United States Patent Application Publication US 2005/0228172 A9 - sequence listing, part 3

SEQ ID NO: 6130 - DNA, 707 bp, Homo sapiens
tccacccgcctcgacctcccaaagtgctgggattacaggcgtgcaccgccatgctctgctaatttttgtatttttagtagagatgaggttttatcatgttggtcagtctggtctcgaaccgctggcctccagcgatccacccgccttggcctccctaagtgcgtggattacaggcacgagctaccacacccggccttttttttttttttttttagagtgaaagtttattaaaaagctttagagtagtaatgaagggaaggaaaagaagaaaagaacacttggaagaagaccaagcaagtgacttgagagaccaagcacctgttacctgcttcttaaagagcaaagagaaattagccagcctaagtaagaggatgggccaggagtgagaactctcatcagagggaatcacatgtacaaagtcctgaggcaaaagagaatactrcaaatattctcttttggtaattaaaacaaaacaaaacaaaaaatgtacctctggccaggtgaggtggctcacacctgtaatcccagcactttggaaggcaaggaagaaggattgcctgaggccaggagttcaggatcatcctgggcaacacagggagaccttgcctttacaaaaaaaaaaaaaagagaaagaaagaaaaaagaagttagccacgttgtggtgatgcgtgcctgtagtcctagctactcaggaggctgagttgggg

SEQ ID NO: 6131 - DNA, 1659 bp, Homo sapiens
tgttgatctgtgaccttacccccaaccctgtgctctctgaaacatgtgctgtgtccactcagggttaaatggattaagggcggtgcaaggtgtgctttgttaaacagatgcttgaaggcagcatgctcgttaagagtcatcaccactccctaatctcaagtacccagggacacaaacacctcggaaggccgcagggtcctctgcctaggaaaaccagagacctttgttcacttgtttatctgctgaccttccctccactattgtcctatgaccctgccaaatccccctctgtgagaaacacccaagaatggtcaataaaaaattaaataaataaataaataaataaataaaaagtatttatccagtattttttttccttagacttactgaagcaaaatgaagacttcccactaagctaaatttgtgtatcatatatttctgtcccctttatcctctaaaatctaatttctcttcactcatcctatatatcaaatagtataagaaacgtaatgatactaaaagattaaagaatattcagacgtgattttttcagtcaatgataaagaaatgggtaatcaataatgagcaatttgtaagtgtactataatagaattgctgcaaaaactgctgtctattgagaaaacatgcatccaactattaaaggtaatttatatttataaaatcaaattaaatccacttgtaaatgtaagagaagcctcaaagggcttcaatcattgttacaacagttataagaggtatttctatatttgaggttgtaaaataataatactgaatactatatgcaaagtcaggagcaaatcaacagttctaacagtctaacagtgatgtgtcattcttacattacacagtaaattggatcatagagcatgaaacagattcaggaagaatcatctcgggtgttcacaatgaccattaaaaatctgtagttgaacttagtttaaattaactgttttcaaaatttgccattttccacaactcttatttttcttgattctgagtcctgatcctgtaaacttgcaatactctgtggaaaggatttcaagagagatatacttttatctttaataagaacatgaattaaaccagaaaaaaaggaaatgagttgaaggccactgctgtggctactgaaataattgatgcattttatcttaatacttgactggaaatttcctgtttctttggtttgtatcttgttattaatttttatcattaaaatgtataatagctttatagtagcrcatatctatgttatttttcttcattattaaaattgatttggccattctaagtctttatttcatgtaaattttagaattagcatgtcaacatatccaatcctaaaagaccttcctgaattttgattaggagggtattgaatttataggtctataagggaagaattgctagcttaacaatattaagtattctaatccattaacagaacatactttttaattgatttaggccttcattaatatgtctcagcaaggttttttcattttctgttaacatgaggaacgtcctttgacattcattgtattgatttttctggtactaaattttctcagatctttttgtctgttgtctgaatacatctttattttaccttaagttttgattaatattttcaaaggatgt

SEQ ID NO: 6132 - DNA, 771 bp, Homo sapiens
cccaccaggtccctcccccatcattagggattacaattcaacatgagacttgagtggggacacagagccaaacagtatgagaaggtttatcattgttattaattgggggtatgctttactaataatttgtttattattaacagattaattattaaagcattaataataattgacttattattaataacctttctggaggtctctattctatcccccaagtattcatggaagtctctgcattccagctgattggaacttgaatgtctcccagcattgtgtgagccctggtaatcatacagcttacaactacctggctagtccttgactgtacttttaaaatttcaacctataaaggtacagctttgtattggacaacaaatttaggatacttgcagatttctggaactctgtctctggagagctatcccctttattgttctcttctcattaattccagctgtttcagtgccctcaaattctggtttttgtcttatgaattcagcaatatcagaataaatctctctccctaccatggtatggaaagtttcttcatgcagaaaaccagagcaattattatattcactttgttttttcacttgtcaatgttgaaattcctgcactaactttgtccaatgtccggaaagagttgtgcttatttttttccagttttctttatgatttaaaaaattttattgagacaagatcatccaggttcaagtgcagtggtacartcataggtcactgcagccttgaaatcctgggctcaaagga

SEQ ID NO: 6133 - DNA, 581 bp, Homo sapiens
tttgtttacaaagagtataatttttgctttctaatacattgttttgtagcataggtatctttggggttgaaatggaataaataacatttcattttcatagaaaatgaacactatataatgaatagaacttttcattgacaatcttgaatgcattacattactcttaagggcattgtgtttttcaaatgttttaagctagcatctctcctagacttaaatgacaaaatgaagttcaccatttctagtttgactttttttctaaatttgtcttccttcttacacatcataaatcaagtttgatccatattggaaaccatatgttttcaaactgatatctttattaatgaaaatrtgtaagtataaattcctgggcagtttttttcagcagcctagaatctaatatcaattgttacgaagttcaatgctctaaataaccatgagctccagttaattgacaagattgaatacacattttaaaataacataaagaatgttgactaaacatttagtcattatttctaaatcttaaatagtttaatattatcatactgccatggaataaattgtccttagaatcagga

SEQ ID NO: 6134 - DNA, 795 bp, Homo sapiens
ttttgtttacctgaaaccagacatatttaggctttatttaataatggtggttaattacattgttacatctgacaatgagaaaagaaggaatctcttgggttaaaaamattaaaaattaaaaagcacaatgggagccaggtcttcaggagactgaactgagcagatgccctggatctggtagatgcggaaatcttatcagctatggtctatggatctaactctcaggtgctcccacttgactgaaaacttcttctttctccacctcttcatctcattgtgtatcttgctcctccccctgcctccaactgggtaagaactcatattctactaggcaacatactgagcacatgactttaatccagtccgtctgcctctctcacatcagctgcataatcatttagcttaaagtgacattttaaaatctcagttttcttactagccttgatttttaaagagtcagtcgacttttaaaccttttaagactttaatgttatcaaacgtttaaataatatttccctaatcactggagtaaagccctgatgtgtgttgtggaggggtgatttaattttctgggttctgagtacctcttttctaattgatattcttcactgccagcttctctaaagagagatgggtttgtggggagggtggaaagaaagaagaaatgaaagaagaaagaaatgaaggaaggaaagcagaccaggaggaaaaaaggaaagagagagacagggaaagaagaaggagggagggagggaggaaaggaaggaaggaaggaaggaaggaaggaaggaagga

SEQ ID NO: 6135 - DNA, 795 bp, Homo sapiens
ttttgtttacctgaaaccagacatatttaggctttatttaataatggtggttaattacattgttacatctgacaatgagaaaagaaggaatctcttgggttaaaaaaattaaaaattaaaaagcacaatgggagccaggtcttcaggagactgaactgagcagatgccctggatctggtagatgcggaaatcttatcagctmtggtctatggatctaactctcaggtgctcccacttgactgaaaacttcttctttctccacctcttcatctcattgtgtatcttgctcctccccctgcctccaactgggtaagaactcatattctactaggcaacatactgagcacatgactttaatccagtccgtctgcctctctcacatcagctgcataatcatttagcttaaagtgacattttaaaatctcagttttcttactagccttgatttttaaagagtcagtcgacttttaaaccttttaagactttaatgttatcaaacgtttaaataatatttccctaatcactggagtaaagccctgatgtgtgttgtggaggggtgatttaattttctgggttctgagtacctcttttctaattgatattcttcactgccagcttctctaaagagagatgggtttgtggggagggtggaaagaaagaagaaatgaaagaagaaagaaatgaaggaaggaaagcagaccaggaggaaaaaaggaaagagagagacagggaaagaagaaggagggagggagggaggaaaggaaggaaggaaggaaggaaggaaggaaggaagga

SEQ ID NO: 6136 - DNA, 795 bp, Homo sapiens
ttttgtttacctgaaaccagacatatttaggctttatttaataatggtggttaattacattgttacatctgacaatgagaaaagaaggaatctcttgggttaaaaaaattaaaaattaaaaagcacaatgggagccaggtcttcaggagactgaactgagcagatgccctggatctggtagatgcggaaatcttatcagctatggtctatggatctaactctcaggtgctcccacttgactgaaaacttcttctttctscacctcttcatctcattgtgtatcttgctcctccccctgcctccaactgggtaagaactcatattctactaggcaacatactgagcacatgactttaatccagtccgtctgcctctctcacatcagctgcataatcatttagcttaaagtgacattttaaaatctcagttttcttactagccttgatttttaaagagtcagtcgacttttaaaccttttaagactttaatgttatcaaacgtttaaataatatttccctaatcactggagtaaagccctgatgtgtgttgtggaggggtgatttaattttctgggttctgagtacctcttttctaattgatattcttcactgccagcttctctaaagagagatgggtttgtggggagggtggaaagaaagaagaaatgaaagaagaaagaaatgaaggaaggaaagcagaccaggaggaaaaaaggaaagagagagacagggaaagaagaaggagggagggagggaggaaaggaaggaaggaaggaaggaaggaaggaaggaagga

SEQ ID NO: 6137 - DNA, 757 bp, Homo sapiens
aaaatattcagggtggggtggggaggggcgatggctggcgcctgtagtcccagttagtagggagactgaagttggaggatcacttgagcctagaagttcaggaagtagtgcactataatcctgactgctaatagccactgcactccagcctggcaacatagtgagactccatctcttaaaaawtttttttttaattaataaataaaaatattcagtcaaaaaattaaaataactatacaaaaattttaaaataatgcaaatggaataaatcagggcagtattacaactatttgcatagcatttacattgtattaggtaatataagtaatctggagatgatttaaagaatatgtataagttacatgtaaataccatgccattttatgtaagggacttgagtcttcacaaattttggtttcctaggttgggggcctgaggcctaaaaatcaatcactgttgggtactaaaggaagactattttggaactagatatgtgattaggatgaccacacatgccagtttgttcagtaataaatgttccagcttatacctgccatctttgtattttgtctggttgaggaagtatcttgtttgttttcttgctttcattttttcagaaaattattttcaatagtttcattaaattaagacgtaacatctcttacacttcaagttcaccacactctgtctaggagtgcatgagtcgtatgtatagtgaattgagttccactagctttgcctgaccctttccagatac

SEQ ID NO: 6138 - DNA, 656 bp, Homo sapiens
agaaaggccctcatggccttagccccaggaccacccctcaattcatcccttggtgaagccgtggctcctccatggactccatgtccctgggaaggcctcaccccttagcagcctcctggggcccaggccaggggctgcctgatagagctgctccctcttcactgatgggagtgagggctcagatgaaccctggctgatgtaagtcttccagaaaataaagacagtgaggccggcccaggctgcaatgtaaactacaagcaacrtatcagccagatacccttttaatagacatcaaagcaattcaggtcaccttgatattcttagagcaaaaaatcctgatcagggccgggcgcagtggctcacacctgtaatctcagcactttgtggcggcgaggtgggtggatcacctgaggtcaggagttcgagaccagcctgaccaacaaggtgaaaccctgtctctactaaaaatacaaaaatcagccaggaatggtggcaggggcctgtagtcccagctactcaggaggctgaaacagaattgcttgaacccaggaggcggaggttgcagtgagctgagctcgtgccactgcatgccagcctaggacacggagcaagactccatctcaaaaaaaaaaaaaaaaaagaataaaataaataaa

SEQ ID NO: 6139 - DNA, 656 bp, Homo sapiens
agaaaggccctcatggccttagccccaggaccacccctcaattcatcccttggtgaagccgtggctcctccatggactccatgtccctgggaaggcctcaccccttagcagcctcctggggcccaggccaggggctgcctgatagagctgctccctcttcactgatgggagtgagggctcagatgaaccctggctgatgtaagtcttccagaaaataaagacagtgaggccggcccaggctgcaatgtaaactacaagcaacgtatcagccagatacccttttaatagacatcaaagcaattcaggtcaccttgatattcttagagcaaaaaatcctgatcagggccgggcgcagtggctcacacctgtaatctcagcactttgtggcrgcgaggtgggtggatcacctgaggtcaggagttcgagaccagcctgaccaacaaggtgaaaccctgtctctactaaaaatacaaaaatcagccaggaatggtggcaggggcctgtagtcccagctactcaggaggctgaaacagaattgcttgaacccaggaggcggaggttgcagtgagctgagctcgtgccactgcatgccagcctaggacacggagcaagactccatctcaaaaaaaaaaaaaaaaaagaataaaataaataaa

SEQ ID NO: 6140 - DNA, 613 bp, Homo sapiens
tcttgatacataaagccagttggcctacattagcatgcaccatgctaatctcttggaagagattcagttcagggccaaacccacacagggtggcatcagagccctgagattcaaagcaacaatcaagcagataggcacagacttcctgggtccaaatcctgtgacacggtttggctctgggtccccacccaaacctcatctcgatttgtaacccccacgtgtcgagggagggacmtggtgggaggtgactggatcatgggagcaattttccccacgctgttctcatgatagggagtgagttctcatgagatctgatgctttaaaagtggcagtttcccctgagctctctctctctcctgccaccttctgaagaaggttcttgcttctcctttgccttccgccacgattgtaagtttcctgaggcctcccaagccctgcggaataactgtgagtcaattaaacctctttcctttgtaaattacccaggctcaggtaggatctttatagcggtgtgaaaacacactaacacatcctggccctccactttccagttctgtaacttctctgagcaaagtctgttcatctgtaaacacagtctccagttcagttccta

SEQ ID NO: 6141 - DNA, 613 bp, Homo sapiens
tcttgatacataaagccagttggcctacattagcatgcaccatgctaatctcttggaagagattcagttcagggccaaacccacacagggtggcatcagagccctgagattcaaagcaacaatcaagcagataggcacagacttcctgggtccaaatcctgtgacacggtttggctctgggtccccacccaaacctcatctcgatttgtaacccccacgtgtcgagggagggacctggtgggaggtgactggatcatgggagcaattttccccacgctgttctcatgatagggagtgagttctcatgagatctgatgctttaaaagtggcagtttcccctgagctctctctctctcctgccaccttctgaagaaggttcttgcttctcctttgccttccgccacgattgtaagtttcctgaggcctcccmagccctgcggaataactgtgagtcaattaaacctctttcctttgtaaattacccaggctcaggtaggatctttatagcggtgtgaaaacacactaacacatcctggccctccactttccagttctgtaacttctctgagcaaagtctgttcatctgtaaacacagtctccagttcagttccta

SEQ ID NO: 6142 - DNA, 805 bp, Homo sapiens
cttgagccctggaagttaaggctacagtgaggtgtgatcaccctactgcactccagcctgggcggcagtgtgaggccttgtctcaacaaagaaagaaaaaagaaaaagaaaaagaaaatgaattgttctcaggaacgttcagatgaggttttagaagacctagccttgggttcctcrcagcgagaatgaatcttctcactgtcctcgctgggtcgactcagcaccctgccttctgagtttatccgcaggccagcacaggtcgcttcagggactaaagggttaaagactctagtacgatataaagaaaagtatcactttctttttgtacagatgaagaacctgagagtcagtgtataaattactttcccaagacctctgtaatgaaatgccacaaactagtggcttaaaaccaaagacatttgctctctcacaattctggaggctggaagtctgaggtccaggtgtctgcagagccgtcctccttctaagcctgtagggagactctcctttgcttcttcctgctctggggctgccggtaatcattggagttccttagctggcagcctcccggctccgttccctccctccgcaatcacagcccatctttcttcccccgtgtctgtctttatgtagcattttcccctatgtgtctctttccctcttctcagaaggagaccagtcggattggattggggcctgcctagttaaatttgtcttaagatgatgacatctgcaaagaccctatttccaaatgaggccacattcacagatactggggtacaggacttcaacatactctttggga

SEQ ID NO: 6143 - DNA, 805 bp, Homo sapiens
cttgagccctggaagttaaggctacagtgaggtgtgatcaccctactgcactccagcctgggcggcagtgtgaggccttgtctcaacaaagaaagaaaaaagaaaaagaaaaagaaaatgaattgttctcaggaacgttcagatgaggttttagaagacctagccttgggttcctcacagcgagaatgaatcttctcactgtcctcgctgggtcgactcagcaccctgccttctgagtttatccgcaggccagcacaggtcgcttcagggactaaaggkttaaagactctagtacgatataaagaaaagtatcactttctttttgtacagatgaagaacctgagagtcagtgtataaattactttcccaagacctctgtaatgaaatgccacaaactagtggcttaaaaccaaagacatttgctctctcacaattctggaggctggaagtctgaggtccaggtgtctgcagagccgtcctccttctaagcctgtagggagactctcctttgcttcttcctgctctggggctgccggtaatcattggagttccttagctggcagcctcccggctccgttccctccctccgcaatcacagcccatctttcttcccccgtgtctgtctttatgtagcattttcccctatgtgtctctttccctcttctcagaaggagaccagtcggattggattggggcctgcctagttaaatttgtcttaagatgatgacatctgcaaagaccctatttccaaatgaggccacattcacagatactggggtacaggacttcaacatactctttggga

SEQ ID NO: 6144 - DNA, 805 bp, Homo sapiens
cttgagccctggaagttaaggctacagtgaggtgtgatcaccctactgcactccagcctgggcggcagtgtgaggccttgtctcaacaaagaaagaaaaaagaaaaagaaaaagaaaatgaattgttctcaggaacgttcagatgaggttttagaagacctagccttgggttcctcacagcgagaatgaatcttctcactgtcctcgctgggtcgactcagcaccctgccttctgagtttatccgcaggccagcacaggtcgcttcagggactaaagggttaaagactctagtacgatataaagaaaagtatcactttctttttgtacagatgaagaacctgagagtcagtgtataaattactttcccaagrcctctgtaatgaaatgccacaaactagtggcttaaaaccaaagacatttgctctctcacaattctggaggctggaagtctgaggtccaggtgtctgcagagccgtcctccttctaagcctgtagggagactctcctttgcttcttcctgctctggggctgccggtaatcattggagttccttagctggcagcctcccggctccgttccctccctccgcaatcacagcccatctttcttcccccgtgtctgtctttatgtagcattttcccctatgtgtctctttccctcttctcagaaggagaccagtcggattggattggggcctgcctagttaaatttgtcttaagatgatgacatctgcaaagaccctatttccaaatgaggccacattcacagatactggggtacaggacttcaacatactctttggga

SEQ ID NO: 6145 - DNA, 785 bp, Homo sapiens
gcagataatgttgcaaggaataaccatgtaacagaacgatttctttaacttttttaggatgaacatgcaaggttggaatttttaggtcaaaggacataacaattttcagtattgtagatattaccatagaatattccagaaggtttgtccaatttacaatgttgtgtaccatggggaagtgagtcatttggcacattctatccagcatcagatgctgccacttatttggttaatttaacaaaaacaagctaaaaccacattgttcaggttttaaatttttttaatacaatkctatcacactatcacaagcggagaagaggtggtttttggccgctgttaatgtttgttaactaaataaatgatgacaggaataaatgaatggaggtaggctttgaccccagcagcttacagcgggcatagtgggtacactgtgcacagagaggggctacaccccgtgaagatgccagatgcagaaatagcgagtgtcttttgtgcactcactgtgaaggagggtgcctgtcagccccatgaggtcagctccgtggttaccccactttacaggtaaaaacactgagccccaggtcaaagagctggctggtgatggagccagtgcttgatggcagaactggtgccaccgtcaccctgcacctgcttctctgaccacaggaactgacctctaatctgggagccagaatgatccccatggtaactgcaaggacgcactgcccgcaggtgtctataaacccatgttattcacgaggcaggcctcctctctgggggatccc

SEQ ID NO: 6146 - DNA, 785 bp, Homo sapiens
gcagataatgttgcaaggaataaccatgtaacagaacgatttctttaacttttttaggatgaacatgcaaggttggaatttttaggtcaaaggacataacaattttcagtattgtagatattaccatagaatattccagaaggtttgtccaatttacaatgttgtgtaccatggggaagtgagtcatttggcacattctatccagcatcagatgctgccacttatttggttaatttaacaaaaacaagctaaaaccacattgttcaggttttaaatttttttaatacaattctatcacactatcacaagmggagaagaggtggtttttggccgctgttaatgtttgttaactaaataaatgatgacaggaataaatgaatggaggtaggctttgaccccagcagcttacagcgggcatagtgggtacactgtgcacagagaggggctacaccccgtgaagatgccagatgcagaaatagcgagtgtcttttgtgcactcactgtgaaggagggtgcctgtcagccccatgaggtcagctccgtggttaccccactttacaggtaaaaacactgagccccaggtcaaagagctggctggtgatggagccagtgcttgatggcagaactggtgccaccgtcaccctgcacctgcttctctgaccacaggaactgacctctaatctgggagccagaatgatccccatggtaactgcaaggacgcactgcccgcaggtgtctataaacccatgttattcacgaggcaggcctcctctctgggggatccc

SEQ ID NO: 6147 - DNA, 751 bp, Homo sapiens
agcrggtttttcttctgagagtgtaggtcacttagggacattgcaatagagatgtcctctttctcaagtcatcttcagatgcccctggccttagaggaggctgatgggagaatggcttggcctctatggtgggatgctggctgccacatgaagccacgagggaatctaagaattccttctatgcaagggacaaaagtttacttgtttaccagagatgaaatttatgtgcattgaggtaaatcttaaccaaggaatttcccttctttatatttgtggacagttgtaggaagtgccaaagagtactgccaagttccagaagcatcttgcccctgaaaatgccgtggcttatccaaggggaaaattgcacatagggagtaatttagtaagagactctcaattaaaactcccctggctctatcttatttttctccttcacagaatacagttttccctggatgtttccacaaatatgtaaaaaatgttggcaaaaaaagaagcattcaaatatttatcttgcatttaacaacatcaagagttacttgagtgttttcattattttaattttaagggctgtggtctgttatttcatgcgaatgagagagaaacatctctctgtggtttcactgataagatgtttcaagagttaagaagttaaaagaaaaacaaacatcaaacttggacatgaacattcactgttcctgatcctcttcctgtttctctacttgagattcacattaagaatttttgggcc

SEQ ID NO: 6148 - DNA, 789 bp, Homo sapiens
ccacttggctccctggcttcagccccttttccagggtagtgaacggttctgtctcactsgtgttccagtcgccactggagtatgaaaaaaacctcctgcagctagctcagtgtctgcccaaacaaccgctcggttttgcgcttgaaacccagggcccttgtgtcataggcacctgaggaatctcctggtccgtggtttgctaagaccatgggaaaagcatagtatctgggctagagtgcacccttcctcatggcacagtccctcacagcttcccttagggaggggagggagttccctgaccccttgcacttcccagatgaggtgacgcaccccctcccgccgaccagccctggctttggctcgccctccctgggctgcacccactgtctaaccagtcccaataacatgagccaggtacctcagttggaaatgcagaaatcacccaccttccacgtttatctctctgagagctgcagaccagagctgttcctatttggccatcttgccagcccctgatgttccattctttaccttctatcttgttttgtcttgaacatcagagaagaactaattaatttgttttatggactattttttatgcagctagaaatagtgaaattggattagagctcaatcgattatccattttgtactttgtaccatccagtctttccccttttactggtcccatttcctcaacctgtaaacatattcaagtttcattaccttaagtaattccttaaatccttgcttttgttttcttctcaaaataccaacgtagccctctcc

SEQ ID NO: 6149 - DNA, 796 bp, Homo sapiens
tggatccctgtcatatttccttttgtccccacaccaaagttcctcaagagtcatcctccattgattgctaatccaagaaacttcttgatcacttatctatctagacatcagtctgcccagcattcctcctatggcatggaaagtggtgcttagattcttagcctgaagtgacttttccatccattcattaattaattcattaaataatatttagtgaacatgaccactgcattcctgatctcaagatacaaggtcctttaaccaccctctcttttagaactgtctcgttacttgaacaaactctcattctaatagttcctagttctgccacaacttcattcttccctttgctttctgcaaatttcatggacagccaacaatcttaggatagaaaattctcaagtggttgctgcctgtccaccttggaaacttgagctccaagggcagctctaatcactggtttcatcacagaaaaagaagtggagctgaataaagcagctgaggttgaagtccattgtgttaactcaaggaaaacgtttttttcgtttctcgcttgttttgctcacaagtataaagacaaagaactactttaataggaagtttcagtcacaaagaaatttcacaaagaaacaaacccaatactgtactttggttgataagagaggtttctaacacacagagaaaatgcactgggggcttctcttttgttgatattgkgccctaatcaaaatatcttgttagattttcaataagaatgctccatggctatatttgccaaattcatttctatatttaa

SEQ ID NO: 6150 - DNA, 792 bp, Homo sapiens
tacattcactttgcgagagttccattccacatgtcctacggaatctatttattagtttcatttccctttttgtttacttgatactgagccccagaagccaatgaacatcattttygtgtggaggggcagtacttagtgaatagcctgctggtgctcgcctctgcagttaagtattgcttcacctgacattctgcgattccacattaatgtgagagtaggagctatggtatggggatgggaaggagcaaccaaaccaaaaaagaggggatggtgccttgaagactggtgatgggggcttgtaggtggatactggttcaggaggtttttggtaattatgactttcgtttacatattttgttgcactggcttcacattcacaaattcgtgcaaagtttattccttactggaaagacacaattttcttattttagctataaaaaaaggtgatattttagtgatcagacttattgctctcgttttatgcaaaaattccttactttcattatacttatagctatattagtgctataatgtaacttggaaagttacaataagtacataagcttaaaaaaaaaaggtcactgaaagcagtaatcaaatgatcagaatggccttgatgtgaattcatgtagattttaaagatatgtacattcaatgacaaacgcagtaatggcaaaacaaaaacaaaaagttaaagttatttcaaaaactacttggaatacacaatccactttcccaagcctattgaaatgcaacatatttttttccaataactttttaaaaaaaaaatcc

SEQ ID NO: 6151 - DNA, 365 bp, Homo sapiens
agctcaaaagccatttgttttgagtccattccactacttgaaaattccttatattccacgggagccaaaatcaaattgtcacagaaaaacaagccaagagattggtatctccaaccaccccggctgaggctgggacaacaccgattcyagtaaatccactgtgatccttccacccatccatccattcaccaacctctggctgatgccccacatggcaggctctgctggctgccagagaccagagagggtgagatacccacaaggagaccgccaggcaaacacaggggcagactggacccccagcaccttccatgtacaggcttggcgtcctccagaaataatcaaaaccctttgcagttcaggat

SEQ ID NO: 6152 - DNA, 1566 bp, Homo sapiens
cgagatcgggccactccactccagcctgggtgacagagcgagactctgtctgaaaaaaaaaaaaaaaaaaaaaagattcataaaccaagccttctccagtacctcccccttccccagcgtgcatcacctggtctatgggctgatgcattgcagtgtattagacagaccactgcctgctgttgccctcagggaccctcaaacttgagcttccatcagaatctcctggagggcttgtcaaaacccagggtgccgggcctcaccactctcaagtttctgattcagtgggtctggagtggaggtctgaaaatctgcatatccaggttcccaggagatgctggtgatgctggtctgaggatcatgtttgagaaccactatttaaaccctgagcaacttgaggttggtcttttattatttttttacctccagtctctgaaagaatctgatttaaggttggtgttcaatcaatacttgaatgaaaggtattgatgcatttgttgcagccaatgagagtgacaggattatgtcttgagacttttttccccaatttgttcactctgcagtgggcattcttctctcttctttccgaagatggtggccaagtccttgggtcctatgccttgggggcggctggtttcccaggccagtcagaaaatggctgggtctaggaagacagcttaggctgaagcccatgaaggtggctgcagtgtgagcctgcagaggagggcagcagaggcagcaggcttgaggggaggggtggagagtgtttctggagatcagccagattggtaggatccaaaagttacaagctcaggtgccctgttcccggaacagctcttccaagaggtgatcaggctttaatggagtgatcctgagatgccagagaatggttgggagactgaacaccgaagctcatagctcggagttgcaaccaaagaccacagctgtgccctggctagcacagaaatagctgctgcccacctggcctcattagaccctgagattggcaaagaagcctgtctgcggggcccctgtgtgggctcaagtccagcagcctttcccaaatgtttcggatcacataaggccaccaagactcctatgtgatcctaggtggcaagaaatccactccccaacataattgggattgaatgtctttcaaattcgtggagggagctgaaggcagatttaatcagatttagagaagtaaaggcagacggcacacctcgtacctgctgcaagtccatttagcaccgatgatgygctgggccccatgccagtcctgctggaacctaatgccaattgtgttcacttggacctgggcctctgcccgagtgtggcagcagagggcacagctgggagtgcagactgtcagaaggtgagcaggaacaatcgattgtgctgccggggtcacagaagctggagctggactgagccctggggcactgtgacagaagaggggcccccagcaggtggccatccacattgtttgtgaggctggcactccaagcctggactgaatgtggttcggctcaggccactcccatccccaggactctgagaccccataga

SEQ ID NO: 6153 - DNA, 822 bp, Homo sapiens
tacctctagctrtagctgtttctacttctcttttacaataatatgaaccctttatactagagtcacttcactgacactataaaaacatttctttttactacaataaaaagcataaatgttaactaatcttcagtaatttttagaaaagttatacaagatttaggtccagattttaaataatgcaaacatctggacacagctaagcacatgcctttcttggaactgttttaaaactctacttaaacttaattctacattaatttcatctcccagtagaaaatagtttcagctttccctaaactttttcctagagtgaaaactcaatcaaagcaaaatctcagcagatagattctttttgcaacttcagctcactctataagggggttggtgggggtgggcttctggcagtctgcacagatatccgtattccagccttaactacacgtgcttatagcttgccagggacacggcttctcaccagtcccagtggactgcaaggcgtctactcactcagctctttatatctttgcatcagaaagagattgacaactcttcactgctttctacctccctcaaatacccacacacgcacatgcacattctataggtgaatgtttttctctttttttttaagtaagaagaatgaaagaatatgtaatgctatttctatatgattctagtatgacttctccacgacactgtttttctaagcacaaaaaaagactccctcaaataattcttaattgcttgacttttttttttttttttttttgagatggaatctctctgtcacccaggctggagtgcagtggcatgatcttg

SEQ ID NO: 6154 - DNA, 823 bp, Homo sapiens
ttttctaatttgtacaaaggtgccctgggggtccaggtcatgcatagaaaattcctcaccaggcactcaccaggagcagaaccctatcatcctcctcctcctcacagtgactcctgctctaacagaggcacagaggcgcagaaagagggagttcccctgaggcagcaggagggcttcctggaggagggagggtttsggctgggccttgctgatcctgtagcaaccagtgattctggccacagcccgtgcctgcctgcctgactctctgcgaagggactgcagcctgctctgtgctgcggcccttcctcgacatggctggtttcttccctaggtctatctttggttcctgctgactcttccgtgacataaatgcaaatgagaccacagacaactagcctcaaagccaaggaagccgctggctggagttgtctccacagtcccctgctgggcagggaagtgggcagaggtgatggtcacgtccatccatcacggcccatcaggggagcaggcctcttggggcccctgacacctccaagtggccaaaaaaaaggtcataccaggagacagagccttagactaaccaacaagagcttcccgcatggctgatgacagtttcccacgttctttcttaatcactgggaccttagttcaaaggtgatcctgtgtggagtcctgaaatgtaaagcagagtggtccagagcttacctcttgccctgaggtcttttcatcaaacctagggctccttagggcacagtagcttgaaaaccgctgacccacaggatgtgactcaaatttctaaagctctcacaactctcccctcctt

SEQ ID NO: 6155 - DNA, 638 bp, Homo sapiens
tgctcaaacctaaacccccaaggcgctggtattagaaggtgaggccttagagcagggattaggtcatgagggtaaagctctcatgaataggattagtgaccttataaaagaggctccagggagctgccttgccactttcacatgtgaggacatggtgagaagacagcaatctgtgaaccagacagcaggccctcaccaggcaccaaatcaactgatgccttgaccttggacttctcagcctccagaactgygagctatacattgctgttgtttataatcacccagtctatggcagtttttatagcagcttgaaaggactaagagaattacttttatctcttccccccacccacatacatgtgagcagagtggtcccttcttcccctttctgtgctgtactctgtccttctacccatcacagccttcctcctgctgtgtctgaagcacccatttctccgtttgtcctacacacaaatctcagctccttcagggcctggtgtttttccccctctgcatttcctgggctggaccctcataggtaccccatcagaatctttcactgcagacccgtggcagccagcaggtgccatggctccctggactctgtgggtaggatttgggcaacttgaatgtgttta

SEQ ID NO: 6156 - DNA, 831 bp, Homo sapiens
tctttctctcactagtgcttctgacattcgtgcccttatttagtcttcttgtttcccaggaaccaccaatatggacttctggaaagaattagcattcccctttatattaaaactcacaaaattcagctggaagtgaccatagtggccaaataactatttttatcataatgttaatcactaaaaggtgtagagtcattataaagaaggataattgaaaaaacccacgtatcagtccaaggaaaaaaatcattatttaattgcagattttgcaaaacaaggctgggtagagattttggtaattattttagataagtaatctttccctcactctttcttgagaaatggaaaatacatagggtttttatttaagtccagtaactaaatgagagtcccacccacttctcataccaggctgaatgttttttatctttacaaagggcaaaagatattcctgcccagttccagaacaagatggcataggtacatttttattggcatctatgctagatgcaaatttttgtctgcatctctcttgtaaatacaactaataaatacttggatattacacaacataaaataagatggttctgaaggtggaaaagaaattgaacttactaaggaaggaccrtagggcttgatccaccacagtgatgtgaatcatggaggttttctttttatctcccatataactgtggatggaatgtcagggaggcctgatacactaactctccctacaaagaaaaagaaagcctgccctctccatccaaagcggtgggaaaggggggagtccaaccaagaccaagtgtagacccccaacccctgcttcaacct

SEQ ID NO: 6157 - DNA, 603 bp, Homo sapiens
ccaccctcacccctctttctccctgcagaaagcttttctaatactttcagccgtggtcaatttcaggtgatagcaatggtaatcatttattgagtacttaccaaatgctagagactgacacaggctatgtcattttttcaatacaaagccctgtgaaatgggtactatcagaccatttttacacctgtggcttagaagacttaaatgtctagtgtaagggcggttgtagtggtaggcagaggcaggtctcaaaccctcgcctacctaactcagacacacttggcaatactatatatctctttaagcctttcagaggatatgttttaggaggtgkattgttccattttatatatatatgaacatgatagacagacagatagatagataaatagatagagataattttaaacgtgctcactttcatttatgaaaatttacatttgataactaaaagagccttgcaattccagcatctccctcatggtggcagtagaagactaagtcatgtacacgcagcctccagcaccaacaactaacccagaagaaacctccttaataaatcagcttttggtcaagattggtgttacgtaaaatgcaaaatta

SEQ ID NO: 6158 - DNA, 1304 bp, Homo sapiens
  misc_feature (1)...(1304): n = A,T,C or G
annnnnnnnnnnnnnnnnnnnnnnnnnnnnnnnnnnnnnnnnnnnnnnnnnnnnnnnnnnnnnnnnnnnnnnnnnnnnnnnnnnnnnnnnnnnnnnnnnnnaaaaaaaaaagcagttttgcatgttgctaaatggtcttaataatgactagtttaatcactccataaaytctacatgcatataatctcaaaggccagtagtaaccttcggggcaaatgtcgttaatgctttttctggaggcagaggttgggcaaatggctggtgctcgcaacagtgagctggagtgtgggacagccaggttcaaatgctgctctctctgactctcaggttcgttctctctgccctggtttgctcagcatgttcctccagtgtaaggtgaatagggcttgcagaaccccttccctggagcaggagacctgtgcttggtgtcctgtgtggcttggatcctgacagccagagcctcctaactcagggcacttggcctagactttccctcagccctgattgcaattctttgctgtactagggcctgtcaggttggagaaagctctttctctgctgggaccagatcggaatcaacagcaccccaggaacttcatcagggctccaagctgtactctgtacctgttgattcggagcttcaccctccagaccagacttcagggctagccctggatgaagacttggctgtgccctgttgtttgagacaggaaatcctgagaatcttctaagaagaactgtgcctgtccatagcttggttgtgatagttaaacgaagtaatctatgagaggcccaaagtgccattcctggcacttagagaaagctcagtaggtgataataactacttatattagtaataataacatgctgttgtaaggtatagtacagagcaagtgtttcctaaatcatggttattgttgtcatgaccataacttactatgtaactattgatatcagttatctaaaaccacactgtaagggattagaagactggaattctagacggtgtttaaccttgagagcagtttgtttttcccttgagaaaggctgacgagtacacagatcaatggtttacaagggaaatcacctgataaaggggagagttcttacccctgctacaaagatgctggggagtgagtggcgcatcatggaggagcaggatgccattgtgttttgaatgccaggaagatagacgcattttaatgtgaagaggaataagaggattccccggagccatcgagccctctgagacagaagaacataacagtcagtgtgccatgccagtcactgaaaggtgcagacat

SEQ ID NO: 6159 - DNA, 578 bp, Homo sapiens
caaagtaacaagccatggcccgctggtcagacttggaaaggccaaggaggcagtctttttggcttcttctgggaaaatgaaacagcagcccggggaaggcgtctgtgaaggtgccaggtggtagaacccacatagagagcagaaatcggtgcaggtgggagagggcggccagcatcagtgcccccaccagctgcagaaagaaaatccagagagcactgacctygtcacctcttcttaggagtggaagactcaacttccaaatgttgaaaatagagacaaacttggaggggcagttttgggagtgtggatcaatcatgtcatccctggttttgaacccaaaaggcgtatgtcaccctctcacccatctcccaggcctccctcctcccaccccaccagcctcccacactgtggctggtctccctcctccctttcaagggctcttcctgccagtgccctctcctctcctcagctgcctcctctgcctatggtgacaagcggcctgctcccctggcctttggcccccttaggaagccatggttgccatgagggggcagctccctcatgatctttatgtcccc

SEQ ID NO: 6160 - DNA, 779 bp, Homo sapiens
catcccagaacagggcccctgagcacctagagaggaggtgctgtgctttgtcctgcatctctagtcaaggcagtgtaatttctacagccttggaaacagagtccaggggtcagaggtcctgttcctagaaatgatgcctgtggggctgcccctaggatttgaaagcctggtcagagatcactcaaattgaaacaatttcaaggctaacaaaggattatttctagtcgctactgaaatatattgactcmtttttttttctttaaaataaattgccccattcttccctgaataagtaagtcagaaaaaaataattggcccagatattttccccttttggcccatcctgtaactttgttttctcttttcattcctttttttggagacagggtcttgctctatcacccaggctggagtgtagtgttgctatcacagctcactgcagcctccacatcctgggtttaggtaatcctcctgcctcagcctcctgagtagctgggactacaggtgcatgccaccaggccctgctaatttttttaaaaaaatttttgtagagataggatcttgctatgttgcccaggctggtcttaaactcctggactcaagtgatcctcctgcctcagcctcccaaagtgctgggattacaggtgtgagtcaccatgcctggcctcttttcattctttatgcagttgcatatgacaagggctgaagtgtgtgttggtttaatgcagacacagtgtgcatgggaagggcagtgagtcttgtttccatgttataagttg

SEQ ID NO: 6161 - DNA, 779 bp, Homo sapiens
catcccagaacagggcccctgagcacctagagaggaggtgctgtgctttgtcctgcatctctagtcaaggcagtgtaatttctacagccttggaaacagagtccaggggtcagaggtcctgttcctagaaatgatgcctgtggggctgcccctaggatttgaaagcctggtcagagatcactcaaattgaaacaatttcaaggctaacaaaggattatttctagtcgctactgaaatatattgactcctttttttttctttaaaataaattgccccattcttccctgrataagtaagtcagaaaaaaataattggcccagatattttccccttttggcccatcctgtaactttgttttctcttttcattcctttttttggagacagggtcttgctctatcacccaggctggagtgtagtgttgctatcacagctcactgcagcctccacatcctgggtttaggtaatcctcctgcctcagcctcctgagtagctgggactacaggtgcatgccaccaggccctgctaatttttttaaaaaaatttttgtagagataggatcttgctatgttgcccaggctggtcttaaactcctggactcaagtgatcctcctgcctcagcctcccaaagtgctgggattacaggtgtgagtcaccatgcctggcctcttttcattctttatgcagttgcatatgacaagggctgaagtgtgtgttggtttaatgcagacacagtgtgcatgggaagggcagtgagtcttgtttccatgttataagttg

SEQ ID NO: 6162 - DNA, 779 bp, Homo sapiens
catcccagaacagggcccctgagcacctagagaggaggtgctgtgctttgtcctgcatctctagtcaaggcagtgtaatttctacagccttggaaacagagtccaggggtcagaggtcctgttcctagaaatgatgcctgtggggctgcccctaggatttgaaagcctggtcagagatcactcaaattgaaacaatttcaaggctaacaaaggattatttctagtcgctactgaaatatattgactcctttttttttctttaaaataaattgccccattcttccctgaataagtaagtcagaaaaaaataattgscccagatattttccccttttggcccatcctgtaactttgttttctcttttcattcctttttttggagacagggtcttgctctatcacccaggctggagtgtagtgttgctatcacagctcactgcagcctccacatcctgggtttaggtaatcctcctgcctcagcctcctgagtagctgggactacaggtgcatgccaccaggccctgctaatttttttaaaaaaatttttgtagagataggatcttgctatgttgcccaggctggtcttaaactcctggactcaagtgatcctcctgcctcagcctcccaaagtgctgggattacaggtgtgagtcaccatgcctggcctcttttcattctttatgcagttgcatatgacaagggctgaagtgtgtgttggtttaatgcagacacagtgtgcatgggaagggcagtgagtcttgtttccatgttataagttg

SEQ ID NO: 6163 - DNA, 779 bp, Homo sapiens
catcccagaacagggcccctgagcacctagagaggaggtgctgtgctttgtcctgcatctctagtcaaggcagtgtaatttctacagccttggaaacagagtccaggggtcagaggtcctgttcctagaaatgatgcctgtggggctgcccctaggatttgaaagcctggtcagagatcactcaaattgaaacaatttcaaggctaacaaaggattatttctagtcgctactgaaatatattgactcctttttttttctttaaaataaattgccccattcttccctgaataagtaagtcagaaaaaaataattggcccagatattttccccttttggcccatcctgtaactttgttttctcttttcattcctttttttggagacagggtcttgctctatcacccaggctggagtgtagtgttgctatcacagctcactgcagcytccacatcctgggtttaggtaatcctcctgcctcagcctcctgagtagctgggactacaggtgcatgccaccaggccctgctaatttttttaaaaaaatttttgtagagataggatcttgctatgttgcccaggctggtcttaaactcctggactcaagtgatcctcctgcctcagcctcccaaagtgctgggattacaggtgtgagtcaccatgcctggcctcttttcattctttatgcagttgcatatgacaagggctgaagtgtgtgttggtttaatgcagacacagtgtgcatgggaagggcagtgagtcttgtttccatgttataagttg

SEQ ID NO: 6164 - DNA, 763 bp, Homo sapiens
gtgagggaggtgcctaggacacagtttaaggaagcattcactatcaacatgttacaagtacggggttggcatctgcatgagcctgacagtcagtgcctccttaatttttgtgtgttatatgcctcccttgccttaccctagttccagccctgactgtgcttcctacacttaattttgcttttgtgtagtatattccctacattacagtcaggatgatcattctaacttggctacagttactaatctgctgaattttttttttttttgagagggagtctcactctgttgtccaggctggagtgcagtggcacgatctcagctcattgcaagctccgcttcctgggttcaagcaattctcctttctcagcctcctgagtagctgggattacaggcgtgtgccaccacacctggctaatttttgtactgttagtagagacggagtgtcaccatattggtcrggctggtctcgaacacctgacctctggtgatacacccaccttggcctccaaagtactgggattacaggcttgagccaccagccccagcctgctgaaacttttttatcggaacgtccacttttgtccaagatagagtaccaagaactggatttatcctcccttccgaaacgatttttaaaaatcagacaaaatatattgaaacagtttttaagacactgactgtcagagaattaaggacagtgatcactgagacttgggaaaaatgagtgagccctactcttgccccactttaccaccttgaggta

SEQ ID NO: 6165 - DNA, 641 bp, Homo sapiens
ctcccggcctcatcctcccaaggctatttattattttgttatattggtaggtaggtctcttaccaactggataaaatgctccttgaaggcaggggccatgtctttacttctctggtatactccaaagtgctgagcatttaataggcatccagtggagagcaacccagttgaaaacattagtgcctcatgtctgcatgaaccaagcttgccttccagctcctcacagaatctctgtgggaataagtaacatgattggaaaacatgaaataacttactatgtaagtgatcattttacactttatgtcatcaccaataggtggcaccatcaattttaaaattatatagcccaaaattgtacatattgatggtgtttgttcaatagatgtttaytggactccatgtatgtagaaacttctcagctcgccactaccaccagagtaaaaataaaagtattacagacacgctttatcatactttctcttctagtaataccctaaaaaacacgtatttccactttcagagttcatccccgtgttggaagaacaacatctaaatcttggataacacaaaaacaacggttttacaattttgtccttttgtgtttgtgtgtatgtgtgtgcattccaacccagcttaatatc

SEQ ID NO: 6166 - DNA, 657 bp, Homo sapiens
cctggctgacatggtaaaaccccgtctctactaaaaatacaaaacttaactgggcatagtggcgagcacatgtaatcccagctactcggggggctgagttgggagaatcacttgaacctgggaggcggaggttgcagtcagccaagatcatgccactgcactccaggctgggcgacggagacttcatctcaaaaaaaaaccaaaaaggattgtttgaattgaacaaataggtgctttttaaccaaaaaaataacaaatacaattgaatttgagccttttcataacaaacgaggcctgaatcaaacacgtcaccctacccacactaccttgagaggtcttgatgaaggctaccatcttgcgcggtcatgtaagagaacttacagcacagctgttccctcaaagtgactttcatttaaaatgcctctgtaaaatattttggaaacacggtgaartattgtctccattacatttattattttttcaagttcaactacagacctccaaatgactcccaattcacattccatcatggtttttaaataccattagccatttgtgtgaaaatggtgttgtctacatgactccatattataagaagatggaattggtgagttatttcatcatcccagaattttaggtcacaaaaagaggaaaagt

SEQ ID NO: 6167 - DNA, 812 bp, Homo sapiens
atctgtagtctctttcccatagccttaaatatcttcatggcagattccagaggggtctgtgtgtgtggacacccccagtgtatctgtcttcatgacgttgcaactgaagtagatgctaggagaacactggagccaggatactgggcagtgtcttagttaatctttaattataagcaaaatcatccatcatttgtttaacagatctaaagtttaagagtaaatattaaatagaccaatattatttgcttcagcttttttgtttaattattattattatttttttttttwtttttttttttttgagaccaagtctttctctgttgcccaggctggagtggagtgcagtggtgcgaccttggctcactgcaacctccacctctaggttcaagcaattctcatgcctcagcctcctgagtagctgggattacaggtgcccaccaccatgcctggctaatttttgtatttttagtagaggtgaggtttcactgtcttggccaggctggtctcaaactcaagtgatccacccaccttggcctttcaaggtgctgggattacaggcgtgagccaccatacccagcctgtttaattctttataattcacttctgttgtgaaaacagcattttatacttaagcttaatgattgcaacagtcaaaattatttattttttaaacttcacttatcatttaggaattattttcccgtaaggaccaaatctacttttattatttaaaaaatttactttttggaggagctaattataactagaattctagatctccagtgtagccagtttcattgtataggtatatc

SEQ ID NO: 6168 - DNA, 812 bp, Homo sapiens
atctgtagtctctttcccatagccttaaatatcttcatggcagattccagaggggtctgtgtgtgtggacacccccagtgtatctgtcttcatgacgttgcaactgaagtagatgctaggagaacactggagccaggatactgggcagtgtcttagttaatctttaattataagcaaaatcatccatcatttgtttaacagatctaaagtttaagagtaaatattaaatagaccaatattatttgcttcagcttttttgtttaattattattattatttttttttttatttttttttttttgagaccaagtctttctctgttgcccaggctggagtggagtgcagtggtgcgaccttggctcactgcaacctccacctctaggttcaagcaattctcatgcctcagcctccygagtagctgggattacaggtgcccaccaccatgcctggctaatttttgtatttttagtagaggtgaggtttcactgtcttggccaggctggtctcaaactcaagtgatccacccaccttggcctttcaaggtgctgggattacaggcgtgagccaccatacccagcctgtttaattctttataattcacttctgttgtgaaaacagcattttatacttaagcttaatgattgcaacagtcaaaattatttattttttaaacttcacttatcatttaggaattattttcccgtaaggaccaaatctacttttattatttaaaaaatttactttttggaggagctaattataactagaattctagatctccagtgtagccagtttcattgtataggtatatc

SEQ ID NO: 6169 - DNA, 812 bp, Homo sapiens
atctgtagtctctttcccatagccttaaatatcttcatggcagattccagaggggtctgtgtgtgtggacacccccagtgtatctgtcttcatgacgttgcaactgaagtagatgctaggagaacactggagccaggatactgggcagtgtcttagttaatctttaattataagcaaaatcatccatcatttgtttaacagatctaaagtttaagagtaaatattaaatagaccaatattatttgcttcagcttttttgtttaattattattattatttttttttttatttttttttttttgagaccaagtctttctctgttgcccaggctggagtggagtgcagtggtgcgaccttggctcactgcaacctccacctctaggttcaagcaattctcatgcctcagcctcctgagtagctgggattacaggtgcccaccaccrtgcctggctaatttttgtatttttagtagaggtgaggtttcactgtcttggccaggctggtctcaaactcaagtgatccacccaccttggcctttcaaggtgctgggattacaggcgtgagccaccatacccagcctgtttaattctttataattcacttctgttgtgaaaacagcattttatacttaagcttaatgattgcaacagtcaaaattatttattttttaaacttcacttatcatttaggaattattttcccgtaaggaccaaatctacttttattatttaaaaaatttactttttggaggagctaattataactagaattctagatctccagtgtagccagtttcattgtataggtatatc

SEQ ID NO: 6170 - DNA, 764 bp, Homo sapiens
atgttcacatgtgcaatgaacacaatttttagtttagtgactaatacactattactgttattgaagatatcagttttaacttaaatgggacaaacgtcatacttatttatttattttggttagaatttaggttaacctgatcaacctggcttttggtattggctcaccaaataccaaagtgtaataatctcttttttgttaccattttatacatgtgttaagtgagaaatgtgtaatgatttcaacaaacttgtgtgattagaaaactgatatattccaattttctttctagtgaagggatttttttatgtttcattacttcttgacattctgaaagagataactggaagttccttgattcagaaaacagattcagatgaagaagttgcaatgctgttggacacagtccagaaagtatttcagaaaatgttggaatgtattgcacggagcttcaggaagcagccggaagaaggcctgcgggtactcagamctccccaggacggggttcgctagatgggcttttcagggctggctacacctacacagatgcatcagccctggctgtgctgttcacgctcgggtgacacgcagtgttgtgtgggaggtccctgctggcgaggtgcactgagagagatggagtccgtgtgggagtcccccatggtggatacactgagagggagatggtgacccctgtgcatgggctggaggcaggaagggcaggagctccagctgttagattctacccaatggtcttagaacaggat

SEQ ID NO: 6171 - DNA, 775 bp, Homo sapiens
taatttggtagagatggggtttcaccatgttggccaggttggtctccaactcctgacctcaagtgatctacccacctcagcctcccaaagtgctgggattacaggcgtgagccaccccaccgtgcccacccagaactgcttaatttttatttcccaattggctggggctcctacttctttagctttacttttctttgtcttgtttcagcctacaagactggcttacaattattaagcagttagaatgtatgccaggcacttggttaagtgcttaactacatcattatatttaatttcttcatttcttttcttttcctttccttttctttttcttgttttgttttgttttgttttgaggcagagaggcagagtgtcactctcctccaggctggagtgcagtggtgtgatctcagctcactgcaacctccgcctcctgggttcaagcrattctcatgcctcagcctctcaagtagctgtggtttcaggcccacaccaccaggcctggcttctttttgtgtttttttgtggagacggggtttctccatattggccaggctggtctcgaactcctgtcctcacgtgttctgcctgcctctgcctcccaaagttctgggtttccaggcgtgagccactgtgcccagccctaatttccctaaatataggaagtagacattagtaatattctcctactatagatgaagaaacagattcaaagaggttaagtgacttacccaaggtcatgtggtaagaaggtggaggagtgggctcaaatctg

SEQ ID NO: 6172 - DNA, 775 bp, Homo sapiens
taatttggtagagatggggtttcaccatgttggccaggttggtctccaactcctgacctcaagtgatctacccacctcagcctcccaaagtgctgggattacaggcgtgagccaccccaccgtgcccacccagaactgcttaatttttatttcccaattggctggggctcctacttctttagctttacttttctttgtcttgtttcagcctacaagactggcttacaattattaagcagttagaatgtatgccaggcacttggttaagtgcttaactacatcattatatttaatttcttcatttcttttcttttcctttccttttctttttcttgttttgttttgttttgttttgaggcagagaggcagagtgtcactctcctccaggctggagtgcagtggtgtgatctcagctcactgcaacctccgcctcctgggttcaagcgattctcatgcctcagcctctcaagtagctgtggtttcaggcccacaccaccaggcctggcttctttttgtgtttttttgtggagacggggtttctccatattggccaggctggtctcgaactcctgtcctcacgtgttctgcctgcctctgcctcccaaagttctgggtttccaggcgtgagccactgtgcccagccytaatttccctaaatataggaagtagacattagtaatattctcctactatagatgaagaaacagattcaaagaggttaagtgacttacccaaggtcatgtggtaagaaggtggaggagtgggctcaaatctg

SEQ ID NO: 6173 - DNA, 788 bp, Homo sapiens
agtggaggcagaacacagcagcaggtgcaaagtcctgccctggcagtcagccttaccccaggctgacacacccaccccacccatcctcccaggtttataagctctggacartcagcaccatcctcacctgctgtgctcttgcttgcacagtgtcctggagctggacctggctctgggtttccaggaagcagtttgactaaaggcagcaagctgcttcctctgctgcctgagataccaggtaagcctcaccctcttagagactctcatcctagtgtctgacgaccaccaggccctggaaaagggtcgggatattcaacccttgttaatcatataaaaaatagctttggagcctttagactttgcagctccaaataaaactcaggtaagtcgtgaactgaatgcctcatgcatcttcagatggtattgggtcctgaggtaacactgaagcagaagtctaactctatttagatatctttccctgatggtctgaaagaatgagatgctaaatgcattcaataattttgatttgatctttaaatacctgtaaccctattgcaaatagtagagtgaatatagcaattcccataagtgtggtgcagtagataatttccatctaaaattttacttaccaagatatagaatttccctttgggggtctgtgaactttcttagttttattttcccaaacaaagaaacctccagattatgggtgggcaccctacttacttttattacctggcagaatttgcaggatcattgcccagaactagcatattgattcagatttt

SEQ ID NO: 6174 - DNA, 788 bp, Homo sapiens
agtggaggcagaacacagcagcaggtgcaaagtcctgccctggcagtcagccttaccccaggctgacacacccaccccacccatcctcccaggtttataagctctggacagtcagcaccatcctcacctgctgtgctcttgcttgcacagtgtcctggagctggacctggctctgggtttccaggaagcagtttgactaaaggcagcaagctgcttcctctgctgcctgarataccaggtaagcctcaccctcttagagactctcatcctagtgtctgacgaccaccaggccctggaaaagggtcgggatattcaacccttgttaatcatataaaaaatagctttggagcctttagactttgcagctccaaataaaactcaggtaagtcgtgaactgaatgcctcatgcatcttcagatggtattgggtcctgaggtaacactgaagcagaagtctaactctatttagatatctttccctgatggtctgaaagaatgagatgctaaatgcattcaataattttgatttgatctttaaatacctgtaaccctattgcaaatagtagagtgaatatagcaattcccataagtgtggtgcagtagataatttccatctaaaattttacttaccaagatatagaatttccctttgggggtctgtgaactttcttagttttattttcccaaacaaagaaacctccagattatgggtgggcaccctacttacttttattacctggcagaatttgcaggatcattgcccagaactagcatattgattcagatttt

SEQ ID NO: 6175 - DNA, 788 bp, Homo sapiens
agtggaggcagaacacagcagcaggtgcaaagtcctgccctggcagtcagccttaccccaggctgacacacccaccccacccatcctcccaggtttataagctctggacagtcagcaccatcctcacctgctgtgctcttgcttgcacagtgtcctggagctggacctggctctgggtttccaggaagcagtttgactaaaggcagcaagctgcttcctctgctgcctgagataccaggtaagcctcaccctcttagagactctcatcctagtgtctgacgaccaccaggccctggaaaagggtcrggatattcaacccttgttaatcatataaaaaatagctttggagcctttagactttgcagctccaaataaaactcaggtaagtcgtgaactgaatgcctcatgcatcttcagatggtattgggtcctgaggtaacactgaagcagaagtctaactctatttagatatctttccctgatggtctgaaagaatgagatgctaaatgcattcaataattttgatttgatctttaaatacctgtaaccctattgcaaatagtagagtgaatatagcaattcccataagtgtggtgcagtagataatttccatctaaaattttacttaccaagatatagaatttccctttgggggtctgtgaactttcttagttttattttcccaaacaaagaaacctccagattatgggtgggcaccctacttacttttattacctggcagaatttgcaggatcattgcccagaactagcatattgattcagatttt

SEQ ID NO: 6176 - DNA, 766 bp, Homo sapiens
atcccactctcagaacgtcctagtccagcaggctccaggcaggtgttggcagagagaagagaaggggttgtctggagggagaagctgagtrtgcagaggtgcaagagaggaatgccagggagagcccaaccagggcgggccggccagcggcctctgtcctggagaggctacatcccagtacagacggcgggtggccctaaagagggaggaaaatggcagtgatcagatgcctaagtggctaaactctggccgcagcatgaagctagaggaagatttagacatttacacatcatctcgtcatgtgtgtatttcaactgacgttgttagaggtaagtcctgggctcactcaaagcctttcactatgtgtttaacagactggagtcgatggaagttgatctctctccttctccgattagaaaagtaagtgcatctctcctgctgagttcctctgtataccagacgtgtggcatttcccattttcctcagtagtgaaaaacgtaacctctcgtgcaacagtagacagactttgcacagtgctgctgcttcgtgtgctggtcccgtgggtgagaggggtgggctgtggctataagctgggtcatgagaacgctcctgttctgcctgaatggccaggactgcagttgcatctggagaaacaaaagcaaatgcggacgaggtgttggcagggtcccatgcaggttctgtgttgttcctgtgttgttcccgtacaggtcccatgttggtcctgtgttgaatctatgttggtccc

SEQ ID NO: 6177 - DNA, 877 bp, Homo sapiens
cctgtgttggtcccatgtcggtcctgtgttgaccctgtgttggtcctatgttggtcctgtgttggtcccgtgttggtcctgtgttgaccctgtgttggtcccatgtcggtcctgtgttgaccctgtattggtcctatgttggttctgtgttgatcctgcgttgatcctctgctggtcccatgttggtcccgtgctggtccctgtcagtctctgttggtgtcaaggagaaagggcagcaaagttggtggccctgggctttaactgccttcacttgctgtctcatgaaatgacaaacagtgctgaagaagacagtagtaaactttgtcagcccaggaaaagaaatgggtcagaaaagccaaggactctgggaaacaggaagcaacaacttcaagctggagagaagcaagaccagaggaaacctgcccggaactcagggagagtccaggcccggctctcccgtcgtctgtcctgrtgggcagaactcagcgccagatgtaccacatcggccacacaccaggcagctcggaaacgggagagaggaggcagtttgggaaggactcagggcagagtgagctgcaccccataggagggatcaggacttgagaagcctgtggggcaggagggggccgaggagcaaaggcaggaaaactgagtgtgttctggcggcggtgaatgcctgtgttccacagtgccagttattggcttatttgatttatgtgttgcttcgggttgtgcgacacagtgtggctcattggcaagcactgttccgagccctttatagatatgaactcagtcgtgtagcagccctgtggcatgggtaatcacacccggagccggatgatggagggacccggagtcagaataagaaggcagaact

SEQ ID NO: 6178 - DNA, 877 bp, Homo sapiens
cctgtgttggtcccatgtcggtcctgtgttgaccctgtgttggtcctatgttggtcctgtgttggtcccgtgttggtcctgtgttgaccctgtgttggtcccatgtcggtcctgtgttgaccctgtattggtcctatgttggttctgtgttgatcctgcgttgatcctctgctggtcccatgttggtcccgtgctggtccctgtcagtctctgttggtgtcaaggagaaagggcagcaaagttggtggccctgggctttaactgccttcacttgctgtctcatgaaatgacaaacagtgctgaagaagacagtagtaaactttgtcagcccaggaaaagaaatgggtcagaaaagccaaggactctgggaaacaggaagcaacaacttcaagctggagagaagcaagaccagaggaaacctgcccggaactcagggagagtccaggcccggctctcccgtcgtctgtcctggtgggcagaactcagcgccagatgtaccacatcggccacacaccaggcagctcggaaacgggagagaggaggcagtttgggaaggactcagggcagagtgagctgcaccccataggagggatcaggacttgagaagcctgtggggcaggagggggccgaggagcaaaggcaggaaaactgagtgtgttctggcggcggtgaatgcctgtgttccacagtgccagttattggcttatttgatttatgtgttgcttcgggttgtgcgacacagtgtggctcattggcaagcactgttccgagccctttatagataygaactcagtcgtgtagcagccctgtggcatgggtaatcacacccggagccggatgatggagggacccggagtcagaataagaaggcagaact

SEQ ID NO: 6179 - DNA, 554 bp, Homo sapiens
tgcgacttgccattagctgaagaagccactttggccaaagaagtcctgtccacttctcagaatctcatttctaatgattggttgatgcagaatataaacaattttcttcttagtacaatttaggacaattctgaaagttattgaagaaagggggcaccaaaagacacccattggttcatctggggaatacacatgttcttcccatctttgtgatgtatgaacaaccttctgatgatcagaatcatttgtcctgccaggatgttgattccttcagttgctggtctcttggcaaaaagagtagagtcagaagtgaccaagcagcagctgtcacttgggttagtaggactcagctstttcacttggtagaattgttttccatctaggaatcaaaacgtctaaaccagctttggaaatgggaggtcaggttcaccaagtgggaaattcagaatgacggtaaatgtagcctctcttacttccactccttggttcatccatgatgtattctcatattgatctcaccataatatcacatgcatctttccctccagtggaca

SEQ ID NO: 6180 - DNA, 820 bp, Homo sapiens
catagttacaagggaagaaagaaggtcatgtaacctccagcttggtcatagtacttagacatgagatagtccaacctctcatcgagtatagatcattctaagacagacaaactttatttgttcaagaaatatttgtggattaactatttaatgaatagatatctgttggttaaattaatgctcatccatcaacagtgagctcactttgaaaaatcaaggttatttaattatttatcaggattattgtaaaccaagccctgtgctaagcactttccatacacaatcattaaccctcacaataaccaaacaagattccttttattattttagcacctgcccaatcatccaaatcctgatctcttcaccctagcacttttagggtataatggaaagggtctatgcatttaagacagaaagatctaggttgacagcaaccctctatcatttgacgagatgcatgatcttgggcaaattaagccttctgattctggtgctgtattttctcataggtagctagtggcacttcatgttattgttctttattacttatcacattctgtgtactagcaactagtctgtattttagmccacctaaattaagtaaggtataaatttagtaaggtgtaaatttcttaaatgcagaaggctatgtttcattcatcttcaccattgtttcaatttgaaaaacccttattagtagtagcagttgccaaatatagcactgctatattcatcctgaagcctagagaaataactggaatagtataagatcaataaatgttagatgaatgaatagtttgctgtgtattcctaattaaga

SEQ ID NO: 6181 - DNA, 666 bp, Homo sapiens
gtcttcatgggccctgtggcctcccatgggccccggttcctcgttggtgccattagaacttgttgctgggactgcgggattcgggccacatgcccgcaaagaactccatgttccacttagaggcttcagagtgcagtgccaggggtgccttcccaaaagtcctccctgcctgggtggagcgtagacagctcagcaccccacggggggcgttggagccagccttggttttgttgggtaaggatgttagaagaggggcgaagacccatagccactggtgtgaagggtctgctcttgaccgaaggctgcctccctctgggtgcagaccaggcaggtggtcccagtcacggtgccctggggccactgggtctgtctgccctcaggctccactagacacacctgcggaggcagcagactagcagcggtgtctgtgaggggcagctgcacagccccctcttgagggtgctcctaggcgttggttaggcccakgcgtttctgcttttggggagcagagcctggagtcgggcatggctggggaggaagctatcgcaggctgagcgcgggctggggtgctgacctgcatcccaagagcagatttgcccctgccttctgggcctgtcctttctgtaacaccacactggacacctgggagcagagcgtcccccggca

SEQ ID NO: 6182 - DNA, 775 bp, Homo sapiens
ctggcaggtgaatcccagcactgatcattagaagagttccccaggtgatcaagggcaggggaaactggaaggcccccactatccaccctgggcggctgtggccccagttacctctttaaccacacttctgtcaagctcgttgaagagcttctgaaactcctcagctgasagcagaacactgccataggaacgcaccttctgcacaggaaggagcacaggtcagcaggggcgcacgggaaggtgagcgccctcgaaggtgagcgcccccagccccaaccccaccctgacgggctgtgaatgctgcaggtgacctgaagccacacccctagtcctgaaaaggggctgctggcccaagtgacctcccgggaggagcccagaggaggctgggagcagggggcgggtacctccatcatggcctgtttgtgggagctgtccagctggaccttctgaagcacctgcagcaagttctggggcttcaccccaactctgcagggaaaaacccacagcccggtgagcacagccagctcggctcccttggaaccctggcctgggtcctcctgccctggcgtctggcttgagctttgccatgaagccactttgcagcttgagccacaccaagagcccctgtaacgagcatcctgccactgccgtccccccgagaaggcgcaaactgacttcaccactatgagcagtcaggaccagaactttccactgcaatgtccctcaagctctctgccctcatttccaagcaggatggtggtgtggacacctggcc

SEQ ID NO: 6183 - DNA, 775 bp, Homo sapiens
ctggcaggtgaatcccagcactgatcattagaagagttccccaggtgatcaagggcaggggaaactggaaggcccccactatccaccctgggcggctgtggccccagttacctctttaaccacacttctgtcaagctcgttgaagagcttctgaaactcctcagctgagagcagaacactgccrtaggaacgcaccttctgcacaggaaggagcacaggtcagcaggggcgcacgggaaggtgagcgccctcgaaggtgagcgcccccagccccaaccccaccctgacgggctgtgaatgctgcaggtgacctgaagccacacccctagtcctgaaaaggggctgctggcccaagtgacctcccgggaggagcccagaggaggctgggagcagggggcgggtacctccatcatggcctgtttgtgggagctgtccagctggaccttctgaagcacctgcagcaagttctggggcttcaccccaactctgcagggaaaaacccacagcccggtgagcacagccagctcggctcccttggaaccctggcctgggtcctcctgccctggcgtctggcttgagctttgccatgaagccactttgcagcttgagccacaccaagagcccctgtaacgagcatcctgccactgccgtccccccgagaaggcgcaaactgacttcaccactatgagcagtcaggaccagaactttccactgcaatgtccctcaagctctctgccctcatttccaagcaggatggtggtgtggacacctggcc

SEQ ID NO: 6184 - DNA, 632 bp, Homo sapiens
agactcctgccaagaccacgacaagcacgcacccctcacacaaggtacaccttgctcccctaggtccccttcgtggggcagaaacccacgcctggaggaggagccaacccttccaggtgcctcaggatgggacactyggctttcccggggtcgaggaccacaccctggtctcaaggccgaggctgttgccacttccagcacccacactgacgccatccacctggtacaggctctggcaaacagcgctactgcaggggtcactggacggtcacacagaggagggcctgagattctgtcagccggttccatctccacaacccagctgcccccaccacccacagacaggcacacaaacacacacatacacacagagatacgcacacacatgcacacgcacacagccatacagacaccacgcacgcagagacatacagacaccatgcatgcacacatagacacaccacacacacgacaccacacgcacacacagacatacagacaccatgcacacagacaccacacacgcacacagacatacagacaccatgcacagacactacacatgcacacatacaaacacacacacagacatacagacaccatgcacacagacactacacatgcacacatac

SEQ ID NO: 6185 - DNA, 632 bp, Homo sapiens
agactcctgccaagaccacgacaagcacgcacccctcacacaaggtacaccttgctcccctaggtccccttcgtggggcagaaacccacgcctggaggaggagccaacccttccaggtgcctcaggatgggacactcggctttcccggggycgaggaccacaccctggtctcaaggccgaggctgttgccacttccagcacccacactgacgccatccacctggtacaggctctggcaaacagcgctactgcaggggtcactggacggtcacacagaggagggcctgagattctgtcagccggttccatctccacaacccagctgcccccaccacccacagacaggcacacaaacacacacatacacacagagatacgcacacacatgcacacgcacacagccatacagacaccacgcacgcagagacatacagacaccatgcatgcacacatagacacaccacacacacgacaccacacgcacacacagacatacagacaccatgcacacagacaccacacacgcacacagacatacagacaccatgcacagacactacacatgcacacatacaaacacacacacagacatacagacaccatgcacacagacactacacatgcacacatac

SEQ ID NO: 6186 - DNA, 812 bp, Homo sapiens
gcacgcgatgtgtgcacacacgatcatgcgtcttacacgggcacgagttcacatggatatctgcacgcgatgtgtgcacacacgatcatgcgtcttacccgggcacgagttcacatggatatctgcatgcgatgtgtgcacacacgatcatgcgtcttacccgggcacgagttcacatggatatctgcatgcgatgtgtgcacacacgatcatgcgtcttacacggacatgagttcacatggatatttgcatgtgattatctgtgcatacggtgatgcgggcgtgcgtattaatgtacgtgtgtatgtgcatgatgatgtgtattgtatccaaacatgattgtatatgtgtgactgtgtatgatcatgtgtgcctgtgattgtgtgtgtatatgcatgtgcatggtcacatgtgtggttgtgtgtgagatcacgtgtgcttggctgtattgtatatatgtatgattgtgcytgtatggctgtaattatgtgtgaacacgtgtgcgcgtgtgtgtgcgtatgaaggtcccagcacagcagccccgtaggaaggctcaggacccctgagctgccttcaagtgggacatactgtcaggtgggacaggtgcacagctcagaggaaggatgaacggggacagaggagggacctggacactcagaacatgggtcttaggacatgatgccaggagcagcaaggcccagacccccgacctctgcctgcctgcccctttaaggtgcccattgctcctaaccggtgcattaagagaaaccagccctcagagatggtcatgagccacctgcgcccgcattaga

SEQ ID NO: 6187 - DNA, 817 bp, Homo sapiens
gagatggggtttcgccacattggccaggctggtctcgaactcctggcctcaagtgatccgcccacctcggcctcccaaaattctgggattacaggcatgagccaccgtgcccagcccaagatcttcttcatttcctaactctcccctgcctgctcagcctcaggtaggtggaggggagaggaagggaggaaagaaagaggggggcctagattcaaaaggaggtggggtctttctttctgtagtctacaaagagggagggtaggtagatcccaaaccgaattattcagaaccgtttttaagcttttattgctgctgccactgcaaagtaaaatttcagtctttctactccagggttgcattaggaggaagaaaacgacttgctccatatgcaaaatgcaccggcctccacaccaaagaccaggcccacccgtcctgttggctggcgcgcaggaggggctccacaccaatctgggagaggaatgaatgctttcccagtggggtagggcttggagctcctagagacatgaactccgtgatctgtggttggtcaatgaccttgagagacaaggaggacaaggaaggtgctgctctctacaaaacgtctttgacctgtttgatgtctagtctccccatacgggttcagcagtgcccagtgtgagaagaacacgctggcaggaaggtgctaacctctcacacaggacacaggggtagtaggcacaacctacccacatgctcacttacaacttcttcctatgctcmgaatgttttgccgcttctttgagaagcaagaaagactcccacatctccccactgcaga

SEQ ID NO: 6188 - DNA, 550 bp, Homo sapiens
agagacccatgcacasgaagaacaggaaggacgcccgagggacgcgggtgccaggaggttgtggcctcacccgtgctcagcattactgccatctcgttaattgaagagaccacgattcatgtggctttggcggtctgggacttggctgtcttcagcaaaatcgtccaccactgagcattgtaaaggaagtgttgtatagctgaaaattcagattttaagtatgaattttatcagacacaccttcactatctcttggctgtgcagccttctagaggtcactacactctcggccccctcttttcctcatctctaaacaggcaaaagaatccccgttggtctcccagggctcctgagtaagagagtaagatccaaattcatgccttggttttctttctcactgctcgtgtgcatggaaccaagtttgttgccttcttggagcctcagtgttctcatctgtaaaatgggcgcatgtgtcacggggatgtgttgctcctggcagtagcataagcaaagtccttagcataggcccctgttcccattgcacaccccg

SEQ ID NO: 6189 - DNA, 550 bp, Homo sapiens
agagacccatgcacacgaagaacaggaaggacgcccgagggacgcgggtgccaggaggttgtggcctcacccgtgctcagcattactgccatctcgttaattgaagagaccacgattcatgtggctttggcggtctgggacttggctgtcttcagcraaatcgtccaccactgagcattgtaaaggaagtgttgtatagctgaaaattcagattttaagtatgaattttatcagacacaccttcactatctcttggctgtgcagccttctagaggtcactacactctcggccccctcttttcctcatctctaaacaggcaaaagaatccccgttggtctcccagggctcctgagtaagagagtaagatccaaattcatgccttggttttctttctcactgctcgtgtgcatggaaccaagtttgttgccttcttggagcctcagtgttctcatctgtaaaatgggcgcatgtgtcacggggatgtgttgctcctggcagtagcataagcaaagtccttagcataggcccctgttcccattgcacaccccg

SEQ ID NO: 6190 - DNA, 822 bp, Homo sapiens
ccacaggcatttgttgcagacccactctgttaaacaatcggacttctaaggatcttttccccccaacaaatccacttttatttgttgacttttcattagttgaaacccttgaggggtacagcatcactcagattctgtgtccagtgggcttagcaggaagattgtttcggaatttggcacgaaccttgccactgtttccgtgggccctagttacctttccccagactactctggttttgtttggtttgctaccaggagtcactgtggtgtcctttgctttgtatacataagcacrtctcttgcccaaatagaattctgtttcatctcgggcataaaccaccttcaattttaagaactgctgtgtgctccctttgattccagagactgtgcttatagtcagcaaaaatggccttggaccacagccttccagacatatttccttttagaagtcctgctcccagcaggcctccacaggattcaagatggcaggaagagaaagaccttctaaggatcttaaggatattattcctctgcagcctcactgggtacccaagatagagaaggccttgtcttaaagagacttatcagtgtgatttttgtctaatggaataatcctccaataagattcatagagaccaggtgcagtggctcacgcctgtaatcccagcactttcagaagctgtgacaggaggatcacctgaggtcaggagtttgagaccagcctggccaacatggtgaaaccctgtctctactaaaaaatacaaaaattatccaggcttggtggcacatgcctgtaattccagctactcaggaggctgaggc

SEQ ID NO: 6191 - DNA, 801 bp, Homo sapiens
cttttttaaaccattattatgatagccaggaatattttacaaatatattaattaacaactattaatatttgttatattaagattcaataaagagagagagggacaggaagagagagagggagattgactctgattttggggtgatgattttctcttcctccaagagcatcctatgcagttatattaatataacaaatattaatatattacaatatattaatgactattaatagaaacaaatgcagtgttcatccacagggttggttgattaacttatgttttaccaatagaatggaatacaatacagctgtgaaaataattagatagactcatataacagaaggatgggagctccaagatgttatattaagtgaaaaaaaatcaaagtgyaacagagaatacaggtatgacatgcgccttttgcataagaatgatcaaaaagatgtacataaaaacaaagaatttagaatgggaaacaaaatggaaggaagtaggaggaacagagcagtgagtcagtagtgaggatgaggcttgaggctttacgccaagctcctgaatgatgtttatgagaaagaatttgacctccctgagaggcagagtagaggtgggggagattaaggatttattttacaacatccttcttgcgatagttgattcctatatttgttttttcatactaggataaagaagatgcaaggctttgtgaagacgttgaaagaaaggtttgtatcaacaacaaatgctgtagttttgcgttttctattctgaagacagacctaacaagagaatccacggatcccc

SEQ ID NO: 6192 - DNA, 590 bp, Homo sapiens
ttgttgatcctgactggagagtggagtgtttgctgcagacaaaaggtttcttactcttctatttggtcggcctttgtttctgcactccatagcatttctgctatttctytgctgtactctggagctctctcttatatttcacagttacattcatcaacaggtagttatttctttgttgtttttgttgttcttatgggggagataagcacgggaacctgctggcctgctagtctgacatcttgttgatttcactggttatttcttaatgagtgtttctcaggtcattctaagtgatagagcaacactctcagggtagctcatacagtacaaaagaaacattcgaaaaaaatgtgctgttaagtaaccatattccagagtaaagtgtaatattctcatctgtaattatgactttttttaatttgtagaattgaattccttcactatgttaataatcagttgtatatagaagaaaacttacatcatgaaaatatagcgattacattcattgtgtggaaaatattagcaaaacagagcaaaaaatagtatcaaattattattcaaatcacaattgttcagataacacattattg

SEQ ID NO: 6193 - DNA, 590 bp, Homo sapiens
ttgttgatcctgactggagagtggagtgtttgctgcagacaaaaggtttcttactcttctatttggtcggcctttgtttctgcactccatagcatttctgctatttctctgctgtactctggagctctctcttatatttcacagttacattcatcaacaggtagttatttctttgttgtttttgttgttcttatgggggagataagcacgggaacctgctggcctrctagtctgacatcttgttgatttcactggttatttcttaatgagtgtttctcaggtcattctaagtgatagagcaacactctcagggtagctcatacagtacaaaagaaacattcgaaaaaaatgtgctgttaagtaaccatattccagagtaaagtgtaatattctcatctgtaattatgactttttttaatttgtagaattgaattccttcactatgttaataatcagttgtatatagaagaaaacttacatcatgaaaatatagcgattacattcattgtgtggaaaatattagcaaaacagagcaaaaaatagtatcaaattattattcaaatcacaattgttcagataacacattattg

SEQ ID NO: 6194 - DNA, 590 bp, Homo sapiens
ttgttgatcctgactggagagtggagtgtttgctgcagacaaaaggtttcttactcttctatttggtcggcctttgtttctgcactccatagcatttctgctatttctctgctgtactctggagctctctcttatatttcacagttacattcatcaacaggtagttatttctttgttgtttttgttgttcttatgggggagataagcacgggaacctgctggcctgctagtctgacatcttgttgatttcactggttatttcttaatgagtgtttctcaggtcattctaagtgatagagcaacactctcagggtagctcatacagtacaaaagaaacattcgaaaaaaatgtgctgttaagtaaccatattccagagtaaagtgtaatattctcatctgtaattatgactttttttaatttgtagaattgaattccttcrctatgttaataatcagttgtatatagaagaaaacttacatcatgaaaatatagcgattacattcattgtgtggaaaatattagcaaaacagagcaaaaaatagtatcaaattattattcaaatcacaattgttcagataacacattattg

SEQ ID NO: 6195 - DNA, 805 bp, Homo sapiens
gcctttcttgttatttgtcactcgattctagtcaatagattatagacggaaaattggcactatgttcataaaaactttctataacctctcctccgtgagctttcctccccctcctcttgacagctagaatgagaaatacgtccagagtaatccccagtgtaacattaagagctttgtattgaagaactacatgtgtttcataattttaacttgaacaaccttggtgagaagggtttgtatccatctatcataaaaaatgttcttcagaaaccttggaatacagcaaatacaattattaaagagtctaaagtttggccgggccccgtggcttacgtctgtaatcccagcactttggaaggccgaggtgggtggatcacttgaggttaggagttcgaggccagcgtggccaagaaggtgaaacccaatcactactaaaatacaaaaattagccagatgtggtrgcagacacctataatcccagctactcgggaggctgaggcaggagaatcacttgaacccatgaggaggaggttgcagtgaactgagatcttcccactgcactccagtctggacaacagagtgagactctgtctcaaaaaaaaaaaaaaattctaaggtctaatacaggacctgattgtgaggggcatgctgatctgtttaagccacatcgtcattaagcctgtgacatatatatatgtgtgtgtgtgtgtgtgtgtgtgtgtgtgtgtgtctgtgtgtgtgtatatatggacttcattgctttaattaacatggggcatttttttttccactattcagttaaagt

SEQ ID NO: 6196 - DNA, 750 bp, Homo sapiens
caaaattgtagataagcaattgtgggctgtgttaatttatggagaraacaactagctgattcttacctaaaacctctattgacatacctaggttatatacactgaccgataatcagaattatgatcagaactctttcactgaatgctgtatgcacttgcagagaaggaaggaagggcaggtatctatggcactgcttcctttatttgtaaagttttattggaacacagccataacctttggtttacctattgtctttatgctacaacagcaaagctaagtagttgcaacagtaaccacatggcccagaaagcctaaaatatatactatatggccatttactgaaaaagtttcctaacttctgacctagaagtagcttcctaatcctgatctcagtgctatggtcagtcactactaatagatcagaggtgacattcaagatgaaacctatttccatgcctggaatagtgggtcaaaagtagcctccattaggctataacatgcaattgccctgcttaaaagaaatacaatgattcatctgttttacaattcattgataaattcattgaaaataataactaccttgtgtaaacttctacagcatcatatgaacaaatatctcaagtctccatagccacaagtataattcttttcatttttaaaaaaaagatgagaaatataggataagaaaggttggaagtttttcagaaccaccaaaaaagctttggatgtttttttcagaaccaactggc

SEQ ID NO: 6197 - DNA, 750 bp, Homo sapiens
caaaattgtagataagcaattgtgggctgtgttaatttatggagagaacaactagctgattcttacctaaaacctctattgacatacctaggttatatacactgaccgataatcagaattatgatcagaactctttcactgaatgctgtatscacttgcagagaaggaaggaagggcaggtatctatggcactgcttcctttatttgtaaagttttattggaacacagccataacctttggtttacctattgtctttatgctacaacagcaaagctaagtagttgcaacagtaaccacatggcccagaaagcctaaaatatatactatatggccatttactgaaaaagtttcctaacttctgacctagaagtagcttcctaatcctgatctcagtgctatggtcagtcactactaatagatcagaggtgacattcaagatgaaacctatttccatgcctggaatagtgggtcaaaagtagcctccattaggctataacatgcaattgccctgcttaaaagaaatacaatgattcatctgttttacaattcattgataaattcattgaaaataataactaccttgtgtaaacttctacagcatcatatgaacaaatatctcaagtctccatagccacaagtataattcttttcatttttaaaaaaaagatgagaaatataggataagaaaggttggaagtttttcagaaccaccaaaaaagctttggatgtttttttcagaaccaactggc

SEQ ID NO: 6198 - DNA, 796 bp, Homo sapiens
caatgaaaagaactaaataattttaggcagtttgtgatcatttgccaaacatcagcccaattttccaaatacttcagcataaatcacattgtagcaagagttcaaaactgtctggaaaatccttctcatctaacatcattaatgcatgtttcaaacagtgagatttctatttattttgacaactattcccagtgttgggatgtggcacgcatgtatgaaaagatgagtagacagccatttgacaacctaattttataatatggattgtgaaaatatttatgagaggtttttatcctatttagtatttcttacagagaatctgggaatccccaattataggttgaggcagtttaaaagtaggaaatgctacacttttgtctacacaggtggacgtgaaggatgaaagagtaaagtgacttccccataaatcacattgacagtaggaaactagtctgaatggagttctaacttgaagctggtggaagggaaggatgggctacaatgacatggatcatataaaattgcaattatcttcctactagggaaaggccttaggtgtatccaggagatctgtaggaaaaaayaaattaaaaaaaaaaaaaaaacagaaggaatcagctgggcagctgaagaatccagtccaagattcaaggtaaccactaaaagactgactggtttgtcgggtggtaggacatttaacactgcttttggaagcaaagtagctgcaaacaattccagtgcaaaggaggatagaataatattacgcaagctagaaagcagagtctggatttatgga

SEQ ID NO: 6199 - DNA, 820 bp, Homo sapiens
  misc_feature (1)...(820): n = A,T,C or G
ttcttcatagtagcccaagaatggactaatacaggcagtatggtcattttcatgatattgactcttctagttcatgagcttgggatgtgtttctagttgtttgtgtcacctatggtttctttcagcagttgtttgtattatatttgaagggatcttttacctccttggttnagttttttcctaggtnttttattttttgccgctgttgtnaaagggattaagctcttgttttgattctcaacttggtggtctaaagcagngctactgntttgngtccattgnttttattacctgngactttactgaatttatttatcaaatcttggaatctttnggaggagtcttcanggttttcttggtttttgatcatttaatnggnaaacagctgtagttngacctcctcttttccaatggtttttctttctcttgcctgattgctctggctagggcttccagtgctatattgaatagaagtggtgaaagtgggcatctttgtccggtaccggttctcagggggaatgtttcaccttttccccattcagtaggatggagtgctgtggggctgtcatacatggcttttattattttggggtaagtcccttcaatggctagtttgttgagagtttttatcataaaggatgctgtattttgttgaatactttttctgcatctattgaaatgatcatatgatttttattttaattatgtttatatgatatatcccattttgaagtgtgttttaattggccagtttttaggrgggatttattttagacaaaggtgaagattaaggggtctgcaatggccctgcctaggcaat

SEQ ID NO: 6200 - DNA, 645 bp, Homo sapiens
cgccctctgctgcttggctgcaggagtaggattagaggatggagaccaccctcagttatatccctcagtcccgcttcatcacatgctcgctgcccttccctcctgctccaccaccccatagaagctagggctgagccagagctctggcccaagtcactctggacagatgggaacacctggagatagcctgggtktgggcgtgtgcactgtgtatacgtgtgtgtgtgtgatgagtgtgtccactgtcttgtctgcatgttcaatgtgcatatcattgtgtgtatgtgaatgtatgagtgtatgttcaaatcccgactataccattttcaagcctcatgtgcctttgggcaagctaccaaactctctagaactcattttcctcatctgtaaaataggaatggtgatagtgcccacttcgtagggttgctgtgaagattatgtgagtgtgtgtagcacactcagaacaatcattgtgtttgaaaagcatctttagtctggaacccctttcccttctctactactccatttatttggtgagttgctactcattcttcaagacccagctgaagttcaggcagcatcaggtccatgtcacagtgcaggaagatctacccttagagtcctgggctcaggggcagaacctca

SEQ ID NO: 6201 - DNA, 544 bp, Homo sapiens
ttttttgttttgtagaggtggggtctccctgtgttacccaggttggtctcaaactcctgggcacaagagattctcctgccttagcctcccaaagtgctaggattacaggtgtgagccactgcacctggccaccctacagtaaaatcttgactcagacatttagcccaaccctttcattttactgatgaggaaactgaggtacatattcaagtaatgcaattatttaacaaaggtcagtgacaagattctgcaaaaatcctataaaagcttaatattcatcaaatataacccaaatgagtgttttccagaaaaatcttcatatgactgagaargaggcaaacaggcccctttctgcctctatggtatgaaaaaaatctatgattttcaaaaattgttacatataatctatagcatatcatacttgggtcaccctatggctgaaatattggttgaaagaaaaaatatgcggggcgtggtggctcacacgtgtaattccagcactttgggaggccaaggcgggcggatcacgaggtcaggagatcga

SEQ ID NO: 6202 - DNA, 544 bp, Homo sapiens
ttttttgttttgtagaggtggggtctccctgtgttacccaggttggtctcaaactcctgggcacaagagattctcctgccttagcctcccaaagtgctaggattacaggtgtgagccactgcacctggccaccctacagtaaaatcttgactcagacatttagcccaaccctttcattttactgatgaggaaactgaggtacatattcaagtaatgcaattatttaacaaaggtcagtgacaagattctgcaaaaatcctataaaagcttaatattcatcaaatataacccaaatgagtgttttccagaaaaatcttcatatgactgagaaggaggcaaacaggcccctttctgcctctatggtatgaaaaaaatctatgattttcaaaaattgttacatataatctatagcatatcatacttgggtcaccctatggctgaaatattggttgaaagaaaaaatatgcsgggcgtggtggctcacacgtgtaattccagcactttgggaggccaaggcgggcggatcacgaggtcaggagatcga

SEQ ID NO: 6203 - DNA, 2008 bp, Homo sapiens
attccaattccgtggccaattatcactkcttggaaaataattcagagttttcccagtttcatcaattctcatcccagctaattctcattaattgttttcttttctattttacttgtctagtaattaaaatatcagctagtttctcagaagaaatagatcatcattagaaaacagttttacaagaaagagttagtacttaatttattcaaaggagacattcattttttcctaagaggtgagctttctgttccatggtttttgtcatgagctgtaaattgcagagccttttaattatttctcactgaaagactgggggagggaggggaagcaaccaagaaaaagtcagtttcttaagagctgttttgtttgtttgtttgttttgtttttgtttttagagtactagaagtctacttaagtcataagttcagagccagttcaaccaagaagtttacatatgtacaaacactactggtaaagcaaagatattttagagtaacttttacagacatttaatggaattgaaccagtatttctccctgattgtagtcacttatcacattcatattgttggtattgctcaggtcctgttctgaaacttattacctgaagtcaagtcccagggagagtaaacagcatcctaatgtattctgaaataggaaattcagtctgaaaatgggaattgaatagactgaaagcagaaggatttcacaaactaagctctaagcattcagtctccaaattgaaaacttcatgagcacatcctgcagctggcttttctataagtagctccacacatgtcgtgttaaggaagcatccactatagcagatgaggattttaggtccatggaattaatagcctgtaaaggggctgcctttctgtgttctctgagattacatggtttcagttccatcctttttggaagaactgtttttataagaaagaaaaagcaaaaggaaggagtttttagatcatttctattacacgtaaatgaaataatttggaaatacactgcagattccaagagtgagcagagaaatctgacttccttccacattcaatgtggtcaaccaggaaatcagattagaaacaagaattatgagactataaggaaaaggcccagtctaatggagagcacatcatgatttcttttcattatcatgttaaaggagctctgtttgttctttttttattaatgctcagacatagataattttgcgtgcttggaatcgtagataaagtggctctgaagcagaatgagtgttgttttcttgtgataaaaccttattccaacacttggagtagtagcctttactctgagtagatttaagtttggtgtttctttttggaatttttttttgaaatttcaaggtcaaggaaatgctataatggagaaaaaagagaaaagacattcaaaaacaatgcaactgggctaaaagccatgactacaaatttagaaggaactaatttgagtgagtgaaattagatgcttgtttcataacaactccaaaagctttgactgatttgaggtgcagacatgccattgttttaaagcagatttcagtggtattttgtacacaagcggaagctacatagctatgggttgtacttactaccaaacttagctggttgttcacaggtgtcaaatgccaactgtcaaaacaactacttttcaaagaactagagttatatcccatgagcagatttcatatgacctctctctttttcaaagttctcagtaaaatcaccaagggagagggaaacaattttagaactgtttctttctgggtattaaaataaaaactaaaagtttcccaacctttaaagcccaaatttatggcagaatgtgggcttctttttggggggcgagggttgttcccagaaatagagttacattcttggcaagattcaacatattcttggttattttggtcaaatgggctcctttgtgccacttagcctttacctcagcaagcgcatcccagccgtggctcccaggtgaatgggggt

SEQ ID NO: 6204 - DNA, 854 bp, Homo sapiens
atcccttgagcccaggagtttgagaacagcctgggcaacatggtgagaccttgtctttatttctctctctctctctttaaagaaactggtatcaggggcacttgtttcttctagatacatttctttgctaccatgtgcacattgyctcatgcaaagaactttctctagttttaggaaaatctatctcccttttcctcattcccatactatttagggatacaacttcctctggtttaagcaaataggttgtgagacccctgtcctgaccactgttggcaagaagctggaagagccaggagggagtctgtactcttaaaccactttgctattataactagtcccaagttccttgttcttgagccaggtactcacccccctccacagaaacctacatgtaggtacagtcagtatggatcttatttcataagctcaggtgtgcaggaaatgttgcttttctttattttctttaaactgatttaattttaactcctggcacccatcctaccaggctgtattatatgctgctcacaagagccatattttaagtataaagatatagaacagttgaaagtaaaataatgaaagatgatattgacatagtttgaatatatgtccccaccaaatcttatgttgagttgtgattcccagtgttggaggtggggcttgatgggaggtgttggggtcatggggtcagatccttcatggcttgccttggtgctgctctcatgagatctggttgtttaagtgtgtggcaccttttccccactctcttgctcctgctctcaccatgtgaagaggctgctcttgcttcaccttctgccatgagtgaaagctccctaaggccccccagaagg

SEQ ID NO: 6205 - DNA, 854 bp, Homo sapiens
atcccttgagcccaggagtttgagaacagcctgggcaacatggtgagaccttgtctttatttctctctctctctctttaaagaaactggtatcaggggcacttgtttcttctagatacatttctttgctaccatgtgcacattgtctcatgcaaagaactttctctagttttaggaaaatctatctcccttttcctcattcccatactatttagggatacaacttcctctggtttaagcaaataggttgtgagacccctgtcctgaccactgttggcaagaagctggaagagccaggagggagtctgyactcttaaaccactttgctattataactagtcccaagttccttgttcttgagccaggtactcacccccctccacagaaacctacatgtaggtacagtcagtatggatcttatttcataagctcaggtgtgcaggaaatgttgcttttctttattttctttaaactgatttaattttaactcctggcacccatcctaccaggctgtattatatgctgctcacaagagccatattttaagtataaagatatagaacagttgaaagtaaaataatgaaagatgatattgacatagtttgaatatatgtccccaccaaatcttatgttgagttgtgattcccagtgttggaggtggggcttgatgggaggtgttggggtcatggggtcagatccttcatggcttgccttggtgctgctctcatgagatctggttgtttaagtgtgtggcaccttttccccactctcttgctcctgctctcaccatgtgaagaggctgctcttgcttcaccttctgccatgagtgaaagctccctaaggccccccagaagg

SEQ ID NO: 6206 - DNA, 777 bp, Homo sapiens
acgctcactcaacggttcgcarttttggcttttctttcctttggtgaggagagagatttgttgctaaatggaattcagttggctattgatattcacgtctcatgaaaattttggaggcgctagttacaaaactttgagactaacaaggtacatgagtgtttaccagcccatgagtaatgtggagtcgccacccttgaaaaagctttctgttccccacatgaatgatcatgatcagaaccaggaatgactattggcatcttcaggaatcaaagtttgaagccagagagtttttctggaaattggtgttgggctacaacatgtggtgttggggggagatccttaaatgagcagggccttggtattccaccagagaactttcactgggttatttaggaagttgctggggcctttggcttctaccacactagatgaagcagaaggataactggctttggactcaggtgctggctggaccactactaattgtgtgacctccctgagcctcagttttcatacttgaaaatagggataactcataaatggcttgggtcatagaagaagcttagtaaatacttggagactgaatgaccatttccttccttacctcagttcatcctccctccatcctgctttcttcgagttctttgtctctgtctttatcagaagcacttcttagagatgatttctttagattttaatatatcttcacatggatttagcatactgccgtccatcttagggctatctttaatctgtgtccttcactatgaagagaaa

SEQ ID NO: 6207 - DNA, 621 bp, Homo sapiens
aattggaaatgtcaataccagtctcaaagagttatctattgtatagttctctcactccctttacaactgttcttcagcctcaataaaagactccatatccatgactccttcatttgcctctaatttacacacccccacacccaccaaagtctcattttgttcccaatgctgcctggagcccatggtcaataacgtggatttctgtctcaccagctctttcaacttcctcctatccctgttttatttttcttctgtgtttaggtaacatttaytgaaggcatactaagtatcaggcaatttgcagtgattcatctaatttttctaaccccatgaaatagttactattattacccctattttaaggttgaggaacttaagtgtttgggaggatatgtaaattgcccgagctcatacacttagcagggccagaactcaaagcccggtctgtgactaaaacctttacaattaaccacaatgcaatactgcccctgctgcagcacctgcctcacaaattctcagtatacagtctgccctcctcaattttataaccagaaagctgagcactgctaaagaaaaccttgtacaaatcattttacaaatctatgatttcttacttcagtt

SEQ ID NO: 6208 - DNA, 810 bp, Homo sapiens
tgctccgtgctgtggcctcagaattttgtatctcaccctttcttactccatgtagtgctttgtattttacacaccaacgagtatcatagttaagtgcactctcactacgatttgagtcactggcacacacagagggacgaaggaaagcaaaacattctactctcaacataggcacacatagtgtcaaaaagaggacttggctgtcctctcctggcaaggycacgtgtggcacaccctgaggttagacacaggccaagtcgccacaggtgccttcttcccagcggacggctgtcctgcctctccctgagctggttattgatgggaggagggtgaactgcaaaccagccgcagggacagagtagggaggcggaggagaaccagggccagtctgtcgccttcagaggtgacctgaatttgggaactccccacttctccgaactgcaggggagcttcccgcgctgtctcccaggctggagtgcaactctgcgattacagctcgctgtagcctccaccctccagcctcaagtgatcctcccacctccgcctcccaagcagctgggactacctacagatgtgtgctaccatgcctgcctaatttttttttaatgtttaatatttgttaaagatgaggtctcaccatgttgcccaggctgtccagcctcagcctcccaaagtgttaagagtcacaggtgtgacaaaagcacccagccctgttgtcaacgttctgtcttattcgtggcaggaaactcccttaagaggggttttatggcaatcctcatttctcagaattttatgctcttattcagaaaa

SEQ ID NO: 6209 - DNA, 721 bp, Homo sapiens
tgttttcagatatagaaactgaggctcaaatgagttaaataacttgcccatataagaaatcaaatgagtcatatagtcaaatacaaaattacatctgctcaattccagagcaaatgctcttaactattactagtccagaatgtgctggttcaaccaatgatgtatattgctaatgtttatttttaaatgcatccaagtgtctcattataaagctagcatgtccttatttttctagtggtatagcctctaaatctttattaaatcaatgttctaaaatggtgattgcaaaatatacaacacattgaatcctattttgtttactaaatgtgtatgaataaatgtatctgaatttcacagacatgtcctcagatatataaaaggtaagtttttgcatgagtgaagactctattggcactcattagtgatcaaattatccaagctgactcaagataaactaagtcacttccagttcacaactcagtttcttttgcatagtcartttggtagttttcccctccctcttcttgtgtcattattcctaagaagatggagatgtttatgtttttaaaatcaggattcaagcatcttgtccacaataatcagtagtctactctggcttcctctgagatgtacctcatatgcttttgctgatttcattgtgttttgctctctattgctgatggttgtagtcctgccatgatctcctgtcgctgggccattg

SEQ ID NO: 6210 - DNA, 721 bp, Homo sapiens
tgttttcagatatagaaactgaggctcaaatgagttaaataacttgcccatataagaaatcaaatgagtcatatagtcaaatacaaaattacatctgctcaattccagagcaaatgctcttaactattactagtccagaatgtgctggttcaaccaatgatgtatattgctaatgtttatttttaaatgcatccaagtgtctcattataaagctagcatgtccttatttttctagtggtatagcctctaaatctttattaaatcaatgttctaaaatggtgattgcaaaatatacaacacattgaatcctattttgtttactaaatgtgtatgaataaatgtatctgaatttcacagacatgtcctcagatatataaaaggtaagtttttgcatgagtgaagactctattggcactcattagtgatcaaattatccaagctgactcaagataaactaagtcacttccagttcacaactcagtttcttttgcatagtcagtttggtagttttcccctccctcttcttgtgtcattattcctaagaagatggagatgtttatgtttttaaaatcaggattcaagcatcttgtccacaataatcagtagtctactctggcttcctctgagatgtacctcatatgcttttgctgatttcattgtgttttgctctctaytgctgatggttgtagtcctgccatgatctcctgtcgctgggccattg

SEQ ID NO: 6211 - DNA, 768 bp, Homo sapiens
gtatgtgataatctttagctacattttagcagccagatagtttctactagctatgcaaagaaatcggtgaaatgtagttttggctgaatgcatggcagtctccaacaaagttggggttccattgaccygagagaaaaagaaagtagatattaaatatgacttagaagttcagattctgtcttatacttaatatttggctgtggaaaatttattcatcttccacaggtctccattttctcatatgtaaaataggaactgacacttttcatgattattgtaatgtttaagagatagcatatgaaaaagacttggtacacagtagagacttagtaaatgaaacaatttgccaaaaaatacctgtaacttctaaaatatatttttgcacttattgaatgctgttataggaaaggttaattatctagtcacatgtaataccatcaaatactggaactacatcacactgccttgccagtatagctaactacttcattccattacttctatcttaccctctggggaagtactgattaagaattaacagactcttacaaagttcatcaactgctaaagaaaaataagtatctaggaataatagaaaaggcaaataatgaagggatctactcagtatatgtaatagataatgcaaatctatataactctttactctccacaaaaacaatgccctcattagcctaatagacattttgtcttaaacacattctactttgcttctttaaagcttgcaagaatcttgggagggagcaaggg

SEQ ID NO: 6212 - DNA, 807 bp, Homo sapiens
catcaattctgactgtcccataggtctgggagcattgtgagtgcccaagaaaataatgaattttacaagattctccactccagaaagaaacattctggtggcggcttctgggaattatcagtgatgacaatggagattgacaaggaraatgagcatgtggttttgtctgggaggagtaacactttcacataaaaccaaagtgcttttttaatatatatatacatttttatttgctctcttcctattctataaaaagtcttttaaaaataattgaatatattttttacaggcaaagtttctgtttttttcaggaaggaaagaaacttgccattacttacttattttccctggtcactggcaatacctttatgatattttttttcttttctccttctgtcacttttcttttgttaaggggcaggggataaaagaataaaataaggatgtgtctgttataagataaaaagaagcttagttcttgaagtcccaaaggaggccagagcaagtcttagtctaggctcaaatatcctaaagcaatgattctcaaactttaacctgcatcagaatctcctggagggcttgttaaaacacaggctgctggactctgtctccataatttctaattcagtaggtctgggatgaggccccatgaatttgcatttccaccaagttcccagctcatgccataggtccaaggatcatacttccagaatcactgccttaagctctagaatgctatttcagctaccaaatatgaacacttacaatataccacactctatgctgagtgtactgagatgggtgaga

SEQ ID NO: 6213 - DNA, 671 bp, Homo sapiens
attttcatgagtccctagctggcttcagaccaccactgactccaactcaggccagcctggttctgaggccccttctccttccacagtgccaagcacacagctcacaactaatctgggtcttggtatttgtattcactgccctttaccctagtctctcatgggttttacatataggttggtgtgtacagtgggatacaggaaaatatcagacagtataacagaatcactctctctcactctgcccccaagcccaggcctgccctgtcacttcaggatgtacaattcagttaattcttctggagccatattcaagcatcaagactcctgcagagggacattctgccgggggctcacacgaatcactkcagcacggttggatttggttttagtgctcactgaggtggctgcagcttggcgaaaccctgacattagccatagcagctacctgctcaccattcagaagccaaacacagtgaggtcttgtcccaaataggaattgtgtttctgatgtcaaaatctgcaaatggattcaatttgcacagcagctgtcctcaaagttggcaattcgacgtcctctcagacaattcattttaagacaatgtgcagtgttttagtcccaaacctacaaaagtccatatgcatcccattttctcccaaatcctgtggcctgt

SEQ ID NO: 6214 - DNA, 804 bp, Homo sapiens
tgtggggtcgcgtgtcaagggggatttcgatgacagctgtaagtccaggcagtagatccagcagaatgcatgtggccaccagaatttacccagcgcctccaaaaagtacccagttgggaaggagacagacgcctgtgtggagggagggacgggtgagaatctggggccctgtcccttagtcctttgtaaatggcagagggagagggggcttccggatggcagtgatccaaaactcacctytccatagaaacagtgaggacactggaggcccagcttccgggccagcccccagtgctgagagaagccactgccccttgccacccccggagaggatgccagccgtgctcattagagggtgggtgctcccagcatccagcctccctctcattcagaaactcggctccaggagggggttttggaggctgggtatatgaggtgtgccagtaccttggggttcttctgagaccaggaacccgtgctttaggccttcaagggccaggactcacctgggcagtgattggatgggagcagccccctcgtccccctcgtctaaggcagttcgaagagacagcaccgcagaaggccctctgtgtgtcccaccctcctggggaaagtgagattcctgtccaggcttggaggagcaaggcagttgcctactacttgaataaatgggttgtttctggattctgggaattgggtagctgacaatggtgcctctttggtgttgctgccaggatgctgggagtctcaaaggggaccagtcacaacaaggacgtgcactctttggttccatagtaattttat

SEQ ID NO: 6215 - DNA, 1147 bp, Homo sapiens
taaaaacatgatcttcaggcctccctgtttcacttagtggattgcaggtgcctttccttgcctttcactgtcctcctcccagagcctccgttcaccctcactgcaggccatgctctctggctggcctttatgctccgtggaaccaaggggaaccctagagcttgagacttgtgggatgctgtagggctgtttgttcccagcctcccagagtacagctaatatgtcccactacctgaacgatgtgcctgccccactgctgagtgacatsggtgtggctggcaaggcaccagtgctggtctttcttccattgctcacacctctcctgggctccctgggcttctgggtgagttgaacactgtggggtgcaggggaggtagggctatctagcctggagtggggtgaatgtgcccttgggaaaaggatgccactctcttccagatctttctgtccttatgtcagagagatggagtcatcccagcacttatggccagcaaacctgaagcgcctccatggccatctccctctgccttcaacccacgtgagcacttcctgggagccaggctgggtgccaggctgtgagggcactgctgggctcacgcgttactgcctgtgcactgttgataccctatttatcaggctcatgaatctgttaaacatgaaaccatcaaccctttccaaacagtaacacaccgcttctgtgtctcacacacgactcctgagttttggcaattcctccagtgaaacactgatttaacgtttttattggatcccacttgtaaatatttaattaaagtctaaaatgttagactatctctagtgcttcgaacacccaaacactcaaaacatgcctaaaatgctatattggttacacaacgaagcactctgctctctctggaactgaccccagtgctgaagcctgattcccacctcccctcctcaccctactccccgtcttcttactggtgctcatagctcttcccaggggttctgagccttcctagggttgcggcgaccccaggaaaagagacaaggcttcagggtgggaccagttaagggctgaggacacaggggccagggtgtcgatggttcctttggggcggtgctcccaactgttcctcccgaggtgactggaacctgagctcaggca

SEQ ID NO: 6216 - DNA, 1147 bp, Homo sapiens
taaaaacatgatcttcaggcctccctgtttcacttagtggattgcaggtgcctttccttgcctttcactgtcctcctcccagagcctccgttcaccctcactgcaggccatgctctctggctggcctttatgctccgtggaaccaaggggaaccctagagcttgagacttgtgggatgctgtagggctgtttgttcccagcctcccagagtacagctaatatgtcccactacctgaacgatgtgcctgccccactgctgagtgacatcggtgtggctggcaaggcaccagtgctggtctttcttccattgctcacacctctcctgggctccctgggcttctgggtgagttgaacactgtggggtgcaggggaggtagggctatctagcctggagtggggtgaatgtgcccttgggaaaaggatgccactctcttccagatctttctgtccttatgtcagagagatggagtcatcccagcacttayggccagcaaacctgaagcgcctccatggccatctccctctgccttcaacccacgtgagcacttcctgggagccaggctgggtgccaggctgtgagggcactgctgggctcacgcgttactgcctgtgcactgttgataccctatttatcaggctcatgaatctgttaaacatgaaaccatcaaccctttccaaacagtaacacaccgcttctgtgtctcacacacgactcctgagttttggcaattcctccagtgaaacactgatttaacgtttttattggatcccacttgtaaatatttaattaaagtctaaaatgttagactatctctagtgcttcgaacacccaaacactcaaaacatgcctaaaatgctatattggttacacaacgaagcactctgctctctctggaactgaccccagtgctgaagcctgattcccacctcccctcctcaccctactccccgtcttcttactggtgctcatagctcttcccaggggttctgagccttcctagggttgcggcgaccccaggaaaagagacaaggcttcagggtgggaccagttaagggctgaggacacaggggccagggtgtcgatggttcctttggggcggtgctcccaactgttcctcccgaggtgactggaacctgagctcaggca

SEQ ID NO: 6217 - DNA, 841 bp, Homo sapiens
tttagtctgcccagtgggtaacttcagcaacatccctaacacaactgttgttcaaactgtactagtggtcccttttatagagtcagacttttagacccatgtgttctcacttcctgctttaatttaacccagtcatgggatactagataatagaactgctacctactagcgaacagggaatctgtgcaattgctgacactttctgttgcacatggatagacacatagtgtattgagactcagttgcaaaaaaatgaacaaatagtacttgcttaaaaagggtaaattcctcatctggctcattctttgatctcttcaattttagttggtttggttcatgggtccctggctaagcgtcatattgtaaactcttagtattatcctggggagagtcattacagtagtttccctgttacactgtatcctctcaaagagtcttaaatrtctatatgcagccctctgctgaatgctaaatggtctctctccagctggaatgataaaactccaagaaacgcatgataatgaggacaccttaacctataaatgatgtgttaagaccgaaaacccaaaacgatgattactgagagtagtgctgatgccctgttttagtaactctcacctaggtgagaacctgaccaaaaggggagaactgttaaataatatttctaggaggccattggttgggactgagctcctgcacaaggcccaagagaccaaaccaagatggagtccctcaagctgaagttccacgccaccaagccaaaactaagctgtcgatctgaccttccaagatcaggagagagtgagttaacagtcaaatcttcaaacaagccagtttcagc

SEQ ID NO: 6218 - DNA, 650 bp, Homo sapiens
acagctgtaaatcttggattgatgggtgaggggatgccctctggtagggggtgttgtggggattctgctgagcccccactgggggcttggtctggagtcaagggcagcgtcccctgccccactcacaagtgcagggagggcactgggtggagcaggaagccttgcttggagtttaactggctgcagcaccgtgagctccacatgtctctctggacctctgcttcctcctggatcagcgagggccaggatgaatgatctctaatgccccttctagctctgacaaccgttsaggtgctggatggcaaacaactcttaacaagaaacatgcagcctccgagtgttaagtgggtctggacttccatgaagacagaggcacagatttacccaaaccaccaagagccagtcagacctggtggtctagtgactagaatctactgaccctcagctctggactctacaccgaagaattcaggagctctcctgacacagagagttagtttatgccctgtccagctagtcagcactatgcggtcaccaactcatgccttccttcctccttgctgacagtttctgggcagtgacgtcactggatggacaaaatgccttctctacccctcacacctggctgacacccccggtctgagtcaaga

SEQ ID NO: 6219 - DNA, 650 bp, Homo sapiens
acagctgtaaatcttggattgatgggtgaggggatgccctctggtagggggtgttgtggggattctgctgagcccccactgggggcttggtctggagtcaagggcagcgtcccctgccccactcacaagtgcagggagggcactgggtggagcaggaagccttgcttggagtttaactggctgcagcaccgtgagctccacatgtctctctggacctctgcttcctcctggatcagcgagggccaggatgaatgatctctaatgccccttctagctctgacaaccgttgaggtgctggatggcaaacaactcttaacaagaaacatgcagcctccgagtgttaagtgggtctggacttccatgaagacagaggcacagatttacccaaaccaccaagagccagtcagacctggtggtctagtgactagaatctactgaccctcagctctggactctacaccgaagaattcaggagctctcctgacacagagagttagtttatgccctgtccagctagtcagcactatgcgrtcaccaactcatgccttccttcctccttgctgacagtttctgggcagtgacgtcactggatggacaaaatgccttctctacccctcacacctggctgacacccccggtctgagtcaaga

SEQ ID NO: 6220 - DNA, 796 bp, Homo sapiens
caatataggaaaaggacattaggtgaaccaatatatggtaacaaatgcatcatactaacgtaagaaggcaataataggggaatgcatttgcaggtccatataggaactttttgtactagtttcacaatttttctttaaatctaaaactgtcccaaagagaaagtttatttttaaaatatgttacccagacttttttttttttttttttttaagatggagtttcactcttgtcgtccaggctggaatgcaatggtgygatcttggctaactgcaacctctgtctcccggtttcaagtgattctcctgtctcagcctcccgaatagctggggttacaggcacatgccaccatgcctggctaattttttgtgtttttagtagagacagggcttcatcatattggtcagggtggtctcgaactcctgacctcaggtgatctgcccacctcggcctcccaaagtgctgcgattacagatgtgagccacacttctggccacattacccaaactttcttattgctactgtttgaaggagcacttcatcgcacaattccaggagacaccattcatataatggtatctcctggagttgttcaaggctttaacacttttacaattttaatggctttttcctaggaaaagcaatcacatctgtcatgcatcaacttgtttttcctgtaaaacttagcatacgttgattacagatcctacttaactgatttgtccagctaggaaaagttgggcagaaccagtcttttataggcaaaggcatggaaggctctttccctcttgtaatgca

SEQ ID NO: 6221 - DNA, 828 bp, Homo sapiens
gatcccctaagaattttgctttagaagtactacctagtcggtcttaaaggtttgttattttacttttggtcccacttcccaatgtcagtgtcagagctgtccttgagactcctcaaatttgggcagggcgtggtagctcaygcctgtaatcccagcactttgggaggtggaggcgggtggatcacctgaggtcaggagttcgagaccagcctagccaacatggtgaaaccctgtctctgctaaaaatacaaattagccgcgagtggtggcgtgcacctgtagtcccagctactcaggaggctgaggcaggagaattgcttgaactggggaggcagcagttgaagtaagccgagatcgtgccactgcactccagcctgggcaacaagagtgaaactccgtcaaaacaaaacaacaacaaaaaacaaaaaaaactcctcaaatgtgaagctgagaattttgaagctcatttataaattcacaccacccttgtgggaggggagagaaggcagatcacatctctgggctcagttggggcaaccattctaggatgctcagagagacctgctcctagaaatccagagtttcctaaaagctgggatcagagttctggcaagaaggctgtagcctgggccttggccctagaccaccaaaaaagtgaatacaggcttaggcagtgttcatagaggcccagcatctggaacaagggtgctgctgtagtctgtgctggtcagaccacacaggaagaattgtttattttccggatactatgattttaaaaggatacaagcaaattggtgtgtatcaaaaggaagctgaccagaatgttga

SEQ ID NO: 6222 - DNA, 667 bp, Homo sapiens
agcaataactggcatttgggartgatgggaggggaggctcactgctgcctagaaagaggcccttctctcctccctgggccagccaggtcccttgggatgggtcagctgagccttgccttggaagtgggtcggcttccttccctatcgtttttcctttatttattttttttgtgactgagggaagtggtaacactaatcaaatgcttactctgtgcaaagcactgtactatttttttttttttggagacagaatcttgctcttgtcccccaggttggagtgcaatggcacgagggctcactgcaacctccgcctctcgagttcaagtgattctcctgcctcagcctcccgagtagctgggattacaggtacctgccaccacacccagctaattattgtatttttagtagagacagggtttcaccatattggccaggctggtctctgactcctgacctcaggtgatccacctgcctcagcctcccaaagtgctgggattacaggcatgagccaccgcacccagccccttctctgtctttttacttctctgccctttggcctcagtctccccttttgacttagaattctttcatgggagtctccagaaaccactacagtggaaatatcccagaaatatcctacctgctccccttccttgagttgcttttt

SEQ ID NO: 6223 - DNA, 667 bp, Homo sapiens
agcaataactggcatttgggaatgatgggaggggaggctcactgctgcctagaaagaggcccttctctcctccctgggccagccaggtcccttgggatgggtcagctgagccttgccttggaagtgggtcggcttccttccctatcgtttttcctttatttattttttttgtgactgagggaagtggtaacactaatcaaatgcttactctgtgcaaagcactgtactatttttttttttttggagacagaatcttgctcttgtcccccaggttggagtgcaatggcacgagggctcactgcaacctccgcctctcgagttcaagtgattctcctgcctcagcctccsgagtagctgggattacaggtacctgccaccacacccagctaattattgtatttttagtagagacagggtttcaccatattggccaggctggtctctgactcctgacctcaggtgatccacctgcctcagcctcccaaagtgctgggattacaggcatgagccaccgcacccagccccttctctgtctttttacttctctgccctttggcctcagtctccccttttgacttagaattctttcatgggagtctccagaaaccactacagtggaaatatcccagaaatatcctacctgctccccttccttgagttgcttttt

SEQ ID NO: 6224 - DNA, 813 bp, Homo sapiens
ttataaataagcttgtcatgagggttagatgatgctcattcgatgttaactattataacaactacgcaccagatcatcacgtaaatacattaagaaagtggtagtgctgataaaaccagatgattagaagatttctgactctattgtcctactaagagrtgcaaacctcactcttgattaacatggtatactaccaggcacaaacccacatgtttttatacgggggagagcaaagaacttattttctggccacacacagtggcttttacctgtaatcccagcactttgggaggccaaggcaagaggatagcttgagtccaggagcttgagaccagtctggacaatatagtgagaacctgtctctaccaaaaattgaaagattagctgggcatggtggatcacatcgatagtcccagctactcaggaggctgaggtgggaagatcactttaaatctgggatgttgaggttgcagtctgcattgagttgtgattatgtcactgaactccagcctgggcaacacagcaagatcttgtctcaaaaaaataaaacaaactaaaaatttattttcccatctgaccactaccgcacagtcattggtggggaagaaactctctaataaccacttgcttcaagatagaacatcactgagttcagagacaaagtaccagaattagatttctaccagtgaacactcattcttcttcctgtcacctccttgtgaatatgacagtagacacaggacaaaagaaaggcaaaaaaatgtaaaaagtaattatgtagctgtattagtccattttcatactgctgatgaa

SEQ ID NO: 6225 - DNA, 665 bp, Homo sapiens
catgattcaatcatctcccaccaggtccctcccacaacatgtgggaattatggaggctacaagatgacatttgagtggggacacagagccataccatatcagtagcctttctaccttatttaacaaataagcagtgcacattatgatcaggagcagttcttaatactttaaaagtagtaactcatttaaaatctataacacccctatgaattagtatctatttattatctccactttcagataagataactgaggcacagagatgttgagtaatttgatcagtgtcacacagctagtaagggcagagctgagtctcaaaccaggcaacctggctccagtgtttacatttgcaccactatgctatgctatctcttttagaagtagaaacattttactgaagcaaaatatattactggaaaaggcaaatggaggcatgatcagttttgttctacatacatascataccaatactctttaatcactctatttggtttacttaagccacaggaagaggtctctttcaaatatgagtgaaacaagccaggtctaaattatatcttactttcggtttcatcttaaatcctgttatccattttatatgagtgtaatgatgaaaaactaaagcttttcaagttcaaagatgtgtttctttaatactgcagaaa

SEQ ID NO: 6226 - DNA, 747 bp, Homo sapiens
cccactttaggggacagtcaccggcccagcaggcctcatgtgtggctcatctttccccgctgtggtgtggtttggtttaaaggcaaagtcagaggagacacatcagccctgttgactaaagcgtaatattttccatcaggtgtcacggctttctgtactttctccttttcccctggggaatctcaaaaagagtccatgtgaacatctgaaaataagtgtgcctcatgaaaaagcatgcacgcacacacatgtgtacacacacacacacacacacacacacccctggggcaaagaaccaccaggaacccaaacactaaacaacctccagccccccaccccaggcaaagctccagaagccgtatctgggagacactgcatttttctggaattgtgtcatcattcacaacaaagttcactctcaggccttgcatccaccccggagctgggctgggctgcccagagccacagtgaaaaaagagctggccactcacaccatttttatggtgagccgtgacctccaaacgagctgggtgtgcgccgggctgaagccctggttccagccgtggtggggcagcatcccrcaagcatatcacagcaccctaagctccagggcttagacccaggcaagaggcatgaaaaatagagcagctacacggaggagcctaagcttctgatttaaatataaaaggaacggagggcaggggtggtggggaggctggcttgtccctcttctccacaggcctggca

SEQ ID NO: 6227 - DNA, 751 bp, Homo sapiens
atcatcagtttgtattagcagcttgaaatacattaacttcttttctttacacagatttctgagaccaggcttgataaggagagtggagaggcagatttgggataaggggagtagagagaataggtggagtggaaggaaggagcagccagagggcattttgtgggtagtgaraggctgggatggatggttagggcttgggaaaaggaaaacagggagcacgttgaggggcaccaaagacaagcttcccacatgttacagttctgccaaaattgaggaaacatgaaagcagcacattcaggcagaggatgaatggagtcggtattcagtgtcaggtcaaaaattgactccatgatttgtaaaatgttgtaggaggcacacttctcagatttccaggtgatgcaaagtgatggaagaaatttccaatgtgacgggggtgaaagcaaccaaagaaaaatgggtgtgaacggagatgcccaagtccagtggggaggaagccattcgagaatataggtgggagaagtgatattgccatgacctgaacccattacgggacagagagttctaggctgggggataaatggcctgggggatgggtgaaggcatatcattctaaaattagaggttttacatctagagtgaggcaaaataggatcacacttctatgacacatgactgaagtatagctgggtattgtcgccatgttcttttcagtgttctccgttctgcctccccgatccgttgctgcatggac

SEQ ID NO: 6228 - DNA, 806 bp, Homo sapiens
gggttttctgattcctaaattagtcatacagcaccttgctgtggctggtcagcactgagttagtaacctgaacccagttaatttcccacctgtacactcagttccatgccctttctgatactgctaactcccaagcagccctcaccaagtgaggcagaggtggagctacacacacgcagggtcagcagctggtcctgccagggatcagggctgcagctggggcggggagagggagggttggtgggagggtggggtagggacacattctgagaaacatgtccttaggcaattttgtccttgtttggacactgtagagcagtggtccccaacttttttggcaccaggaaccagtttcatgcaagacaattttttcatgcrctggagtttggggggagatggtttcaggatgatttaagtgcaatacatttatggtgcactttatttctattattacattgtaatatataatgaaataattatacaactcaccataatgtagaatcagtgggagccctgaacttgttttcctgcaactaaacggtcccatctggggatgatgggagacggtgatggatcatcaggcattagattctcataaggagcatgcaacctagatccctgtgtgtgcagttcacagtagggttcatgctcctatgagaatcgaatgctgccgctgatctgactggaggcagaactcaggtggtaatgcttcttcacctgccgctcacctcctgctgtgtggcccggttcctaataggccaaggaccagtactggtctgtggcccggggttggggacccctgccat

SEQ ID NO: 6229 - DNA, 765 bp, Homo sapiens
tgattgttgtgacggtgtgtggtgtttggttctgactcagcacgggtcgttgagtgtgtggctgggaccattgagaagtagatacacacttgtgtgtgactgtgtaaaaacgtgtgaaacattttctcaccatttccgtgaagcagccgtttcaccagaaggtttggaaggaaccttaagctctggaagcctaagagtttatctggtaattaattttaaacattatatctatggtaaaaataaatgtggattatgaaggagaagacaaagtcagcaaaagtgagatgtcaaggagcttcctgtgtatrggttgacatctctcggccaaatactagactaccatgggtggtggttcattctcttctgctgttaggcacctttggcatgggaaagtgtggggagccctggacttgagacatcctgaggcagcatgattctgaatgactgggactccgaggtcctggatgctggccagcccctgcgatgcccagtcctgaatgagaaaaccatccctattcaaggtagtacagtttgtccttgaaccaggtctagactccagagctactctctcttggtttgatccagtttctctcagaccttgtgacctctacagtgtagttaagagtgtggactcaggagccagaatgcctgagctccagcttcagagatgtgccttggtttccacatttgaaagtggggatgagccaggcgtggtggctcatgtctgtaatcccagctctttgggaggtcaagacgggaggatcc

SEQ ID NO: 6230 - DNA, 816 bp, Homo sapiens
tgaatactgcaagtgtttttaaacaatttttttctgaccgtatttcttggaacctttccattctgcggtctctcaggagccatgtggagagggtagagtcaacccaagccagcagctccctgggttctcctgcaaccagagcagatcaacttagttttcttatgaaaaaggatttctgctgcaccaaaaaaaaaaaaaaaaaagtttggaaactacatgtgggtggcaggaaagaagttattttatctttactaaatttcttgaatttttctagacttcctctggataccaagacagaacctgscagccccaagtcctccaggttcccgtggaatatctagtagtaaagagtcctagcagttgcctgctatctcctcagcagccaaagctggtcctgcttccatttgttacctgaatcctggagacccagtgaagatctgatttatgccacttcttagtcatctcatcttggacaaataccttacttctgctgaacttaaatccttctctctgtaaaatagaacatgagtaacactcttctgtcaacctcatatgacacctgtgaggctcaaatgatctaataagtatcaccttgtgcctttataaattattctgtacatacaagatgaaactattatagctattacagtcagcataaaatcttaaatcagttggtgagcttgtttcctggatgtgaatgaattaagctagtctattctatgtaaaaacagctagctcttgtcacaggaggatgcattgttttataccacagctctgtggttaaattctgatatgacactgacattttattttatt

SEQ ID NO: 6231 - DNA, 775 bp, Homo sapiens
agtaagaattctacaaggtgtcctgtgcagtggtgcacataggattccatccagtgcctaatgcattatccactcaagtgctctatgcagtgaccaccctcagcccagggagttataaggtagtgctgcctgggcaatgaccagtgagatgacctcagccatcccaaacatacaatctggccaagagttctatgccatgctcagctcaattccccacagagtgctccaagctaagcccagcatgaggtctgacactgtgctgaatataattcctagtgcccaatgagtgcccactggatgcccttcaaggtggccaatgaatggacktcacaccccagtgagtgacacacctgggaagttctctcttgcccaaaccccccctgctagggagaagtaggaccacccctctgacctcctgataaatctcaacctcactgccagcctctccacaggctcttggtgtctttaaaaagccacacaatattattttatctaaacaagcaacttgctctaaacctgaagccaaccaagaaaacataaaacccgaatactaacataacaaagttttattttgagattcttttttacatcttttaaaagcaaggtgtagtacatgcttattataacacaaaacatgacaagcaaatagtacaggaacctattacatagaaagtgaaattccctgtttcctttcctctctctcccatctcccatcaatccctctttctagaattaactaccatttatttggtttgcatccttttgggtctgttcc

SEQ ID NO: 6232 - DNA, 798 bp, Homo sapiens
tgtttcatatgattctggaatatttccatgattatcttttggaatattgcttgttccttattctcaggatgctgttattctccatcaccttttagtcattatatcctgaatctcttccatgtaccttccttctctctaaaactgactttgatacaatctatctgttgatatttatgtgctgcatcctaagtaattttttcatgtctctctgcccattcatttttttctcagttcagtcatgtgtaatctgatctttaatttatccatcgaggtttaggttccagggcttactttttacttctacaagttctcgtttttatttcaaacccatctgtcttttaattacaatatcttcctcttatttctggtccttcttcaattctaaatgctttttgtaatccaaatctgattacgtattatgttgttgtgattatattgctatttgtgccttttgaccatcatgagcactggattgggacttcacatgtattgtgattttttattgtgaactcatcttcaggagggtttttcagtgggaattgtgttgtgccttttgacyttcatgagcattgggttgtgacttcactatattgtgatttttttattgtgaactcatcttcaggagggttttatcaatgggaattgtgtgcagctcttgatgagcgtgttcctctgtagaaggtttttaaatgtgtttctgctatgagctgtagtgttgacactcccccaggaccagttcattttttacttgcatgttgcagcttcgagaagcatagtgattgtataaactacaagtct

SEQ ID NO: 6233 - DNA, 685 bp, Homo sapiens
ctgtgatattttgttatggcagctcaagccaatgaatacaccactttatcacaaaccagaatgcaagaagtattttttttttttttgaaacggagtcttgctctgtcacccaggccagagtacagtggtgcgacctcggctcactgaaagctccgcctcccgggttcacgccattctcctgcctcagcctcccgagtagctgggactacaggcgcctgccaccatgcctggctaattttttgtatttttagtagagacggggtttcaccgtgttagccaggatggtctcgatctcctgaccttgtgatccgcccgccttggcctcccaaagtgctgggattacaggcgtgagccaccgcgyccggccagaagtattttttaacactgcgcccggccagaagtattttttaaagtgatgtgtgtctgtgtctagaaatactttttaatagaactaatttatagctccaccaatttaataacatttatgttcagtgtttgtttttaaaaattataaactttagaaaattataaatttgtttctgagtccctatttctctcaagagtcctgcttgaatgacaaaattatgtagtggcctcattcagcatccccctcactttgtcattccaaacttccaattttcttgtccttgtttcttctttttaaatgactagtttgttatttata

SEQ ID NO: 6234 - DNA, 588 bp, Homo sapiens
cccaaaagtagtcactggtatcaaaatctgtgaagtctatcgtgatacccatgggtcagtccttgcaatcactactctgaacacaggtaaatagcgggaaagaatcttctgtgtccatccttgtgctaaatgatgctggggacagagcagtgaatgaaccagtccctggacctggcccccaaccccgagaccacactctcacaaacagacggattatagattgaggtaagtgtgttggctgggtgcagtggcttacacctgtaatcccagcagtttgagacaccgaggtgggagaatcgcttgagcccaggagttcaagaccagcctgggcaacatggtgaaacctcgtctttatgaaaaactacaaaaattagctgggcrtggtggcctgcgcctatgttcccagctactcaggaggctgaggtgggaaaatcacttgagcctgggaggtcgaggctggagtgagctgtgatctcaccactgtattccagcctggaaaacagagcgagaccctgtctcaaaaaaataaaagaagtatgtctatgtaagatttgggaggcagagaatatgagcaaggtctctggttga

SEQ ID NO: 6235 - DNA, 663 bp, Homo sapiens
taaggaaccgaatgcagtgttgactacacagcctcctccccactgggggatgggacgcaccctgccacccttggcagttgaggtcaggctgaccatgaggaaagaaacggtcatgtggattcaactgctgaattcaactaaccacaccagcacttcaacccaactatattcattcatctaggagtttctttgagctcagcaatgttgtttcttgatcctttgacaaaattaatgatgtagcaattcattactgacagggcaaaaaattttgccacaatgtttacaagctctaataaattatggataatttaccaaattaataccagtgaaatgaagcccgcctttttagattttcatttatcattctacctagctctttcctcccctccgcccatcgtctgtctctctctccatctctctctctctcacatacaagcagatagcgtcatttttaagsttatattttttctaaatcagcattctaggtcactttttgtgaaatgaagttgaaagtatttattaggttgcttgcacccacagcaacagtatttctgtaacagattttgacttgagaatcaaagtttgaatatagtataattggtatgttctagcttggtcccatggcccataaaaaaaaactagaattagacataaagtaatgaa

SEQ ID NO: 6236 - DNA, 787 bp, Homo sapiens
gcaaactatcacaaggacagaaacccaaacatcacatgttctcactcataggtgggagttgaacaatgagaacacatgggcacagggtggggaacatcacacatcggggcctgtcagggggtggggggctgtgggggggatagcattaggagaaatacctaatgtaaatgatgagttgatgggtgcagcaaaccaacatggcacttgtatacctatgtaacaaacctgcacattgtgcacatgtaccctagaacttaaagaataaaaaaaaaaaaaaaaaaaaagtcttggctgggcgccatggctcacgcctgtaatcccaacactttgggaggccaagacaggcagatcacgaggtcaggagatcgagaccatcctggctaataaggtgaaaccctgtctctactaaaaatacaaaaaacaattagccaggcatggtggcaggtgactgtagtctcagctactcaggaggctgaggcagaagaatggcatgaacccttgaggtgaagcttgcagtgaaccgagatcacgccactgcactccagcctgggcgacagagcaagactccgtctaaamaaaaaaaagtcttatgatgttgtacatacataacatttttttaatttaaatagttaaaacatggaaggcatccaggaagaaggaacggcaactgagaggtatgggccatatctcagtcaggtaggggtgactcaggggtttggagctgggaggggcaggaggacaccaagctgagttgagactgaaggctgagtgctgcaggggaatggga

SEQ ID NO: 6237 - DNA, 787 bp, Homo sapiens
gcaaactatcacaaggacagaaacccaaacatcacatgttctcactcataggtgggagttgaacaatgagaacacatgggcacagggtggggaacatcacacatcggggcctgtcagggggtggggggctgtgggggggatagcattaggagaaatacctaatgtaaatgatgagttgatgggtgcagcaaaccaacatggcacttgtatacctatgtaacaaacctgcacattgtgcacatgtaccctagaacttaaagaataaaaaaaaaaaaaaaaaaaaagtcttggctgggcgccatggctcacgcctgtaatcccaacactttgggaggccaagacaggcagatcacgaggtcaggagatcgagaccatcctggctaataaggtgaaaccctgtctctactaaaaatacaaaaaacaattagccaggcatggtggcaggtgactgtagtctcagctactcaggaggctgaggcagaagaatggcatgaacccttgaggtgaagcttgcagtgaaccgagatcacgccactgcactccagcctgggcgacagagcaagactccgtctaaacaaaaaaaagtcttatgatgttgtacatacataacatttttttaatttaaatagttaaaacatggaaggcatccaggaagaaggaacrgcaactgagaggtatgggccatatctcagtcaggtaggggtgactcaggggtttggagctgggaggggcaggaggacaccaagctgagttgagactgaaggctgagtgctgcaggggaatggga

SEQ ID NO: 6238 - DNA, 937 bp, Homo sapiens
cctcagcatcactgaatatatccacataataaatctgcacatgtacccccaaatctaaaattttaaaaatgtaatggcttccacatatttaaaaaaatatatataaaataaaatgagggttctcctagtttcttcccaagggtgggtatatttttctacactggcttctacaatcacttatatttgcatgactattaactctacaaatacagctcattcctttctgagaatttcacacttgtattcacttggccatctcttagtcaccagaactcaacatgtcctaaactggtctcattacgcttggccctatgcagactgctttggtatttatgttaacgcatagcacactggggcccagaaggtgttattatccctaatttttccgttttagtcagtatatctttatatcattttatctcataaacagagcataaatctcttcattctcattgccttatttcacctaatagcatgtacaactttctacttagtatttttatccttcaatttgacctcaccaaaccgaatgcattcacggttactgaaatgattcttctaaaatgtgaactcatgttaattttcaaaaaatggatcaattgatttgatgcaagtgtaataaaaattatgactgtttttaaatgaatttgacaaggtgactctgaagtaggtacagaatagcaaagmgctcagaacaaccaaagtatttacaaagaagaagaatagggtcactggctgctatgacagcatacccgagagtgggtaatttataaaggaaagaagtttatttatctcttacttatgcaggctgggaagttcaagaggcatggccccagcatcttcttggcaagcaggaactgatacatttccgagacagctaatctagtcttgagagtgagaactcattactgctagaagacacgaggtcatttatgag

SEQ ID NO: 6239 - DNA, 1339 bp, Homo sapiens
tttctgcaccctgcctgcctctcctttctgctgttcctcaccttcactaacaattcacccctccacacctgcagataggctccccaggctgccaggcttggctacagtcatcctctcggctcacccttagctcactcacaacttaaactcgcaaggttttgcccatgttctcctcgttaggtatgtaacgcttcctgtccgtgttcaggaaaggcagcgggtgtggtggcttcacaacacaatcgctggagtccataggccaggaggtaagcacaggtcctgccacttactggctgcggggccctgagcaagtatttaacttctccaggcttccatctcaattgcacaatagtgacaggaagagcaacacctcacagggctgtgacagtgcagggaaggagttcgtccagtgtcagtatatagagtgcgatagatactagctcttatgtacctgaggacctgagtgcatgaccttagtttagcctttctttcctccctccctccctccctcctccccgccaccctgccccccagcttccatctcacataactggacacaggctcctgactacagggcatgcctctcccatgtaacagaacacattttctcccctctttacatttgtattaatagatactcccctcttttcagttgggaggaatttgacccatgccagcaaaattcacttatttttaccaaccaagccccccctccccagtaaccatgcctcctattttttttctagtctcttctttctaagagctactgcatcaaatttcaaggatcactagaaaacaacggtacaatgtctctgagggagtcttgagggaaggatgggcaagggtttgcaggcaacggagaggctggctgcagaagggctgcaggtggtgtctgagcccaagaacctcatcaacagagcagggaaccaaggccgtggtcccagcagtcttgtccacacccacctgtggaccgaatcctggagggaaccagagcccaggaaaatggaatgaggcttggagtttggattgggtctccaggcacagaatacgaatgagaattctaggccgagctattaagcagaatgaaggagaacctgggcttccagaatgcctgtggacactgaagggtggsacagctctgggaacaggaagagccatcttccaggacacctgtccctggtcagcctggaagcaagcaatgctggagccacactgcagtcaggggtcgtcattttgtccctcagaacatacaccatatatgccacatctgcacacgtcggatggttctaacctggtgggaggagtgactccctcacagctcactgtttgggaagaggaa

SEQ ID NO: 6240 - DNA, 751 bp, Homo sapiens
cggaccccgagtgcactcgtgcacgccacactcacctcttcatctcagggtccccagcgctgcagcccatgagttggaggcattaagggagggtgatgaggccagcggtctgggctttctcttctcaccagtgcacccctgtgtgtcctactagagagcctgctttgctgccccaacttccctcagtaacagttcacaggtaaaccccttttctccacatgggccccacctgtttccgcccccagtgccatctgtccttttaattccttttcttctcccagagttcctgcctcccccatgtcctgaaagcttcgcatcaccctctctcccaaaggttggtaggtctcgaagcttctctggcgacrttttcccagccccttccttgatctgtacatcaagactctttgtcctctctgcctacatctgctgccaggaagagaagtacgaactcagacgcccaagatgagaggggtggggaggaaggagtttgcggtgattctccattccccacaggtagttagggttttgcttttctttggttgctttcaagtacatgtattttttaattagacatggttcacacttcgagatttaatctctttatcattgagtctccatatggacccaaaaccccaaacccagctggtgggatagtgaactcttttatgagttcactatcataaaagagcgttagttccactctgaccttgaattacatgacaaagcttcttccaatcactgggtgttggta

SEQ ID NO: 6241 - DNA, 749 bp, Homo sapiens
aaccccagcactgtgggaggccgaggcggatggatcacctgagatcaggagttttgaccagcctgaccaacgtggttaaaccccatctctactaaaagtacaaaaaccagctgcgtgtggtggcacacacctgtaatcccagctactcgggaagctgaggcatgataatcgtttgaacccaggaggcgaaggttgtggtgagccaagattgcacccctgcactccagccttggtgacaagcaacactctgtcaaaaaaaaaaaaaaaaaaaacacacttcacctttacaaaaaatacaaaaattagctgggcgtggtggcactcgyccgtagtctcagctactcaggaggctgaggaggaaggatagcttgagcccacgaggttgaggcttcagtgaggtgtgatggtgccactacactccagcctgggcaacagagcgagaccctgtctcaaaaaacaaaaataagaaaataaatgatatgtactgaataccactccatcctaacaatgaagcacatcttactcaccgctgtataacataacgtgagggtgtcatccccactctaagaaataagggaaaagaggcagtaaacttttggagaattctcaggtgaaatcccaggtaaaatttcattattgtcattgtacttgtaaaaaatacttaaggccgggcatggtggctcacgcctataatctcagcactttgggaggcccaggcaggtggattacttgaggccaggagttcagga

SEQ ID NO: 6242 - DNA, 749 bp, Homo sapiens
aaccccagcactgtgggaggccgaggcggatggatcacctgagatcaggagttttgaccagcctgaccaacgtggttaaaccccatctctactaaaagtacaaaaaccagctgcgtgtggtggcacacacctgtaatcccagctactcgggaagctgaggcatgataatcgtttgaacccaggaggcgaaggttgtggtgagccaagattgcacccctgcactccagccttggtgacaagcaacactctgtcaaaaaaaaaaaaaaaaaaaacacacttcacctttacaaaaaatacaaaaattagctgggcgtggtggcactcgcccgtagtctcagctactcaggaggctgaggaggaaggatagcttgagcccasgaggttgaggcttcagtgaggtgtgatggtgccactacactccagcctgggcaacagagcgagaccctgtctcaaaaaacaaaaataagaaaataaatgatatgtactgaataccactccatcctaacaatgaagcacatcttactcaccgctgtataacataacgtgagggtgtcatccccactctaagaaataagggaaaagaggcagtaaacttttggagaattctcaggtgaaatcccaggtaaaatttcattattgtcattgtacttgtaaaaaatacttaaggccgggcatggtggctcacgcctataatctcagcactttgggaggcccaggcaggtggattacttgaggccaggagttcagga

SEQ ID NO: 6243 - DNA, 749 bp, Homo sapiens
aaccccagcactgtgggaggccgaggcggatggatcacctgagatcaggagttttgaccagcctgaccaacgtggttaaaccccatctctactaaaagtacaaaaaccagctgcgtgtggtggcacacacctgtaatcccagctactcgggaagctgaggcatgataatcgtttgaacccaggaggcgaaggttgtggtgagccaagattgcacccctgcactccagccttggtgacaagcaacactctgtcaaaaaaaaaaaaaaaaaaaacacacttcacctttacaaaaaatacaaaaattagctgggcgtggtggcactcgcccgtagtctcagctactcaggaggctgaggaggaaggatagcttgagcccacgaggttgaggcttcaktgaggtgtgatggtgccactacactccagcctgggcaacagagcgagaccctgtctcaaaaaacaaaaataagaaaataaatgatatgtactgaataccactccatcctaacaatgaagcacatcttactcaccgctgtataacataacgtgagggtgtcatccccactctaagaaataagggaaaagaggcagtaaacttttggagaattctcaggtgaaatcccaggtaaaatttcattattgtcattgtacttgtaaaaaatacttaaggccgggcatggtggctcacgcctataatctcagcactttgggaggcccaggcaggtggattacttgaggccaggagttcagga

SEQ ID NO: 6244 - DNA, 749 bp, Homo sapiens
aaccccagcactgtgggaggccgaggcggatggatcacctgagatcaggagttttgaccagcctgaccaacgtggttaaaccccatctctactaaaagtacaaaaaccagctgcgtgtggtggcacacacctgtaatcccagctactcgggaagctgaggcatgataatcgtttgaacccaggaggcgaaggttgtggtgagccaagattgcacccctgcactccagccttggtgacaagcaacactctgtcaaaaaaaaaaaaaaaaaaaacacacttcacctttacaaaaaatacaaaaattagctgggcgtggtggcactcgcccgtagtctcagctactcaggaggctgaggaggaaggatagcttgagcccacgaggttgaggcttcagtgaggtgtgatggtgccactacactccagcctgggcaacagagcgagaccctgtctcaaaaaacaaaaataagaaaataaatgatatgtactgaataccactccatcctaacaatgaagcacatcttactcaccgctgtataacataacgtgagggtgtcatccccactctaagaaataagggaaaagaggcagtaaacttttggagaattctcaggtgaaatcccaggtaaaatttcattattgtcattgtacttgtaaaaaatacttaaggccgggcatggtggctcacgcctrtaatctcagcactttgggaggcccaggcaggtggattacttgaggccaggagttcagga

SEQ ID NO: 6245 - DNA, 778 bp, Homo sapiens
tctctcacatacagtctgcagtttaaaagaaagctttgtgttggaaatcacatttcagagttatcatgttgtagatgttaagtagttgtacacagatcagtacaagagcccattcaaggtgaacatctagactaagaaatggaaaatgcaactgggacaaaagaatatttaagggttacaggccaggcgcagtggctcacacctgttatcccagcactttgggagccagcgacaggtggatcacgaagtcaggaaatcaagaccatcctggccaacatggtgaaaccctgtctctactaagaatacaaaaattagctgggcgtggtggtgtgcacttgtagtcccagttacttgagaggttaaggcagaaggattgcttgaacccgggaggcggaggtttcagtaagctgagatcatgccactgcactccagcctggtgacagagtgacactccgtttaaaaaataaataaataaataaaaagaatatttaaggggtacaaagaagagcacasagaaaggtaaacataatagcagacaagacagaaaatatttcatgaagcacaattaatgtgaactgaacacaagttgagtaaaattcattaactcttgtgttcaatgaacatttattaaaccactactatgtgtcaggtacttttctgaatgttgataaaacaggactgtatgaaactgggcggaaaaagtctctcttctcctagatcttatagttgctcagtcctctgcctgctatgcactggcattacagaggagcgtagacaa

SEQ ID NO: 6246 - DNA, 778 bp, Homo sapiens
tctctcacatacagtctgcagtttaaaagaaagctttgtgttggaaatcacatttcagagttatcatgttgtagatgttaagtagttgtacacagatcagtacaagagcccattcaaggtgaacatctagactaagaaatggaaaatgcaactgggacaaaagaatatttaagggttacaggccaggcgcagtggctcacacctgttatcccagcactttgggagccagcgacaggtggatcacgaagtcaggaaatcaagaccatcctggccaacatggtgaaaccctgtctctactaagaatacaaaaattagctgggcgtggtggtgtgcacttgtagtcccagttacttgagaggttaaggcagaaggattgcttgaacccgggaggcggaggtttcagtaagctgagatcatgccactgcactccagcctggtgacagagtgacactccgtttaaaaaataaataaataaataaaaagaatatttaaggggtacaaagaagagcacacagaaaggtaaacataatagcagacaagacagaaaatatttcatgaagcacaattaatgtgaactgaacacaagttgagtaaaattcattaactcttgtgttcartgaacatttattaaaccactactatgtgtcaggtacttttctgaatgttgataaaacaggactgtatgaaactgggcggaaaaagtctctcttctcctagatcttatagttgctcagtcctctgcctgctatgcactggcattacagaggagcgtagacaa

SEQ ID NO: 6247 - DNA, 669 bp, Homo sapiens
tttattcaagtagtaggcaactgccttgctcctccaagcctggacaggaatctcactttccccaggagggtgggacacacagagggccttctgcggtgctgtctcttcgaactgccttagacgagggggacgagggggctgctcccatccaatcactgcccaggtgagtcctggcccttgaaggcctaaagcacgggttcctggtctcagaagaaccccaaggtactggcacacctcatatacccagcctccaaaaccccctcctggagccgagtttctgaatgagagggaggctggatgctgggagcacccaccctctaatgagcacggctggcatcctctccgggggtggcaaggggcagtggcttctctcagcactgggggctggcccggaagctgggcctccagtgtcctcactgtttctatggaraggtgagttttggatcactgccatccggaagccccctctccctctgccatttacaaaggactaagggacagggccccagattctcacccgtccctccctccacacaggcgtctgtctccttcccaactgggtactttttggaggcgctgggtaaattctggtggccacatgcattctgctggatctactgcctggacttacagctgtcatcgaaatcccccttgacacgcgaccccaca

SEQ ID NO: 6248 - DNA, 1388 bp, Homo sapiens
gtgcatcttaaaatcacacggagaggataaaaagaaaaccctttgtggtgacacaacaatgtccaccatgtccctcctccttttgaggacacgggttgattctgggcgtgtcctctctcccctgcagctgtggctggaagtccagggcactgacgcccccagagtacggccctcactgcacgtggagggaggcgggtgtgcaatgcgccagcagccttgtggctcacggggacactgccgggcgcaggtcctggactgtttccccagtccccagcagtctgagctcccaatgcctgcagaggtgacgtgttgacacacccagtatctatggggatgccttcccttcccacacccactccagggttcctgggtcatgtcccaaatagacgacttgcccttgaatctgactcagggtctgcttctggggaggccaaactgagaccccaactgagcgagaatctaggtgtagagcctcaggaacgggtttcacctcctcgaatgtctggcaggacatgaaagcccggctggacccgacactggccctggttgcgaaggactttcccatgcaccaagggcacaatgtcagcaccccggccccgcccactgcttgtcagtgatgaccaagtatgttcccacaattcttagaacttgcccggggtcaggaccacccatcctgagaattcccacagctgatccctccagacaaggactgtgggatccacaacccggacagccgcctgggagctctggtctgtgtggaacagaggctgactgcccctgtcccttcccgtttccatctgtgcggccacctgtcctccctatttcaggcaggaggggaaactcctttgtctcccacctttgccctcactgtgatgcctcgggtgccttccttggagggtgcagtgcaccgttcagaggtcatgagcgctggcatgggcggaaccactcccagatgggttttatttcattcacggaaatggcccccaagtgtactgaaaagtggaatctgtagtcaaaatgtttaaataaggagactttacatttaaagaactgcatttccaatttctcttgagtaatcacaagttgtgggaacacaggtgacatttgcccttggtagggaatccctgaagctgagctgcagctgcccctccacacagggcctgtgctccccactttgccacaatccccactcctccctgttgtccccactcctggcctgtttcactcactcacaccccctgcctcgctcctgtgagtttgtgtccctgccagactggggactccacastgaggctgaggtcaccccactctctcccaacgttgcagagctgttacaaggacaaatgagatcatgagtataaagtgcctggaacgtagatgagcaatac

SEQ ID NO: 6249 - DNA, 688 bp, Homo sapiens
ttccaagaggccctccctgaccatcacaggctatgagcacctcaggtaaacatgcttctgatcagcgcccagatctccccaagtcagcatgtcaggtgtgcgcctccacaacccataacaatcacaatggtgatgatggtgatggtggtgatgatgatgatgatgacgatgaatggttattgagtcctgaaaacaggccaggagttgcatttcactctcygagccacctcatttaactgaccaagggtgatgaggactcaggtgtcattcctgcacccaccaggcctcctgacaggagggaaggattaggacacacattccaagcacctgctgtgtaccaggcacatttatacaggttgactcccttaattctgtgggatctgcattaccattacccccattccacagaccagaaaactgaggctgggagcgtgaggtgaccggcctggggtcacacagccagtgagagacagagggtatcaggcactcaggtgtgtttggtgccaaataccaggctctgcccgtatctccatggggcgtttcctccaggtgtgagtgggaagaagattccacaaggctgctgccctgggtgggctgttggcacagagaacagggcaacagttggaggcagacgtctggggtcccttccctgcgctctcataagctcccctggacacactccacatca

SEQ ID NO: 6250 - DNA, 688 bp, Homo sapiens
ttccaagaggccctccctgaccatcacaggctatgagcacctcaggtaaacatgcttctgatcagcgcccagatctccccaagtcagcatgtcaggtgtgcgcctccacaacccataacaatcacaatggtgatgatggtgatggtggtgatgatgatgatgatgacgatgaatggttattgagtcctgaaaacaggccaggagttgcatttcactctctgagccacctcatttaactgaccaagggtgatgaggactcaggtgtcattcctgcacccaccaggcctcctgacaggagggaaggaytaggacacacattccaagcacctgctgtgtaccaggcacatttatacaggttgactcccttaattctgtgggatctgcattaccattacccccattccacagaccagaaaactgaggctgggagcgtgaggtgaccggcctggggtcacacagccagtgagagacagagggtatcaggcactcaggtgtgtttggtgccaaataccaggctctgcccgtatctccatggggcgtttcctccaggtgtgagtgggaagaagattccacaaggctgctgccctgggtgggctgttggcacagagaacagggcaacagttggaggcagacgtctggggtcccttccctgcgctctcataagctcccctggacacactccacatca

SEQ ID NO: 6251 - DNA, 688 bp, Homo sapiens
ttccaagaggccctccctgaccatcacaggctatgagcacctcaggtaaacatgcttctgatcagcgcccagatctccccaagtcagcatgtcaggtgtgcgcctccacaacccataacaatcacaatggtgatgatggtgatggtggtgatgatgatgatgatgacgatgaatggttattgagtcctgaaaacaggccaggagttgcatttcactctctgagccacctcatttaactgaccaagggtgatgaggactcaggtgtcattcctgcacccaccaggcctcctgacaggagggaaggattaggacacacattccaagcacctgctgtgtaccaggcayatttatacaggttgactcccttaattctgtgggatctgcattaccattacccccattccacagaccagaaaactgaggctgggagcgtgaggtgaccggcctggggtcacacagccagtgagagacagagggtatcaggcactcaggtgtgtttggtgccaaataccaggctctgcccgtatctccatggggcgtttcctccaggtgtgagtgggaagaagattccacaaggctgctgccctgggtgggctgttggcacagagaacagggcaacagttggaggcagacgtctggggtcccttccctgcgctctcataagctcccctggacacactccacatca

SEQ ID NO: 6252 - DNA, 688 bp, Homo sapiens
ttccaagaggccctccctgaccatcacaggctatgagcacctcaggtaaacatgcttctgatcagcgcccagatctccccaagtcagcatgtcaggtgtgcgcctccacaacccataacaatcacaatggtgatgatggtgatggtggtgatgatgatgatgatgacgatgaatggttattgagtcctgaaaacaggccaggagttgcatttcactctctgagccacctcatttaactgaccaagggtgatgaggactcaggtgtcattcctgcacccaccaggcctcctgacaggagggaaggattaggacacacattccaagcacctgctgtgtaccaggcacatttatacaggttgactcccttaattctgtgggatctgcattaccattacccccattccacagaccagaaaactgaggctgggagcgtgaggtgaccggcctggggtcacacagccagtgagagacagagggtatcaggcactcaggtgtgtttggtgccaaataccaggctctgcccgtatctccatggggcgtttcctccaggtgtgagtgggaagaagattccacaaggctgctgccctgggtgggctgttggcacagagaacagggcaacagttggaggcagacrtctggggtcccttccctgcgctctcataagctcccctggacacactccacatca

SEQ ID NO: 6253 - DNA, 700 bp, Homo sapiens
cccttctccaggctgctgagggtcagcttgaggtcacctctccccctcaccttcttctcaggctgcagggcacagtcccttactgcctcctccctggccctccctccccactctgacccaagaaaaagtcaacaaacccaaaagtccatcccaggttctaaatcctctgtggaaggggctccctggctggggaacagcatcaggttcatgcggttccttgtgctggtctgagttgtgcagggaaatgccaagcatcgctgtgtgggcattcctactctctggccccagctgcaaatcggcgtgcagctaggcaggtggacagcatcagttcctcaggtgaaccctgaattggtggggcttcctggctgcgctccctgcagcccagcccttggagatgagggccagggagcaggtgggattccagggccccttagtgatgtttcttcccagccatggttcacaccagctagaaaagagagccagcagaaggagctagagaatggcatctgaggatatgctagtgaggaggaaagcagcctaacagccaagggagggttgcttcctaggaccaaggattggggctggtgtgttggagatctccttcagccccaagacttctgaatcacctcaaytctctttaacatcaccctgtattataattattattatgcctagccagtgcctgacacatagtggatcc

SEQ ID NO: 6254 - DNA, 625 bp, Homo sapiens
aaatctaaaaaaataaaaaataaataaaaagttattggcatgtaaaaaccattcagaaaggtatgttcttatgtaaaatttcaatcataaaataaaatagcaaatgaataaataaaaaagattcatgcatataggaaaggcaaactaaaattttaacccccaaagtcctctttccatggttatggataattccaaaagcacatctgtttaagaattattggctagcattgctgaaaaataagtccagattttctctttcatcttgagtttgaataatattctcttataggcaaaggggccattaagcctgaaatgctattcatgttacatttatgcatataaaaatctattttsgcagaacttctaaattgtctacatgtgttaatgtgctgcagattaactctttgcacatgaataactatttaattatacagctctggttgatatgatagaatacaaaagacactaggaagaaagctaagacttgcacataagaggccacttccttccttttcttcataagcaaccataatatctaacctctataatgtaagagacaggagacctgcttcctttgtcatcttaaaagaataataacaaggaatatcaaatttaacatcacctt

SEQ ID NO: 6255 - DNA, 484 bp, Homo sapiens
ttaaccataattaaggaacagtatatcctaggagatccctgtttcccttcatagtttattcgtttctaattagttttagataatcctgcagttattttcttctttttcctgcctgtacttacatgattttaatattaaaaaattttgggtttattcctagttctgtctttaatatatgtctaatatatgttctatctttaatgtatgcttaatgttcaatgttccttaatttctttatgttataaatatggcctatttcatagattcaccatgaagggcttaattatatactgtttctaaaatagaatactgctctgcatgttatctatagtaaatacraaatagttgttcgccattactagagtcatcttattacttgcattacagtgttttttaaatcctgatgcttgacaacattgttacaattagagatgtttatattcataaaatttcattttatatcatataatattccctgaagttg

SEQ ID NO: 6256 - DNA, 484 bp, Homo sapiens
ttaaccataattaaggaacagtatatcctaggagatccctgtttcccttcatagtttattcgtttctaattagttttagataatcctgcagttattttcttctttttcctgcctgtacttacatgattttaatattaaaaaattttgggtttattcctagttctgtctttaatatatgtctaatatatgttctatctttaatgtatgcttaatgttcaatgttccttaatttctttatgttataaatatggcctatttcatagattcaccatgaagggcttaattatatactgtttctaaaatagaatactgctctgcatgttatctatagtaaatacgaaatagttgttcgccatyactagagtcatcttattacttgcattacagtgttttttaaatcctgatgcttgacaacattgttacaattagagatgtttatattcataaaatttcattttatatcatataatattccctgaagttg

SEQ ID NO: 6257 - DNA, 848 bp, Homo sapiens
ttttctgttgttcatttctatgtaaaattagtgttcctaaatttttatctgggggcatgtttagttaaaagacatggatcaggatgggtgcagtggcttacctgtaatcccagcactytgggagtccaaggcaggaaaatcaaatcacttgaatccagaagttcaagaccagcctgggcaacatagtgagatcccatctcttaaaaaaaaaaaagtcatggctcagagttagaaaagctaacttcacagaggtccctgttttgtaacctttgtgaggtgttcaaaaacacagtggccagctttctgagatgtctggctgtgttcttctcccctttttaaatcagaaatttatcttcctttgtctctattatcctaatccaatttttggttcgactccaaaagtagtagaaccacaattttggttctactctcaaaagtttctcctcagtgtgggggccctaccttggaaagatgctctgacttttcagtcttgagagttcataggggttacattgcttcaaccaccttcagttcttctcactgtggactccatgcactcatccactattgaaaagggtgaaattcctccagattcagccactgttatcacaccggcccactgtgccttccaatgaatacctatcatattcatagcttacctgctcccagatcttttagatacactattcttaccctctgcttcttcctgcacaggtgttaacagcatgcaggtcttgtggccatcccctgttgctagtgttctgaagtttatggagatactctgtcacctagctttatcatatatatttccaagagttgtggtctttgctatttagttactctttttg

SEQ ID NO: 6258 - DNA, 848 bp, Homo sapiens
ttttctgttgttcatttctatgtaaaattagtgttcctaaatttttatctgggggcatgtttagttaaaagacatggatcaggatgggtgcagtggcttacctgtaatcccagcactttgggagtccaaggcaggaaaatcaaatcacttgaatccagaagttcaagaccagcctgggcaacatagtgagatcccatctcttaaaaaaaaaaaagtcatggctcagagttagaaaagctaacttcacagaggtccctgttttgtaacctttgtgaggtgttcaaaaacacagtggccagctttctgagatgtctggctgtgttcttctcccctttttaaatcagaaatttatcttcctttgtctctattatcctaatccaatttttggttcgactccaaaagtagtagaaccacaattttggttctactctcaaaagtttctcctcagtgtgggggccctrccttggaaagatgctctgacttttcagtcttgagagttcataggggttacattgcttcaaccaccttcagttcttctcactgtggactccatgcactcatccactattgaaaagggtgaaattcctccagattcagccactgttatcacaccggcccactgtgccttccaatgaatacctatcatattcatagcttacctgctcccagatcttttagatacactattcttaccctctgcttcttcctgcacaggtgttaacagcatgcaggtcttgtggccatcccctgttgctagtgttctgaagtttatggagatactctgtcacctagctttatcatatatatttccaagagttgtggtctttgctatttagttactctttttg

SEQ ID NO: 6259 - DNA, 665 bp, Homo sapiens
ttaatgcagatggaggacaggggaacatactgacttccagagtcccagtcaaaggaaaatgtgtatgaatccttccatgagccatcatatctatgaaacagaaattgcaaatctccctagggtcaagtttgtatctaaatacattcgaggagtttatttgggaatctctcaaaccacaggtcacatgtcagtgtttcttcagctttcttcaaaaattaagtcagctgagaaggacagttggtttttattatattcttctattccaacaggcttttcattaacaacaagcagcttctgacagggacttttagttatgttctcaaaaaagctagctgttttgaacctcatatttagtttatgcctatactgtaaaaatgagtccaaggcctctaaaattaggaactgacagtattgtctagtcaactagtgcagatatttaggttacaaaaagaaaataktctgtatgtgacttatctttccagactgatatgtggattctcagttgttgacaaattatatattttagaatattagattcaacaatctccttccttatgcttgggtcaacattattcctgtgaatttcctgtttagttcaaattcactgaaatataatgccacctacttactcagtggcctgattacttagaggtgaggatcccacc

SEQ ID NO: 6260 - DNA, 665 bp, Homo sapiens
ttaatgcagatggaggacaggggaacatactgacttccagagtcccagtcaaaggaaaatgtgtatgaatccttccatgagccatcatatctatgaaacagaaattgcaaatctccctagggtcaagtttgtatctaaatacattcgaggagtttatttgggaatctctcaaaccacaggtcacatgtcagtgtttcttcagctttcttcaaaaattaagtcagctgagaaggacagttggtttttattatattcttctattccaacaggcttttcattaacaacaagcagcttctgacagggacttttagttatgttctcaaaaaagctagctgttttgaacctcatatttagtttatgcctatactgtaaaaatgagtccaaggcctctaaaattaggaactgacagtattgtctagtcaactagtgcagatatttaggttacaaaaagaaaatattctgtatgtgacttatctttccagactgatatgtggattctcagttgttgacaaaytatatattttagaatattagattcaacaatctccttccttatgcttgggtcaacattattcctgtgaatttcctgtttagttcaaattcactgaaatataatgccacctacttactcagtggcctgattacttagaggtgaggatcccacc

SEQ ID NO: 6261 - DNA, 665 bp, Homo sapiens
ttaatgcagatggaggacaggggaacatactgacttccagagtcccagtcaaaggaaaatgtgtatgaatccttccatgagccatcatatctatgaaacagaaattgcaaatctccctagggtcaagtttgtatctaaatacattcgaggagtttatttgggaatctctcaaaccacaggtcacatgtcagtgtttcttcagctttcttcaaaaattaagtcagctgagaaggacagttggtttttattatattcttctattccaacaggcttttcattaacaacaagcagcttctgacagggacttttagttatgttctcaaaaaagctagctgttttgaacctcatatttagtttatgcctatactgtaaaaatgagtccaaggcctctaaaattaggaactgacagtattgtctagtcaactagtgcagatatttaggttacaaaaagaaaatattctgtatgtgacttatctttccagactgatatgtggattctcagttgttgacaaattatatattttagaatattagattcaacaatctccttccttatgcttgggtcaacattattcctgtgaatttcctgtttagttcaaattcactgraatataatgccacctacttactcagtggcctgattacttagaggtgaggatcccacc

SEQ ID NO: 6262 - DNA, 693 bp, Homo sapiens
ctactgtgagaactttgagaagctccgtatcctctctgctggttatgattcttgccccttatctgttgcagtgtagaaattaagagtgaaatccttgacatgaaaagggcttgtacacttgtcttcgggagcaggatgaagaaggtgattccttgtgtatggacaggattataggagaagacggagaggagagtgggtgtggtggccaagaggcagagggcaggaaggtggggaggatgtgggcccatcgtggtgcggctctgggcttaagcaggagcccaggccatggcaggacagtrcagtatggacccggctggcttcatgggctccaacagttgcacagggccccctgcttagcaggaccctgtgtttggttttatgctctgctgccacgatcttgaaattctcaataatttttgaacaagggaacctgtgcttttaatttgtagcaggccctgcaaattatgtagcgggatttcataacatctttttttaccctgcagtgcctgttgatggccccctactggtggcatttcagaaggatggaaaaggactgcttctctagtggtgggaagcaaaagcagttcaggatgagaatgcgatttccccaagaagagagtgtggtagttttcgtttctgctatatatatatatatatatatatatatatatatataatttttttttttttttt

SEQ ID NO: 6263 - DNA, 827 bp, Homo sapiens
cagtttgaggaatggagcacagtctggatgaaagaaggagattggtaaaatctgataaggtcatggaaggctttggaacaaggatatagttgaagctaagtgggaagacaagaaggatctagaaagacaagcagaagagaggacttctactatccatcttgatagtaatacaggttatctgtgactcagccaacctcatctgatgcaatatggatatttatgaatcaattgacccaatcygacaccatgctcctcttcttatcctatcccataagtcttctttcagttgctataactaacaatcagagctgtctcttttaaagtcatttgcagcattatttccctggatacaattcccagcccctgacacactttgcaaggctggctccttctcttcaattaagtcttatccaaaataaactttttcagaaaggtcttctctgacaccttaatcttattaagtttccccgtattattcttttacatcatcctctattttcctttgaagcttgtatttcctttgaagcttctgtaacaaattaccacaaacttaataattaaacaatacaaatttatcctctggaggtcagaagtcctaaagtcaggttagctccagggctgcgttcattctggaggctctaggggagaaccttcatccttcccttttctagctcctagagaccacctgcattcctccgtttgtgatctccttccaatttcaaagccagtggcatagcattctccaacctctgtctctgcagccatcatcactttgccttctctgaatttgacccttcagcctctgtttataaggacccttgtgacta

SEQ ID NO: 6264 - DNA, 644 bp, Homo sapiens
agatgaatggctgttgtcctgggggtgtggagacccagtgagagctttgagcggaggtgcagtgtggtctgaccagtatctttgaagaggaggccaggaatgtggattgataagttgaagagagacttaggggagacaggttggagaaagagagggaaaaatgcaggaggcagctgtattctccagagtagaggggaaggctggctggcaggcaggggtggaggggaatggctgggggcttggttgtggtggggagctaaggaggtggtagacgagactagggattgggaaggagggagaagatggcaagatttgggaagggtattgagtrgggagtgggggtggtgaggcattgagtctgatttaaaggtctcagggtgagcgaagtgtctctaaattcctggggaggctgtgcacctagggccttgcctgctttcctactgagtgtccagcagggcctaggcttggacttgggctggctgtggccgcatctgagcacatgggaccaggtctgaactgtgtggggagcgcaggagaggcgggtagaatcagagctctttagaaactcagcgccactcttccactcttgatagcctctctctcgtctccttggcaagactgagggccaggcatcaggacgacct

SEQ ID NO: 6265 - DNA, 644 bp, Homo sapiens
agatgaatggctgttgtcctgggggtgtggagacccagtgagagctttgagcggaggtgcagtgtggtctgaccagtatctttgaagaggaggccaggaatgtggattgataagttgaagagagacttaggggagacaggttggagaaagagagggaaaaatgcaggaggcagctgtattctccagagtagaggggaaggctggctggcaggcaggggtggaggggaatggctgggggcttggttgtggtggggagctaaggaggtggtagacgagactagggattgggaaggagggagaagatggcaagatttgggaagggtattgagtggggagtgggggtggtgaggcattgagtctgatttaaaggtctcagggtgagcgaagtgtctctaaattcctggggaggctgtgcacctagggccttgcctgctttcctactgagtgtccagcagggcctaggcttggacttgggctggctgtggccgcatctgagcacatgggaccaggtctgaacygtgtggggagcgcaggagaggcgggtagaatcagagctctttagaaactcagcgccactcttccactcttgatagcctctctctcgtctccttggcaagactgagggccaggcatcaggacgacct

SEQ ID NO: 6266 - DNA, 644 bp, Homo sapiens
agatgaatggctgttgtcctgggggtgtggagacccagtgagagctttgagcggaggtgcagtgtggtctgaccagtatctttgaagaggaggccaggaatgtggattgataagttgaagagagacttaggggagacaggttggagaaagagagggaaaaatgcaggaggcagctgtattctccagagtagaggggaaggctggctggcaggcaggggtggaggggaatggctgggggcttggttgtggtggggagctaaggaggtggtagacgagactagggattgggaaggagggagaagatggcaagatttgggaagggtattgagtggggagtgggggtggtgaggcattgagtctgatttaaaggtctcagggtgagcgaagtgtctctaaattcctggggaggctgtgcacctagggccttgcctgctttcctactgagtgtccagcagggcctaggcttggacttgggctggctgtggccgcatctgagcacatgggaccaggtctgaactgtgtggggagcgcaggagaggcgggtagaatcagagctctttagaaactcagcgccactcttccactcttgatagcctctctctcgtctccttggcaagamtgagggccaggcatcaggacgacct

SEQ ID NO: 6267 - DNA, 753 bp, Homo sapiens
atgctggtgagggggctgatccctgtccacctcactccatttacagcacccattaactaccatttccatcgttgctgctagtacctccatcaataaccatcattactgtcactaacaccaacaccagcatcaccagtccctcccagtactaccaccaccaccactggcatcaccgttaccaccatgagcactactgtaaccatcmatataaccaccatcaccaccatctgcaccatcacaactggtacatcaccagcaccagcaccactgccaccacctccagcatcaccaaggcaacattagcaccatcagcaatactgccacctgcccaacaactaccatctacactgcctttgccatcttgttgtcttaccccctccccactatccttcttcttctgccacctccacccctctcaagacaaacccattgtgctgtattttctccagctgatggagagctctggagtgactgacggaggctcccacacatccttagagacttgctgactccctgggcctcccaacagacagaccagcctactgatatgactgggggtcacccctgatggcctagactgcaggcaggcagtcatgggttgaaaactgagtggccattgggcagcctgaccaccgaaagctgaccaacacacccctcactggctcaaggaattggctcagcctctacctccagctgttggcttcaccttctccatggccaggaggaggcacacccctttttctggagttggga

SEQ ID NO: 6268 - DNA, 800 bp, Homo sapiens
ccatgcactctytccaggaacatggccctcccagagaggactcacaaatcaaatgtgcatatgcatgcatgcacagacacatatctcacacacacacatgcgcacacacacatacatgcaatacacacattcacacatgcacacacattcacataatcacattcataataccaacatgtaacacatacatgcacatacaacactcaaacacacatgcatatacatacatgttcatgcatatacattctggcacacacaaacatatgtaaatgcatacacataacatgcacacatatacatttataactatatacacaggagcatccacgcatgcatacttgcacatgtgtgcgatgtcatgcctaaacatgtaacacatgcacacacatacatacaacacaaatacacatgcacacatatacacatgcatgcatctgtacagtaccaagacacatacatgcacaacacatatacatgcaatacacactttcatacacataaatgcaaacacacatacatatatacacccctcaaagaccccattattcaattctatacaaaatggtttatcccccaaatgtaacttcttgtaattaataaactctactttactgcacatttcttgatttcaaataatgaggtctcacacacagcacacatacacacattcatactcaaatacatgtgaacatacgaatagaaataggcacacatgcctgaagaccctcttctgtaaaggtattctcaaacttgaattgaacgaattctgctaattatagtcagagtcagcaaagatatat

SEQ ID NO: 6269 - DNA, 792 bp, Homo sapiens
tcctagctgacattggatctatgggattggaatacccagaaaaggagtctaggagtctctgttttgtttgtttgtttgtttttgtttttgagacaaaggctcactttgtcaccctggctggagtgcagtggcctgatcttggctcactgcaacctccgcctcccgggttcaagctattctcctgcctcagcctctcgagtagctgggactttaagcacacgccaccatgcccggctaatttttgtatttttagtagagatagggtttcactatgttggccgggctggtgttcaactcctgacctcatgatctgcccaccttggcctcccaaagtgttgggattacaagcgtgagccaccgcatctggccagagtctccatttttaacaagcatggctgctttgcttgttcccaaagcactgttcttccttggggttcttgcacttgctgttccatctgtctttctctaatagctggatacagggctagcttcatgggcatgtgacctgcgcagtcacasaagaccccatgcttagaagggcctcacacttggtttaatgctctactgtcatctcttgaaatttttaatagtttgtgaacaagggcctcacattttcatatttttttactggccctgggcgaatgatggagctgattctggctgagtgatttgttccctcattgccttcaagtctttgcttaaatatctcattcttaaggccttttctgcacactctatgtcaaattgtagcctttctccctagtcccccagcgctcctccccaacttccctg

SEQ ID NO: 6270 - DNA, 643 bp, Homo sapiens
tggcttttgcagtaatgcaggtgggagaggatagcagctgggaccaaagcagtagagaaggaaggaggtggtgagatgtggctggggtctggatgatttgctgatatgctgtaaatgttctgcttgtttgtttactgtttagtttgaatatctctcccctagagatgggcctgggcatcctggggatgggaaagaagaatctggagtttcaagaagctggctaggcctgacacctgatggacccaagttcttctgctagtgacttaggaaagatcattatgactctttcctrccatcacctttttagccattaatagccattaaaaactggcattcattattttcttaaccaacttctattgagtctggttggtttgaggccttgggctagatgctggggctagaaggtaatacatgttgttctctttttattcatggtgagtttttcagctactgctttctagtagtttctagctacttgagaagccagagaatttgtttcattgatgtttgtatcttctgtggctagcctggagcctggcatgttgtgagttctccgcatacatgtggacttcagccacaggaaagcttgactggtatgaagtagctagccatggagctgagcggaccctggaagtcagga

SEQ ID NO: 6271 - DNA, 593 bp, Homo sapiens
ctttggcatgtgttaacggccaagggagcaggtgttggtgaaaatggatcattcctctcctgccacccttcctgctgcctgcccttcctgccctgcacctcagccaagccaactctcccaggaagaggctacttggagacccagctccttagaagcaaattacagcaaccggcgtggcatgggatggggtggtgtgggcactgactgtcccagaacaacacagggcgtgagccaccatggctgaacttccgccctgacttgacttctgtttgcctttccatcaccctcaatgagagcccagcccccttgccacggcccgctcaggctcctggttctcctctcctctccttctgttcaaccctcctttccctctgctccggcagcatggccttcctgctggtgctgggacatctccagctcaccccaccccagggyctcctttcttgcgggtgtcctggttcactccctcacttcatccaggtctttactcaactatttcatttcccaagaggcccccactactaccctgggcaccttctttctacctgccctgctagtttgtttgtttttttttcatggcgctggatttatgc

SEQ ID NO: 6272 - DNA, 782 bp, Homo sapiens
aaaaaaaaaaaaaaaaaaaaaaagaaatgccacatattgactgtgtattttgtcttagacacgatggtaccctgtttatgaacattatcttaatgattacaccatgaaaagtagacatgactgggcatggtggctcacgtctgtaatcccagcactttgggaggccaaggggggtggatcaccaggtcaggagttggagaccagcctgaccaacatgatgaaaccccatctctactaaaaacacaaaaattagctgggcatggtggtgtgtgcctgtaatcccagctacttgggaggctgaggcaggagaatcgcttgaacccggcaggcgaaggtttcagtgagccgagayagcgccactgcactccaccctgggtgacagagcaagactccatctcaaaaaaaaaaagatactattcccatttttcagataaagaaactgaaactgaaactgagagggtagagggaacttgaaatagccagcaaatggcagagctggggtctagctcttcccaccaccccgagctgcctcaccaggcctgcccacaacacttgcagtctgcatgctggagctctagcctttctgaggtgtgcagggctctggtggagattcaggagtcagaaggaagagcccatcaacccctgagcctctcaggcagccattctgcaagtcccctcagcaagcactgcctttctacctggcctgggaaaccacggccccattgtggaatctgcttttccacggagcctagccccaagtgccacctggggcgagtgcagca

SEQ ID NO: 6273 - DNA, 633 bp, Homo sapiens
tgtttggtatcttattgtagtcacgtgtggtgacagagagactcttagggagaggagaagactttggagtctctgtatttggcttcctcaggtctcctggggagcagtgactccttgtttcttctcagtgtgttcaggtgatcacagctggaggaagatcactaagcagagccgaagcacttaagagtgagggtcacccagctgctaccatcaattggcgatcccaggaaggatgacctggctgccatctcttggctgagatctcggctccagggaggagagctccctggagagtgaatgccaccgccaggcacggtccrcggaccagcactgcagcctcctgggtggtctgcttgtcttcccatgcacaggggacgcaatgagttgtaggctttgttaccaacaggtagaatgaatggcagaaggcctcactgcacgcagcaggtgtgagtgaagccgcgaagactgaaactgcatgtccatgaagtcccacccaaggctaagcaacaaggggttttcttctgctgatgcttcagaacacaggagcctctaggaggcagggaactctttcagccagctgagcacacaggacttgtgagcctcggactggcgtggacctggaaacaccatctg

SEQ ID NO: 6274 - DNA, 633 bp, Homo sapiens
tgtttggtatcttattgtagtcacgtgtggtgacagagagactcttagggagaggagaagactttggagtctctgtatttggcttcctcaggtctcctggggagcagtgactccttgtttcttctcagtgtgttcaggtgatcacagctggaggaagatcactaagcagagccgaagcacttaagagtgagggtcacccagctgctaccatcaattggcgatcccaggaaggatgacctggctgccatctcttggctgagatctcggctccagggaggagagctccctggagagtgaatgccaccgccaggcacggtccayggaccagcactgcagcctcctgggtggtctgcttgtcttcccatgcacaggggacgcaatgagttgtaggctttgttaccaacaggtagaatgaatggcagaaggcctcactgcacgcagcaggtgtgagtgaagccgcgaagactgaaactgcatgtccatgaagtcccacccaaggctaagcaacaaggggttttcttctgctgatgcttcagaacacaggagcctctaggaggcagggaactctttcagccagctgagcacacaggacttgtgagcctcggactggcgtggacctggaaacaccatctg

SEQ ID NO: 6275 - DNA, 633 bp, Homo sapiens
tgtttggtatcttattgtagtcacgtgtggtgacagagagactcttagggagaggagaagactttggagtctctgtatttggcttcctcaggtctcctggggagcagtgactccttgtttcttctcagtgtgttcaggtgatcacagctggaggaagatcactaagcagagccgaagcacttaagagtgagggtcacccagctgctaccatcaattggcgatcccaggaaggatgacctggctgccatctcttggctgagatctcggctccagggaggagagctccctggagagtgaatgccaccgccaggcacggtccacggaccagcactgcagcctcctgggtggtctgcttgtcttcccatgcacaggggacgcaatgagttgtaggctttgttaccaacaggtagaatgaatggcagaaggcctcactgcacgcagcaggtgtgagtgaagccgcgaagactgaaactgcatgtccatgaagtcccacccaaggctaagcaacaaggggttttcttctgctgatgcttcagaacacaggagcctctaggaggcagggractctttcagccagctgagcacacaggacttgtgagcctcggactggcgtggacctggaaacaccatctg

SEQ ID NO: 6276 - DNA, 633 bp, Homo sapiens
tgtttggtatcttattgtagtcacgtgtggtgacagagagactcttagggagaggagaagactttggagtctctgtatttggcttcctcaggtctcctggggagcagtgactccttgtttcttctcagtgtgttcaggtgatcacagctggaggaagatcactaagcagagccgaagcacttaagagtgagggtcacccagctgctaccatcaattggcgatcccaggaaggatgacctggctgccatctcttggctgagatctcggctccagggaggagagctccctggagagtgaatgccaccgccaggcacggtccacggaccagcactgcagcctcctgggtggtctgcttgtcttcccatgcacaggggacgcaatgagttgtaggctttgttaccaacaggtagaatgaatggcagaaggcctcactgcacgcagcaggtgtgagtgaagccgcgaagactgaaactgcatgtccatgaagtcccacccaaggctaagcaacaaggggttttcttctgctgatgcttcagaacacaggagcctctaggaggcagggaactctttcagycagctgagcacacaggacttgtgagcctcggactggcgtggacctggaaacaccatctg

SEQ ID NO: 6277 - DNA, 795 bp, Homo sapiens
gggcgagcattgctgcttccaccgggatgcgggaaaaacagtgcagagagatcctgagcttccgcacgtcatcatttctcagagtcgccatctgttccttcaagcaagtaacacctttggggctgcagtgtggctcagagcaggtgtctggcctcgtgtgagataccccagagcctctgcagcccaggacttgccagtgcgacttctcccgggctccggagaggccgacgggatcgtgacgtcctgaggcctcttccaccgcagagctgttgggatcgacttcacaccccaccaaggtggcctggggtggcccacagctggcccgtggatgggccctgcacctgtggtgtggccactgtcacatggctggtggttggcagctttggtggaagctacagttggcagctgtcatgccagggcttgggctgggcactggggaaacatcgmcatgaaatgcagaagggagggttccccctccctggggagagagtgtggagatgtccctgggactgggctgccagtcagatgcgaattcagacaagccacagtaatttttcatgcaagcatgtgtattatttggctcagctgccaaaacaaatcccacagcatgggtggcttcaacagcaggaatttgttctcccacagtcctggaggctggaagcccaagatcaaggtgtcggctgggctggttccttcggaggcctctttctgggcttgtaggtgctgtcttctccctgtgtcctcacgtggtcgtccctctgtgtgtgtctgtgtcttcatctcccctttttaata

SEQ ID NO: 6278 - DNA, 788 bp, Homo sapiens
tgggtgggagggtttatagttggaaatacagtgggcatgggggctcactgggtaggcaacatttgagtaaggacatcagggaggtgtctatgggaaatgtgggggaacttctggaggaagaacattccaggaagaggccccagtggaagttggcctagtgcatgtaaggagcagtgggagagccatgagcaagggccagttgggcacatggrgcagggggtgacgaggggaggcagcaggccttgggggccattctgggactttgcctttgacacttgtgcatgtgatgggaagctgccaaggtctttaagtggaggagtgacatgatctgcttgaggtttttacttgatccactgactgctgtgcattttgactgagtgggacaggaggctattgtagtaatttaggcaagagacaagctcactttctgattaaagaatgcagtgcatcattgtaattcattgccttaaaaattaatggacagctctttgctggagtgtcctactgaagcccagattatctggtaagaaggtgcagggaggtggagttggatgactttaggttccttctgacatgttggttattattctgtactgcaaaattctctatatgtaaatttaagttttctctaatttgggagctcattataataagcccaatcttagcattttttttcgttactatactatatgctccactatatctgtgctgcatcattgtggcaattgctgtcacatagggctgtcataatctgagagtatacccctctctctcccatgacactgtga

SEQ ID NO: 6279 - DNA, 579 bp, Homo sapiens
atcccctcaattcttgttggccttgcagatactggtgaatcagtggcttaatttttatatttgtttccagatagcattgccctctgtttccctgggcagacttaatgcaagcccattgtctctcagttcaacatcagtgccacatgggaagatgcattaaccttgtaaacacaaacttacctccccttttatgccaggccatgctgttycatcatcttgaactattctggggctgcttcattttagggtatagctgcctgctgtggaggtttcctcccagagttctagatggggagccagtcaagaactcccttgacatttctgctatctagcaatgcccttttctgcctaggctctgaatcactttggtgaggagattaggactcacatctaattgacttctttcttttttctctccacaaaatagcagactgaaagagtaagttttctttttcttgatgtgtgactcttcttactctagtgctccagaacttctggactagctttcatgatggaaaaagtgttctcttcatactaccaagaaacatgatgagctgagattccagccatagttcttta

SEQ ID NO: 6280 - DNA, 579 bp, Homo sapiens
atcccctcaattcttgttggccttgcagatactggtgaatcagtggcttaatttttatatttgtttccagatagcattgccctctgtttccctgggcagacttaatgcaagcccattgtctctcagttcaacatcagtgccacatgggaagatgcattaaccttgtaaacacaaacttacctccccttttatgccaggccatgctgttccatcatcttgaactattctggggctgcttcattttagggtatagctgcctgctgtggaggtttcctcccagagttctagatggggagccagtcaagaactcccttgacatttctgctatctagcaatgcccttttctgcctaggctctgaatcactttggtgaggagattaggactcacatctaattgacttctttcttttttctctccacaaaatagcagactgaaagagtaarttttctttttcttgatgtgtgactcttcttactctagtgctccagaacttctggactagctttcatgatggaaaaagtgttctcttcatactaccaagaaacatgatgagctgagattccagccatagttcttta

SEQ ID NO: 6281 - DNA, 683 bp, Homo sapiens
ctgccctgctgcctgcccgtgtgtctgccaggtgtcagacctatctgccctaggtattgtcagtctgcttggggctcgctgactctcccgctgtctctctttgctgcctacctstgtctgtggttgggttccaatctctgtctccacttgataagtgcctgacttcaccttttgggtacatgtcacatgttaggtgcctgttgttcatgtccccttctgtctctgcctgttgggtttatgtcttcatctgtctctgcctgttggatacctgtccccttctgtctttgcctgttgggtttgtgtcaccatctgtctctgccttttggatacatgtccccttctgtcattgcctgttggttttttttttgaaacggagtctcactttgtcgcccaggctggagtgcggtggtgcgatcttggctcactgcagcctccccctcccaggttcaagccattctcctgcctcagcttcccaagtatctgggattacaggtgcccaccaccacgcccagctaattttttgtatttttagtagagacggggtttcaccgtgttagccaggatggtctcgatctcctaacctcgtgatccacctgcctcggcctcccaaagtgctgggattacaggcgtgagccaccacgcccagcctgcctgttgggtttatgtccccttctgtcattgcc

SEQ ID NO: 6282 - DNA, 732 bp, Homo sapiens
tttctaacaaccctggtgtggcagtggcactggtccagagacgcccatggagcagtaaggttctgacacatctccttgcctgtagcattgcccacctctgtgtgcacacacacacacacgcatgcacacacacacctgtgcacacacatacacacacacggcatcccaagggcccttctggtgtgcacactgggtcaccgccctctccgcctcagagcccctggtgtctactcaacacatgccctgctctctccgaaagcgcctctgctgttgccctgctcagagtgtccttccctccttccctctgtagggctgactcctctgtgtccctgaggcctcccctgattcacctctttgagcctgcactgggcyccacccccaggatggtcaggcgccccccacccggtgtccatcatgccatccatcacattgtactgcaggggctgtattacgggtctttcaccccagagagacactaagctccgtagggcaggcgcccagccctgcaatgccgcctggagcagagaggtcctcgccgcgctgttcactgcggaatgcgcacagaggttccggccgcggtgttcactgtggaataagtggagaggtcctggccgttcttgtcactgcggaatgagcagagagaatcctcgcagggcatctcctgtcctcaccttcacccttcctttggcctgagatccaaaggcagactggggccagattcagtctttccct

SEQ ID NO: 6283 - DNA, 732 bp, Homo sapiens
tttctaacaaccctggtgtggcagtggcactggtccagagacgcccatggagcagtaaggttctgacacatctccttgcctgtagcattgcccacctctgtgtgcacacacacacacacgcatgcacacacacacctgtgcacacacatacacacacacggcatcccaagggcccttctggtgtgcacactgggtcaccgccctctccgcctcagagcccctggtgtctactcaacacatgccctgctctctccgaaagcgcctctgctgttgccctgctcagagtgtccttccctccttccctctgtagggctgactcctctgtgtccctgaggcctcccctgattcacctctttgagcctgcactgggccccacccccaggatggtcaggcgccccccacccsgtgtccatcatgccatccatcacattgtactgcaggggctgtattacgggtctttcaccccagagagacactaagctccgtagggcaggcgcccagccctgcaatgccgcctggagcagagaggtcctcgccgcgctgttcactgcggaatgcgcacagaggttccggccgcggtgttcactgtggaataagtggagaggtcctggccgttcttgtcactgcggaatgagcagagagaatcctcgcagggcatctcctgtcctcaccttcacccttcctttggcctgagatccaaaggcagactggggccagattcagtctttccct

SEQ ID NO: 6284 - DNA, 1495 bp, Homo sapiens
agaaaagtattttaacacttggagctctttagacacaagaattacgttgctatttaaatttcaaacacgttttttgttgtggggaatgtaatctggcaattagtaaatacttccaagcattgagtactcactccatggagaaacgggatgcagtgaactgtgaattggagtagaaaggatgctgtggttttccctctgtacatttaagtgtggatggggagaagggagtggctgtggtctcgggtggatggggtgaggggagtggctgtggtctcgggtggatggtgagaggggagtggctgtggtctcgggtggatggtgagaggggagtggctgtggtctcgggtggatggggagaggggagtggctgtggtctcgggtggatggggagaggggagtggctgtggtctcgggtggatggggagaagggagtggctgtggtctcgggtggatggggagaggggagtggctgtggtctcgggtggatggggagaagggagtggctgtggtctcgggcggatggggagaggggagtggctgtggtctcgggcggatggggagaggggagtggctgtggtctcgggcggatggggagaggggagtggctgtggtctagggcggatggggagaagagagtggctgtggtctcgggtggatggggagaggggagtggctgtggtcttgggtggatggtgagaagggagtcgctgtggtctcagacggatggggagaggggagtggctgtggtctcgggcggatggggagaagagagtggctgtggtctctggtggatggtgagaggggagtggctgtggtctcgggcggatggtgagaggggagtggctgtggtctcgggcggatggtgagaggggagtggctgtggtctcgggcggatggtgagaggggagtggctgtggtctctggtggatggggagaggggagtggctgtggtctcgggcggatggggagaggggagtggctgtggtctcgggctgatgtggagaggggagtggctgtggtctcgggtggatggggagaggggagtggctgtggtctcgggtggatggggagaagggagtggctgtggtctcgggtggatggggagaagggagtggctgtggtctcgggcggatggtgagaggggagtggctgtggtctcgggtggatggggagaggggagtggctgtggtctcggcgttactggagacactgaggatggggcagtttctaaaatatcaatgttcataatacatggggaattacatttctgcaaccatgtccttatattttaaatgaaagtacttgatgtgaacaagtgaggagataagagtgagggggtggcgagttcgtggaaatggtttaaagcccaccagcatggaggtggtgggggtgcctccaagcayaggtggcaaatcccgcaagacaggagcagcagttaagggggccgtgggtgaagttggggggcggctgattacggaggagcttgtggtgggtg

SEQ ID NO: 6285 - DNA, 1495 bp, Homo sapiens
agaaaagtattttaacacttggagctctttagacacaagaattacgttgctatttaaatttcaaacacgttttttgttgtggggaatgtaatctggcaattagtaaatacttccaagcattgagtactcactccatggagaaacgggatgcagtgaactgtgaattggagtagaaaggatgctgtggttttccctctgtacatttaagtgtggatggggagaagggagtggctgtggtctcgggtggatggggtgaggggagtggctgtggtctcgggtggatggtgagaggggagtggctgtggtctcgggtggatggtgagaggggagtggctgtggtctcgggtggatggggagaggggagtggctgtggtctcgggtggatggggagaggggagtggctgtggtctcgggtggatggggagaagggagtggctgtggtctcgggtggatggggagaggggagtggctgtggtctcgggtggatggggagaagggagtggctgtggtctcgggcggatggggagaggggagtggctgtggtctcgggcggatggggagaggggagtggctgtggtctcgggcggatggggagaggggagtggctgtggtctagggcggatggggagaagagagtggctgtggtctcgggtggatggggagaggggagtggctgtggtcttgggtggatggtgagaagggagtcgctgtggtctcagacggatggggagaggggagtggctgtggtctcgggcggatggggagaagagagtggctgtggtctctggtggatggtgagaggggagtggctgtggtctcgggcggatggtgagaggggagtggctgtggtctcgggcggatggtgagaggggagtggctgtggtctcgggcggatggtgagaggggagtggctgtggtctctggtggatggggagaggggagtggctgtggtctcgggcggatggggagaggggagtggctgtggtctcgggctgatgtggagaggggagtggctgtggtctcgggtggatggggagaggggagtggctgtggtctcgggtggatggggagaagggagtggctgtggtctcgggtggatggggagaagggagtggctgtggtctcgggcggatggtgagaggggagtggctgtggtctcgggtggatggggagaggggagtggctgtggtctcggcgttactggagacactgaggatggggcagtttctaaaatatcaatgttcataatacatggggaattacatttctgcaaccatgtccttatattttaaatgaaagtacttgatgtgaacaagtgaggagataagagtgagggggtggcgagttcgtggaaatggtttaaagcccaccagcatggaggtggtgggggtgcctccaagcacaggtggcaaatcccgcaagacaggagcagcagttaagggggccgtgggtgaagttggggggcggctgattrcggaggagcttgtggtgggtg

SEQ ID NO: 6286 - DNA, 744 bp, Homo sapiens
caaagcttttgccacttaatattggttgccattctccaagctggcttttccagactgaggtcatctcttctgtttctataaaacttttaaaatacagttattatggaaatttaaaactattatgctatatcataactttgaggtttatgtatctatctctccctgcactagactggctttcttgagtgctggaaatatgattgattccttattccctcacataaaggcaggcatctgcctccctgactgaggtagggtcactgcacaagtagyattgttttcctcaatgttgaaacttttggtctgcagcactgtcctgaaacttaagaaaactatgttgaatgagccaaagaaggctgatattcagggaacagtaaattttaaggaaaagcagttttgcctgtagggaaccatgtcttatggtgggcttttctcttgagggtattctgaaagggaggcaattactaaatccttggctatgatcttcaaagggcttctgccctgtggaaaccaagaggctttcttagagaccatcagcccttgccatacacaatccaatgctcatgtcctccatttgacagccgcttgctaaattcctccgtcacctcagtaacctatgtcttagagtgatatagaatccgccaaatctatatatcaaacagagattaccatgagagtaacaatgtaattgaaggcacttcttaaattatgaagtgctttgttatgttatgactactgttatta

SEQ ID NO: 6287 - DNA, 504 bp, Homo sapiens
tgtattctggaatagactcyttttgacaatattattcattatggttacttctaattacttcatacatgctggaaattaagactgaaatcacacccaggagctgttgtagagtttttctatactctgagctcccctcagaactggccacattctgggtcatctgattcagaggaatgccaagtttacaagagtggtatattctatcttcagaatgcaaaaaagtccattgaatactgtgtctatttttaatttggagggttggaaactgcaacaattcttccttaattttagagaatatgtctaccatgctttcagtcaatgggctgctaaacagtttatctgtatagcataaccaaaatgtctgtggggttcatttcacactttcagcatgcacatgtcttactagggtaaccaggtcacctgctacttcctcctcatgtggttcatttagcataatgtgattaataaaattgaaccatcatgatgtctatgaaatatcaagaa

SEQ ID NO: 6288 - DNA, 504 bp, Homo sapiens
tgtattctggaatagactctttttgacaatattattcattatggttacttctaattacttcatacatgctggaaattaagactgaaatcacacccaggagctgttgtagagtttttctatactctgagctcccctcagaactggccacattctgggtcatctgattcagaggaatgccaagtttacaagagtggtatattctatcttcagaatgcaaaaaagtccattgaatactgtgtctatttttaatttggagggttggaaactgcarcaattcttccttaattttagagaatatgtctaccatgctttcagtcaatgggctgctaaacagtttatctgtatagcataaccaaaatgtctgtggggttcatttcacactttcagcatgcacatgtcttactagggtaaccaggtcacctgctacttcctcctcatgtggttcatttagcataatgtgattaataaaattgaaccatcatgatgtctatgaaatatcaagaa

SEQ ID NO: 6289 - DNA, 784 bp, Homo sapiens
aattcttcttgacactcggaaataaaaagaatgagtgtcactactgaaaagttggtatgctttgttttatcacataataagtgacaacatcagatagcaatctatggatcttctctttttgccatgaaaagtacagagctaagatctagatcctgtgtgaagaaccatcttcagcataggttatctggtaaaattatttctgtcttcttcattatttactcattctcttgcaattccaaaaataaacacagtcattgcaaataacttttgagaaagaggtagtctttacataatcaataaaagttttgaatattgaaaacrtcaaagtatttgcagtcatcaataacttgcacgattacggaaatttcaactccatacgtgtgtgtgtgtgtgtgtgtatatatatttacttatcttacataaatttacttccttaggtattgttaacaataaaataagtattattttgacttaaagttttagaactcatttcaataacaatgagaaatacattattgttcagagaagtctgctgacctgagttattgctggcacccctttatatcttttcagagtaaaacactgtgagatggggtcagcggttttttccaatgttgtttcttctggaacaagttttggtggtagcatcttatcccaaggaacatcttcataagctctatgaagttattaaataggaacatcttatgaaaagcatattcaattggtaaagtttataacaatatgatactatgataagagaatccgaagatgaccctgaggatcc

SEQ ID NO: 6290 - DNA, 716 bp, Homo sapiens
aatctgatggcgaagggtttttggcagggcagyggctggatctgaccctccagtgggggaaacaaatggtagcttgtggactggtggtgtgaggagtggtgaaggcagctgcagggtccactgagagacctgtggccatggggaagtgggtgaatttgggatattttagagtctagtgaaatgaacactctagaagtgacttcagcaaccctcttctttcaatggaggtggaagatgagaaaggggtgggggctggccgaggtctcccaggaggtagtggccagaaaggaattggagtcaagtctcctcaacccagaccagcatctgggctgggtgcctgattccccgtcacggcgctggagcgtgaggagcagggctgagtcaggggctgagaagtcctatgcatagggcataggtcagtcaggtccccaaggtcaggagaaggcagaagggacatcagataactgcccttagggcagggggagaagacctctcaactcatactgcagagagaggcaagggcaggtcatggtggaaatggggaggtgggcaaggtgacctttggtgaccccaccactggcatcagaccctgccagtagggcctgcctgggagccagcctgcagctgggggcgggagaagggaagggagaccacggttgcagatgcctgggatggctgcttaccatatattccagatgccacgcagctactttggc

SEQ ID NO: 6291 - DNA, 716 bp, Homo sapiens
aatctgatggcgaagggtttttggcagggcagcggctggatctgaccctccagtgggggaaacaaatggtagcttgtggactggtggtgtgaggagtggtgaaggcagctgcagggtccactgagagacctgtggccatggggaagtgggtgaatttgggatattttagagtctagtgaartgaacactctagaagtgacttcagcaaccctcttctttcaatggaggtggaagatgagaaaggggtgggggctggccgaggtctcccaggaggtagtggccagaaaggaattggagtcaagtctcctcaacccagaccagcatctgggctgggtgcctgattccccgtcacggcgctggagcgtgaggagcagggctgagtcaggggctgagaagtcctatgcatagggcataggtcagtcaggtccccaaggtcaggagaaggcagaagggacatcagataactgcccttagggcagggggagaagacctctcaactcatactgcagagagaggcaagggcaggtcatggtggaaatggggaggtgggcaaggtgacctttggtgaccccaccactggcatcagaccctgccagtagggcctgcctgggagccagcctgcagctgggggcgggagaagggaagggagaccacggttgcagatgcctgggatggctgcttaccatatattccagatgccacgcagctactttggc

SEQ ID NO: 6292 - DNA, 716 bp, Homo sapiens
aatctgatggcgaagggtttttggcagggcagcggctggatctgaccctccagtgggggaaacaaatggtagcttgtggactggtggtgtgaggagtggtgaaggcagctgcagggtccactgagagacctgtggccatggggaagtgggtgaatttgggatattttagagtctagtgaaatgaacactctagaagtgacttcagcaaccctcttctttcaatggaggtggaagatgagaaaggggtgggggctggccgaggtctcccaggaggtagtggccagaaaggaattggagtcaagtctcctcaacccagaccagcatctgggctgggtgcctgattcccygtcacggcgctggagcgtgaggagcagggctgagtcaggggctgagaagtcctatgcatagggcataggtcagtcaggtccccaaggtcaggagaaggcagaagggacatcagataactgcccttagggcagggggagaagacctctcaactcatactgcagagagaggcaagggcaggtcatggtggaaatggggaggtgggcaaggtgacctttggtgaccccaccactggcatcagaccctgccagtagggcctgcctgggagccagcctgcagctgggggcgggagaagggaagggagaccacggttgcagatgcctgggatggctgcttaccatatattccagatgccacgcagctactttggc

SEQ ID NO: 6293 - DNA, 745 bp, Homo sapiens
tttttatagcagcactatttgtaatagctaaaaattgacaacccaaatgtccattattagtagaatgaatggatctactatgagatattccccaaatcaaatactatacaacaatgatgctgagcagttcattacatgcaacattatggataaatctgaccaacactatgtggcacaaaagaagacacacataaaagaatatatactgtatgattacctttatataaagtttgaagatatgcaaagttaacctatgtgattagacatcagcattatggtttttcttgtgggagagtagtgaccgagaaaagagtacatggaagtttctgaggtgctggtaatgttccgttttggatctgggtgctggttacatgattgtgttcagttgtgaaaatgtatcaagctctatcctaatgatatgtgcatatttgaatatatgtgaaaagtatatacttcaataaaaagtataaaaagtttatagtttccttaaaaagtataaataagataaagagtgctgttgtagttatagtttmttaaaaacttcatgcttgggctgggcatggtggttcacgcctgtattcccagcactttgggaggctgaggctggaggatcgcttgagcccaggagttcgagaactgcttgtgcaagatggtgaaaccctgtctcaacaaaaaatacaaaaatcagccaggcatggtgtctcatgcctgtagtcccagctacttgggaggctgaggttggggg

SEQ ID NO: 6294 - DNA, 508 bp, Homo sapiens
cgggaggcagctgtcaagttaggaaatgagattccttggaggcgggcaggtgacacaaagtaagtgcctaccagttacagaacactcagcactttacaggcacgccttgtttagtccttgcacatcacacgtgcaagccatttgctaatattttaccatctagagactaaaggctcggccccattgagcaatctcacaggttrgagagagcatctgggtttggatacaggtgtttcggattccagagaccacgtgtgttattaactactctgctgctttctagatagtctttcattaaaatcataaaagatggaaaactaaataaaatacagctgtgttttgctcattcaccctttccttttttcagccatctttcagtgaggacccgccaggtgtgaagcactaaattgttggggtttgtgagagctcatcacactcacttttacccccggccagtttggaactgagaaaaagctgctggagtcagatggataaagatggaagatcc

SEQ ID NO: 6295 - DNA, 1614 bp, Homo sapiens
cttaatttttctgttcctagagatttatttcattgtattatatttgacagcagtcaacaaacagcaaataggcagccaagtgcagttctcttagccgtaatggtttgtattctctgcacaaggcagagttttttttttttttttaccgcatacatcatttggaacttgatacattgatcccaaaaagtaatatacattacttttgttctcctgacataaaccagcaaaacaaatccagtggacggagtggggtggggccagacataagggtgtgactccctttgggaggggattgctgtgagtttagcacgtgtgtggggactacccgagaatgtcagggctggtgaggcgcaagcatgtgattaggtgagggcgttgtgtgagtgttcaactgtgcagtgtgatggggttcaggattgcttgtctgtgggtctagtgggaagcaaagtgatgttaacttttctagtagatatgagaatatgcagcctgggaagtctttgtgttcgggtgcatccaagcaccctgaatctgttaaagcttacatcaatgtcgaacaagtgttctggctttaagggagtggtcataatttgggcaacccttatgccccaagattgtcagcctggaagtcacatgggggccacatctccattcatattttaattcctcctgttccatgctctgggattccagtccctaccttagaactcctttggttatctcagcaagttcctagggtgctagtatttctcatgggtttctgcacccacaagtccttactgctgtcgttgcttggatccatgtggatgatgtcttctctgcacattgactcctctggcatctcagagactactcaccttccacagctaatgctgggctggccaccaggaagggaatgggtcctttcactaatgacctccaatgcagctgaaaccaggctgcaacttctggcaagacttgactgaggggatgacagcatcaggaaatgaagtcacagcatggcaagtagatgcggctgtctccatagcccacaggctcaggcccattctgccctaagaggctggttggtgcagcctgccaactycctgccagtgtgtctccctgtgccaggaactggcttcttttgtcctgacagtggcaaatccacatgcatgactccatttttttggagtccaggttcagtttgcaaagaggccagagaagaaaactgttcttgggctaaggccagttgctgcttcttgacgccctctcttatgacggttgacagtgggtgagtccagttccttcaaaggaaagtcttcctcctcccacctccagcttccttgaattatggccacagaggatcaatggcatgagagtgacagagactacttgggagactgcattgtttgatctgtccccccgacaataataacacataacacgctagtcttcgtcctgcctggtcagggaggaaagctttgaccatctgctccctgcaattggagtgcccccagctatgatccaccagcaatcgcttatccctgccactcagccatttatcagtactgtcctgtctaaatcccaaaatacaaaagctgtactccccctagaggaacaaaaccttctgagattcgg

SEQ ID NO: 6296 - DNA, 837 bp, Homo sapiens
gaaagcagatggagtcttcttcataggcattttcaaatgtcttcctattctgagagagaaaacttatggaactattgagggaacagttattccaatgctttttttgttcccagggaaaactgaaacaaaccttgtaagtcttatcctgggaaccatgtgatgtgtcaattggcttaggcaggaatttaactttcagatggtatagagcagccacagtttggctggtactgtgcctggcctttgaggctacagagataaccgggaagggtcccagcccacagggtacgagtgccaaggagagcacgggtgaggtaggaggtgggatttgactttggaggcagggctcaggcactggaccaaattgatgactaagggctggggcagaagcagctttccataagacacacccactaatgtgccatgtcagtttaccattgccatggcaacacctggaagtttccacccttttccacagcaatgacccaatgacctagaagttacctccattttcctagaaatttctgcataggycaccccttaatttgcacgtaattaaaagtaggtataaatatgagtgcagaactgcctctgagctgctgctctgggcacactgcctgtggggtagccctgcttcacatggagaagtacctctgctgctgctgtatactgcagcttcaataaaagttgctaagaccacctgctagcccttgaattcttttctaggtgaagccaagaaccctcctgggctaagctccagtgtggaggcttgcctgccttcattacaagcttatcctcagagaccccacagtgagtggcccctgacaaatgccagaacca

SEQ ID NO: 6297 - DNA, 821 bp, Homo sapiens
catgtctacgtcacccactggcttcccagtctcccaggcaaatcagccccatcagcatggcctccaagaccctctgctccagcttctatgccaacctcattgcagcaaacaccccttcccaatcacctacattccagccattcaaagctgcttgtttccccatgagtctgccgtgcactctgaagctctctgcctttgcctatgttcccagtgcttaggatgccagcgtgaccccttatccaccgcaaaaactcactgaaattctaagttaagttcaaatgcagccacctctaggaagcttttcttccyctctattctctccctccactggcccacttcactctcccattgaattatgtcctcccgccctccaggctgtgatgtactctgcaaatccctccagagtggttcttggcatgctgtgttgtgattgtgacagtgtagtgttcatagcatgaagtttgaagtcagatagacctgggttgggattctagattccccacctgtcacctgtgtgactttgggcaggttattgtactcttgcagagttagtttcctgtctttgaactgagaaataatggaaactcctctcaaggttgtgaagatccaataaggtcatgcatgacagtacagatgtggtacctggaatatggaagctgtcaacacacgggagctgctgtccttatttctgtcattggttgcctctgtgcctgcctcccttctggaccaggagacactgaaaagtgattcatttctgtaatgtaaatgcccatgacagggcgtggcccagagagttggtgcttagaaaacattccagattg

SEQ ID NO: 6298 - DNA, 529 bp, Homo sapiens
aaatattattaatggtaatttctaataggatgatctcagtgggaacttggagccagtttgcccccggctatggctgcttaagtgacctggtaagatctgtctsattgccagacatttgtcaaagaactgacccttgcagagaactgaccccccagagggtgggcaaagttattgcctagcctgaagtaattagagggcagtgaggcttttaagtagatgggacagccagatatctactacttcatctgccccagaccagctgcctggtagttaagtctggattctagcaagagaatgcaggtgctctagtgaaaaaaaggagatggagctatcacagccaatgatggaccttggggcccaggcagctctaggtaggctccccttcccatgcaaagaggagacagagccattcttctactccactttgccatgcgttcctgcacctcttgacccagagcatgtttgggatgcctttagagagccagcagcctgacctggccagtgaggaaggcgctgctccagagcagag

SEQ ID NO: 6299 - DNA, 726 bp, Homo sapiens
atgtggctcctttaggaggaagaaaagccctgccttgtcagtaagacattggaacaatatttcccagggccaactggaatgctgtttggccattgtcatggagaaacagatacaggtcacaactatattacccagacaagtctctgtgcctccacccaggaaaggggcacttcctgtaccccacataggcgctgtgggctttgcaagacaccattgtgaatgtttagttggtggtgctgggttactccacaggggccaagtcaattcccaggtgttaaaaaaatcatgacgcttgttaaagaatagtaaggcagacttgattcagcgggactcttgcgagagatgtagggaccactgcagcggggtgttctagggtgggagagagattgggctcaactccaactgcagcaagaacaagtggggattcatacccaaggaatggtgtggaggggtcaatraatggaaaagcactaagaggaaatgtcagaggtaaggggggattctggtaagctgacttagcaggattcttgctaaaaatggacaatgtagagacaacatggaaatccaaatcagggcctaggtgaggagagagttcaaaggagcctgattagagtttggttgagaagatctttgtcagcactgagcagggaaggactgtgcagaggttaggacctacctccacccctttgcattagctatgatcctcctgaaatgggggttctgcca

SEQ ID NO: 6300 - DNA, 761 bp, Homo sapiens
ctgcaccaatctcctccaccctttttgactcccaaatgcttcttgacacctgactcccaccctgtcactcagagactaacctatgtcaagatttacaaactccccgggtgcggtggctcacgcctgtaatcccagcactttgggagcccgaggcgggcggatcacctgaggtcaggagttcgagacgagcctggccaacatagggaaacccccatctctactaaaaatacaaaaagtagctgggcgttgtggcaggcgcctgcaatcccagctattttgggaggctgaggcgacagaatcgcttgaacctgagagtcagaggttgcagtgagccgagatcgcgccattgcactccagcctggacaaygagagagaaactctgtctcaaaaaagaagaagaaaaaaaaaaaaactaaacaaacaaaaaacaaacccccaaaaacaaagatttacaatcttaccaaacaggaatggtaactacaggaagtagttactatctgaggttattggtaatgttattgctattgttaatgtcacttttttttcccactcccattttctctggaagccgtttgggaggtcctgcctctcaccttctctatccacttcttactcctaccagaggttgtagacaaagatgagggttgatgcattgtgcaactctgtggctccccctagtgatatgatacatttggggtgatggggtttgcctagacagggccccaaggatgctggtagggagcaggtagggaaccccacct

SEQ ID NO: 6301 - DNA, 966 bp, Homo sapiens
agtaaatgggctggccctaaggggtgaaagtgcagattcctccctcaacccctgaggagtctgactggcacttctgatatttggggctcaggaagttaaaaaccatagaaaatattaattccccattcataatataattggcatgtactaktcccatatgtgcaaattaactcttcgctgtgaacatatgcaacttggcattccacactcaaccggcataggggcagactaggagtcccatggagctgatgttcccaggagcacccctcagcctatgctggtggataatacctggtgtgggggtgagtgagaaagatcccagtagaatagcctttctcctccccactccttcctccacccatgaagactattctttattcaagagagacatgaaattggggcagaagtgtgctgagaaatatttaacaactggatttccaaaaaatacatattcataataaattttactgatataaagtatttgtagcacactgttgagcactcaatttgtcgctgttcggggtgccactatgtaactctcatggacctagggtaactgaacaaagggaggtgaacgtaggaataaaagacaagagacaaaagagcatgtttggaagaaggggtcagggggcaccttgcctctagtggacaagggccctgaactttacacagccctctgtatttattaggcaaaagagatagcgagaagtggggtggaagaagaggtcagctgcttggtccagagtaggcttgcaagactgcattctctagatgtcccagtagataacttcaaggagctcggcgccaggaagcaatggccctcagcaaaccttctggcagtgggagtaattgtgagtttgcccacatcctgcattcatgataaacagtttgctgtttgatcatatagcctccagtggaatgctgagttggtcacgtcccacgggccttcatctccctgcagcacgt

SEQ ID NO: 6302 - DNA, 648 bp, Homo sapiens
attctagattgaaagcaacttgaaatgagacagtagagtgtaatgcgtgtttagtttgtgcttgaataaaagacgaaaactacgtaagacattgggacaactggagaaattagcatatgggctggggattgggtacaggcttcaatgtcgttacttgggtgagttgaagaatgtacgtgttcttaggggacatctgcttaaggatatacaaggttcaggggggaaaaatatctccaaacgatatacttttatatctatgtgtgtacatgtgtgcgcgtagagaaagaaaaaagtacatacgctgtatatttcaaagaacatataaaaccatggatgtcaatatacttcccttccrgtgcgctgcctgcgcagaaccgagaggttctgacgatccgcagctcccacgctccccttccggccccgcagcgctgtgaactccatttcccagaaggccttgtatcccgtgcatggccgtttccaggcaggaaggcgaagggccttctgggaggtgaggtcctgggcggccgctggccaccaggcggaagtgcgtaccggaagtgccggcggcagtgtgtaagacgctcacgggcgcgcggactatcgggcggctaggctctctgaggaggctgccacagtggtgagtggtgt

SEQ ID NO: 6303 - DNA, 597 bp, Homo sapiens
tagttctaagagaacaatatggtggaccagaaccctggtttattttccggttctagatcctggagcaagatacctgtggcttctcttcccctgaggtagaccagagaagatrttgaagccatggaggggcaacaaacatcttggaaaaggcacagccttaagtcagagttggtgtgaagacagcttcacccctggagagtgtgaccttgggttgctcaaatcactacttggagtccccatttttcttcatctataaaatagaggtcattggccgggcacagtggctcatgcctgtaatcccagtaccgtgggaggccgaggcaggtggatcacctgaggtcaggagttcaagaccaggctggccaacatggtgaaaccctgtctctactaaaaatacaaaaattagctggatgtggtggcgggtgactgtaatcccaattactcaggaggctgaggtgggagaattgctgaacctgggaggcggaggctacagtgagctgagatcacaccactgcactccagcctggtcaagacagactgagactccgtctagaaaaaaaaaaatggaggtataacagctatccctcagggcatatt

SEQ ID NO: 6304 - DNA, 806 bp, Homo sapiens
ggcctggggagaggcaagacttcaaagggcgtctggaaccggaatgcggttccgtgttactgccgggatggggaaggagtaaagaatgattccgagggagctctgagcgtcctctgggtgctggcagtctggcgggggtcacaggagaaattgcggcgatgtgtgcggtgggagagactgacagcggcctctgcggggtgggggtgcggggtgagcctgatgcattggagaactgagcaggctgctacgcctggctgtgggtgcgggtgccgaaagcgtggacaccaggggattctgttggraataagctggctcacatgatggggatctcgatgttctgggaggggaaatgagccaggtgggagcggggtcgtgatggagagtggtggagagcccagagagtgggggaggaagggatggagtcagcgctgggtggtacaaagaagacccctcaggacccgagatgggatggatcaggggtgggatggggaaggagcctggggagatggtccaggcaggaggggagtagggaaaggactgaggtgagaggtaggtgtggtgattggaggcaggagcaccttggagccatctgggtgggacagtgttgagaactggggaccctgggctggctcgtagctgtcaacgcgaggcatctacctgctggaatggagagggagaagggggacgggaggcattcggcttcctgtcttagggccttgactgcctgctgctacctgatggagcagcagtcccccacctgccccttatcggaaaaagcagcgttagcccggacacaggcacacgga

SEQ ID NO: 6305 - DNA, 782 bp, Homo sapiens
agccgtgtgtggtggcacacacctgtagtcccagctactcggggtgctgaagcaggagaattgcttgagcccaggaggcagaggttgcaatgagctgagattgcgccattgcactccagcctgggcaacaagagcaagactctgtctaaaaaaaataaataaataagtaaacaaacaaacaaacaaacaaacaaaaaacaacaacaaaactttggccagatgtggtggttcatgcctgtaatcccagcactttgggaggctgaggctgatggatcacttgaggtcaggagttggagaccagaatggccaacatggtgaaactccgtctctagtaaaaatacaaaaattagctgggtgtggtggtgtgcacctgtagtcccagctactcaggaggctgaggcargagattcacttgatctcaggaggcagaggctgcactccagcctgaacgacagagtgagactccgtctcccccccgccaaaaaaaaattaaattaaataaaaaaatcagccaagcatcctagtgtgtgcctgtagtcccagttactcaggaagctgaagtgggaggatcgcttaagctcaggagttcaaggctgcagtgagccatgattgcaccactgcaccccagactgcagaacagagcaacaccttatcaaaaaagaaaaagaaaaagagagagagagagaaggaaggaaggagggagggagggagggagggagggagggaggaagaaagggagggaggaagagagacaagggccctaatgaagagaaaaatgaagg

SEQ ID NO: 6306 - DNA, 782 bp, Homo sapiens
agccgtgtgtggtggcacacacctgtagtcccagctactcggggtgctgaagcaggagaattgcttgagcccaggaggcagaggttgcaatgagctgagattgcgccattgcactccagcctgggcaacaagagcaagactctgtctaaaaaaaataaataaataagtaaacaaacaaacaaacaaacaaacaaaaaacaacaacaaaactttggccagatgtggtggttcatgcctgtaatcccagcactttgggaggctgaggctgatggatcacttgaggtcaggagttggagaccagaatggccaacatggtgaaactccgtctctagtaaaaatacaaaaattagctgggtgtggtggtgtgcacctgtagtcccagctactcaggaggctgaggcaagagattcacttgatctcaggaggcagaggctgcactccagcctgaacgacagagtgagactccgtctcccccccgccaaaaaaaaattaaattaaataaaaaaatcagccaagcatcctagtgtgtgcctgtagtcccagttactcaggaagctgaagtgggaggatcgcttaagctcaggagttcaaggctgcagtgagccatgattgcaccactgcaccccagactgcagaacagagcaacaccttatcaaaaaagaaaaagaaaaagagagagagagagaaggaaggaaggagggagggagggagggagggaggragggaggaagaaagggagggaggaagagagacaagggccctaatgaagagaaaaatgaagg

SEQ ID NO: 6307 - DNA, 782 bp, Homo sapiens
agccgtgtgtggtggcacacacctgtagtcccagctactcggggtgctgaagcaggagaattgcttgagcccaggaggcagaggttgcaatgagctgagattgcgccattgcactccagcctgggcaacaagagcaagactctgtctaaaaaaaataaataaataagtaaacaaacaaacaaacaaacaaacaaaaaacaacaacaaaactttggccagatgtggtggttcatgcctgtaatcccagcactttgggaggctgaggctgatggatcacttgaggtcaggagttggagaccagaatggccaacatggtgaaactccgtctctagtaaaaatacaaaaattagctgggtgtggtggtgtgcacctgtagtcccagctactcaggaggctgaggcaagagattcacttgatctcaggaggcagaggctgcactccagcctgaacgacagagtgagactccgtctcccccccgccaaaaaaaaattaaattaaataaaaaaatcagccaagcatcctagtgtgtgcctgtagtcccagttactcaggaagctgaagtgggaggatcgcttaagctcaggagttcaaggctgcagtgagccatgattgcaccactgcaccccagactgcagaacagagcaacaccttatcaaaaaagaaaaagaaaaagagagagagagagaaggaaggaaggagggagggagggagggagggagggrgggaggaagaaagggagggaggaagagagacaagggccctaatgaagagaaaaatgaagg

SEQ ID NO: 6308 - DNA, 782 bp, Homo sapiens
agccgtgtgtggtggcacacacctgtagtcccagctactcggggtgctgaagcaggagaattgcttgagcccaggaggcagaggttgcaatgagctgagattgcgccattgcactccagcctgggcaacaagagcaagactctgtctaaaaaaaataaataaataagtaaacaaacaaacaaacaaacaaacaaaaaacaacaacaaaactttggccagatgtggtggttcatgcctgtaatcccagcactttgggaggctgaggctgatggatcacttgaggtcaggagttggagaccagaatggccaacatggtgaaactccgtctctagtaaaaatacaaaaattagctgggtgtggtggtgtgcacctgtagtcccagctactcaggaggctgaggcaagagattcacttgatctcaggaggcagaggctgcactccagcctgaacgacagagtgagactccgtctcccccccgccaaaaaaaaattaaattaaataaaaaaatcagccaagcatcctagtgtgtgcctgtagtcccagttactcaggaagctgaagtgggaggatcgcttaagctcaggagttcaaggctgcagtgagccatgattgcaccactgcaccccagactgcagaacagagcaacaccttatcaaaaaagaaaaagaaaaagagagagagagagaaggaaggaaggagggagggagggagggagggagggaggraggaagaaagggagggaggaagagagacaagggccctaatgaagagaaaaatgaagg

SEQ ID NO: 6309 - DNA, 782 bp, Homo sapiens
agccgtgtgtggtggcacacacctgtagtcccagctactcggggtgctgaagcaggagaattgcttgagcccaggaggcagaggttgcaatgagctgagattgcgccattgcactccagcctgggcaacaagagcaagactctgtctaaaaaaaataaataaataagtaaacaaacaaacaaacaaacaaacaaaaaacaacaacaaaactttggccagatgtggtggttcatgcctgtaatcccagcactttgggaggctgaggctgatggatcacttgaggtcaggagttggagaccagaatggccaacatggtgaaactccgtctctagtaaaaatacaaaaattagctgggtgtggtggtgtgcacctgtagtcccagctactcaggaggctgaggcaagagattcacttgatctcaggaggcagaggctgcactccagcctgaacgacagagtgagactccgtctcccccccgccaaaaaaaaattaaattaaataaaaaaatcagccaagcatcctagtgtgtgcctgtagtcccagttactcaggaagctgaagtgggaggatcgcttaagctcaggagttcaaggctgcagtgagccatgattgcaccactgcaccccagactgcagaacagagcaacaccttatcaaaaaagaaaaagaaaaagagagagagagagaaggaaggaaggagggagggagggagggagggagggagggaggaagraagggagggaggaagagagacaagggccctaatgaagagaaaaatgaagg

SEQ ID NO: 6310 - DNA, 648 bp, Homo sapiens
cccacttatcaactgcatctggaagcacagccctctatctcctggtgtctgaaccttggagctggaagccttagatgcagattcttggtcttcactagattttttttttttttttttgagacagggtcttactccattgcccagtctagagtgcggtggcaagatcacagctcactgcatcctcaacctcccagctcaagcaatcctcctgcttcagcctcctgagtagctgggactacagatgtgagccaccatgcccagctgatttttaaaaaattgttcaaggctgggcatggtagctcasgcctgaaatcccagcactttgggaagccaaggcgggtggatcacttgaggtcaggagttcgagaccagcctggtcaacatggtgaaaccccatctctgaaaaaagaatactaaagttagcctggcttgttggcagacggctgtaatcccagctactcgggaggctaaggcagaagaatggcttgaacctgggaggcagaggttgcagagatccaagatcgcaccactgcagtccagcctgggtgacagagcaagactccgtctcaaaaaaaaaaaaaaaaaagttttttgtagaaacgagtttcattgtgttgcccaagctggtctccaactcttgggttcaaa

SEQ ID NO: 6311 - DNA, 648 bp, Homo sapiens
cccacttatcaactgcatctggaagcacagccctctatctcctggtgtctgaaccttggagctggaagccttagatgcagattcttggtcttcactagattttttttttttttttttgagacagggtcttactccattgcccagtctagagtgcggtggcaagatcacagctcactgcatcctcaacctcccagctcaagcaatcctcctgcttcagcctcctgagtagctgggactacagatgtgagccaccatgcccagctgatttttaaaaaattgttcaaggctgggcatggtagctcacgcctgaaatcccagcactttgggargccaaggcgggtggatcacttgaggtcaggagttcgagaccagcctggtcaacatggtgaaaccccatctctgaaaaaagaatactaaagttagcctggcttgttggcagacggctgtaatcccagctactcgggaggctaaggcagaagaatggcttgaacctgggaggcagaggttgcagagatccaagatcgcaccactgcagtccagcctgggtgacagagcaagactccgtctcaaaaaaaaaaaaaaaaaagttttttgtagaaacgagtttcattgtgttgcccaagctggtctccaactcttgggttcaaa

SEQ ID NO: 6312 - DNA, 580 bp, Homo sapiens
ccaggcctcagttcccaaaccttacctgaatatccaagaccctrgctcacagggttcccctttgccaggaccttgttgtccctcagagatggacacaacagagacatcgggccctggaaaccatccagaacgctgtggagtgccgagccctgagtgagtacagcaccctccaccgttttctcgcgtactttgcccattgcccaggaactccctcgggtcctgacccatccgaccctatctctcccaacgtccagatgcgaatccttcctggaacacctccaacgtgcccttcgcagtcgcttccgcctgcggctattgggggtacgccaggcacagccgctctgcgaggagctctgccaggcctggtaggagacgcgggggcaaggggcgtgggttgtgacttgggcggggaagagggcggagcctgcagtttgcttggccttctgtgtaaaggggagtggcctccaacagggccaaggtttaagagatgcagcttaatgtttagagcccaggtagataggggcgaggcatgagaagcccccagcttttaagatacctgccatatggcaatgtggctttt

SEQ ID NO: 6313 - DNA, 763 bp, Homo sapiens
ctttgggaggctgaggcgggtggatcacttgagctcaggagttcaagaccagcctggacagcatgttgaaaccctgtctttactaaaaatacaaaaaattagccgagcatggtaatcccattctcacagtcatagaaaggttcttttttaaggattctacctacttgagagcatcatatactgccagcacttgttcacttcaagagtgtctggtttcatctctatgacataattacaaccaaaatcctaaaggaactgatttaccacactgtgtttgccataaggcccaatttgtacctgcagcagcagctgtatcatcccarctcacagctctaccctctaaaggtgtgcctgaggcttgtgatccagtccatagggaaatatcactacctgctgtgttttataattggaccatccaagggttgtcagggttttcccagagagttttgtgggatttttttttttttttgagaccaggtcttgctgaagttagtatggcagcatactaacacattaacctgtcgaaagcttcctgcagagctgtgtcccagtctcaaagtgcccctttctaataattctatatattggtatcaaactttgggctaagtgtcagataaatgctctccaataatccaaagaccaacaaatgtctggatttcttttttcttttttgttttttaagagacatagtgtggttctgtttcccaggctggagtgcagtggtgggatcatatagctcactgcagaaactcctgggatcaag

SEQ ID NO: 6314 - DNA, 763 bp, Homo sapiens
ctttgggaggctgaggcgggtggatcacttgagctcaggagttcaagaccagcctggacagcatgttgaaaccctgtctttactaaaaatacaaaaaattagccgagcatggtaatcccattctcacagtcatagaaaggttcttttttaaggattctacctacttgagagcatcatatactgccagcacttgttcacttcaagagtgtctggtttcatctctatgacataattacaaccaaaatcctaaaggaactgatttaccacactgtgtttgccataaggcccaatttgtacctgcagcagcagctgtatcatcccaactcacagctctaccctctaaaggtgtgcctgaggcttgtgatccagtccatagggaaatatcacyacctgctgtgttttataattggaccatccaagggttgtcagggttttcccagagagttttgtgggatttttttttttttttgagaccaggtcttgctgaagttagtatggcagcatactaacacattaacctgtcgaaagcttcctgcagagctgtgtcccagtctcaaagtgcccctttctaataattctatatattggtatcaaactttgggctaagtgtcagataaatgctctccaataatccaaagaccaacaaatgtctggatttcttttttcttttttgttttttaagagacatagtgtggttctgtttcccaggctggagtgcagtggtgggatcatatagctcactgcagaaactcctgggatcaag

SEQ ID NO: 6315 - DNA, 669 bp, Homo sapiens
tattttctttcttgaattttctgcagaacaggaaaaaatgacttttcagtaccatgttgtagaaatgagaatatgcatgtaactaytgggaaataactatatcacagtcaacaatgtttctttgacagattgaagggaaaattgatttttttaagatcacaatttacaagaaaaatctctcacaactctaatcaaaagtgatatcaaagaaccatgaaagcaagaaggcaatgttaagcgaagaactttggttgccttattaactctctgtatttaattgtggtccaattggttacccatttcagttgccgaaggttttgtttttgcttttgttttgagcagttcaaatcatatgagtactgatatttcaaagctttccatctttgatagaagtaatttttaaaaatgaaaaaaatcacttattttctttcaaaagaattaaaatcattttacctaaaaaataccattaaatccattagacttttaaaaaaataaacctcagatgcattatgagctatcagtgacattattttcttgtattttgaaacagtatttaccactcattactcacaattatttctaactatggtaaaaaagacaaaaataagcacaattaacaaggatggaatagccaagcggggtcctgaaatactaaattaaattatcttt

SEQ ID NO: 6316 - DNA, 819 bp, Homo sapiens
ggctagcacctagcatttcagcagagggaccattttagaccaaaatgtactgttaatgggtttttttttaaaattaaaagattaaataaaaaatattaaataaaacatggcaataagtgtcagactattaggaattgagaagggggatcaactaaataaacgaagagagtctttcttatgccttccttgcagttatgtaatattttcttttttaaatttcacatgcatgtaatttgagcactttgaggggccaaggagggtggatcactagaggtcaggagtttgagaccagcctggccaacatggcgaaaccccatctctactaaaaatacatctagctgggtgtggtggcgggcgactgtaatctcagctacttaggaggctgaggcaggagaatcacctgaacccgggaggcggaggctgcagtgagtcgarattgcaccattgcactccagcctgggtgacagagcgagaactccatctaaaaaaattcacatgcaagaagcaaaggtagacaaggtagaagatgaatgacagcagcccacaggggaggatggggataatacctcactgaaagatccagaattgggagtatcgggctgagagagagaaacaaaaccacaatcttagttttatcatattgttaaaagactttcaagaaataatacaaactggagatagtagatacacaggctccattctaagaacaaagtctgttagaagcaggaacacttggacaaatatgggatgggagggatgtcaggccgaggttagagtggtgatctctccccaccctttagggcctttggaggtggagaa

SEQ ID NO: 6317 - DNA, 718 bp, Homo sapiens
caaaaaacccaacaacacaaatttggtgtcttccagtttttgaagccagagtcctaaaatcaaggcgtgggcagccgtgctcctgctgcaggctgcaggtagaatttgtttcctggcctttccagcctcttgaggctgcctgcattctgtggcttgcggctcctctttgcatcacttcaacctctgcttccagcatcaaatctcctttttctctgactgtgactctcctgccttcctcttacaaagactctagtgatgacattgggcatatccagataatccgggataatgcccctctgtcaggattcttggcttaatctcatctgcaaagccactgttgccatgtaatatagtatgttgacaggttattaggattagaattaggatgtagacatctttggggatgggggaacatattttttcaggctaccatgcccttctgcaaggtgctgacctttaagagaacrcctgccttggttatgagcattgcggggagtcagttggctgcctgctgagctgaccctcaggaagtgctcaccacctttgtgaattcacagcagtccaggatcagtcaggccaggcccagaaatacaattgtatctatctatctatcatctgcctgtctgtctgtctgtctgtctgtctatctatctatctatctaaaagagacaaggtctcactatgttgcccaggctgatctcacactcctggcctcaag

SEQ ID NO: 6318 - DNA, 718 bp, Homo sapiens
caaaaaacccaacaacacaaatttggtgtcttccagtttttgaagccagagtcctaaaatcaaggcgtgggcagccgtgctcctgctgcaggctgcaggtagaatttgtttcctggcctttccagcctcttgaggctgcctgcattctgtggcttgcggctcctctttgcatcacttcaacctctgcttccagcatcaaatctcctttttctctgactgtgactctcctgccttcctcttacaaagactctagtgatgacattgggcatatccagataatccgggataatgcccctctgtcaggattcttggcttaatctcatctgcaaagccactgttgccatgtaatatagtatgttgacaggttattaggattagaattaggatgtagacatctttggggatgggggaacatattttttcaggctaccatgcccttctgcaaggtgctgacctttaagagaacgcctgccttggttatgagcattgcggggagtcagttggctgcctgctgagctgaccctcaggaagtgctcaccacctttgtgaattcacagcagtccaggatcagtcrggccaggcccagaaatacaattgtatctatctatctatcatctgcctgtctgtctgtctgtctgtctgtctatctatctatctatctaaaagagacaaggtctcactatgttgcccaggctgatctcacactcctggcctcaag

SEQ ID NO: 6319 - DNA, 618 bp, Homo sapiens
catatcaccttgattcctctggagactttatgctggacctgatgtaatcattgcagtttttctatgattcatcctcaagctctatttttcctattttagtgatatgtcctacaatcagaaaaaaataatcaaattctagttgatgttgagaatattagaattactgcatggtttcctggggaaaattctgtttacacatattattttaaatatttccttctgttgctctttagtaccttttaaatttttccttctgttgctcttgtatatcttgatttcctattgttcatatattagtccattctcacactgctttaaagaaatacctgaggctgggtaatttrtaaacaaaaggggtttaatttgctcaaggttttgcaggctgtacagagaacatcatgctggaagctgcctggcttctgcggaggcctcaggtaactttcagtcatggcggaaggtaaacaaggaatcaacacttcacatgcctccagtaggaggaagagagaaagagcgagtgggggttggcggggaggtgctacaggcttttaaacaacaaggtctcctgggaagtctgttatgagaatagcaacaaaggcatggcaccaaaccattcatgaa

SEQ ID NO: 6320 - DNA, 568 bp, Homo sapiens
acctgacttccctctcctgctccaagtcctggaaactgtcttcaatcagtaagctggagcaatgataaggctcacctaatttgtttcctatctctctaggaacactgctcttcattgtctgatgtccacagtcctgaaaaactttgtttcatatactttgtccatgttttaggagattttaagttagaaggcaaactcagtctctgttattctattttggctataagtggaagtcctccatgccctacaattttattccaccacttctctttcatcctttattttctgtttcactgccctaattgcaacattgtaaaaacagtaacgaaatagctcctatttatgagatactgccatgtgccagggctttatcacacttgataaagagtacgtccagcaaccatgactacaagttaggctttttaaaatatatattgatgaaaaatttcaaacatttagagaagtttaaaayaatataaatgtttttcacatggagtacagacaatgctaaccttttgccatttttgcttcagcaatagctgaagtctcctttgtccccacttcacca

SEQ ID NO: 6321 - DNA, 690 bp, Homo sapiens
gtttgctaagtcctcctggaggagagagaaattcagcaggaataactggatttcatcgggtaaattccccaaatattgattaagtattccccccccccccctgttctggtgagtcttcagtggggccccaaatcacataagaaacttgttaaactgaaaatttacagcctagacaagaaagtgagacccccatctctaaaaaaaaaaaaaaaaaaaaagaaagaaagaaagaaagaaaaaaaacccgggtgtcgtgttgctatagtctcaccaggctgagatgggacaatctcttgggcagtcccacgaagagactgcaatgagctatgattgtgccactgcactccagcctggatgacagagcaagaccctgtctcaaaaaaaaaaaaaaaaaaggcaaagaaaattcagattcagtaagtctggggtggagctcgagatctctgyacttctcacaaggtcccaaggtcccaaggtcccaaggtcccaggtgaggctgatgctgctaagccataagccacactttgagttgcaaggccccaggtgcaaagcgccatgccaaatatagggaacacaaaggtgaacagatgaagacgacaaagccattgtccttaggggatcatctcttggtgggaagacaggtaaacagtaaccattccacaggcacccctggtaaggatttaggtggat

SEQ ID NO: 6322 - DNA, 658 bp, Homo sapiens
caggtgctactgaggatttgcaagaggaagaacctaatcttatctgggcgtcaggacaagacctttgaagaaaggatatttaaagtgtaatgtgaacatgagaacagggaaagaatgctgcagacaaatatatgcaaagatgcacaagtgagagatcatcgtgctttcgggaaacttcacaagaagcctggtgaggaaagggaactggcaagagatgttcacggggttgacctatggttggtgccttcagggtcaaggaccccaggatttaattcagatagtttgtgtcagttatctgatgctsggtaacagactactccaaaatttagtggcccaaacaagaatcattttttcaggattccgtgtgttggcttgtaatttttctacagatcttacctgggctcacccatgtggctgcattcagctggtacgtcagctgggggctggactaacccaggcctgttgggcctctggttctgtgaagtctttcatttggaaggaggcaagactgagctacttcacacagaatctgaggacagcgttccaagagggcaattcccaatgcacaagtgcttatcaagcctctccttgcatcatttgctgatatcctgttgcccacagccagtcacatggctaagcccagaatcactgtcagagg

SEQ ID NO: 6323 - DNA, 818 bp, Homo sapiens
caggctctcacgtccctacagttcagtgggggaagaaagacagaaaacgaaagaaatgagataattttggattgtgataatagccttgaagatactgtaggcataatagtaggtgaaaatagttcacaatcagtgaatatttgtagcactcccacccatagctgcttctgatcactgtccgtgctatgttgccagctttggaaatgtcttcttcacctttgtcctgaatcacaggaacagtatagggcattgacacagagatggcacttcttgttttctgggacaactctatccttttgtagccccatcgctgaaatccctcccctacatcttgccccctatcaggcagcacatcgctccaacactcttggagttgggatgcagaacctgtattttgggttcttcttagaggtgrtgggctgttgtcatagcaactgcttcctagacttaaccgtcagcctcagtggaggtttctcctcagcttttcaggctgtaggcaatgctttctcctcaaatgccagagctgatctaactcccctgcctctagcctgcaagctggagagactctttactttcaaggaagtctggcttttacaggttcaagcctttataagaacaccaaagcaagagcaagtccaaaaggggcctccctgcctggatgacagaggtgctggctggggcttaggtaagaagctctcctttacctcttgcccctcactgatctttccagacccctggggaggcttatgcagggggctctggcggcaatttccctatccattttgggttgtgttagttttcaggtttctctgctgttt

SEQ ID NO: 6324 - DNA, 818 bp, Homo sapiens
caggctctcacgtccctacagttcagtgggggaagaaagacagaaaacgaaagaaatgagataattttggattgtgataatagccttgaagatactgtaggcataatagtaggtgaaaatagttcacaatcagtgaatatttgtagcactcccacccatagctgcttctgatcactgtccgtgctatgttgccagctttggaaatgtcttcttcacctttgtcctgaatcacaggaacagtatagggcattgacacagagatggcacttcttgttttctgggacaactctatccttttgtagccccatcgctgaaatccctcccctacatcttgccccctatcaggcagcacatcgctccaacactcttggagttgggatgcagaacctgtattttgggttcttcttagaggtgatgggctgttgtcatagcaactgcttcctagacttaaccgtcagcctcagtggaggtttctcctcagcttttcaggctgtaggcaatgctttcycctcaaatgccagagctgatctaactcccctgcctctagcctgcaagctggagagactctttactttcaaggaagtctggcttttacaggttcaagcctttataagaacaccaaagcaagagcaagtccaaaaggggcctccctgcctggatgacagaggtgctggctggggcttaggtaagaagctctcctttacctcttgcccctcactgatctttccagacccctggggaggcttatgcagggggctctggcggcaatttccctatccattttgggttgtgttagttttcaggtttctctgctgttt

SEQ ID NO: 6325 - DNA, 800 bp, Homo sapiens
agcgaagcccaggcattcagcgaatcatgtaatttattctgcagtgccgagcctgggctgtctcagacatcatattgactttttttttctcccatctgtcaggggcagtcagcagctctgctattgtgagagcgcatcacattacatctatttatttatttatttccgctgcttctttgtagcatgattgggcaagaacgcattatctcagatcagcgaatactaagaaaagcatctgaacatcattacgacagcatgttaaacatttgtcctacccagtttgttaaatcagcaaatgtatttccagcaaatgcttgtaattgttcataaagggctccctactgcagggttttactaagctgaaaatatggcctgttattttcttcagctctttaggtcagcggtgattccaatatattgtaaataatgctgaacagctggtgtactgacttggtgtgtgtgtgtgtgtgtgtgtgtgtgtgtgtgtgcgcctctgtctgcatatgcatgtgtctgcacacaaccacacacctggctatagctctgcatgttgcacacatattttgtgcacatgtaaatgattgtataggtcaatrcggtataaagtactgtatatggccaggcaggcccaacactttgggaggctggggtgggaggattgcttgaagccagcagttcaagaccagtctgggcaagaaagtgagacccctgtctctacaaaaaataatgtaaaaaacgtaattagccgagtgtggtggtgtgtgcctgtagttgtagctattcaggagactgaggtggga

SEQ ID NO: 6326 - DNA, 800 bp, Homo sapiens
agcgaagcccaggcattcagcgaatcatgtaatttattctgcagtgccgagcctgggctgtctcagacatcatattgactttttttttctcccatctgtcaggggcagtcagcagctctgctattgtgagagcgcatcacattacatctatttatttatttatttccgctgcttctttgtagcatgattgggcaagaacgcattatctcagatcagcgaatactaagaaaagcatctgaacatcattacgacagcatgttaaacatttgtcctacccagtttgttaaatcagcaaatgtatttccagcaaatgcttgtaattgttcataaagggctccctactgcagggttttactaagctgaaaatatggcctgttattttcttcagctctttaggtcagcggtgattccaatatattgtaaataatgctgaacagctggtgtactgacttggtgtgtgtgtgtgtgtgtgtgtgtgtgtgtgtgtgcgcctctgtctgcatatgcatgtgtctgcacacaaccacacacctggctatagctctgcatgttgcacacatattttgtgcacatgtaaatgattgtataggtcaatgcggtataaagtactgtatatggccaggcaggcccaacactttgggaggctggggtgggaggattgcttgaagccagcagttcaagaccagtctgggcaagaaagtgagacccctgtctctacaaaaaataatktaaaaaacgtaattagccgagtgtggtggtgtgtgcctgtagttgtagctattcaggagactgaggtggga

SEQ ID NO: 6327 - DNA, 602 bp, Homo sapiens
agggattccgcctgctgattgcgtggagatggagagcccccacgcagtgcagctgggctgcagggggaggagaaaagagaaaggcgcccctccctcccgtgccgctgcccccttgactagtgccggacgcgctgcccggatcacctgcgccagccactgcagcacgtcgggccaccttggccagggggcaggctcagggacggtgtggaaccccgaccacttctccgactgcacgcctcgcagggctgcaaaacagcagccccctcgtcccacgcccgcttctcccagatcatcccgccgagagtgggctgccggctgcccgscaagtaactgcgggggcactggctttggggagaaaaagtttggcgaccggctgcgccagtgcagcagcgtgtggggagaatcccggggcctgagccctgccttggccgctgcgggatcatagccgaccccgagaccggatctttcccagccggcaggctctggaatctggattgggtgcgcggcgctctagcccaagtgcgctgcggcgcgggtagggttaaccgcctcggcaccccggccgggggtgggtgggggcggggccggaggaggggatcccc

SEQ ID NO: 6328 - DNA, 809 bp, Homo sapiens
ttggtaggatgttgtagtgcccacccttactgggatgagcagatgcagtggcccctgctttggaatcagtgccatctgggtgctcattggctaggtgattacaacaggtagcttggcctcggtggacttcgggatcttayctgtaaacccttctgtccctgggatgttaggaagactagaacaaagggaagctgaaacatttggcagtggcaccagctagggcgagttagagcaaagtatagccagcatctccagggctgaagctcctagcccctccccaccatgaatctgaaacccggacattttctcttggaaggaacttgtttgcaatggggtgattgggtctgtgtgtcaacctgtgcagatattacacgttctgaactcttcagtgtctgcaagatgtatccggactgccaacaatgtttgtgttcacctcactaagtgtgccatttgggagtggggaggcaccttacacttcagtatcatttcacaggtccaaagtaatgttcactgctccttttcactgtcaaaagaggctccatttaaatgattcattacatgtttccccatccatgaagcatgatctcgcttgatgcagagtaagaattccagctacgctcttactagtggtgtagccttcagcgtgtcatttcacctctgagtacatcagtcagctgttgtcacaaaaatgctgtgtaacaagctgtccccaattgtcagtggctcaaaacaaccttttattctcctagatctgcaggttggcttgggtggttctgctgatcctggctgggcttgctcacatgctttca

SEQ ID NO: 6329 - DNA, 871 bp, Homo sapiens
actgtgggtggggaggagggaagggtcctcagaacacacctggggcctaagctgggtcctgatggtcaccgtgggacccactggacacacatagtcccttgtctgggagtggcatggggaggcttctgcccttgggcagttgtggaaagtgaaggagccctggaggrctggctgaggggagactaacttcccttgtgttcaaaggggtccgggcactggggttctccccaagtatttcttattctgtctggcctcgctttccttttgccctgagtattatcaggagggacggtccatctagatgttctccaggagcaaggacccactcttctacatcagtgacacaggaacatgaagccccctcctgtagggacagctcagaatggtggagtccacagtccgtccccgagagacatggtttccatgagcacagtggctgctttggagacagtagatcattttcatccccaaaaccaaacacactcctgctcaaatggcgttattcttaaagcagcttcactggttagactgaagggccatggtagcccaagtgatgagcggggtagaacggagcaatcaggagagatcttgttcctcataggaaactgggcatctctgtggccctgagcatcccaggaggccgatcgtacagagacctctggtgcctgaccgcagttcacatccacatccctggaatagcccatcacaggctcttcacccttggcaggtggacaccattcaacctgccagggcaggtgtgtgcccgtttcatggcatatggggacaacgggattctctgtccaggtcccactcttctcgagtccttgggaagatgcccacccctgcttagggcttcagactgcagagaccc

SEQ ID NO: 6330 - DNA, 871 bp, Homo sapiens
actgtgggtggggaggagggaagggtcctcagaacacacctggggcctaagctgggtcctgatggtcaccgtgggacccactggacacacatagtcccttgtctgggagtggcatggggaggcttctgcccttgggcagttgtggaaagtgaaggagccctggaggactggctgaggggagactawcttcccttgtgttcaaaggggtccgggcactggggttctccccaagtatttcttattctgtctggcctcgctttccttttgccctgagtattatcaggagggacggtccatctagatgttctccaggagcaaggacccactcttctacatcagtgacacaggaacatgaagccccctcctgtagggacagctcagaatggtggagtccacagtccgtccccgagagacatggtttccatgagcacagtggctgctttggagacagtagatcattttcatccccaaaaccaaacacactcctgctcaaatggcgttattcttaaagcagcttcactggttagactgaagggccatggtagcccaagtgatgagcggggtagaacggagcaatcaggagagatcttgttcctcataggaaactgggcatctctgtggccctgagcatcccaggaggccgatcgtacagagacctctggtgcctgaccgcagttcacatccacatccctggaatagcccatcacaggctcttcacccttggcaggtggacaccattcaacctgccagggcaggtgtgtgcccgtttcatggcatatggggacaacgggattctctgtccaggtcccactcttctcgagtccttgggaagatgcccacccctgcttagggcttcagactgcagagaccc

SEQ ID NO: 6331 - DNA, 871 bp, Homo sapiens
actgtgggtggggaggagggaagggtcctcagaacacacctggggcctaagctgggtcctgatggtcaccgtgggacccactggacacacatagtcccttgtctgggagtggcatggggaggcttctgcccttgggcagttgtggaaagtgaaggagccctggaggactggctgaggggagactaacttcccttgtgttcaaaggggtccgggcactggggttctccccaagtatttcttattctgtctggcctcgctttccttttgycctgagtattatcaggagggacggtccatctagatgttctccaggagcaaggacccactcttctacatcagtgacacaggaacatgaagccccctcctgtagggacagctcagaatggtggagtccacagtccgtccccgagagacatggtttccatgagcacagtggctgctttggagacagtagatcattttcatccccaaaaccaaacacactcctgctcaaatggcgttattcttaaagcagcttcactggttagactgaagggccatggtagcccaagtgatgagcggggtagaacggagcaatcaggagagatcttgttcctcataggaaactgggcatctctgtggccctgagcatcccaggaggccgatcgtacagagacctctggtgcctgaccgcagttcacatccacatccctggaatagcccatcacaggctcttcacccttggcaggtggacaccattcaacctgccagggcaggtgtgtgcccgtttcatggcatatggggacaacgggattctctgtccaggtcccactcttctcgagtccttgggaagatgcccacccctgcttagggcttcagactgcagagaccc

SEQ ID NO: 6332 - DNA, 871 bp, Homo sapiens
actgtgggtggggaggagggaagggtcctcagaacacacctggggcctaagctgggtcctgatggtcaccgtgggacccactggacacacatagtcccttgtctgggagtggcatggggaggcttctgcccttgggcagttgtggaaagtgaaggagccctggaggactggctgaggggagactaacttcccttgtgttcaaaggggtccgggcactggggttctccccaagtatttcttattctgtctggcctcgctttccttttgccctgagtattmtcaggagggacggtccatctagatgttctccaggagcaaggacccactcttctacatcagtgacacaggaacatgaagccccctcctgtagggacagctcagaatggtggagtccacagtccgtccccgagagacatggtttccatgagcacagtggctgctttggagacagtagatcattttcatccccaaaaccaaacacactcctgctcaaatggcgttattcttaaagcagcttcactggttagactgaagggccatggtagcccaagtgatgagcggggtagaacggagcaatcaggagagatcttgttcctcataggaaactgggcatctctgtggccctgagcatcccaggaggccgatcgtacagagacctctggtgcctgaccgcagttcacatccacatccctggaatagcccatcacaggctcttcacccttggcaggtggacaccattcaacctgccagggcaggtgtgtgcccgtttcatggcatatggggacaacgggattctctgtccaggtcccactcttctcgagtccttgggaagatgcccacccctgcttagggcttcagactgcagagaccc

SEQ ID NO: 6333 - DNA, 660 bp, Homo sapiens
aggtggcagcagcaggatttgtcatgcggagggggaaggatgaaactcggagggcaaaaggggaattttttttttttcaggaagaggaaaggatgtttttggtgcgtcggagtttcagtaggctgggttgtgcgagagatttccaaaccggacatagccgtaatgaatgggctgcctcctggctttctgaacctgcagctgcttcaccccagcaagctccctggtgtctctgggcctcagtttccttttctgtaaattggaagtaatcgcacctgcttctgtggacgtgggagtgtggtgtggggtggtgaatagtaaagagctctgaggcgttctctcagcgtaacctggcgcagagccggtgctcaccagggtacactggctgcacacatctcgctattgtttccattcttcttgctggaaaggcctccactgctggaagtgcagcckcagagtgagcaggaggaagcacctagcagcgggcacctagtgggcacttcatcaggggtcagccgctcttctgttctggagggtgcaggccaatgggagccctatgtgggcctggggagggcatgggctcttcctggcccctgctgctggctgctatggtggctggagccgggtgggctggataattatgccttacataagtgggaggcc

SEQ ID NO: 6334 - DNA, 682 bp, Homo sapiens
aagctcagcttctgtgtaggggggcatgaagggcacatgtgggtcagagacaacagagccaaatggtgggatttgggatcaccagtagcttcctaggcaccctttgccccaggccagtagtgttgctggtccgtccacccccagagtgggcacagaggagggcaaaggctacagtggggcaccaactgttcccaggccctaggctgtgagcatgctgcatggggttcagccacccaaaaaagctgctgtgctcagcagtgcggcaaataggctggagggggatgggcrtccaggccagctgccggctggtggcagacacacagctgggtgtgcataaggcgtggctgcaaggctctcaggctcttgatccctggagcctctggcccagcgtctcagggtgtctctgtctccattttgttagtttaaggcattgaggaagccagggcaggggagggaaagagctgaaaggagaagaaaaagccgcggtttccaagactggcttgatcactcattttgctgtgtgaccctggacaagtcattagcccactccaggcctcagtttccccatgtataaagagggcagtgttgagctgggtaatctgtgtgaccttagataagccacctaacctggctgtgcctcagttcttccctgtgagaggaggacacccccacttgcctcaca

SEQ ID NO: 6335 - DNA, 682 bp, Homo sapiens
aagctcagcttctgtgtaggggggcatgaagggcacatgtgggtcagagacaacagagccaaatggtgggatttgggatcaccagtagcttcctaggcaccctttgccccaggccagtagtgttgctggtccgtccacccccagagtgggcacagaggagggcaaaggctacagtggggcaccaactgttcccaggccctaggctgtgagcatgctgcatggggttcagccacccaaaaaagctgctgtgctcagcagtgcggcaaataggctggagggggatgggcatccaggccagctgccggctggtggcagacacacagctgggtgtgcataaggcgtggctgcaaggctctcaggctcttgatccctggagcctctggcccagcgtctcagggtgtctctgtctccattttgttagtttaaggcattgaggaagccagggcaggggagggaaagagctgaaaggagaagaaaaagccgcggtttccaagactggcttgatcactcattttgctgtgtgaccctggacaagtcattagcccactccaggcctcagtttccccatgtataaagagggcagtgttgagctgggtaatctgtgtgaccttagataagccacctaacctggctgtgcctcagttcttccctgtgagaggaggacacccccactygcctcaca

SEQ ID NO: 6336 - DNA, 754 bp, Homo sapiens
ggcactctgacctcagggtccccgccgagttgccctccgaagtgctgggaatacagcataagccaccacgcccagcctactctccaatattagtggatcttctgtgctccttgtatctcactatccctaaattaacagctcagggagaggtttgtagactcttaagaacttttggataactcgtagtgtttttgtagttttgtagtgatattatctcaaatacgtccgcggttatttgtgaaatttgaaatttgaggtggatttataatgatattgcttaattttatataagcaaattctttattgaaacyaataacatgggaatagaaataaatttgtaaactgtgaagagcaatgattcaaaattttggggggatttcactgtcttacgggaatctaatgaaagcattggaagaatgcacatatacacacatgtaggattttctttttttttcttttactttttttttttttttgagacagggtccctctttgttgcccagattggagtgcagtggtgcagtcatagctcactataaccttgaacttttgggctcaagagatcctcccgcctcagcctcagaagtagctaggaatatgcacgtggcgcacgcccaactaatcttattttttatagagatgggggtctcactgcgttccccaggctggactcaagctcctgctttcaagtgacatgtaggattttctatatacataatattatgaagtttacaagttaaaaactcctgtaagg

SEQ ID NO: 6337 - DNA, 754 bp, Homo sapiens
ggcactctgacctcagggtccccgccgagttgccctccgaagtgctgggaatacagcataagccaccacgcccagcctactctccaatattagtggatcttctgtgctccttgtatctcactatccctaaattaacagctcagggagaggtttgtagactcttaagaacttttggataactcgtagtgtttttgtagttttgtagtgatattatctcaaatacgtccgcggttatttgtgaaatttgaaatttgaggtggatttataatgatattgcttaattttatataagcaaattctttattgaaaccaataacatgggaatagaaataaatttgtaaactgtgaagagcaatgattcaaaattttggggggatttcactgtcttacgggaatstaatgaaagcattggaagaatgcacatatacacacatgtaggattttctttttttttcttttactttttttttttttttgagacagggtccctctttgttgcccagattggagtgcagtggtgcagtcatagctcactataaccttgaacttttgggctcaagagatcctcccgcctcagcctcagaagtagctaggaatatgcacgtggcgcacgcccaactaatcttattttttatagagatgggggtctcactgcgttccccaggctggactcaagctcctgctttcaagtgacatgtaggattttctatatacataatattatgaagtttacaagttaaaaactcctgtaagg

SEQ ID NO: 6338 - DNA, 748 bp, Homo sapiens
aaaaaataagttaggagaaaggatttgtcacagactatcagatcactgcaacttcaaatagccctacgtaaaattaattccttaagcgcaagaaaaaatttataatgcccacaagtccaggcaatattttggtttattttacaacagccccgtaatttaacaacttattagcaaaaacatgtaacacttaatgagactgccctcaaagtacaggctgcgcctggctaccaccgtccttaaaataatcctagttaaatgacagtagacgtcagttcaaacctatgaacctttaaatctggcaatagttcaagtacaaaaaaaaatcctaaccaaagccaaagtaatcctgagattttttttcctytcctcaccctcggggaccgcacctctttgtgcacaagggtctgaaagtctcctaatctcaaactccagttaccagcccggctactactccccggcaagacactgtcgccagcctcgggtggcttttgctcagcagtggagacgtcggcgaatgcggacgggcgcgatcactggagtccagatgccaggcgttgttccgccgggcccgaaaccaagactaggggcgcgccgtcaccagagaccgggcctcaggctggtgcggggcagcggagacccaggctgcggtcccagttttggcctgggctctacctcaaagcttaaggaccggcgaagaggacaaaaagcaacgggcggacgcacctggcgaggaccttcggcagccgga

SEQ ID NO: 6339 - DNA, 895 bp, Homo sapiens
cggtaccaccttgcaggttyctttatccttctgagcctcaatttccttgtctaagttgagcaaagatttgatgagatcatgggtgtggaagactcaatccagtgcctgccacatagtaatcgcttgattatctggtagcccttgttttttatttggctctgagtgagggagaagggtggcaggcttccccaggctgcaatgtgcagtcatcaaaggttttctcagggaagctgtggtccttgggatgttgacgaacccaagagttagagaccaaaccaagaccaacctctctgtggttgttccctggctggccctccagagggtggccaaaaaaataaataaataaaacacaaaagaaagatatacatctacagaagctgaaattcctctgtttttctactttatcttattacttcttccctttttctctaaagtagctgaaccacatatgttaagagtcattgtaatactgaaaagaatggaaaacaggtgttcgaacaaaacttggccatgctattcatggcagcactactcacaatagcccaaagtagtaacagcccaaatgtccatcacctgctgaatggataaagccaaatgaggtctatccagacaatgggatattagtcagccatagaaagagatgaagtactgatacaagctacaatgcagatgaaccttgaaaacataatgctaagtgaaagaagccagacgtgaaatacccacatgatgtatgattccatttatatgaaatattcagagttggcaaatccacagaaacagaaagcagaccgggggttgccaggggttgggggtcagaggggaatgaggagtgactgcttaatgggtacaggttttccttctggggtaactaaaatgcttgtaactagatagtgat

SEQ ID NO: 6340 - DNA, 895 bp, Homo sapiens
cggtaccaccttgcaggtttctttatccttctgagcctcaatttccttgtctaagttgagcaaagatttgatgagatcatgggtgtggaagactcaatccagtgcctgccacatagtaatcgcttgattatctggtagcccttgttttttatttggctctgagtgagggagaagggtggcaggcttccccaggctgcaatgtgcagtcatcaaaggttttctcagggaagctgtggtccttgggatgttgacgaacccaagagttagagaccaaaccaagaccaacctctctgtggytgttccctggctggccctccagagggtggccaaaaaaataaataaataaaacacaaaagaaagatatacatctacagaagctgaaattcctctgtttttctactttatcttattacttcttccctttttctctaaagtagctgaaccacatatgttaagagtcattgtaatactgaaaagaatggaaaacaggtgttcgaacaaaacttggccatgctattcatggcagcactactcacaatagcccaaagtagtaacagcccaaatgtccatcacctgctgaatggataaagccaaatgaggtctatccagacaatgggatattagtcagccatagaaagagatgaagtactgatacaagctacaatgcagatgaaccttgaaaacataatgctaagtgaaagaagccagacgtgaaatacccacatgatgtatgattccatttatatgaaatattcagagttggcaaatccacagaaacagaaagcagaccgggggttgccaggggttgggggtcagaggggaatgaggagtgactgcttaatgggtacaggttttccttctggggtaactaaaatgcttgtaactagatagtgat

SEQ ID NO: 6341 - DNA, 1160 bp, Homo sapiens
gacctcaagttaccgccctctttggcctcccaaattgctgggattacaggtgtgtgccaccacatccagccaacatattttaatgttattatttatgtttttatttttatgccacaataaaaatatgmcagttgaaccccaaaatttcaaactgagaaataaaacaacagctacaataataaccatgtttggtgtatcctacctattttatatacgctatccacctaatcctcacaacccccctaaaataggcagcagtagctccattttacaatggagcaaacttctcaaaacttgggcaacgtgtctaataatcatgatgatcataacaataataagtatagaatataagagttgcttgctgaggcacttgttacatatcggctcagtttgccttcccaacatcatcatgatgtacatattatcattatcacccattttacagaggaagatgaacagagaggttaagtgacttggcctaggttagacagcccacaggtaacagaaacagggatttgcacccaggtcatttgacctcagagtccatatgcatcaccactggagcccgcaggcgtggtcatggagccgggaaggaatgtggacacctgcagaacttacctccctgtcctctctcatggaaaatgggaacagactaggtatctgctccatgacatcaagtgacttcatgggatccagaccttcccccaggctgcatggaagccagcatatagccagacaggtgtgatatgtgaatgtccctctggcctgccaggctcccagacacagatccttgatatctgtgcaggcacctccactttatgtggagaagcagctgagccaaccttaggattcatgagtacctaccacagctcactgtccttttgaaataaactctccagctctttggaatgttttctgttttcatggtggtgaaatctgaaaacgtctctaggtgaaaagacattaagtaaagacaaaacccctccactggtcctcaatctaggaataagcccagagatgtttttaataaatggggaatgcaaaaaaaaaatgcggtaaaatatcagtgactctcctggcacttagaaataaaggaccacagccactgcagccacagtggtgttatatgggacaaacactgagcactcatttgctccttc

SEQ ID NO: 6342 - DNA, 1160 bp, Homo sapiens
gacctcaagttaccgccctctttggcctcccaaattgctgggattacaggtgtgtgccaccacatccagccaacatattttaatgttattatttatgtttttatttttatgccacaataaaaatatgacagttgaaccccaaaatttcaaactgagaaataaaacaacagctacaataataaccatgtttggtgtatcctacctattttatatacgctatccacctaatcctcwcaacccccctaaaataggcagcagtagctccattttacaatggagcaaacttctcaaaacttgggcaacgtgtctaataatcatgatgatcataacaataataagtatagaatataagagttgcttgctgaggcacttgttacatatcggctcagtttgccttcccaacatcatcatgatgtacatattatcattatcacccattttacagaggaagatgaacagagaggttaagtgacttggcctaggttagacagcccacaggtaacagaaacagggatttgcacccaggtcatttgacctcagagtccatatgcatcaccactggagcccgcaggcgtggtcatggagccgggaaggaatgtggacacctgcagaacttacctccctgtcctctctcatggaaaatgggaacagactaggtatctgctccatgacatcaagtgacttcatgggatccagaccttcccccaggctgcatggaagccagcatatagccagacaggtgtgatatgtgaatgtccctctggcctgccaggctcccagacacagatccttgatatctgtgcaggcacctccactttatgtggagaagcagctgagccaaccttaggattcatgagtacctaccacagctcactgtccttttgaaataaactctccagctctttggaatgttttctgttttcatggtggtgaaatctgaaaacgtctctaggtgaaaagacattaagtaaagacaaaacccctccactggtcctcaatctaggaataagcccagagatgtttttaataaatggggaatgcaaaaaaaaaatgcggtaaaatatcagtgactctcctggcacttagaaataaaggaccacagccactgcagccacagtggtgttatatgggacaaacactgagcactcatttgctccttc

SEQ ID NO: 6343 - DNA, 1160 bp, Homo sapiens
gacctcaagttaccgccctctttggcctcccaaattgctgggattacaggtgtgtgccaccacatccagccaacatattttaatgttattatttatgtttttatttttatgccacaataaaaatatgacagttgaaccccaaaatttcaaactgagaaataaaacaacagctacaataataaccatgtttggtgtatcctacctattttatatacgctatccacctaatcctcacaacccccctaaaataggcagcagtagctccattttacaatggagcaaacttctcaaaacttgggcaacgtgtctaataatcatgatgatcataacaataataagtatagaatataagagttgcttgctgaggcacttgttacatatcggctcagtttgccttcccaacatcatcatgatgtacatattatcattatcacccattttacagaggaagatgaacagagaggttaagtgacttggcctaggttagacagcccacaggtaacagaaacagggatttgcacccaggtcatttgacctcagagtccatatgcatcaccactggagcccgcaggcgtggtcatggagccgggaaggaatgtggacacctgcagaacttacctccctgtccyctctcatggaaaatgggaacagactaggtatctgctccatgacatcaagtgacttcatgggatccagaccttcccccaggctgcatggaagccagcatatagccagacaggtgtgatatgtgaatgtccctctggcctgccaggctcccagacacagatccttgatatctgtgcaggcacctccactttatgtggagaagcagctgagccaaccttaggattcatgagtacctaccacagctcactgtccttttgaaataaactctccagctctttggaatgttttctgttttcatggtggtgaaatctgaaaacgtctctaggtgaaaagacattaagtaaagacaaaacccctccactggtcctcaatctaggaataagcccagagatgtttttaataaatggggaatgcaaaaaaaaaatgcggtaaaatatcagtgactctcctggcacttagaaataaaggaccacagccactgcagccacagtggtgttatatgggacaaacactgagcactcatttgctccttc

SEQ ID NO: 6344 - DNA, 1598 bp, Homo sapiens
aagcagctgacctgaagaattacagaaggtgatttaatatgggaaacctatctaccggagcagggtggtaaaactgataagtataatttgtataatttgcgctggaaaccaatgccttctagaactttagtttcctctgtttctcaattgtatttaatatttataatttttaatcctctaaaaccatattttctgtaagatatttttcttaccatgtacaggtatttttaaaaatacaatatctaagttagttcaggatttctttttaaaatgtttgtcttctctgtatcattattctggccagctattagtaggaaattaaaatgcagtctctgagggtagcaagaatagaaaagacttgaggcagtttgaagaataaatcgatgtcttactaaaatatgtaaattaaagaagactttcagtttgcaacctaggcaataaaactgaccaaaccccaaacaggtttaagagcrtatttaggttttagaaactgaaagaatatattatgaattatttcagattgactttgggaatttcattttggattattcttttaactagagaattatatgcaaacaaattcttgatttaaaaattattttcagtagtatctgtgagaatatgattcaataatgctacaggaaataattaatttgtgtacattccaaccaaatgagattgtttggcagtctctgaattcctttcccattctccttggcaaggaaagtggggtcctgggtaactactatcggattataatttgcttgtcccaccatgccaaacactggatcctgatgaccccgaaccaggtaggggtgcctctattaacgatttcactgtgaaagtaaaacatatcaagaaaaaagagaacagaagtcatccatgaggacctgcaggcaattctaattgccaagcatactaatgtatgcaaagttcattacagacactccaggcatctgttgtacttccaggatagcatagaaactcgccaataaacaaagctcttggagaatgaaaataggcttctgattattctaaaatgctgcctttacccatcaacaaagataacaacattgttccccaaatcaaacatatttctccctcatgttccccctcattcaggaggaaaatgacagatttctcttttttctttccatgttttcttggaaggagaagcaagttttgattacgtacactactatagcattggatgacaccagttgaacactaatctgttttgcacgtgtaaagaacatttgactggaaagtcagaaaacttgagttcatattttggctccagtaatgaccagaacagtgaccttggccaaatgcaatgcaattctttctcaaatctggatgtactcatttgtaaaacagagttttattgtgtgtaccatctctcttatgactatggtgtttggaggatcaaataaaattacacatgcaaaagagttctgcatatcacaattgctacagatgtgttaaatatttaatttttttcctggtaaaatcttgagatctcagttaccagatggcagatgtgacaaggttaagaagcgacacaggaggtccaatattcaaattaaatgcagctatat

SEQ ID NO: 6345 - DNA, 813 bp, Homo sapiens
tgccaacagcaaaggccaaagagcaaagaaagaggaaaagcaggggacatcttacagtatcaagatattagtgtttgcacttttttgtatctaaaccaataattacatgcatgcacgcacgcacacacatacacacacacacacatgtatttaayatatgccatctagctagtctaaccaaaatgcttaactgcattaatcattcaaccaataatttttatatgctaaatgtagtgtttgtcttttacaaattagttctggccatgattactgctctcaatgtgcttacattctagttgtggagacaagttttataccctaatgaagaccagttattgtgagaaatattatctaatgaactagagaatggggcacataataagagatttgaaatttctgggaaatgagaaattattacatgctgggatagaaaagcatcattgaagaagtgcaatgtgggctgaattctaaagagtaggagggattcagatggaatcaatcggtcatttcaaatgacatatgtaaagggagagagatagagggcagaagtgcacaagacctactcaagcaagagcaagaatattgcactcaagctttagtgcaaactagtgatgtaaagaccatatttcatagggcctggaatgctaggccagggagtttgaatgtcatcttaaggcagctgagagacctcgaggattttcagttgaaaaacataaggacagtgttttaggggactaaatgtggtgacatgatctttgaaaagggagaaacctagaggtggggcaactggtaagagaaactaatgcaggggat

SEQ ID NO: 6346 - DNA, 791 bp, Homo sapiens
gtggcaggcacctgtaatcccagatactcaggaggctgaggcaggagaatcgcttgatcccaggaagcggaggttgcagtgagcggagatcgtgccactgcactccagcctgggcgacagtgcaagactccatctcttttttttatttaattaataataattttaggttattcagggaagatagcctctgactaacaaagttattgtttagatgaaacttacctgttgctgagctaccaaggatatctactattccttattttactctcaaaggaaatctatccaaagaaaagcatttttcrtgtgtgtctgtagctttgagtcagaacctttatggcttggttgcctgatgaaatagaatagcagttcctgttagcaccttaacttctcagtattttcaacataatcctgttgattttgtatactggatcttatctgtttccttatctgttatatttaattagaaatagtgatacaggtaaaactatttttcagtttttgagatgaacacatttgtttaatacagtgagagctggagttttagaaactttcatctggagaccaaaatgaataaagtaattattaataggtatgataatacagtcagactttatttttgatagtaatcatacttaactgggtcatcttgaacaaatatgaatatggcagagcaagaaccaaccacataatcctacggggcaatgcaaagtaaaaatgtggggcccactgttcaaaaattgttaaaaattccaaacgaatcattaaatcaaaccatagtccttttgggtgca

SEQ ID NO: 6347 - DNA, 799 bp, Homo sapiens
ttggtctttgacctcccaaagtgcagagattacaggcatgcaccactaatgccgggccaaatacttgtaatttaaattatcgctgggctgggcacggtggctcacgcctgtaacccagcactttgggaggccgaggggggaagttcacctgaggtcaggagttccagaccagcctggccaacatgctgaaaccctgtctcaactaaaaatacaaaaatcagccggacattgtggcagacgcctgtaatcccagctaatcgggaggctaagacaggagaatcgcttgaacccgggaggcagaggttgcagtgagccgagatcgcaccattgygctccaacctgggcaacaagagcgaaactccatctcaaaaaataataataaaataaattatagttggaaaaaaggggtttcctaaagacccaagggaaatggcctctttgttcctgaagccacagagaggatttttctgctccccacaactagttttccttgtgaaaattcataattgctaccagcttgttctcctctctgtcactatacatctgtccttgaagccttatttgaacaaagagttctggtatcactcggatgcctagaaactgttgccgttctgtgaaaccgaccaccagaggaaacccatgcttctcattggctgccttactaagatggtgacttgttgccctggtgacaagttgcaatgacaggtggctctgccaaatcagaacacagtgatacttgcttcccctcccgggtgaaggatggaaaataaaagtaaaagccttggcggctgtcaggctt

SEQ ID NO: 6348 - DNA, 799 bp, Homo sapiens
ttggtctttgacctcccaaagtgcagagattacaggcatgcaccactaatgccgggccaaatacttgtaatttaaattatcgctgggctgggcacggtggctcacgcctgtaacccagcactttgggaggccgaggggggaagttcacctgaggtcaggagttccagaccagcctggccaacatgctgaaaccctgtctcaactaaaaatacaaaaatcagccggacattgtggcagacgcctgtaatcccagctaatcgggaggctaagacaggagaatcgcttgaacccgggaggcagaggttgcagtgagccgagatcgcaccattgtgctccaacctgggcaacaagagygaaactccatctcaaaaaataataataaaataaattatagttggaaaaaaggggtttcctaaagacccaagggaaatggcctctttgttcctgaagccacagagaggatttttctgctccccacaactagttttccttgtgaaaattcataattgctaccagcttgttctcctctctgtcactatacatctgtccttgaagccttatttgaacaaagagttctggtatcactcggatgcctagaaactgttgccgttctgtgaaaccgaccaccagaggaaacccatgcttctcattggctgccttactaagatggtgacttgttgccctggtgacaagttgcaatgacaggtggctctgccaaatcagaacacagtgatacttgcttcccctcccgggtgaaggatggaaaataaaagtaaaagccttggcggctgtcaggctt

SEQ ID NO: 6349 - DNA, 564 bp, Homo sapiens
caaagtgctgggattacaggcgtgagccaccgcgcctggccaataaaagaataacttttatgtgagttttatctcaattaaaaagttccaaaaagaaaagaaaggaaaagaaaaacccatgtaaagtgcttagaacaggcctggccttgcagaagcactcaatatttattacagttaatactaatactactgccataattattttcctcattgtaacagagtctgagcttttcagccttgtgcctccctcctccccttccatcccacacctgggtgagcggatgagcaagcttgggtgctccctcctttggggtgtgcatccacgagactcaaaccatgcatggtgttggcccctgtgcagaaaccctgagcmcagccccacccccaagcacgatgaaacacctgaccagtctcctttcctcactctcaaggcatctcagatctgtgtgggaggcctgcctgctctccacagagacccctattatgtaagcaataaacctctcacatcctcttggtgtgtgtgtgacatcatcagtctcgatgtttgaaccaaattttacgtgg

SEQ ID NO: 6350 - DNA, 1252 bp, Homo sapiens
tttttccttttttctttaaatttcttgcagtgattttatgcttttatttttaaaaaatccacattttctttctccagatcttccataagtattacatttcaggggtttgaaaatgttaaagtactgacaggtacactgtgaagtcaaggaccccaccaggcccctggctgcccaccctcccccacttttctgccccgctagccactggtgtgcagtgactgtcaccccgcctcaccgctgctgcaaggtcaaaccaaacactccccccaccctgccccccacctgaagcacttcctgccctgctccctgggagaccaaaccacacacactcctgtctgcacgtggctgccccgggccgtgggaacagccggtcctgccctcccctcccctacctgaccggtcctccctgcccccaaccatctcctcccgttccttcccccgcagagagctgggcaggctggaggaccgggagggttgaagagtgacccccgcagcccccatacctctagataaatctgagcctccaataccactcacacctcaaaatgtctcccgaggggacttttacatcctttaatctctagaacatggaagtaaggggtctagaagacagaagtaaggggtcccatttcacagaggggacactgaagcccagagaagctcagaggtttgtctaggcagacggaggtgctggggtaaggaaaggggaagtgaggaccccagacagcagctgaggaggagtccatgggcacctggtcccccgggcttgcagcgatgtccttcaagtctctgcagtgggggtggcggcagggacttggccccaggctgtgttccccaggactgtggggggaggagggggagaaggcagctatgaggcagagacagccctgaaagtggggaaaggtgacaggctcacacccctagaaaggagaaagggagagggtggggggtccctaaagcactgttcaacttccttctccccataaagtgacatcctcacttctgccccctcctcacccacttggccccaaatgactgagtcctgaggctcctggggctctttggggtctgctgggtaagtgtgaggtatcctgaagggggccaaggccaatgggggacctggaaactagcatcagagaaagtaacaagtctaggcctgctgggggtgggaggggagagataaggagaccagactttggaggagggaggggacttggctgccstaaagggagggtcagttgtcagtgtttcg

SEQ ID NO: 6351 - DNA, 844 bp, Homo sapiens
agaaaaatctcttctatctttaatgaaattagttaccaaaaatagaaaaaaaaaaatctttgctcaactagaagttaaatgtgtgtttctatttccgaacactagttcttactcaactatgatacagcctgtgagaaggaattagtcctctacaacacactgccactctgaaaggttcaggtaggtggtaggaagtgcccagctttgggatggtgctgaacccgatgccgcagaagccaaatgaacacttggggcaaatggtcccccagcctggcagtagctttggctctcggtgtgacaaagcagaacagctaggggttctcaggtgtaggcgagcacctgaaacccttgaaaggttgtcacatgacgggtgttctcaatgtataaacttctacactgccttggttgttgatgattttaagattaaaaatctacttgggaagttggataacaaagtatcccagtaggatggcccttgtttttttttctttttagacagagtctcgctctgttgccaggctgcagtgctatagtgcagtggcgtgatctcggctcactgcaaccctgcctcccgggttcaagctattctcttgcctcaacctccccagtagctgggattacaggtgcccaccaccacgcccagctaatttttgtatttttagtagagacggggtttcatcatgttggccaagctggtcttgaactcctgacctcaactgatctgccygcctcggcctcccaaagtgctgggattacaggcgtgagccaccgcgcctggccaggatgggccttcttttagatgtttctcatctttagtactcagtatggctagaaaatggtgtgg

SEQ ID NO: 6352 - DNA, 821 bp, Homo sapiens
tgcctgttcgagatgaccagcgtggctggagtgccaggagccaggggacaatgcagggagatgaggcgggaagtaacgagggccctgtggcctgcagggtcagtgccccgcagtcccccaccggcacctggagctctctcttcctgtacccgccacccagctgtgtctggggagggaggctagggagcgtgtgtgtgccagcttcttagacccaccatttctggccccggccctctgtggttgggctataaagttgccaccttgaccacaccagtctcttggggctggccaggctgccccagggctggcctcggaggcatctggagctggcaggaggggggtccccggggtgggatgacaggatcagcctaatgaggcctggcatggctaagcagctggcacaggtcccagcgggtggcttgagcgacatgggtyctccgggagcggccaggacaccacaagatgctggccatctgatggaaagagaaactgaggcacagaccccagatgaaggttaaaccctaacactgggtgagactgggaaccactcttcagtttcccgggaaacaggtcagctcaatcatcttgtctttcttcttttgagacggggtctcactctgtcacccaggctggagtgcagtggtgcgatctcagctcacagcggcctcgacctcctgggctcaagaagttctcccactccagcctcctgagtagctgggaccagagggggatgccaccacacctggctaatttttgcatttttggtagagagggggtcttgctatgttccccaggctagtctggaactcctggggctcaaa

SEQ ID NO: 6353 - DNA, 575 bp, Homo sapiens
ttaggaggccattactatataaaggatgatttaaatggaaaatgatggctaagactgaaaaggctctggttgttggcaaatgttctgtctactcaaaaggaagataattctatgtaataaaaaggcagggcgtttttattcagcctgagttggtatcccagcaccaccatgtatcagctgtatgaatttgagaacgttaacttgcttctcagaaaagcagtggtattatgaagttagggttaartgagttaatatgtataaatgtttagcatgatgcctgacacattgaaagtgttctgccaaatcctatgaagagacaacctaaaatataatactctagtggtttataaggtttttggggttcactttgggaatttgatgaaaactgtagattcttcctcctcaggaaaatatatatatatatacacattttttgcacagttttaggaaattcaaagatccaaagcagtacagtgataggttttaggttaagatcctttgttctaggccaagacccattctcaaaagaaagaataaggtcctcagtttaatttatattttatatatttttgatc

SEQ ID NO: 6354 - DNA, 643 bp, Homo sapiens
ttctgtttagacagtgaccttggcatcactctgcccagcacctctgtatgagtcattagctcaccacacagaccgccaaccatttagaggtcaaagctagtttattacagcagaaagaagtctcagagcccaaatgctatacaagtatttaattatgggtgcacagtttaattacttagtccagctttatatgacttaatttataaatataatttacagttcccttgtttctttctcaagccatttagttcattaatagtgctgactrtaagagctcttcagtcctttcctgctgggctacaggccagtggttaccaaggtaaggggaaggggggcagggatgttgggagaagtctgctcctgcaagaaacactttatcactggtgttgctaggaatttccagtgcatggtgataacaaaaagcagactgacttttatttggttttattattgctttcaaagcctgtaaatgctaacacccccctccaccccattgcctgcacccagaatagaacacttgcccctctgccaaccccatgcctcttctctaggcacaagctttagttcctcattgaagccatttctcagcaacaaccttctagggcttcctcttaggtctccctaagtagcatttgttcattca

SEQ ID NO: 6355 - DNA, 767 bp, Homo sapiens
caagaatttctctgccctcaaagcaattttctgtttaatgctatgctgaggatactcttatttcatactaatgatttagaaccctcaccaccatatcagaattccaagccaaaactaaggtactatgaaaagttaactggtgtggaaagtcaatggtcatttcttatcttatttctctacttgaagagttattccttaccaagagctctccgcaccttcactatggggaaatatgcaccyactttaaggaaatattatgggaattaaatgttgtgacatctttcaggcacccagcacagtggtgagatggagttccccctttaccttctcccatattctttcctgatcctatctgagtaattacaactcttccaaccaatccacttttacacagtttttttatagaataaacatccaaatgcagcatctgtgatatatctgaattaaatagtgggtgcaacaacatggctatttcaagcttaaatgtcagctcatttttttgaaagcaaagtcatgggagtgagtgtctgtttacacctaatgctgagaaatttaatctctgcaggctgtgacacattctgatatcagaggatcaaaatcccactggtggaagttaatttcctttgctctacaatccacacttaccattctgcactcaggtgggaaaataaaagttgtgttcttcatccaaagttactaaaaacacccaagcccaaatttaaacctcaaaactatgagctctgcttccttggaactcaaaagaataa

SEQ ID NO: 6356 - DNA, 602 bp, Homo sapiens
ttgtctaacagattgaagctcagttttcacattgactcctttcttgaacagactctccttggccaactctagtcaggctcctcggcgtcctcttctcaactagacctcaactgtggcctataagactgcaaactctcagcacaaatgattttcacccacccttgcctgcccctctcagatatgccacgttgagacttgaactaacactagcatactttctagaagctcaaggccacatccctaagttgatgactccaactctcttaatttccagcctgagaaacctcacagtccctaggagaatttactgtttgttcccgacaaaaccttcaaggagaaaattctctctctcacactctgtctctctgtcagtccttgtgggaggataagaaactaacttcaataggttccatgctccaatttccaccactgcctcctgtcaaaagataggaaaaatttgtctctcctccacttcagtaccaattaccaagcccagatgaccaagtcatgtggacccacctcctgcagtccttcccctgagcacaccacagtctgtgaaaaatcccagtcttttgttttggtgaagytgtttggatcacatt

SEQ ID NO: 6357 - DNA, 858 bp, Homo sapiens
tgggaggtgatgtataaagagtattcctgtttgagctgccaaaggggcaaagcagaaattactgcatctaccctcaatattctgcaccctaccatgggggcagggagggcacccacgtttatctggggtgagcaaaagttaactaaatgttagacatggtgctataggaratcagaattgaggcatttttgctaatccaagattcagtttctaatttcattttatttcagaacagttctttacccatccatgagagtaagatatacttactcctctgagcttccatgcaatcctgtatattatattccaaatattatgtattttctaccttattaaaatgtaaagctgtgaggagagttttagttcttcagccaaatagtcccaatatatgaaattgatcagaccatccatatagattatggtattctattgcctgaagtagtaaatatttatttctgagggaaacctgtgataccccttttctatgggcatcagtctaccctttctacaatcccttggaatttctttgcattttcaactgccatttccaatcagttttatctgcctggtcttcattaacacaaatagaatctattataatagtttttaagtcattttccctgcttctagtcttttcttcctcaatttctgcttaccttagaagcatagatttcccaaagttctgttagtctcaaattttttctagtaactacagaagaattatcctgttatagcctggtcttaaagacctacatttgcttgaagaaatctgcttcatcttattgctctattattgccttcgcaattcatttctgagtaatgaacctcctgttaggaaggacactatcactcgtttta

SEQ ID NO: 6358 - DNA, 632 bp, Homo sapiens
aaagtagaaagaatacaaaagagcagatatgtcagctgtgtaagtctagagatctaatataaatgtacaacatgaagactagagttaacattggagatttctgcttctagcaaaatctcttgtagtggattttagttgtttttgccacacacacaaaaagggcaagtgtgagatgatggaaatgttaattggctggcctatggtaagcatttcactatctatatgtctatcaaaacatcatgttgatttttaaagctatgtgatatggaggagctggatggatggggaagtcagaaggaataaagctagacttgggagagaaggaggaacggaacccagcgaccccctcctctggcttcagagactggggctgcctgggctgcggaaatcatgagacayggttcagagccaaggcaccggagttggccagacctggtgtcctcccacctccacctctttgcaagtctgtgaccttggacaagttattgtgtccctggatctcggtttcttcatctggacaatgggatacaacaaaccctacttcacagggccattgtgaggagtaccacacactaattctcaggaatgtcacctgtcaacaccactgtcaatcacattctccggggtggctc

SEQ ID NO: 6359 - DNA, 799 bp, Homo sapiens
ggcattgatttttgtatatggcgtgaggtgcagaccaaggagcattttttttccacttggatattcaattggcccaatatcatttattgcaaagaccattctttcccctccctctgcagcattgattttgtcatagatcaggtgactgtgtgtgagggtctgcttctgactctaatctgctccccgggtctatttgtctgcccccatgccaataccaacctgtgttaattaccaaggctttgtaatagacttgatatccagtggctttgttctttctcgtgattgcctggctggggttggccattagcacttcaggtctttgggctttcttgacttacatttgtaaaagatcttgtaaggagaaaagtctctcagggggactagcaggtgtgaggagacccaagagggggtttttgcttcacctgggccatagctgactgcggcttggaccaggcgtcagccayggaagtgggatgccaggtcagtttgggaatatgtttgatggtggctttggtgaggactatggcagagagagggattgcagatgacacctatatttaggtcctaagcagctagctggatgattggccacattcggggacgggaaagtctgagagagctgccatcttggtggaatgtgcatccctcacagccccgctccacacacacacatcctctcctcacctgtcatacagcacaaataaccactggccacagtcgtgatgccaaggttgtgtgcctcaacccatctggccgtgtgtctatgtgtgtttgggggcttctgtgagcattcctgttg

SEQ ID NO: 6360 - DNA, 815 bp, Homo sapiens
ggatccgagtgtgccaagcagaggggcaggcagttagtccacttagaaagcagacagagtgggccgggcgcggtggctcatgcctgtaatcccaacactttgggaggccaagacgggtggatcacctgaggtcaggagttcaagaccagcctgaccaacatggcaaaacccccgtctctgctaaaaatacaaaattagccgggtttggtggcgtatgcctgtaatcccagctacttgggaggctgaggcaagaggattgcttgaacctgggaggtggaggttgcagtgagccaagatcatgccactgcactccagcctgggtgacagagcaagactccgtcaaaaaaaaaaaaaaaaaaaaaaaaaaargaaagcagacagagtgaggggaaagagagagacaggaggtcagggagccaaggggccaggacttgcaggactctggatttcatttcttactcgctgaagagtctggaatttattctagcagtgacaggaaagccactggaagatttaaggttgggaagggtttcatctacttgttttaaaaagactgctggctactgtgtgaagaaaaccgtggcagggcaggagtggccacggggaggccatggcgtctgttttggaaggtgtctagcaagcagcaaacggcaggctggacttaagtgggagcagcagaggttgtgagaaagggtcagatataagatgtattccaaagtcagagcacacaagatgtggtaatgggtggatcaaagatgaggcaggtaaaggggtagaatctggattcccaaagggccccatgtgattgctaaaaa

SEQ ID NO: 6361 - DNA, 809 bp, Homo sapiens
caacttctctaaccatatcccagggctcccttcgatctcacattctgcaacccatgctgaaacctcttcctcctgtctcaccagatcataggggaaatargaagagaaggcactgaccatgcagctgtgccttggcattttatttccttatcattgtatttccttagttatgacacatttccatttatggagtactgacccttataaaatctcccagtgggtactcttgatctactaaataatgcctctggcttcttctttttaccctttaaatatattttgatggttcatttggcacattccccattcagttattaatggcccacaaaaacttactagcagcaatcatttactgattaatctacacaacaatccagaaagacaagtagtattaatccttcgtcctgcagagggaaaccaaggggaaaaggaaggttaactcagtttcccaaggtcagtggctaaacaagattataaccagccctaacctgtcctccatttctataaacacttcccacagtgctgttgtcttcctttaaaaatcaacattgtcgacgcagctcgataatttctgtgttgaaattccattgacacagactagttcaaaactctcaagatttaccaacaataattttaactgctaatagttcatggatgaaagttgctaaaataaagagattattgtagagaaaaaaaacataagcgaaaagatctggatttagaaccaactctgccactatgaaactgaaaaaatcacttaacttctctacatctctgtgtcatctgtaaaaatgagattatgctaaata

SEQ ID NO: 6362 - DNA, 812 bp, Homo sapiens
gttcaatcattttctttcttggatatcttacaagtaataaaaaacaagtttatatctgaagtttcatcttctcttaccaaaagttctcttcctcctatttttcttatttttcttaatgtctctaccatatacctcatttctcaagctagtctctgtcttgctttcattatcattggcaaaaatctatactgttctgtttctttttggtgtactttcttaatgacttgaattttctccccytcttatttccaataatgaacaatctaattaaattctcatgattgattgctttccttagggtaacaattgcccaactactgatgaagattcagtctttccccatgtctgcagtccgtgctgtaggatatatctattatcttgacaattgttggtgctgcatatctgcatcaataattcaaaatggatattcgattagggttggtagaagccctcccaagaggaaatttgtttaacttttcctaaatgtaaatttttgaaacctatcttttggccagacacagtggcacatgcctgtaatcccagtactttgggaggctcagatggtatgatcacttgagaccaggagtttgaaactagtttgggcaacataggctatctctacaaaaaaataaatagttagccgggtatagtgcagcacctgtgatcccagctacttgggtggctgaggaggcaggattgcttgatcccagatggtcaaggctgcagtgagccatgatgatatcactgcatttcagcctagcgacagagtaagattctgtgaaaaaaaaaaaaaaaaacatattttcaaaaat

SEQ ID NO: 6363 - DNA, 802 bp, Homo sapiens
tcaaaagggccggaaagctaatataaaagattgatatcaaaaataacttttgagattcttgaagtttaacaactgtggaatgatacaaggaaaagtagtgataaatgtggcaagctaattctttattatattaaacttctgtgtaaaatagaaaaaacaaaatttccaataagaataatcatctgataacctctgtctactatttagaaatattttaataattgaaaattaaaaaaaaactatgactcaaactaataaaatacatgcattacaaaagccaaatcctgactatgtgctttaataacatggtgaatttgatggaataaatatgctatgaatgattaatgtaattgaattacatgtatttgatgtrgtagtgaatataggcagctactacacattgattagaaatagtccaataatatttaaacaaaaaagatacagaattatacattaaaaatgatagatggtaataccctagaatatgcaagcattttaacctaaaaatggaaatgcatggccttaggtttcttttcaatttaagtgtaaggaagaataaattcaaaagatctattgtgcatcatggtcaccataatcaatacaatagattatgaacattgctaagagagtagatgataagtactctaaccacaaaattcataaatatacgaggtaatgcatgaggtaattagtattatttagctattccatgtgtacatatttcaaaacatcacattatataccagaaatatatatatctttaattaattaaaatattcagtttaagtcaagtgtaattctt

SEQ ID NO: 6364 - DNA, 802 bp, Homo sapiens
tcaaaagggccggaaagctaatataaaagattgatatcaaaaataacttttgagattcttgaagtttaacaactgtggaatgatacaaggaaaagtagtgataaatgtggcaagctaattctttattatattaaacttctgtgtaaaatagaaaaaacaaaatttccaataagaataatcatctgataacctctgtctactatttagaaatattttaataattgaaaattaaaaaaaaactatgactcaaactaataaaatacatgcattacaaaagccaaatcctgactatgtgctttaataacatggtgaatttgatggaataaatatgctatgaatgattaatgtaattgaattacatgtatttgatgtggtagtgaatataggcagctactacacattgattagaaatagtccaataatatttaaacaaaaaagatacagaattatacattaaaaatgatagatggtaataccctagaatatgcaagcattttaacctaaaaatggaaatgcatggccttaggtttcttttcaatttaagtgtaaggaagaataaattcaaaagatctattgtgcatcatggtcaccataatcaatacaatagattatgaacattgctaagagagtagatgataagtactctaaccacaaaattcataaatatacgaggtaatgcatgaggtaattagtattatttagctattccatgtgtacatatttcaaaacatcacattatataccasaaatatatatatctttaattaattaaaatattcagtttaagtcaagtgtaattctt

SEQ ID NO: 6365 - DNA, 809 bp, Homo sapiens
ttactggtgccaaatagtgtctaagcatccacaaccttgaattctttctgaaaccattcattcctatagcctgttctcaggctgtaaatgcgagagatctttctatcagaagagaagaggaggcgcagtttaattcctcacaaattaaaggactgataatgctttattccataaacattttctgagctttctcttcatgcaagccctgacttgggtgcccacccatcctgcacagaatattasgatagcaaattttctgagctagaactcagtggtgggttcaaattctgatttctacaacttacttgttttagaattttggtcaaatgacttaacctctttaaacctcagttcctcatttgtaaatgggagacaacattcttttcatgggtttgttaggcagatcacgaggtcaggagatcaagaccatcctggccaacatggtgaagcccagtctctactacaaatacaaaaattagctgggcttggtggcacgtgcctgtaatcccagctacttgggaggctgaggcaggagaattgcttcaaccagggagtcagaggttgcagtgagctgagatggcgccattgcactccagcctgggcgacagagcaagactccgtctcaaaaaaaaaaaaaaaaaaggaatttaatgagataacttaaagttcttaatatatacttcaactaaatattataaataaatagataaatgttacctattattatcattagagctttctcaatagttgttttattactgctcactgtcacatttcctaaagatttctgaagaatgtttcacatcatt

SEQ ID NO: 6366 - DNA, 809 bp, Homo sapiens
ttactggtgccaaatagtgtctaagcatccacaaccttgaattctttctgaaaccattcattcctatagcctgttctcaggctgtaaatgcgagagatctttctatcagaagagaagaggaggcgcagtttaattcctcacaaattaaaggactgataatgctttattccataaacattttctgagctttctcttcatgcaagccctgacttgggtgcccacccatcctgcacagaatattaggatagcaaattttctgagctagaactcagtggtgggttcaaattctgatttctacaacttacttgttttagaattttggtcaaatgacttaacctctttaaacctcagttcctcatttgtaaatgggagacaacattcttttcatgggtttgttaggcagatcacgaggtcaggagatcaagaccatcctggccaacatggtgaarcccagtctctactacaaatacaaaaattagctgggcttggtggcacgtgcctgtaatcccagctacttgggaggctgaggcaggagaattgcttcaaccagggagtcagaggttgcagtgagctgagatggcgccattgcactccagcctgggcgacagagcaagactccgtctcaaaaaaaaaaaaaaaaaaggaatttaatgagataacttaaagttcttaatatatacttcaactaaatattataaataaatagataaatgttacctattattatcattagagctttctcaatagttgttttattactgctcactgtcacatttcctaaagatttctgaagaatgtttcacatcatt

SEQ ID NO: 6367 - DNA, 831 bp, Homo sapiens
ctataatgtagtctggcctcccctacattgaacctaaatctggtcaaacctccagatctaacttctaatttacagaggagacagaggaacatgtcaggcactatcacaaggatgcaatcaacaaaacagttgttagaaacaaatagacaaatgactgagtttctttaagaataaaaaaccgccaaagacaaaaaggaatagaatgggaacctataggctaaaagagatttaagaaatatgttaaccagttgtaatgtattgggcctcctttggttcctgatgcaaagttttcaaaaggaagagtttttatcttttagaaatacatactgaaatatttatagattaaactatattatatctgggatttgctttaaaaatctggagaagagtaggaaaacaatatacaggaaaaagaaattagccatgagttgataattgttgcaactgagtgataggtacacagagatgtatcaggccttccttttttgtaaatgttttaaattctgcataattttatcaaatgccatatatagaaaatgcactattcctcacagacacatgcatactcaaggccacagattgagcactccagtgctggttagagagataggaataaggacctgaataatgaagaaaaaataaaayaataatacaagaaaatgactgcaaagaatgatgataattatactccaggaacagaggaggatgattaacgctactctctaaacccaaaggcccccccaaattaaagaaataaaatacatgactgaaattaaaaatcatgactatgcattcagaaagcaatttgataattgggaggttaatgcagga

SEQ ID NO: 6368 - DNA, 721 bp, Homo sapiens
agtgaaacctcgtctctactaaaaatacaaaaaattagccgggggtggtggcgggcgcctgtaatcccagctactcgggaggctgagtcaggagaatggcgtgaacctgggagtcacagcttgcagtgagcygagattgcgtcactgcactccagcctgggtgacacagccagactccatctcaaaaaaaaaaaaaaaaaaaaaagaagagaaaagaaagaaggagagaaagcacagcagttgcagaggagtccagccatttcacaaggaagaagaggaagcacacagataactaatagccaaacataaatgtctacgcttttcgtttggatgggccatgggccacgttccagctaacatgattctttcatctctcatctctttccgccctttcctttcctcctgtgttctgatcctgactaccaccaggcatcctcagaaaggatttttcatgctgataattagacttgatgtatttatggagctctgttttcccagaggatcatcccatctgaggctgacatccctttgaaagtttggagaatgtgaagcttggaagagctaaacagttcccagagaccagaaccgcagggaattaaacttcaggatgatcttaagatatttagtgctcttatcctccatgtgcagagtatctctttggaaaaattttggtggcaaaagtcattaatgaatctatataacaccctgtttaaccaaagta

SEQ ID NO: 6369 - DNA, 721 bp, Homo sapiens
agtgaaacctcgtctctactaaaaatacaaaaaattagccgggggtggtggcgggcgcctgtaatcccagctactcgggaggctgagtcaggagaatggcgtgaacctgggagtcacagcttgcagtgagctgagattgcgtcactgcactccagcctgggtgacacagccagactccatctcaaaaaaaaaaaaaaaaaaaaaagaagagaaaagaaagaaggagagaaagcacagcagttgcagaggagtccagccatttcacaaggaagaagaggaagcacacagataactaatagccaaacataaatgtctacgcttttcgtttggatgggccatgggccacgttccagctaacatgattctttcatctctcatctctttccgccctttcctttcctcctgtgttctgatcctgactaccaccaggcatcctcagaaaggatttttcatgctgataattagacttgatgtatttatggagctctgttttcccagaggatcatcccatctgaggctgacatccctttgaaagtttggagaatgtgaagcttggaagagctaaacagttcccagagaccagaaccgcagggaattaaacttcaggatgatcttaagatatttagtgctcttatcctccatgtgcagastatctctttggaaaaattttggtggcaaaagtcattaatgaatctatataacaccctgtttaaccaaagta

SEQ ID NO: 6370 - DNA, 2708 bp, Homo sapiens
tcccacaggactcaaggagagagggtggtcttggttgcagggcactaaccaggaagctcagctttgatcactatcaaggctcttgtgaattaacagyggacaatggacacagagctacaagttagcatttgttattcttattatttccacctctaagcctttgtgtgatggtctgatctcccacggagtccagaatggccccattacccccatcatattctatttgccaatctcataaggaagttagttactcgggtgttacgttttggatgatcaaatattaaaaccatttttaaaagtaaaaagcaacatactaataaagttgtggactcaagctttccaggtttttatctggttgagcattctttatactaaataaaattatcttttttatttatccagaaacattgggggaaaaaaatgaccttatgtattaaaaactcgaaatggtccttgcctggacttggtgatgcttgcacagcaaaagactacctgttggaccgtaggttctaggtattcacttcccccccaccagtcaatcccctgcctgtgcttgctgaagaagcctttggtcgtggcgtccataaacattattgctgatggaccatggacacgtgcaggcttccaaaaatgtagacttggatctgaatcagacaggaaaactataggggaaaacagaagctttattttgattatagaaccaaagaaatcttggatagaaaggtaaactcaagagtatcttttttttttttttttttttttgagacggagtctcgctctgtcgcccaggctggagtgcagtggcgagatcttggctcactgcaagctctgcctcctgggttcatgccattctcctgcctcagcctcccaagtagctgggactacaggtgcccaccaccacgcccagctgatttttttgtatttttagtagagatggggtttcaccatgttagccaggatgctctcgatctcctgaccttgtgatccgcccgtctcggcctccgaaagtgctgggattacaggcgtgagccaccacgccgggccaaatttaagagtatcttagagggaccagtctatcccacaaataacactagaggctgtcaaaaagagttttcctcctctctccaatgtttaaccttaaggtccaattggctctttccacctttattctgagccgaacctacctgaatttgaaggatagattagaaaggttagggtcagaaatcaaaaacaccctttcctcctgggctctgggacgtgaactgtgattttttttggtcaatttttatgaagaatggtactccacgaagacattagtcgttcatgtcagccatctaatttaatgattaaattaatcattctaatttaagagcagagaaaaatccaagacccagaaagcacgtgttggagctcagacaaatgcctggtccctgatacctaatgcagtatttgacgatgttttattttactgggcaactgtagtgcatgcagtccagacccattaaggagaggaggaggatgtaacattggatattagcagtttagaagggtacaatctccaagccagttttcacatgaattaattttattaaaaaatgttacattctagtccactagaacctttaggaaataccactctttgtgttgcctattgtcaacagtactgaactatggaatcagccataaaccagccatgtaattttattttatttttgaggcagggtctcactctgcagcccaggctgaatgcagtggcgtgatcatagtttgctgcagccttgaactcttgggttcaagtgatactgccatgtctgcctcctgagtagctgggactacaagtgtatgccaccaggcccggtgaatttttgatattttgtagagatgggatcctgctacgttatccaggttggcagccgtgcaattttagacagagactttgcttctttggactgtgaagtggttaaagtgatctgtgtgattctttctaattacttgatatcactctattccctaacatcacagattgcaaatctgatttaccattctttgttgacattaacttggtcccctaaaaagcagctaggaattaggaataagctgatccttcacaagtgaggtggaataaaagagatgtgtgtgaagatgggcacttgacctaggggttactagagaattctagttttctgggatgttgctaaccagtttcacaggaggaggggaaaaaaatcttttctcataatactgttacaaagcttttggaatttttctaaggagttactacaaaggagatatttattctaaatgtgaaaagatcagctcagcaaatgaagacatttactttattaccataatttaacatttttatagactttctgctcttcatcattgagaacaaacatgaaaatctgcacactttcaacagttaggacattgttctgagaaggaaaacgtgactgcctggaaataaaggctgtgaatcaagtgcatgcaaatgagctccatgccacccagctctgcagccctcctagaaacatgtgtaagacattacaatcctgaaggctctgggcagcctaaggggacatgaccacctagggctcaagcctagcaaagcagaacttattctggacacgtcatgaggttgaaatcactttttgtaaatctcagatttaaagcaaataagaatacttcaagcagaaaatcttagaaaa

SEQ ID NO: 6371 - DNA, 2708 bp, Homo sapiens
tcccacaggactcaaggagagagggtggtcttggttgcagggcactaaccaggaagctcagctttgatcactatcaaggctcttgtgaattaacagtggacaatggacacagagctacaagttagcatttgttattcttattatttccacctctaagcctttgtgtgatggtctgatctcccacggagtccagaatggccccattacccccatcatattctatttgccaatctcataaggaagttagttactcgggtgttacgttttggatgatcaaatattaaaaccatttttaaaagtaaaaagcaacatactaataaagttgtggactcaagctttccaggtttttatctggttgagcattctttatactaaataaaattatcttttttatttatccagaaacattgggggaaaaaaatgaccttatgtattaaaaactcgaaatggtccttgcctggacttggtgatgcttgcacagcaaaagactacctgttggaccgtaggttctaggtattcacttcccccccaccagtcaatcccctgcctgtgcttgctgaagaagcctttggtcgtggcgtccataaacattattgctgatggaccatggacacgtgcaggcttccaaaaatgtagacttggatctgaatcagacaggaaaactataggggaaaacagaagctttattttgattatagaaccaaagaaatcttggatagaaaggtaaactcaagagtatcttttttttttttttttttttttgagacggagtctcgctctgtcgcccaggctggagtgcagtggcgagatcttggctcactgcaagctctgcctcctgggttcatgccattctcctgcctcagcctcccaagtagctgggactacaggtgcccaccaccacgcccagctgatttttttgtatttttagtagagatggggtttcaccatgttagccaggatgctctcgatctcctgaccttgtgatccgcccgtctcggcctccgaaagtgctgggattacaggcgtgagccaccacgccgggccaaatttaagagtatcttagagggaccagtctatcccacaaataacactagaggctgtcaaaaagagttttcctcctctctccaatgtttaaccttaaggtccaattggctctttccacctttattctgagccgaacctacctgaatttgaaggatagattagaaaggttagggtcagaaatcaaaaacaccctttcctcctgggctctgggacgtgaactgtgattttttttggtcaatttttatgaagaatggtactccacgaagacattagtcgttcatgtcagccatctaatttaatgattaaattaatcattctaatttaagagcagagaaaaatccaagacccagaaagcacgtgttggagctcagacaaatgcctggtccctgatacctaatgcagtatttgacgatgttttattttactgggcaactgtagtgcatgcagtccagacccattaaggagaggaggaggatgtaacattggatattagcagtttagaagggtacaatctccaagccagttttcacatgmattaattttattaaaaaatgttacattctagtccactagaacctttaggaaataccactctttgtgttgcctattgtcaacagtactgaactatggaatcagccataaaccagccatgtaattttattttatttttgaggcagggtctcactctgcagcccaggctgaatgcagtggcgtgatcatagtttgctgcagccttgaactcttgggttcaagtgatactgccatgtctgcctcctgagtagctgggactacaagtgtatgccaccaggcccggtgaatttttgatattttgtagagatgggatcctgctacgttatccaggttggcagccgtgcaattttagacagagactttgcttctttggactgtgaagtggttaaagtgatctgtgtgattctttctaattacttgatatcactctattccctaacatcacagattgcaaatctgatttaccattctttgttgacattaacttggtcccctaaaaagcagctaggaattaggaataagctgatccttcacaagtgaggtggaataaaagagatgtgtgtgaagatgggcacttgacctaggggttactagagaattctagttttctgggatgttgctaaccagtttcacaggaggaggggaaaaaaatcttttctcataatactgttacaaagcttttggaatttttctaaggagttactacaaaggagatatttattctaaatgtgaaaagatcagctcagcaaatgaagacatttactttattaccataatttaacatttttatagactttctgctcttcatcattgagaacaaacatgaaaatctgcacactttcaacagttaggacattgttctgagaaggaaaacgtgactgcctggaaataaaggctgtgaatcaagtgcatgcaaatgagctccatgccacccagctctgcagccctcctagaaacatgtgtaagacattacaatcctgaaggctctgggcagcctaaggggacatgaccacctagggctcaagcctagcaaagcagaacttattctggacacgtcatgaggttgaaatcactttttgtaaatctcagatttaaagcaaataagaatacttcaagcagaaaatcttagaaaa

SEQ ID NO: 6372 - DNA, 794 bp, Homo sapiens
ggatcccccatggcaaaaagtgactgtagatgtgggtgttgagtgtgtaaagcctcttgaatactctgggcttgtctccagtgtctggaaagttgtttatgaaatggtagagacaagaacattattatttaattctggatatgtgaacctagtacatgccttatatttcataggcattctggaaaatccccacactattcaaaaaggtgaaaactatttcaaatcaatttattttaacaaataacttcattttcagatttgatgagccatctctgaagttaaagaaataaatatcmtacatatttgatacctttgaggaatgaagttcatgcttacccttccattttttttctcagtggttcagtttacaatattttatttctgagtaaaatcctggagttacttcccatatacctagtctcacctacaaggaattacatgtgccattcatgactgcttgccttagttggggtctttgtgctttttttatgcaatggttaagttctaggttcactgcagttacttccacaggagaggtgattcatactttactgaaatgcctggaactgatggcactggtagggcctgtagatcagactgtgaaatgcttatctgcactgagagccctgactgtttccattactgttctggtctcctatgcttggttaagttagaaatttcaatattgtttcctgttgccttctttcattttcatttatattactcttattagccaatctatttggaaactagaatatgttttttgaggcttctctttagaatgtgccagaatt

SEQ ID NO: 6373 - DNA, 634 bp, Homo sapiens
  misc_feature (1)...(634): n = A,T,C or G
ttttnnnnnnnnnnnnnnnnnnnnnnnnnnnnnnnnnnnnnnnnnnnnnnnnnnnnnnnnnnnnnnnnnnnnnnnnnnnnnnnnnnnnnnnnnnnnnnnnnnnncctcactatacttttagcaatttgatctatccttgaaccaaagctgacagacaaaaaaggaagcaaagcaaaataaaacaatgtaaataccattcctgaagtggaaaatgattcagggtgttacttcagtttcctatgtccctcttagttagttttcagaatcctcaggtagtttccttctgtattctgcttaatgattttagccataatcagactgtagttgacttacaccattttatcaatattggaattatttttaaatttacattttatgtttaggaattgctttgaaaagtttgatttaattttgcttttaagtatataactatctatatggtcctcaagtatttatatacctcccaggtaaaaactaaaaaacaaggttgttaggagctgtaacatgtcccaccccaaaatcatatgttgaattcctaaacgycagtacttcagaatgtgactgtatttggaaacaaggtctttcaagcctattaaattaaaacaataaagaaaaataaggccactaaagtgga

SEQ ID NO: 6374 - DNA, 653 bp, Homo sapiens
tctcttttttccccagccatgttgtgaggatagccctggtagcagaactattccgagacttctgaggcatcacaggcacctgaagccctaagaaaagatgctcctctctgttaagaagactgagaaaaagagagtccctgatttttttctccatttcttctttcccaccactttgccctaaatgtagttccagtctcatggaattccccaaccgtctaggsggggataaaatccagaaagaaccttatcttttcattcagagagactagaaaagtggcctttgggaactattgtcaaggaaaatctagagaggagaggttgaagaaggctcttccccactttctgtgcatgaacttgcataagtctaagacttccctctgggttgtgcctgggtggagcagagccagcaaagcacagcaaaggctttaggaactggactgtaaaataaaccatagcctaaatcccagtctaacccctcagtggtatatacatatgcaggcagattcaaacagcacagcaaaggctttgaaaactgaactgttgttagaaacaccaatcacaggcagtaaggtggaacttgcactctcagcctaactggattgattgcctattagaacaaaacaaaaatcgacattttctagaagattttagca

SEQ ID NO: 6375 - DNA, 1797 bp, Homo sapiens
catgacaccagtgtggcctctactgctatctagttaaatgatgaataattgggtcatatgtttcatacacgttttcagaattaaactaattacagtaagcattttgaaaatatgaattagtccataaattttactaattgtataatttcaaaagttattttatttattggtgagaaagaggaaagtactctaggtaactaataatcagtgctccaacactgagaaatgggggagagagagagagaaagaggaagagaggtagacagaaaggtgccatctgctcgtctattatacagcatcttgtctcatgttttttcacaacagttctaagatagaacaaatacatatcctaaatataaactttgaatgaaattttttgttactgtggcactatgccatttcaacatgacaggatatggtgatgtatttcaatataattattttagctgtagggcataagtacaataaaaatactgatacctarctacctacaatatcaccaaaaagcatgtgtatactttgtctttcttatagttattatgttcccacataccttcaaaggcatttcatttaaaaaatacatttattatgaacatttttatgagccaatcattgagctttgaacaccatcattattttacgtacttcctcatctatacatttcccaatctctctctgttttactggagcgtttcgaagtcaataccatgcagcatgtcctttcactcctaatactttagcaagcttttcaaagtgaaaaagacggagtcagagggagagagaaagcgtgaaagtggtaggcaaagagaggaagagagaaaaaaccattttcttacgtatccacaaatttacaataactacttaatacttactatcatccagtatctgctccatatttacattcctctggttatctaaaatatctcttttcacttattccatgattaactgaactagtagaatatatgattatatgaaatcatagcatatataatatttatgatttaaacaggtttcattttattgtacttcagccttgtatcttgtaatctagaacagttcctcctatctcctcttttctctctgccacggacttattgactaaattagattcctacattctagatttggcttgaggtgctattcaagtttccctcaacttctgaatttcttatagactgaagttaaagacttgattaaattcagttagctgttcttttggttttataaaaagaatatttcaggcatggttcttgatttcctggcttgtctaaaatgctttcacgttgcatcatatcataccagaatgtgtatgattcagtgatgctaaaattgatcagtgggtttaggtgatggtagcttgataattttattgtgaagtttatcatcaatacttcatctaaggttttattatctaatgaggaccatttctttaatcagttattgcatcaggaattgcaaaatgttgatttagaaaattctttccttttgaatttattatctgagcatctgtataaaatccctcaactacagagctctttggacatcctgaaatgcacattataccagaaaagccagacaaatgcttgtttccctttaaatctcaatttctagagtcatgatttggtgcccaagcaactgccattggtgcccagtgacttttattttatttttctttctctcctaactcccttttaaaaaatatcattttaaatttacaacattttgtatattcaatttgttttaattaatggggtcacttttttattgttcatgttgtctcatctatggcaagtg

SEQ ID NO: 6376 - DNA, 626 bp, Homo sapiens
atttgaataacaaaagcatctgcactccagatccagtttaatccacatgcttccagagtccttgatgcttcctgtacactctgaataccaccaacagcagaaaacgattgagtgtggattgttaaaggggaaagattcaggacaaaaacatgaggactgtcactcccttgggagagagccctccgctcccatgtcctctgcactgttttcacatgaattgtgtagaggatctggaatggaatgttgccatgtgattaggtaccagtgagacaaattctgtcagtgatccttctgtattttaatttatgcagaccataaaagatattcagtctgttctctaatttatagaccttcttttgaaaataatctaatctgactacagtaaactaagatttttgaagaaatatatccttttcagaagttctcaaaattacttaaagctatccccccaatttrtcaactgccacaatcagtcgcacccggtgagcacatttccgtgtctttacctagtgatcagcagggccgcagcgggttcctgcctgcagtagggagggggtccttggagagaatgtggtttctttggaggactctcacgatcgtttaatgaagatatctatgcatgcccc

SEQ ID NO: 6377 - DNA, 747 bp, Homo sapiens
taaagcaaggagaaaaccatataacttttttctccaatcttattgaaggcttattcagtattttaaatactaagttctgcattttataacttagagtaatgaggtttcttatataaaacttcatatcatatgccaaccccaacctctgtaaactttattctgatagtattcctgcaaatacatacatacacaacatatttacacatgcacatttttgtttaaggctagctattcccccccccacacacacacacatttgcctgcgtgagtaaccagactagatctcttttacaattttcacattccccatatctgatcagaggttcttcccaaatgtatgcacatgacacgcacacacacacacacacacacacacatgcatacacttggacatgcacacacacacatccctatctccatttcagaaatgttctttgctttgttgggagcagsaagccactgtttgttctgagtgcagaccatggtctctcttgttctgaattctggtgagttgtcaccatgaatgaatgaatttcctgtggggaagacaggatcatcttcctatctgtttctcacgcctcctgtgtctctgctgttgccagtgttagaaaccttaaccccttggagtctgttcatctctcttgctggttctgctccctggtatgcgtgcagctagtgactgtgcaggcatcaggtgacctctccgcctactttaggcaaaagccagagaataaaagagaggatcct

SEQ ID NO: 6378 - DNA, 809 bp, Homo sapiens
ttaagttttgtatttgacctctccttattgtccaataattatgatttattattctggtctattagcataattggaagtttatgggcacatgtcttattagtatctctttataattagtagagttatccggaggtttccccctttgagaaaagatggagtaagtctggagctggctcattcttcttttaaggacatttgacatctgcgttctgcaggaacgcatatttgactcctctttaattggttagtgtgtgagagcagcaaggctgaccaacaggtgggttacttcccatctgccatccacacgttcctcgtcatgacaccattcctttttatgctgccatgattttaactgactcaccaatttcaggtcactctttcctgctcatgctggtccatcaaggtatctgctaaatagacatgtgtttaccaaagacacaggacacccatagacagcagcacttttccactattgaaaataataaggatgaggcatattctattaaactcactctttctttaaatcactccatttttaatacttaatattacctgtcctgaaattcttttcttgcccccaaatatacctgcaggctgtacaggaaacatagcggcttctgcttctggkgaggcctcaggaagcttccaatcatggcggaaggcaaagaggggaggaggcatctcacagggccggagcaggaggaagagaggttgggggaggtgctacactgttaaacaaccaggtctcatgagaactcacgaactgtcacgagacagcaccaagggcacagcgctaaaccattcatgaa

SEQ ID NO: 6379 - DNA, 767 bp, Homo sapiens
aatgtctcagcaatgcatgtctcactagtgtcttcataatggccttggtaaatgggcctatgctgtaaatgggacaatttacagatgatatagaaattgaacaaataaatacaagatactagaaataatttttaactaatacactagaaaacataaatgaaactttaaaatcatagaaaaatacaacatatccaaaatgcacacaataaaatatgacacctgaaatgtcctctaactataaataaatataacattaaatcatagacagaaatatttgcacaaagaaaaccacaagcctgggtgactttaaaacttaggcctggccgggcacggtggctcatgcctgtaatcccagcactttgggaggctgaggcgggcggatcacgaggtcaggagatcgagaccatcctggccaacacagtgaaaccccgtctcttctaaaaatagaaaaaattagccaggcgcagcaatgggcacctgtagtcccagctacttgggaggctgaggcaggagaaaggcgtgaaccctggaggcagagcttgcagtgagccgagatagagatagcaccactgcagtccggcctgggcgaaagagtgagactctgtctcaaaaaaaaaaaaaaaaaaaaaaattaggcctacaaaaattcaaagaatatatgattctaaacttacacaaacactttttgacaattataaaagagaaagaaaagacaaggaycactaagaggaaaaacgttgtgcttcccaggccatctgaagaatgta

SEQ ID NO: 6380 - DNA, 758 bp, Homo sapiens
cagaactgtcttcctgcaaaagaaaaaggaaacatatactgcatttcaaaatgaaatatacatcatcatttcataattgcattatcacccgccattgcattaccacttatctttcttcgtgtgggtaaaagaatctgatattacaaacttctgttaaaatagcctttttttcagagatgaaaaagaatatcaaagaataattaaaggtaaggatgcaaaaatttgtcatatgtgaagatgttcccactaaccagccaccttcctggggctatgatctgacccatgcctctggcgctggrgatgtattcatactgacccatctcgtcttcttcttgtgagcaataacctatattcctcccatttggtcacatttaggaattatgagacagtttctggcccataaagactccaaacctggaatatatttctccagacctttgccattgacccatcagaaacactgtattacatcttatttcttgaccatcacttgaattttacataagagaaagctattttctgcccatatgcttttgttatatgattcctaattttattggcattgatataacatcaggaatgagattcagcctattttgactggttaggtcatattccattagtcgtgtatatacattgatatttgaaatcacttttatagaatatcagtgccttcgtgaatcacatttggctgcagtaatatgcccataggactgtctcagttcttccttttgagtttaatattagaataaaatccc

SEQ ID NO: 6381 - DNA, 761 bp, Homo sapiens
tcactttagcctaatgtaccccattctcctctcctttctcctgctatcaccttcagtaaggattagttacctacctagttgtatagtgttatgctagaggctgtgtttggagattggcctttggacacacagcatctttactattcttgccaatgctagaaaggactgatattacgactttccctgtcaagcctatgagtacrctttacaggccaaggctcccctctgggaattaagcatctagaatagagccattatagtcatgctcctgtgtggggagcatgaaggtttccaaccaggactgtaaggtgataaaagcacatgtcagattcagtttcagataagtgtgttttaaagagaagagatgttagaggataagaagacatggagatcacaggatgatcactggattgggcccagggaagcctttagcttttcctgaacaaactggaaaggttttatggaaaaatttgaagtctgtttttaagtgggtccaagtctagtggtctctagctaactcatgtacttcagttcccctgaaatggaattagctgaacattttcctttagagtttcaagaatctttcattgttttttgagacagggtctcactatgttgcccaggctgctctcaaactcctgggctcaaatgaccctcccacctcagccttccaagtagctgggattacaggtacatgccaccacacctgcctaatttcaagaatcttaaattaacttagaaccaaggagcaagatgaagga

SEQ ID NO: 6382 - DNA, 761 bp, Homo sapiens
tcactttagcctaatgtaccccattctcctctcctttctcctgctatcaccttcagtaaggattagttacctacctagttgtatagtgttatgctagaggctgtgtttggagattggcctttggacacacagcatctttactattcttgccaatgctagaaaggactgatattacgactttccctgtcaagcctatgagtacactttacaggccaaggctcccctctgggaattaagcatctagaatagagccattatagtcatgctcctgtgtggggagcatgaaggtttccaaccaggactgtaaggtgataaaagcacatgtcagattcagtttcagataagtgtgttttaaagagaagagatgttagaggataagaagacatggagatcacaggatgatcactggattgggcccagggaagcctttagcttttcctgaacaaactggaaaggttttatggaaaaatttgaagtctgtttttaagtgggtccaagtctagtggtctctagctaactcatgtacttcagttcccctgaaatggaattagctgaacattttcctttagagtttcaagaatctttcattgttttttgagacagggtctcactatgttgcccaggctgctctcaaactcctgggctcaaatgaccctcccacctcagccttccaagtagctgggattacaggtacatgccaccacacctgcctaatttcaagaatcttaaattaacttagarccaaggagcaagatgaagga

SEQ ID NO: 6383 - DNA, 820 bp, Homo sapiens
tcagcccatctcctggaagggcctcagagagtcagagtcgtagtgtattgtttccatctgctcttcaagagaaggaaaggaaagaaccctccactgtggtgtcaaggggcctcaggcccatggagcacagtcttcygagatgcccatcacgtgcaggactggcgtattgtaaatgctctgcaaatgtttgctgccctgtgccaggacaaagtgaaatcacctgacgaagggaaagttgaggaatgatacagttgctccgtggaagggtttttggtaaacctgaggctgggttcatctattccttccttattccctttcctgcacccctctatctctttcaccaagttttggccctcacaatgacactcacatttgcccttcttctctaatttcatggactcttcccttgcgacctcatcgttatcagctgcatccttggcagcctccttgccaaggctgagctctctgcggctgagtgcatttcctaaagcactgctcctatcctgataacacattgccccacccaaccactggcctgacatcccatggcagtaactgacttcagactcttctgcagagttctcaggtgcttccaaggtctgcccccagccctacctatctgggtccgtttttattactcctgagcccatgcttcctttcaacaagacaggtctgctccacctcttgcagggtccagggttgctcctgcttttgcttttgctgtactatcatttcgaatatcctctctttcttttcatgtaactaacaaaacactctggcctctaaacccagacacacctcttgatgaaaatatcaccag

SEQ ID NO: 6384 - DNA, 820 bp, Homo sapiens
tcagcccatctcctggaagggcctcagagagtcagagtcgtagtgtattgtttccatctgctcttcaagagaaggaaaggaaagaaccctccactgtggtgtcaaggggcctcaggcccatggagcacagtcttccgagatgcccatcacgtgcaggactggcgtattgtaaatgctctgcaaatgtttgctgccctgtgccaggacaaagtgaaatcacctgacgaagggaaagttgaggaatgatacagttgctccktggaagggtttttggtaaacctgaggctgggttcatctattccttccttattccctttcctgcacccctctatctctttcaccaagttttggccctcacaatgacactcacatttgcccttcttctctaatttcatggactcttcccttgcgacctcatcgttatcagctgcatccttggcagcctccttgccaaggctgagctctctgcggctgagtgcatttcctaaagcactgctcctatcctgataacacattgccccacccaaccactggcctgacatcccatggcagtaactgacttcagactcttctgcagagttctcaggtgcttccaaggtctgcccccagccctacctatctgggtccgtttttattactcctgagcccatgcttcctttcaacaagacaggtctgctccacctcttgcagggtccagggttgctcctgcttttgcttttgctgtactatcatttcgaatatcctctctttcttttcatgtaactaacaaaacactctggcctctaaacccagacacacctcttgatgaaaatatcaccag

SEQ ID NO: 6385 - DNA, 786 bp, Homo sapiens
aggagaagaattcgtaaaaactgctttggtaaacaccaaagcacacaggaggcagtattttactaaacaaatattatactaagatattaacagtttttgaagtaacgcgctttcttattttatagagatgcagatagatctttgagcatacctgatgaacagttacactcatttgcggtaagtggcacttttattgaggttgtattttcatcgtacacttgtatctgtttcatgctgaagtcaaagccatctttttttaaatcttccccatttcatgttgcatttagtcatcttaagtgttgtaaaaagaatgtgctggagtaagaactgatctgcagctctgtttagttagtgagctagtatgagtaaatatwctatccaaacaacagaaaatgtatctttttttttttttttttttttttttatggactctctttctgtagcccaggctggagtgcaatcgcgcgatcttggctcactgcaggctctgcctcccaggtccctgttcaagcaattctcctgcctcagcctcttgagtaactggaattacaggcatgtgccaccatgcccagctaatttttttttctttttttttttttgtaaagacagggtttcaccatgttggccaggatggtcttgaactcctgacctcgtgatccacccacgttggcctcccaaagtgctgtgattacaggtgtgagccaccatgcctggcccagaaaatgtatctttttaaaaggtaattgtgagctgtctataggaccctgcaagccactacccaatttt

SEQ ID NO: 6386 - DNA, 798 bp, Homo sapiens
ggaaaaagaaatacgtcaccctgtgttccaatggcgtgctcacctattattcaagcttaggtgattatatgaagaatattcataaaaaagagattgaccttcagacatctaccatcaaagtcccaggaaagtggccatccctagccacatcggcctgcgcacccatctccagctctaaaagcaatgacctatccaaggacatggacaccgggctgggtgactccatatgcttcagccccagtatctccagcaccaccggccccaagctcaacccgcccccctctcctcatgccaataaaaagaaacacctaaagaagaaaagcaccaacaactttatgattgtgtctgccactggccaaacgtggcactttgaagccacgacatatgaggagcgggatgcctgggtccaagccatccagagccagatcctggccagcctgcagtcatgcgagagcagtaaaagcaagtcccagctgaccagccagagcraggccatggccctgcagtcgatccaaaacatgcgtgggaacgcccactgtgtggactgtgagacccagaatcctaagtgggccagtttgaacttgggagtcctcatgtgtattgaatgctcaggtatccaccgcagtcttggcacccgcctttcccgtgtgcgatctctggagctggatgactggccagttgagctcaggaaggttatgtcatctattggcaatgacctagccaacagcatctgggaagggagcagccagggacagacaaaaccctcagaaaagtccacgagggaagaaaaggaacggt

SEQ ID NO: 6387 - DNA, 798 bp, Homo sapiens
ggaaaaagaaatacgtcaccctgtgttccaatggcgtgctcacctattattcaagcttaggtgattatatgaagaatattcataaaaaagagattgaccttcagacatctaccatcaaagtcccaggaaagtggccatccctagccacatcggcctgcgcacccatctccagctctaaaagcaatgacctatccaaggacatggacaccgggctgggtgactccatatgcttcagccccagtatctccagcaccaccggccccaagctcaacccgcccccctctcctcatgccaataaaaagaaacacctaaagaagaaaagcaccaacaactttatgattgtgtctgccactggccaaacgtggcactttgaagccacgacatatgaggagcgggatgcctgggtccaagccatccagagccagatcctggccagcctgcagtcatgcgagagcagtaaaagcaagtcccagctgaccagccagagcgaggccatggccctgcagtcgatccaaaacatgcgtgggaaygcccactgtgtggactgtgagacccagaatcctaagtgggccagtttgaacttgggagtcctcatgtgtattgaatgctcaggtatccaccgcagtcttggcacccgcctttcccgtgtgcgatctctggagctggatgactggccagttgagctcaggaaggttatgtcatctattggcaatgacctagccaacagcatctgggaagggagcagccagggacagacaaaaccctcagaaaagtccacgagggaagaaaaggaacggt

SEQ ID NO: 6388 - DNA, 798 bp, Homo sapiens
ggaaaaagaaatacgtcaccctgtgttccaatggcgtgctcacctattattcaagcttaggtgattatatgaagaatattcataaaaaagagattgaccttcagacatctaccatcaaagtcccaggaaagtggccatccctagccacatcggcctgcgcacccatctccagctctaaaagcaatgacctatccaaggacatggacaccgggctgggtgactccatatgcttcagccccagtatctccagcaccaccggccccaagctcaacccgcccccctctcctcatgccaataaaaagaaacacctaaagaagaaaagcaccaacaactttatgattgtgtctgccactggccaaacgtggcactttgaagccacgacatatgaggagcgggatgcctgggtccaagccatccagagccagatcctggccagcctgcagtcatgcgagagcagtaaaagcaagtcccagctgaccagccagagcgaggccatggccctgcagtcgatccaaaacatgcgtgggaacgcccactgtgtggactgtgagacccagaatcctaagtgggccagtttgaamttgggagtcctcatgtgtattgaatgctcaggtatccaccgcagtcttggcacccgcctttcccgtgtgcgatctctggagctggatgactggccagttgagctcaggaaggttatgtcatctattggcaatgacctagccaacagcatctgggaagggagcagccagggacagacaaaaccctcagaaaagtccacgagggaagaaaaggaacggt

SEQ ID NO: 6389 - DNA, 798 bp, Homo sapiens
ggaaaaagaaatacgtcaccctgtgttccaatggcgtgctcacctattattcaagcttaggtgattatatgaagaatattcataaaaaagagattgaccttcagacatctaccatcaaagtcccaggaaagtggccatccctagccacatcggcctgcgcacccatctccagctctaaaagcaatgacctatccaaggacatggacaccgggctgggtgactccatatgcttcagccccagtatctccagcaccaccggccccaagctcaacccgcccccctctcctcatgccaataaaaagaaacacctaaagaagaaaagcaccaacaactttatgattgtgtctgccactggccaaacgtggcactttgaagccacgacatatgaggagcgggatgcctgggtccaagccatccagagccagatcctggccagcctgcagtcatgcgagagcagtaaaagcaagtcccagctgaccagccagagcgaggccatggccctgcagtcgatccaaaacatgcgtgggaacgcccactgtgtggactgtgagacccagaatcctaagtgggccagtttgaacttgggagtcctcatgtgtattgaatgctcaggwatccaccgcagtcttggcacccgcctttcccgtgtgcgatctctggagctggatgactggccagttgagctcaggaaggttatgtcatctattggcaatgacctagccaacagcatctgggaagggagcagccagggacagacaaaaccctcagaaaagtccacgagggaagaaaaggaacggt

SEQ ID NO: 6390 - DNA, 798 bp, Homo sapiens
ggaaaaagaaatacgtcaccctgtgttccaatggcgtgctcacctattattcaagcttaggtgattatatgaagaatattcataaaaaagagattgaccttcagacatctaccatcaaagtcccaggaaagtggccatccctagccacatcggcctgcgcacccatctccagctctaaaagcaatgacctatccaaggacatggacaccgggctgggtgactccatatgcttcagccccagtatctccagcaccaccggccccaagctcaacccgcccccctctcctcatgccaataaaaagaaacacctaaagaagaaaagcaccaacaactttatgattgtgtctgccactggccaaacgtggcactttgaagccacgacatatgaggagcgggatgcctgggtccaagccatccagagccagatcctggccagcctgcagtcatgcgagagcagtaaaagcaagtcccagctgaccagccagagcgaggccatggccctgcagtcgatccaaaacatgcgtgggaacgcccactgtgtggactgtgagacccagaatcctaagtgggccagtttgaacttgggagtcctcatgtgtattgaatgctcaggtatccaccrcagtcttggcacccgcctttcccgtgtgcgatctctggagctggatgactggccagttgagctcaggaaggttatgtcatctattggcaatgacctagccaacagcatctgggaagggagcagccagggacagacaaaaccctcagaaaagtccacgagggaagaaaaggaacggt

SEQ ID NO: 6391 - DNA, 798 bp, Homo sapiens
ggaaaaagaaatacgtcaccctgtgttccaatggcgtgctcacctattattcaagcttaggtgattatatgaagaatattcataaaaaagagattgaccttcagacatctaccatcaaagtcccaggaaagtggccatccctagccacatcggcctgcgcacccatctccagctctaaaagcaatgacctatccaaggacatggacaccgggctgggtgactccatatgcttcagccccagtatctccagcaccaccggccccaagctcaacccgcccccctctcctcatgccaataaaaagaaacacctaaagaagaaaagcaccaacaactttatgattgtgtctgccactggccaaacgtggcactttgaagccacgacatatgaggagcgggatgcctgggtccaagccatccagagccagatcctggccagcctgcagtcatgcgagagcagtaaaagcaagtcccagctgaccagccagagcgaggccatggccctgcagtcgatccaaaacatgcgtgggaacgcccactgtgtggactgtgagacccagaatcctaagtgggccagtttgaacttgggagtcctcatgtgtattgaatgctcaggtatccaccgcagtcttggcacccgcctttcccgtgtgcgatctctggagctggatgactggccagttgagctcaggaaggttatgtcatctattggcaatgacctagccaacagcatctgggaagggagcagccagggacagacaaaaccctcagaaaagtccacgagggaagaraaggaacggt

SEQ ID NO: 6392 - DNA, 775 bp, Homo sapiens
caaaccaaaaagtgttgtcatgaggtgggaaaagagggcaaatagggtagaagttctcaaatgttgttctcctgagtgcctcaaaaccacctggagaggcttccaaaaatatagatttcctagggctcattccagcatcctgatttactaggtctgtggtagggaccaggaaactgggttttttgctttgttttgttttcattttcttttttcttcttcttcttttttttttttttttttttttttgagcagggtctcattctgtcacctaggctgaagtgcagtggcgtgatcccggctcactgcaacctccatctccagggttcaagcgattctcctgcctcagcctcccaagtagctaggaatacaggtgtgcaccacacccactaattcttgtatttttagtaaagtcagggtttcatcatgttggtcaggctggtctcaaactcctgacctcaggtgatctgcccaccgcytcagcctcctgaagtgctgggaccacaggcgtgagccgctgcactcagccacatattgttttctttcttagatgcttctgatggataactagatttgagaaagactgatattgagccatgctctctaattgaaacataatgtgagccacattttctagtagcctcatttttaaaagataaaggaaacaaaactttttagtaatacattttaatttctttttgtcgccatggctggaatgcagtagcgcgatctccacccactgcaatctctgcttccttggttgaagtgattctcctgg

SEQ ID NO: 6393 - DNA, 598 bp, Homo sapiens
tttgagttcaggagttctaagaccaacctaggcaacatagggagaccctgtctctacaaaaaataaaaaagttagctgggcaygatggtgaggtggtgcgtacctgtggacgcaggcgtgcgggagggctggggtgggaggattgcttgagcccaggagtttgaggctgtcctgagctgcgattgtgccactgaactccagcctgggcaagagagcaagacttcatctcaaaaaattttttcaaaaattttaaaaatgattttttcaagtggtggtggcatcccattaagatgatttgaaaaccgaattggttgtgatccacggtttggaaaaaatggtttaattccattaaaagctagaaacactttttgttgttacgaattgtttatctaaagctactaccagtagcgagcatttagtgaaagcttgccgtatgcagcccttggtaggcaggtgttctcccatgaggacgcgaccacggactggttaagtacttagcccagagtagcccggatagtcacattggagctggaatttgcacctggtcagtgcggcgccagagctcattccttagctgctgttgtgtggtctcaatctt

SEQ ID NO: 6394 - DNA, 638 bp, Homo sapiens
cctcccaaggtttagctgcccacgctttccactgcagcagagccatcattgcacagtggagacctgagtgcccgcatgtgggaagcagaggatgagttctgggacatccccacagagggtgctgtgctacagtrggcaggaggcagaattccagcagggtgctctgatatccagcccagggcgccgtcttccgtgtgaagggaatggggtgtggaaggggtggaacacagaggagcgtgcagcacggatgcctagccagcaccactccagcccagcggccgtgggcagcatcagcacccacacatcaagactgcttctgtccttggcagtgtgggatgaaagtggcacttttcccaaaaaccccgtaacatgagaaaaacagacaaattccaagtgagggatagcctgcgaaatttctgaccagccatggccaggccacgcagagggcagaggcgtgccacgctggccgggaaggaaagctgcactaagatggctggacccttggggttcctgtgtatgttgggggggtggggattgtttttggcctttgtgtgtctgttgtcttttaatgagtgtaggactagaagaagggagagtcctactcaaggaggaattcctgtcccagaaactggaatcct

SEQ ID NO: 6395 - DNA, 624 bp, Homo sapiens
tgattcaggcttatagcaccggcttagacaactggcccccaggatggaaggggcaccaggagcagagatgaatggggccatctgcccagcctatatcacactgcctttgccacatcccaatgaaattatcacaaaacacaagacaaattgaatcatcaaaaatcagtagcaccgtaggggtgcaggggatgaggttattaattcctgctgaagggattgggataagctgtgtgaatgtaaaccaggcttcattgtagagatcatgctcgaatagctgggtgccacagcagaagcccctcgaggtggaggacctagcagtaagtgctgtttgagaaaaggaagggcaagagagaaacctggaaggggagtccatggggtcagggtgtagagaacactaaatacccagaayttccagtgggggcttgtcactggattcttgaagatggccaagaaacattgaagggagaaaattacctgagagcagagaggcagtcacagggaagatgatacaaacaccttaaagagccaggttagaactaacgcaacccaagccatctccatctggccagatctcttttggatacaatcattaacactggagggatggaggggtggaggggtgga

SEQ ID NO: 6396 - DNA, 829 bp, Homo sapiens
cttttccctgccttgccttctccatggaaaccccaaagcctatgggtcaggttttccccttgctccatcttctgccacctgacccaagccctggtgctacccctgtggccctgcacaacacagggtgaccctactcagtaagacctgtgagtaggagaaacatctcccttccagacctcagtctcctttcctcctgtggccacactgactttacctgaccatacctaacatttacattcttagaatcaccatctgttttcattctttactcaatgagtgtccagtgtcatattctatgtgccatttcttgagatttatagactagatacctggaaatgttgtggttcctttcatataaatagaaaatgaggaagcgggtgaagtttgagggtcaggatcatgagtctgatttggggatgttgagttttgaggtgctaggcagggtgcacaagtgtagatgccctgraaatgacaaatacaagcctggacctttttttaagtttctctctgacctaggacctactccagtcattcagaaattcctaactctagataagcccaaactcaaatgtgcaaggaagatggtgggtgttcaggaagtgttacattaactaattaaaagaagcaatgggctgaccactaagaaacatgggttgaagcctaatcactgtcccttgttctggtaaaattactcccctctccctttctaggcctcaatttcctcttctgttaaacaagagagttgaactggatgtctaaagctgctgccagctatagtcccacccttatccttatactacttcccatcttggagttgagcacaaaagga

SEQ ID NO: 6397 - DNA, 831 bp, Homo sapiens
ggatccttttgtgaaaataaatttcattctgatttaatataaacccattaaaacatctcatttacctctcttacaattgattttgttgtattgttaaaaggttttctgtacaaatttggcattgcagaagtatgtttcgaatagtatgggaaaaacaaattatcagagtttatcaggggtggggaatatttacaaatcctcaacaaaacttgtagtgtttggtcacatgaagacaaaaacatgaaagaatacctgagaaaaatgcttgagacaaagagagaagaaataaagctgttagtcatggacacttctgatgcattttgtacaggtataactttctatactacagtgtattcttatttatcatgcagataaatcctcccttccattttgagttttgaaaggggaaaaatagacaatttatgaaagcatgaaatatattcaaagagctctcataacccgattakgtgttcttaagctctctctgaagttttgatataatcaagtgaataaataattttcaaaaatcgtatgtaatacatttgtaagagcatatcttattgcagataatttctttatagaattatgcttcaatacatgacaggaaactgaattttattagacaactaaaaccataaataaacaaggtgagactgtttttaccgaattgggagatagagatcttgtgaaggttttattagcaactatcagctaggcccaacaaatgattatggcgaagcttggaaagacagtagtccatcttaacatagtcaaaaagatttcaatacaaataagtgtcagggttcaaacaaacatatacatccaaaattg

SEQ ID NO: 6398 - DNA, 731 bp, Homo sapiens
tttttccttctgtctatataatagaatttataaaacctattattgcttgtgcagtgttttggacgtaaaaatttgtgaactcattacattaaaaatctttaagtaaatccattaatcttaagtgggcttgatgaacttggattcttcatttgtctctctctcacacacaacacgcatacaaaacatacacaattagcaaatacagtatttactaaagtctttataagatccttttatcaagattctttacctaaattagataagaagaaagataattggaaatgcatatatagaaacacacttacatatgcattaacacacacrtatacacatacacatatacttgtgtatacatttgtcatgccctttcccttgtagtcagaaagcatgggtcagaaaccactgggtggtggtgggaataatgtctttccttattacgcttaataatccactataagaatttctgttttctctttgctgcgctcctgggctcagaaagaatttggaggtaggtcctcatgctcaagggaggaatgctttcctcaggtaacatagttatagttcccatggattggaggctataactgatgtcctgtgcacactgggctttttctgccattgaatccacaggcagagaatagcatcatcgtattggcaggggaaatagattgcaattatcagagagaaattggattgctcctccatggtaggggcaaggatgattatatctg

SEQ ID NO: 6399 - DNA, 731 bp, Homo sapiens
tttttccttctgtctatataatagaatttataaaacctattattgcttgtgcagtgttttggacgtaaaaatttgtgaactcattacattaaaaatctttaagtaaatccattaatcttaagtgggcttgatgaacttggattcttcatttgtctctctctcacacacaacacgcatacaaaacatacacaattagcaaatacagtatttactaaagtctttataagatccttttatcaagattctttacctaaattagataagaagaaagataattggaaatgcatatatagaaacacacttacatatgcattaacacacacatatacacatacacatatacttgtgtatacatttgtcatgccctttcccttgtagtcagaaagcatgggtcagaaaccactgggtggtggtgggaataatgtctttccttattacgcttaataatccactataagaatttctgttttctctttgctgcgctcctgggctcagaaagaatttggaggtaggtcctcatgctcaagggaggaatgctttcctcaggtaacatagttatagttcccatggattggaggctataactgatgtcctgtgcacactgggctttttctgccattgaatccacaggcagagaatagcatcatygtattggcaggggaaatagattgcaattatcagagagaaattggattgctcctccatggtaggggcaaggatgattatatctg

SEQ ID NO: 6400 - DNA, 494 bp, Homo sapiens
aggcaggagaatcacttgaacccaggaggcggaggttgcggtgagttgagattgtgccattgtactccagcctgggcaacagagtgagactccgtctcaaaaaagaaaaaaaaagtttattttttctaactttcttattttcttgggttaaactagagctcttaaattaacctgcctgcccatcagctttccagactaggagtgattatataacttacaattcttactggggacctgaaagtcccaacatgctctgaagcctggaaaattaggtggaagaaggaaaagatagaaccttggcacagagagaaaaaaaaagtggttagcatctgtgctggactaaaaaatatataagtatgaatgttagattttgtgagttacatcagggacacatgtgcatatctgcatttgatgtgtgtgcaattctgtggtcaagagggtgtctgtgagtgrgaagacacatccaaagatttaatgagaagaataatgatttt

SEQ ID NO: 6401 - DNA, 680 bp, Homo sapiens
aaatacatcatcctactacagaggtctgccctaaagtgtatgtgtgggtttttgttgttgttgttgttgttgttgttgtttggtttggttttggttttggtttgagacagggtctttctctatgcatcaaggctggaatgtagtgccatgatcatggctcaccgtagcctccacctcctgtgctcaagcgatcctcctgcctcagcctcccaagtatctgggacagttaaagtgtgtttcactgcatgtatacagctggatgaggtaaagttaagtcagaggacaagaggactctttagagagtccacttctgaaaggagggttaaagggacagatmatgcttctgttaaggattcctcttcctccctttcaccccaagctggtgctcaggtggggaggaccctagtcttaccagccctctgaagtaggtgggagaggatgtggtcccctcattttatttattttttctttctttctttcttttaaagggaaagagggaatgggatgccagaagcctatagcccacccaaatactaaccaggcacaaccctgcttagcttccaagatcagacaagattgcgtgttttcagggtggtatggccatagacctcttattttcataacgttccagagtccttatttttgataagaagtttggcaaaggagtcatgccatcagta

SEQ ID NO: 6402 - DNA, 680 bp, Homo sapiens
aaatacatcatcctactacagaggtctgccctaaagtgtatgtgtgggtttttgttgttgttgttgttgttgttgttgtttggtttggttttggttttggtttgagacagggtctttctctatgcatcaaggctggaatgtagtgccatgatcatggctcaccgtagcctccacctcctgtgctcaagcgatcctcctgcctcagcctcccaagtatctgggacagttaaagtgtgtttcactgcatgtatacagctggatgaggtaaagttaagtcagaggacaagaggactctttagagagtccacttctgaaaggagggttaaagggacagatcatgcttctgtyaaggattcctcttcctccctttcaccccaagctggtgctcaggtggggaggaccctagtcttaccagccctctgaagtaggtgggagaggatgtggtcccctcattttatttattttttctttctttctttcttttaaagggaaagagggaatgggatgccagaagcctatagcccacccaaatactaaccaggcacaaccctgcttagcttccaagatcagacaagattgcgtgttttcagggtggtatggccatagacctcttattttcataacgttccagagtccttatttttgataagaagtttggcaaaggagtcatgccatcagta

SEQ ID NO: 6403 - DNA, 680 bp, Homo sapiens
aaatacatcatcctactacagaggtctgccctaaagtgtatgtgtgggtttttgttgttgttgttgttgttgttgttgtttggtttggttttggttttggtttgagacagggtctttctctatgcatcaaggctggaatgtagtgccatgatcatggctcaccgtagcctccacctcctgtgctcaagcgatcctcctgcctcagcctcccaagtatctgggacagttaaagtgtgtttcactgcatgtatacagctggatgaggtaaagttaagtcagaggacaagaggactctttagagagtccacttctgaaaggagggttaaagggacagatcatgcttctgttaaggattcctcttcctccctttcaccccaagctggtgctcaggtggggaggaccctagtcttaccagccctctgaagtaggtgggagaggatgtggtcccctcattttatttattttttctttctttctttcttttwaagggaaagagggaatgggatgccagaagcctatagcccacccaaatactaaccaggcacaaccctgcttagcttccaagatcagacaagattgcgtgttttcagggtggtatggccatagacctcttattttcataacgttccagagtccttatttttgataagaagtttggcaaaggagtcatgccatcagta

SEQ ID NO: 6404 - DNA, 738 bp, Homo sapiens
ggatcccttctctgcacagccacatttctgaaagaatagctgacactggatgtttccattcctttgctgactattatagcatttaaaacactctggtgtaatgattacaatgattcgctttcttggccacctccttctttccagattgaaaactctcccaataaagggaccatgcgttgctcttcttagtacccctgacccccaaaaggtgtccaacacataagaggggctcagtgtttgctaaaggacaaagtaaggacaggggtgcataggaggttggttacctgtggagctctccagcgatggcagccagcagggagctcttcccacagccgaccttccccacgatgcccaccagcataccctgcaargaagccacacaagcatctgctattggtaggagacaggacagaggtggcagtggtctccctcttgacactctgggctgccagtcctcccactgaggcttctcttttcttctttctttagtgtgtagggaaagaattctccacttcacaggctgatcaacaaatcaggctctagaaaagtagggtgtttttttctccactcagagtggctatcagtttcactgtctatgtgaagggcctctgaaggggagcagcatgccagagagaatgggaggaaaccacccaagaacttccaaggtaaactctgagacaggcactccagaacgggagagggaagggtagaattccaggctttagggcctggatgatg

SEQ ID NO: 6405 - DNA, 432 bp, Homo sapiens
  misc_feature (1)...(432): n = A,T,C or G
gnnnnnnnnnnnnnnnnnnnnnnnnnnnnnnnnnnnnnnnnnnnnnnnnnnnnnnnnnnnnnnnnnnnnnnnnnnnnnnnnnnnnnnnnnnnnnnnnnnnngagtgagagtaggggagctaggacaggtaggggaggtaggggagctgggtgggaggggagctagaggaggagggatgstaagggaggaggggaagcaggggaggaggggaggtaggggaggaaaagaggtaggggagctaggggaggtaggggaggtaagatgtgactctcacatgtgtgtccatcttttttcctttagtagattggagggctcttgaggggaggaaccatgattgtccctagattttgtgtgggcagcacccaaggttgacattcaagtgtgtgctcaaatgtcacctcctcccctagagtctctttgcaatcacaggat

SEQ ID NO: 6406 - DNA, 1058 bp, Homo sapiens
gaaagactttcagtcagtatctgcagaatgtctgggctgatacatttctcagtaataaaatgtggacaagaggaccaatctaccttcaaaatatatctccagcagtagtacagcaacagtggttaaaacaaatctcattctgccattttcttcttttatgactttgaacatgaaatccgacctcatgctggartttcctcatataaaatgagaatgatagtgcctgcctcacagggacactatatgggaagttaatatatgctatagatgataaacatgccaaacccatattatgtactcagcaaatggaagcaattattattattaataagtccgctggcttccattcgtctcacctaccatttctccggtcccagccaccatttcccctcacctaaccttccataatagattagccagactcctgttttcactcttgaaacatttaggtctgtttttcatacaccagccagtgtgaagtttttaaaacgaaaacggatcatgtcacttctccacttaaaacactgcactgctccttacagaacccagagcagaattctaattccttagcgcacggccaggcgccggtggctcacacgggaatcctagcactttgggaggctgaggcgggcgggtcacttgaggtcaggagttcgagaccagcctggccaacatggtgaaactccatctctactaacaatacaaaaattagccgggtatggtggcacgtgcctgtaatcccagctactcaggaaactgaggcaggagatttgtgtgaatccgagaggcagagattgtagtgagccgagatcgcaccagtgcactccagcctgggccacagagtgggactccgtctcgaaaaaaaacccaaaaagcaaaaaacacattccttagtggggaccaggcccaccccctctacctgctcaattcatcccacttaggctctgtggcctcgctttggtttcccaagtccaccacccttcttatcttggtctggaacattcttcccactttctctgcctcgccaactcttagtaactcccatccaaaatgacagt

SEQ ID NO: 6407 - DNA, 689 bp, Homo sapiens
ccaccaacaccacccaatcccacaaaacactgactggtaaaagacacgttgatccttagaagttctaccacctaaaatatatctggtttttagttcataaggtagaatagaaaatatactttacaagatacatcttcaaatggcatttccttaacttccagaattaaaaaaaagttcagccgacttatttggaaccattgaaccaaatacctttgactccttggacacacagctttacactttaaaaataaaatgacctggtgtatgcatgtcccctcctcacaccagctggtatctcagagtcttctgatgtagattggcatcttccgcctagcccaaagcagggggtcctgcaagatatcggggctgatgacctcgtaagtggtttcacagaaagctgtatgcatttcagccctgtttcctttacccacccagctcggtgaagaacttgtattaattggtgctttgaggcagaaggggattttcttggccgtggcggaagccagccagccagccagctccctggcagacttgcagactggccagctgagctctcttaaaaattgacctacattgaaccaaacccgtagaatgtgtgttagatcaaatttgctcctctctgcttgctcagagagggtcatgctctgcaaatttccrtaccatcgtggccaggagacagacaccagcag

SEQ ID NO: 6408 - DNA, 806 bp, Homo sapiens
tccctggaggactttgaaattacccaatcaaaaatatacatagatgcatacaatctgtactcttcaaaaatgaaccttttttgatttagagagtactggcaggaaatgaagtcaaaccagtggtttcaaccacaattccctgcaatctcgccagggttgtggatgagacccttgagcagcccgggtaagttgtctggcctgacaattccatcactcggaaagtcagamatggaccttataacaagcaagtggccggcaggaggcctgtgggctgtgcccattgatttgcgagggatttaaatggatagttcaagcattagatgtactgtcctctctgaaacaaaagtgagaaaagaaagtaactcctttataatgctgtgctccacacgtacccattgcttccattttttcctaacaaaaacaagagattgacatttttcgctcagttctcaacaaaaggcctgcacgcatttatcaagtgaagtccttgtacttgagaacattcaagtaactgcagtttacacattttagaagaaatgtaattatcataagatggaacagttcatagatctttaatactgagtaatttatcaatgttcttttattttatccagtatatgatatgctttgaaaaatttatataccattggctggggtgaagctaatcacatactagtttaataatataatactttactcctgaaaaccatctttcttgaatggatttatcctgagttttataaatgcaattaataaaattttgtcaataatccagaagatttatggcaaacccagatactgaaact

SEQ ID NO: 6409 - DNA, 817 bp, Homo sapiens
atagtccttggaaggtggtttcaaggttcagctctgccataaagccattccctcaggggctgtcygtgcacatacctggccaaggctgctgttttggatttataacagaacgcctaccactaagggacacaccagcgcttcttgggggggcctaagttaagaatctgggcatgtgattttgctccgaataaaatggctacaaagtttaagcacagatccaatggtgtaagattatggtgatcccaacgtgccagaattaccgtgtaatttcgagcgagggagacatcagtaccgtcttgcagatagtgggtttccgtgaaactgctggcaatgagacctctgcggaaaaacaaaaacaccataaaaagatgagtgcagaattgcactgatacattgttgtgaatgtctaggctatagggtagcaagattgtgacctcctttttttttttttaacagataatccaaggaagctcccattagggccttcccagtttaggttctccggggagaattcagaggagactcagacaacagagtcagatatgcatcctcggaacaatagcccacacactcaatgtggaaccctccctctctcccttcctcccacctcattccttcattcgcacactgggtgcacacacttgcaaacgcacacatttgtcacacacatatactcttccatgaatagtacaggcagatttccaatttgggaaaatctcctgcttggaagtcacagtctccaccaactggaatcaatggttgaaccacctgctgggaaaatcattctgatccgcagcagtgcccctgctggctcccc

SEQ ID NO: 6410 - DNA, 817 bp, Homo sapiens
atagtccttggaaggtggtttcaaggttcagctctgccataaagccattccctcaggggctgtccgtgcacatacctggccaaggctgctgttttggatttataayagaacgcctaccactaagggacacaccagcgcttcttgggggggcctaagttaagaatctgggcatgtgattttgctccgaataaaatggctacaaagtttaagcacagatccaatggtgtaagattatggtgatcccaacgtgccagaattaccgtgtaatttcgagcgagggagacatcagtaccgtcttgcagatagtgggtttccgtgaaactgctggcaatgagacctctgcggaaaaacaaaaacaccataaaaagatgagtgcagaattgcactgatacattgttgtgaatgtctaggctatagggtagcaagattgtgacctcctttttttttttttaacagataatccaaggaagctcccattagggccttcccagtttaggttctccggggagaattcagaggagactcagacaacagagtcagatatgcatcctcggaacaatagcccacacactcaatgtggaaccctccctctctcccttcctcccacctcattccttcattcgcacactgggtgcacacacttgcaaacgcacacatttgtcacacacatatactcttccatgaatagtacaggcagatttccaatttgggaaaatctcctgcttggaagtcacagtctccaccaactggaatcaatggttgaaccacctgctgggaaaatcattctgatccgcagcagtgcccctgctggctcccc

SEQ ID NO: 6411 - DNA, 817 bp, Homo sapiens
atagtccttggaaggtggtttcaaggttcagctctgccataaagccattccctcaggggctgtccgtgcacatacctggccaaggctgctgttttggatttataacagaacgcctaccactaagggacacaccagcgcttcttgggggggcctaagttaagaatctgggcatgtgattttgctccgaataaaatggctacaaagkttaagcacagatccaatggtgtaagattatggtgatcccaacgtgccagaattaccgtgtaatttcgagcgagggagacatcagtaccgtcttgcagatagtgggtttccgtgaaactgctggcaatgagacctctgcggaaaaacaaaaacaccataaaaagatgagtgcagaattgcactgatacattgttgtgaatgtctaggctatagggtagcaagattgtgacctcctttttttttttttaacagataatccaaggaagctcccattagggccttcccagtttaggttctccggggagaattcagaggagactcagacaacagagtcagatatgcatcctcggaacaatagcccacacactcaatgtggaaccctccctctctcccttcctcccacctcattccttcattcgcacactgggtgcacacacttgcaaacgcacacatttgtcacacacatatactcttccatgaatagtacaggcagatttccaatttgggaaaatctcctgcttggaagtcacagtctccaccaactggaatcaatggttgaaccacctgctgggaaaatcattctgatccgcagcagtgcccctgctggctcccc

SEQ ID NO: 6412 - DNA, 817 bp, Homo sapiens
atagtccttggaaggtggtttcaaggttcagctctgccataaagccattccctcaggggctgtccgtgcacatacctggccaaggctgctgttttggatttataacagaacgcctaccactaagggacacaccagcgcttcttgggggggcctaagttaagaatctgggcatgtgattttgctccgaataaaatggctacaaagtttaagcacagatccartggtgtaagattatggtgatcccaacgtgccagaattaccgtgtaatttcgagcgagggagacatcagtaccgtcttgcagatagtgggtttccgtgaaactgctggcaatgagacctctgcggaaaaacaaaaacaccataaaaagatgagtgcagaattgcactgatacattgttgtgaatgtctaggctatagggtagcaagattgtgacctcctttttttttttttaacagataatccaaggaagctcccattagggccttcccagtttaggttctccggggagaattcagaggagactcagacaacagagtcagatatgcatcctcggaacaatagcccacacactcaatgtggaaccctccctctctcccttcctcccacctcattccttcattcgcacactgggtgcacacacttgcaaacgcacacatttgtcacacacatatactcttccatgaatagtacaggcagatttccaatttgggaaaatctcctgcttggaagtcacagtctccaccaactggaatcaatggttgaaccacctgctgggaaaatcattctgatccgcagcagtgcccctgctggctcccc

SEQ ID NO: 6413 - DNA, 817 bp, Homo sapiens
atagtccttggaaggtggtttcaaggttcagctctgccataaagccattccctcaggggctgtccgtgcacatacctggccaaggctgctgttttggatttataacagaacgcctaccactaagggacacaccagcgcttcttgggggggcctaagttaagaatctgggcatgtgattttgctccgaataaaatggctacaaagtttaagcacagatccaatggtgtaagattatggtgatcccaacgtgccagaattaccgtgtaatttcgagcgagggagacatcagtaccgtcttgcagatagtgggtttccgtgaaactgctggcaatgagacctctgcggaaaaacaaaaacaccataaaaagatgagtgcagaattgcaytgatacattgttgtgaatgtctaggctatagggtagcaagattgtgacctcctttttttttttttaacagataatccaaggaagctcccattagggccttcccagtttaggttctccggggagaattcagaggagactcagacaacagagtcagatatgcatcctcggaacaatagcccacacactcaatgtggaaccctccctctctcccttcctcccacctcattccttcattcgcacactgggtgcacacacttgcaaacgcacacatttgtcacacacatatactcttccatgaatagtacaggcagatttccaatttgggaaaatctcctgcttggaagtcacagtctccaccaactggaatcaatggttgaaccacctgctgggaaaatcattctgatccgcagcagtgcccctgctggctcccc

SEQ ID NO: 6414 - DNA, 576 bp, Homo sapiens
cagaaaaagagaccgaggcaaatttcagagcaggagtggaagtttattttaaaagcctttagaacaggaaagaaaggaaagtatgcttggaagagacccaagcagacactgaggtcaagtgcagtgtttaaccttgatcctaggactttagaagctggcccctttcccatgattcttcctttagggtgggttgcctgcaagcccagtaccctccttatccttgggaagtgagcacacacagtgtgtttagtatgttgtatgcatgcctatctgagactttttccctttttctggtggagtgcccctggaaactcatactctgccattttgtctcttactgtgtactcccaggaaattgcttatctctggtgcctgcattcagttaacacttyagtgcaacaggtgtggaccatcaggaagtggcttttcccttgcatcagctgccaagttatcacttttagagaggcagtgtgataattgccaaaccttcacctgacagtcctagtggctgggagaaccctttcctgtccactcttgcctatctaactagctgtaacaggtttaaaacttgatagt

SEQ ID NO: 6415 - DNA, 769 bp, Homo sapiens
tccttgtggtgatggaaatgcttcatattttgacgatatcgatgccaatatcgtagttataatatggtgctgtaatcttgctgtatgttacagctggtgaaaacatgggatgtctttgtattaattctttctttaaaattttattttactttttttgtgagacagattctcgctctgtcacccagcctggagtgcagtggtgtgatctcggcttgctgcaacctccacctcccaggttcaagtgattctcctgcctcagcctccagagtagctgaaattacaggtgcccaccaccatgcccagctaattttctgtatttttagtagagacaggttttcatcatgttgggcaggctggtcttgaactcctgacctcaggtgatctgcccaccttggcctcccaaagtactagcattacaggcgtgaaccaycgtgccaggctgtactaattcttacatctacatatgaacctttaattgtttcaagataaaaaatgcttaattcaaaaactcagatccaatgattattctccattgtgcaagatttcttatgggcttcctacttcccctggaaagaagatcagcattcttatcatggtggaggaccccctgtgaccttgtccctatcacctgccacccctgcaaccctcttcttcctatggctgtcagggttcctggcctgttgaccttctgccccttccaccctcaaatttgccacactttcctgcttcatggctcacaaatcctctccactttctgaaatctcacagt

SEQ ID NO: 6416 - DNA, 769 bp, Homo sapiens
tccttgtggtgatggaaatgcttcatattttgacgatatcgatgccaatatcgtagttataatatggtgctgtaatcttgctgtatgttacagctggtgaaaacatgggatgtctttgtattaattctttctttaaaattttattttactttttttgtgagacagattctcgctctgtcacccagcctggagtgcagtggtgtgatctcggcttgctgcaacctccacctcccaggttcaagtgattctcctgcctcagcctccagagtagctgaaattacaggtgcccaccaccatgcccagctaattttctgtatttttagtagagacaggttttcatcatgttgggcaggctggtcttgaactcctgacctcaggtgatctgcccaccttggcctcccaaagtactagcattacaggcgtgaaccatcgtgccaggctgtactaattcttacatctacatatgaacctttaattgtttcaagataaaaaatgcttaattcaaaaactcagatccaatgattattctccattgtgcaagatttcttaygggcttcctacttcccctggaaagaagatcagcattcttatcatggtggaggaccccctgtgaccttgtccctatcacctgccacccctgcaaccctcttcttcctatggctgtcagggttcctggcctgttgaccttctgccccttccaccctcaaatttgccacactttcctgcttcatggctcacaaatcctctccactttctgaaatctcacagt

SEQ ID NO: 6417 - DNA, 819 bp, Homo sapiens
ctgcaagtcaggatccaggagaagaattcgtaaaaactgctttggtaaagtaaacaccaaagcacacaggaggcagtattttactaaacaaatattatactaagatattaacagtttttgaagtaatgcgctttcttattttatagagatgcagatagatctttgagcatacctgatgaacagttacactcatttgcrgtaagtggcacttttattgaggttgtattttcatcgtacacttgtatctgtttcatgctgaagtcaaagccatctttttttaaatcttccccatttcatgttgcatttagtcatcttaagtgttgtaaaaagaatgtgctggagtaagaactgatctgcagctctgtttagttagtgagctagtatgagtaaatatactatccaaacaacagaaaatgtatctttttttttttttttttttgatggactctctttctgtagcccaggctggagtgcaattgcgcgatcttggctcactgcaggctctgcctcccaggtccctgttcaagcaattctcctgcctcagcctcccgagtaactggaattacaggcatgtgccaccatgcccagctaacttttttttcttttttcttttttttttgtaaagacagggtttcaccatgttggccaggatggtcttgaactcctgacctcgtgatccacccaccttggcctcccaaagtgctgtgattacaggtgtgagccaccatgcctggcccagaaaatgtatctttttaaaaggtaattgtgagctgtctataggaccctgcaagccactacccaatttttgaagccattcct

SEQ ID NO: 6418 - DNA, 819 bp, Homo sapiens
ctgcaagtcaggatccaggagaagaattcgtaaaaactgctttggtaaagtaaacaccaaagcacacaggaggcagtattttactaaacaaatattatactaagatattaacagtttttgaagtaatgcgctttcttattttatagagatgcagatagatctttgagcatacctgatgaacagttacactcatttgcagtaagtggcacttttattgaggttgtattttcatcgtacacttgtatctgtttcatgctgaagtcaaagccatctttttttaaatcttccccatttcatgttgcatttagtcatcttaagtgttgtaaaaagaatgtgctggagtaagaactgatctgcagctctgtttagttagtgagctagtatgagtaaatatactatccaaacaacagaaaatgtatctttttttttttttttttttgatggactctctttctgtagcccaggctggagtgcaatygcgcgatcttggctcactgcaggctctgcctcccaggtccctgttcaagcaattctcctgcctcagcctcccgagtaactggaattacaggcatgtgccaccatgcccagctaacttttttttcttttttcttttttttttgtaaagacagggtttcaccatgttggccaggatggtcttgaactcctgacctcgtgatccacccaccttggcctcccaaagtgctgtgattacaggtgtgagccaccatgcctggcccagaaaatgtatctttttaaaaggtaattgtgagctgtctataggaccctgcaagccactacccaatttttgaagccattcct

SEQ ID NO: 6419 - DNA, 541 bp, Homo sapiens
ccgtgccccgggactgatgaagggcccattccaggcctttgggcacccgggctcgctacccttctgggagccctgtcctgtgggccaggacaaaggtgccctcactggtggcattctcagaagctcagccactccccacacatgcacataggggcgtgcccacaccaagccacgtgtgggtgtctggggacartgagtcttgggggagggggtgggtcccttccagaagggtctggccaaagtccagttatgaaggtgagctgagatgggctccctcaaaggagccatagtgtggggagccccgggcagagcccagagagaaatgccagccccgagaccgagacacgctccaaggagtgctgccaagagcagtagacacagccgctgaggcccacggggcacagtgaggctgtgggagagggtggcccctctgtggccatttccctgcctgtgctcacatcccctcctcaggcctgtctcaccagctcttgcagcccatgacccacattctgtctgactctccttcctctcctggctacag

SEQ ID NO: 6420 - DNA, 541 bp, Homo sapiens
ccgtgccccgggactgatgaagggcccattccaggcctttgggcacccgggctcgctacccttctgggagccctgtcctgtgggccaggacaaaggtgccctcactggtggcattctcagaagctcagccactccccacacatgcacataggggcgtgcccacaccaagccacgtgtgggtgtctggggacaatgagtcttgggggagggggtgggtcccttccagaagggtctkgccaaagtccagttatgaaggtgagctgagatgggctccctcaaaggagccatagtgtggggagccccgggcagagcccagagagaaatgccagccccgagaccgagacacgctccaaggagtgctgccaagagcagtagacacagccgctgaggcccacggggcacagtgaggctgtgggagagggtggcccctctgtggccatttccctgcctgtgctcacatcccctcctcaggcctgtctcaccagctcttgcagcccatgacccacattctgtctgactctccttcctctcctggctacag

SEQ ID NO: 6421 - DNA, 541 bp, Homo sapiens
ccgtgccccgggactgatgaagggcccattccaggcctttgggcacccgggctcgctacccttctgggagccctgtcctgtgggccaggacaaaggtgccctcactggtggcattctcagaagctcagccactccccacacatgcacataggggcgtgcccacaccaagccacgtgtgggtgtctggggacaatgagtcttgggggagggggtgggtcccttccagaagggtctggccaaagtccarttatgaaggtgagctgagatgggctccctcaaaggagccatagtgtggggagccccgggcagagcccagagagaaatgccagccccgagaccgagacacgctccaaggagtgctgccaagagcagtagacacagccgctgaggcccacggggcacagtgaggctgtgggagagggtggcccctctgtggccatttccctgcctgtgctcacatcccctcctcaggcctgtctcaccagctcttgcagcccatgacccacattctgtctgactctccttcctctcctggctacag

SEQ ID NO: 6422 - DNA, 541 bp, Homo sapiens
ccgtgccccgggactgatgaagggcccattccaggcctttgggcacccgggctcgctacccttctgggagccctgtcctgtgggccaggacaaaggtgccctcactggtggcattctcagaagctcagccactccccacacatgcacataggggcgtgcccacaccaagccacgtgtgggtgtctggggacaatgagtcttgggggagggggtgggtcccttccagaagggtctggccaaagtccagttatgaaggtgagctgagatgggctccctcaaaggagccatagtgtggggagccccgggcagagcccagagagaaatgccagccccgagaccragacacgctccaaggagtgctgccaagagcagtagacacagccgctgaggcccacggggcacagtgaggctgtgggagagggtggcccctctgtggccatttccctgcctgtgctcacatcccctcctcaggcctgtctcaccagctcttgcagcccatgacccacattctgtctgactctccttcctctcctggctacag

SEQ ID NO: 6423 - DNA, 760 bp, Homo sapiens
aaattcaccacattgtagtgacatgactgatcaatgtacaatgaagacatagccaaacactgattaatagtgagtggcagagcctcacatttcatttttggttgtaatatattactgttttaaaatttgctataactgggccgggtgcagtggctcacacttgtaatcccagcattttgggaggctgaggcctgtggatcacttgaggccaggagttcaaaaccagcctggccaacgtggtgtaacccgtttctactaaaaatacaaaaaaaattagccagttgtggtggcacacacccgtaatcycagctactcaggaggctgaggcaggagaagcgcttgaacccaggaggtggaggttgcagtgaaccgacattgtgccattacacttcagcctgggcaacaagagtgaaactccaactcaaaaaaaaaaaataaaaataaaaataaataaataaataaaacttgctgtaactggtcttattcctaaaccccctgcccagcttggatgtggggcaagagtgttcttaaatttcctgttaactgtatttttctgtcttctatcaaagtccaactctcagttggtgctcttggcttgggatggtgtccagatgcaggaaggaagtctcaaaagcctggagtgctggagtgaggtggcctgctctccacactggcacgtgcgaggttcccgactttgctgcccttcacgcagttttagcaaccaaagatgagctgccctgacctctgggttgcaactttt

SEQ ID NO: 6424 - DNA, 719 bp, Homo sapiens
atcaaatctaaaattgtttgccaaatgtcagtcctgaacttaactatagtcctattaacctgatatttgcttatcttgaatgaaggttaaaaagaggagactggtttcttgtccttgtgaaatttactcacatccaatcaatagtttcagtgattcctttgtgtaaaattacatgcttcagtatgtgtgtaggcattaaagcataggttagggtgcccagctcctggatgacatgtctctacccaagttacaggtaacttgagacctggtgtttttccattcaactagccattgtctctgctttcagccattcctcttaacacagatgtcactattctaaaactagcaccctgtggacccactgttcagattatttcaagcttgagagcagagcataagccagtttatctgacaggtggaggacagcactcctcttgtacctatgtatttgtctggaattccccacagcaaaacagagtcaaccagcattttcccctttcctacatccatgatacattcccgtcattatagcacaacactgacctaaaaaagtaaaattgtggagaaggggaaagaagtatatatgaagccacatgccctacgtaccttccattgcttgtactttgaaaccatctttctttcaaattagtcattatgctttacagatgacacgtgagcccamgataagtacagtcatcccttggtatccatgggggatt

SEQ ID NO: 6425 - DNA, 1322 bp, Homo sapiens
taccatcatgatctaatagaaacaaaattacttcccaaaggcctcactttcaaattccatcacattgggggttagagcttcaacgtgtgattttttgaagggacacattcagctcataacaggtagtaaaaaatataatataaaattggagtttggagctggatcacccaccagctggctggaaatgaggactccatcactggtggtaagtggagtttgagcagcccttagtgctataattattaacactttatccrgtggtaaatagggatgacatactagtagaaaagaaggcactggcagattaaatgtattaagtatttgagacataaaagggaaatagtaattataagggcaatggaattggatgtctgttgtagaaacagtagagggttttgagaaagactttgaaaggctgaagttgattaattaccaactaaaagttaaatttgagagccacagtccctccttatagcatttggagtctagcatctcctgtagcctgtaacgtaaaaggctaggaatcaggcttaagacttgattatgagagaagtagacattatgttagaattttaagccactgcagcttgactactaagttcaagatcttaattaggaaagaatgagacactgagtcatggaataggggtatctgtgttgatgcatttaaaaatcttgaatcactagattcttctaaaccctctggattcttccctgttaaatgtttgtgttccacccgtagataaagataaaacagaggatgctatcttgcaaaacaacatatgttctccttaaactctgtccctaccttttcttaaccacttgattataactaagggtaaatcataacataacctaacagggaaaaggctgagtctgctatgggagctgtaggacctagtcaacatgtagaatcaggagctgaaaagagtacatgctgaatcaaagggtcagacatcaaattggataagagataatttatcagtgttggagccctctcccttactataggatttaatatcttggtaaagatcacagcatatgatgcaaagaagctgctacgatggcttttagaaacttgcagaaattggtgacgcacactaagtagaaatgtcagaactgctgtggaagacagtagaaggagggatagaaaagcttagagaagagcacttgctagaataaatacgtgaaaatgaaaagtccaccagataactaggctccatataaggtcccagaggacattctgtttactaaacaaaaggaatatgctggtgagaaggacaccaatgtcactgagaagctcagtggtggctatcctctgt

SEQ ID NO: 6426 - DNA, 767 bp, Homo sapiens
agatgttttttttccccctggaacttttataaacaacaagaactccaggtgcaacagttataagaagtagtttttcatagtggtacccagaaaaccagggactctgggctacatcagccactggggaggctaaggcagcaggatgtttgggcctaagagttcaaggccagcctgggcaacatagcaagactctgtctcaaaaaatgtaaatatttgcaaataagacatttatcacagtggtttttgttacagtaaaaactaaaaattgtttaacaatataggattggctcaacaaattacattataggcatctgaagaaataatatgcaactgcttacaataataatgcaagtcaacatttacagacatggactgattgcgyttaatatacagtgaatatagaaaagccctgggaggtgatagcagggaaggaaagggattgaaagtgattgagggattgaaaggagggaggaaggagtaggtaaggctagaggaaagtggttacggtggggcatggctgaataaaagtgggctgagaaaggtgaatgagtttattctgagctctgggtcagaagccgctggaaataacccagggaacatggaaggtggaagagtggcaatttagtactgtggcacagacaggccctggatgttcccaacctcacaacattcaaataaatgtcttcattttttaaatacagaaggaggcatatccagaatttaacaatgatttttctctgattgggactgtagaatgtttttggttg

SEQ ID NO: 6427 - DNA, 1625 bp, Homo sapiens
gcctgccttggccttccaaagtgctaggattacaggtgtgagcyaccacgcccagctggctatgttcatttttaaggcaactttaaaaaagtactagttggctgaaaagctgattgatgctggcaccccctcctgggcagacacagaaagtcccaggggcacagccacagcaatgggcagccagcagggatgggcaggggctctaagccctccctggccaaggacaaggctagtgctttccccttgaacagtctggggctgggtggaggctgggacccagagggaagccccacacccatcaccccaacctggctcccagtagactcccacctttaggcacagtgtccaatagcttccccctcttcctgtactggttactatcgatttctccttggcttctgagcctaactggaggagcactctcgcctagaaatctggctccaaggtaataccatcctcccaaagacggagagaaggggtcccgggaacgggtaagatggagtggacatactccacctctctctcccactgaatgcagctacaaaacctggacagaatgcaaggagcggctacttgaggcctctgaaaactaaagaggagcaggcagatagggaagaagaccagacttggaagcaccagccaaccagcagtgagttctccattgtttttctccagcctaactcaacacagcctggaactccaaaggagtcactggggcacggacagaaagaattccaggacaagccctctagtcctgactcaagcagcagaaagggagtatctaatgctcagagaaggcagaaatcccatttttgtttgttctcttttcttccttgccttgtgccccagcccacaagcagtcctatggcaaccaggggcagcagcagttgaagaaaagctgccaagtcaaaattcgagggaggagctgtgatcccaaaagtgtgggccaaaccctgtgtgttgctcttctgtctgtccccctgccaggcgaccctggacagagaaagctgccaagtcaaaactcagaggaggagctgtgatcccaaaagtgtgggccaaatcctatgtgttgttctttccctgtccccctggcaggtggccctggacacagtcgtagaagcacacaaagcagaacaaggtaactgaagccccagcttcccggctggaggacagaaaagggagccccagaggagatcgggaaaatgatgctgcaggttattgacgaacgcccaggctcagctctaagctgcagatgctaggatctgatcctaattaccacaccgaaggctgagaactagactaacagaccacctgccaagtcccaggctgactgctgactggcacacacccgggaaaagtccaaacagcactgccatcttcaaaatcgggactaacattggaaccacagaccacagaaggcagatgggaacctgcagcctaaacctaaccaggtcaattgctactaaattgcaatgctgacaaaatatcaacattgtccatagatttaaacaagacccagagactcatagcagaatgtgcaggatgcagtccaaatgactccgtagccccctggtctcctaactatggactgtccccacccactagatgccttgtgcagggacctg

SEQ ID NO: 6428 - DNA, 1625 bp, Homo sapiens
gcctgccttggccttccaaagtgctaggattacaggtgtgagccaccacgcccagctggctatgttcatttttaaggcaactttaaaaaagtactagttggctgaaaagctgattgatgctggcaccccctcctgggcagacacagaaagtcccagrggcacagccacagcaatgggcagccagcagggatgggcaggggctctaagccctccctggccaaggacaaggctagtgctttccccttgaacagtctggggctgggtggaggctgggacccagagggaagccccacacccatcaccccaacctggctcccagtagactcccacctttaggcacagtgtccaatagcttccccctcttcctgtactggttactatcgatttctccttggcttctgagcctaactggaggagcactctcgcctagaaatctggctccaaggtaataccatcctcccaaagacggagagaaggggtcccgggaacgggtaagatggagtggacatactccacctctctctcccactgaatgcagctacaaaacctggacagaatgcaaggagcggctacttgaggcctctgaaaactaaagaggagcaggcagatagggaagaagaccagacttggaagcaccagccaaccagcagtgagttctccattgtttttctccagcctaactcaacacagcctggaactccaaaggagtcactggggcacggacagaaagaattccaggacaagccctctagtcctgactcaagcagcagaaagggagtatctaatgctcagagaaggcagaaatcccatttttgtttgttctcttttcttccttgccttgtgccccagcccacaagcagtcctatggcaaccaggggcagcagcagttgaagaaaagctgccaagtcaaaattcgagggaggagctgtgatcccaaaagtgtgggccaaaccctgtgtgttgctcttctgtctgtccccctgccaggcgaccctggacagagaaagctgccaagtcaaaactcagaggaggagctgtgatcccaaaagtgtgggccaaatcctatgtgttgttctttccctgtccccctggcaggtggccctggacacagtcgtagaagcacacaaagcagaacaaggtaactgaagccccagcttcccggctggaggacagaaaagggagccccagaggagatcgggaaaatgatgctgcaggttattgacgaacgcccaggctcagctctaagctgcagatgctaggatctgatcctaattaccacaccgaaggctgagaactagactaacagaccacctgccaagtcccaggctgactgctgactggcacacacccgggaaaagtccaaacagcactgccatcttcaaaatcgggactaacattggaaccacagaccacagaaggcagatgggaacctgcagcctaaacctaaccaggtcaattgctactaaattgcaatgctgacaaaatatcaacattgtccatagatttaaacaagacccagagactcatagcagaatgtgcaggatgcagtccaaatgactccgtagccccctggtctcctaactatggactgtccccacccactagatgccttgtgcagggacctg

SEQ ID NO: 6429 - DNA, 1625 bp, Homo sapiens
gcctgccttggccttccaaagtgctaggattacaggtgtgagccaccacgcccagctggctatgttcatttttaaggcaactttaaaaaagtactagttggctgaaaagctgattgatgctggcaccccctcctgggcagacacagaaagtcccaggggcacagccacagcaatgggcagccagcagggatgggcaggggctctaagccctccctggccaaggacaaggctagtgctttccccttgaacagtctggggctgggtggaggctgggacccagagggaagccccacacccatcaccccaacctggctcccagtagactcccacctttaggcacagtgtccaatagcttccccctcttcctgtactggttactatcgatttctccttggcttctgagcctaactggaggagcactctcgcctagaaatctggctccaaggtaataccatcctcccaaagacggagagaaggggtcccgggaacgggtaagatggagtggacatactccacctctctctcccactgaatgcagctacaaaacctggacagaatgcaaggagcggctacttgaggcctctgaaaactaaagaggagcaggcagatagggaagaagaccagacttggaagcaccagccaaccagcagtgagttctccattgtttttctccagcctaactcaacacagcctggaactccaaaggagtcactggggcacggacagaaagaattccaggacaagccctctagtcctgactcaagcagcagaaagggagtatctaatgctcagagaaggcagaaatcccatttttgtttgttctcttttcttccttgccttgtgccccagcccacaagcagtcctatggcaaccaggggcagcagcagttgaagaaaagctgccaagtcaaaattcgagggaggagctgtgatcccaaaagtgtgggccaaaccctgtgtgttgctcttctgtctgtccccctgccaggcgaccctggacagagaaagctgccaagtcaaaactcagaggaggagctgtgatcccaaaagtgtgggccaaatcctatgtgttgttctttccctgtccccctggcaggtggccctggacacagtcgtagaagcacacaaagcagaacaaggtaactgaagccccagcttcccggctggaggacagaaaagggagccccagaggagatcgggaaaatgatgctgcaggttattgacgaacgcccaggctcagctctaagctgcagatgctaggatctgatcctaattaccacaccgaaggctgagaactaractaacagaccacctgccaagtcccaggctgactgctgactggcacacacccgggaaaagtccaaacagcactgccatcttcaaaatcgggactaacattggaaccacagaccacagaaggcagatgggaacctgcagcctaaacctaaccaggtcaattgctactaaattgcaatgctgacaaaatatcaacattgtccatagatttaaacaagacccagagactcatagcagaatgtgcaggatgcagtccaaatgactccgtagccccctggtctcctaactatggactgtccccacccactagatgccttgtgcagggacctg

SEQ ID NO: 6430 - DNA, 617 bp, Homo sapiens
ctgctctccacatagtcctcctccctctgagcagtgtggcccacttagggctcctgtaagtttcctgtgaagtcctgggcaagctacttttctcctcaggatgctttgtcctgccagccaagtcatgtcccgttgaggtgatgggagattgagtcttttacacagacatttgcaaatgagggctcaaacttgaatctacaagttggtgctggtggcaaaaacttgcaggtgtctgttcccatcttctagcactccccacctcagygtccattcgacatctttccagcttgcagaaactctctggtctcctttgagtttctgtcttctctggggttcagtgggagccacgacatgtgtggaccctggagctaggggtggctgggagcctcagatcaccctggatattgcataaagggtcagggttcaatggcactggcagaaacctccaaaatgtgtttcaaatccatcagcttctctccacatcctagggaagggtccatcctttcttcctggactattgctggtgtctcttaactaatcttgctatggctcccacaatctgctcttcatattgtagccagagtggcagctccacatggctggggagtcctcacaat

SEQ ID NO: 6431 - DNA, 841 bp, Homo sapiens
gattttcctgcctcagcctcccaagtagctgggattacaggcccatgccaccacgcccggctaatttttgtatttttagtagagacggggtttcaccgtattggtcaggctgctctcaaactcctgacctctggtgatccacttgccttggcctcccaaagtgctaggattacaggcatgagccactgtgcccaaccagcaatattcttaattgccctatgagaatgtaggaagacatttctgaaacaattaagatgttgttgttttctaaaaataatgttttaaaaatgcttgttcacttttttctctttttgtattgttagcagcggtcttcatgattatctcactcattttagttcatattattatgtactcacaatatttcgtttgttttcttcactgaaaagcattttttaatccacacttttctatgtactttgtatacarttgtgaatgaaatagaccaaaattcctgcccttatggggtttacatggtgttactagtaggatatgcctcatatgaaaggcattttaataatgggtaataattttaaaatataaaatatcaatttttgatagcctgaaagaacaacccagtttcttgaaagttatcctgaaaaaaaaataggtaaacatggatgcaaaactattcattaagtagctgctcaccacaatagtctataacagggaaaaattgaatacagtctaaatgttcaaaaatcagagacctagctaggagagaaaattgtgtgtctgtatagataatcattaaaaataatcatgctaggccagacacggtggctcatacctgtaatcccaagtttggaaagcaaaggtggta

SEQ ID NO: 6432 - DNA, 841 bp, Homo sapiens
gattttcctgcctcagcctcccaagtagctgggattacaggcccatgccaccacgcccggctaatttttgtatttttagtagagacggggtttcaccgtattggtcaggctgctctcaaactcctgacctctggtgatccacttgccttggcctcccaaagtgctaggattacaggcatgagccactgtgcccaaccagcaatattcttaattgccctatgagaatgtaggaagacatttctgaaacaattaagatgttgttgttttctaaaaataatgttttaaaaatgcttgttcacttttttctctttttgtattgttagcagcggtcttcatgattatctcactcattttagttcatattattatgtactcacaatatttcgtttgttttcttcactgaaaagcattttttaatccacacttttctatgtactttgtatacaattgtgaaygaaatagaccaaaattcctgcccttatggggtttacatggtgttactagtaggatatgcctcatatgaaaggcattttaataatgggtaataattttaaaatataaaatatcaatttttgatagcctgaaagaacaacccagtttcttgaaagttatcctgaaaaaaaaataggtaaacatggatgcaaaactattcattaagtagctgctcaccacaatagtctataacagggaaaaattgaatacagtctaaatgttcaaaaatcagagacctagctaggagagaaaattgtgtgtctgtatagataatcattaaaaataatcatgctaggccagacacggtggctcatacctgtaatcccaagtttggaaagcaaaggtggta

SEQ ID NO: 6433 - DNA, 841 bp, Homo sapiens
gattttcctgcctcagcctcccaagtagctgggattacaggcccatgccaccacgcccggctaatttttgtatttttagtagagacggggtttcaccgtattggtcaggctgctctcaaactcctgacctctggtgatccacttgccttggcctcccaaagtgctaggattacaggcatgagccactgtgcccaaccagcaatattcttaattgccctatgagaatgtaggaagacatttctgaaacaattaagatgttgttgttttctaaaaataatgttttaaaaatgcttgttcacttttttctctttttgtattgttagcagcggtcttcatgattatctcactcattttagttcatattattatgtactcacaatatttcgtttgttttcttcactgaaaagcattttttaatccacacttttctatgtactttgtatacaattgtgaatgaaatagaccaaaattcctgcccttatggggtttacatggtgttactagtaggatatgcctcatatgaaaggcattttaataatgggtaataattttaaaatataaaatatcaatttttgatagcctgaaagaacaacccagtttcttgaaagttatcctgaaaaaaaaataggtaaacatggatgcaaaactattcattaagtagctgctcaccacartagtctataacagggaaaaattgaatacagtctaaatgttcaaaaatcagagacctagctaggagagaaaattgtgtgtctgtatagataatcattaaaaataatcatgctaggccagacacggtggctcatacctgtaatcccaagtttggaaagcaaaggtggta

SEQ ID NO: 6434 - DNA, 714 bp, Homo sapiens
tggaggatagtgtcatggtattttggattatcatttactccccaaatgagaggtttatttctgagccttgactatcaattcattaatttataattacatcatggataaatctagtatctgactgttgtctgaacattgtactgagttccatctgtttctgctttaccttcttgttctagtggtagagaaaggtagataaatctggtctgggcaaaaggtaaaatgatggaacatttatcaaaagtggatggttgccacaggctagaacaacattatagataactttcttttagtttttaaattattatcaaggtaacttttcaatttaccagcagctactcagctactattgaagggcaagtaatgaattatattgaatgacaaattctgatttaacttccattgggatcaaaggtaaaaacattttgtaggaaagtcatttccaagactgtaaacttcacatgaaaayttaaatatcaacagaaatataatctgatgcagttatttgtcttccctagaatgaatgatccaggtgactatttttttttaaatattttccattcccaactactatacagaaaaagctgtaacatttgtacacacacaaaatctctgctacagttttttgtcttggaatgaagggtgcttacttggagatgtatagaataaagtgatgagggatgaccttttaatctcatcatatttctcagattc

SEQ ID NO: 6435 - DNA, 619 bp, Homo sapiens
tcatttgtgatagataatccaaaatcaaactaatcgtgtcataaacataggaagtcaatggtgagcgagtttgcactcctccttataaaacaactaagtgggaggaatatctaggtctggctcttaattagctaagaacaaaaccagaaactcctccaggcaaagagaatcaaaagtgtagaattatgagatgataacactggaagtgtggtgattaacgcggttcatctgtatcacttttaccatgaaagttgagatccagagaggttragtgatatgtagaggattatagccaatataatctaatttatcaaacataatatttatgagcctagtaaaatgctagcactaaggaaaaagagggagaaaatactctccccatccatgaggttttcacagtcccatgcagaaataggtgtatagacatataattatggtgcagtctctctccagacaacatgggattaggacgtgcatctcttggcttctcagtgccatgtacaccaacccagctgtctttaacaccctgaaacttggccctaagtgaatcagatctgtttgaagcagacaggcagactgcagtgagagaaaacttaacatcacttcaaccacattgcag

SEQ ID NO: 6436 - DNA, 732 bp, Homo sapiens
ccatttttgatccaaagaaagtagaggagtatttgagacatgagtgtacccagccctttttttaatcagaggcaatgcatgggtctggctggttacactttgccaagaagacttgtcttatgaaacccaaggtatattttgttatgccattttatgtccttttcttttaacattgtggaaagtggtatgttgaatcaagtgtaagctgagttttccagacaactgaaatagctacatcatgaatgttattttgttattaaagggtttttactcagtgctttgtgccaatggatgtccttttccttggagacacataactacaaaattacctcagcttggcctggttttctctcctgccctcttggggaaacatgggcctggcctgggaaaaggcaggtcatgggctggaaggtaggttttggtactaggaagaaatctctgtatctgtcagctttaaagagaactgggccaaaaatctctaacctcactctcyctggactccaacacttccctgcaatcctttggtcttgagcatgtgccagcatgaaggcagactccagttcatacatgaaaggcaagaaaaagaaaatagtaaccttgaatcttctgtgggccaccaggcactcacctttccccaccttgcacactatccagtcaaggctgttgcagcccatctggtggctttacatgggacattaccaaaggcttcttcctccatcctggggttgcaaa

SEQ ID NO: 6437 - DNA, 568 bp, Homo sapiens
cccttctcttcccactcccctctttgtagatwtcctgctgaagtattgattgccaaggtctctacaagatttgcaaacttttacagtcatttatggtgcatgcaataaaaacaggtgatatgagcatgctagttcaaggtgtaatgcaaaaatgtattcggtgcccttggcaactatctgtgagacctgtttgtctttgcagaacccccccttcactgcaatgaacccctctgtaacaaaaattggccctttacatttccagggccttggcccctcagtggagaggcacacacgtttcaagtagaaaattcagttatttcagctgtatttcaagccaggaaaaaaaagaaaaagaaaaagaaagaaagaaaaacttttaacaaaacggtgagaaacaaggaaaaaagaactatttaaaattccccaatttcctactctctttttttcataaagaaaacaaagtaaatctacaaacaatgtacaatgtactctctcactgccccttgcaattgggcaaccgggatcttttcactgtgaaaaaataagagactgagattacacacagact

SEQ ID NO: 6438 - DNA, 551 bp, Homo sapiens
agctatgaccctttattattttcagcatcgctgttaaacaaagagtaactgtgaatgaatgattcaggcattaccaaacataaatacaaattttacgcttccttttattattttcctgtgagaaggaagtgatccttttaaacacataaataatttacattgagggttagagaaagtgcctgtggcacataatgaaaaccaaaccaccgtgagcaggtatgtttgaagtccccagtgatgatcgcgttcacgctcctaataagtgcctacagaggatggcagcccggagtggaaggagccgttgaaggctgagtttttgccttcccaggctctgtcagagcagcacagatttcagagtcatttcttttggtgagaaaaacagtgtagtaaggaatgattcccgtaggtgacttttgaataayacagacatcattctcccattctccatgctaacactttgaaacttttagcattttcccaaaaatatcactaccttttcctcctcttaaaacaaagattagggaaccaattttaaccctttgcacgacttt

SEQ ID NO: 6439 - DNA, 791 bp, Homo sapiens
ttgattgatctcttcttcccttcatcagcatgcacttcctccctcactagaaggatttgacactgggtattcccttctctaacagacccaactccttttctttttattggcttgggctgagaacaaggcaagtgtgatctgagccacctcttaagtataaggaatgtggcttttaaaaatgcatgcacccaggattattctcaattcagattaccttaattggtggtaagaattgaagctggagttgggtagttaatgaagatgccaggtgggaaggagtgaaatactggagcctgaatgaacctatggaataattcttgttaatccatattttattccaacgtaacttctttgtcactcttatacatccaaatcctggcttgtatcatttctagttctgaaaattacctccttgtgactttttgtatttacccacatcatcatctccttaaagactccagccttgaactcacttctctttctccccactcttcaatcaccttgaacctctggcatttcatccatctgccccatgcattattactatatcacatcagtcccaacacatacacatacccacatactcacagagagagaatctggtgcctccaaaggctgactggttgatccaaaatactactgcttgaagatattaagaaatgagggtaagaaagaagtgcacaatgatcccctaagtctcaggaccaaaggacatycaaaaagcaaggagcatggagcaaaaatgcaaaggcaggtaccttcaatacacatcgttctacagctttacagga

SEQ ID NO: 6440 - DNA, 682 bp, Homo sapiens
aaattaaattaagcttgccccttgatatttctctctttttaaaatatttcttggttttggaatactacaaaaacaaacaaaaatttttaaaaaatatatttcttggtggatggtaaaattaccatacacaggctrgacacaaggatgtcttctacctaaacaagctcgcttatgcaattctttaaacactatttcaactctgtgtaattctttaaacactatttcaactctgtgtaagcatgtatctcatttcttctccaatcatgttcatggttatcatttaactgaactataagttcttcattatctttctgttcttcattacttcttaattttgcagaaaagattttatttccatgcaattttttgtaatctcagatttttccttctttgtgattgttttctctgccttcttgaatctttatataaaccatagccattttctaaaattttttctgcttcctttaggaaatcagagtgaccatttttccaaatcattacaggagtacctgtatggattgtactacctttttgtagacgtttttatttttctctatttttttgagaggtgtgattacctgttctaacacagccctgccaccatgccagccaactttttggtgcactcatatgttctgagggttcattctacagaagtcactctattcttgctgtaaccaca

SEQ ID NO: 6441 - DNA, 812 bp, Homo sapiens
atactacatatatttaattatctaaattcctgaacagcatttgggatagaaatttagaagcttgtgtgatatagttccagcaattatatccagaaataaatatccgggtgagttaaattaatgtctttgtgcatgtacacatgcatacacagacacagacacacagatttacacatggctatgtctatagacagcaagctcacatttatttatacttaaatatttgaatataccttatacaattttatctttctatcatcaaattatatttttctccttgcaaaccctggtatcctaaaagatttgtatttctacaatgacatatttacaaagatggaaagataatccaaagtaatccgtaatctctcattccttgccctccttctgccagtttagctaaggaacataaacaagaacagtgacccaagagccaaagggagattctgccatcaccatcatttctttgtatcctgcatgctaaytgtgttctttctgtggtttgataatttgggatctcagatttagggatgaaaattattacaactgcattaaggcttggctcccacttttcactgtctttttactttcatggtcatttaaaagacatgcctagagtttgataaagcattgacgactctcaataagaataatgtgcacaaatggatccaggcttcccaataaatctgaatccaggctgagcggttgtctgagcatttcccccagatttgctgcagaatactgccatcaagtgtggagttacaatggcagtttctagaggtagtttcagtgtagatatggtagtgcatgggttt

SEQ ID NO: 6442 - DNA, 634 bp, Homo sapiens
ttgctcccgtctaatatgaccagaatgagctggaataccacactgaccaaatctggatctttggactaaagtattcaaaatagcatagcaaagctcactgtattgggctaataatttggcacttattagcttctctcataaactgatcacgattataaattaaatgtttgggttcataccccaaaagcaatatgttgtcactcctaattctcaagtactattcaaattgtagtaaatcttaaagtttttcaaaaccctaaratcatattcgccaggaaattttcctaaacattcttaagcttctatttttcccctgccaaaggaaggtgtttatcattttaaaatgcaatgtgatttagtggattaagcaggagcgctggttcttgtctccattgccttttcttatatcattgataatgatgtaagaatcacaaggggccgggcgcggtggctcacgcctgtaatcccagcactttgggaggccgaggcaggtggatcatgaggtcaggagatcgagaccatcctggctaacaaggtgaaaccccgtctctactaaaaatacaaaaaattagccgggcgcagtggcgggcgcctgtagtcccagctactcgggaggctgaggcaggagaatggc

SEQ ID NO: 6443 - DNA, 808 bp, Homo sapiens
agaacmcttgggactactgaagaattccactttcaggcaaaagacaggaagtgtgaagacactgtctgggtgttaaaatcactgtatttcataagaaacaaatagaaagatcaatccctcgatcagactctatctctcgttcttctacaccttctcttttattattttataaaagaatcaaaatagccaatagaaggaaagcatctcaaaatggggcagactcataaaaaactattattttgtatacatccttatcctatctgaccatgatttcttctggaattaacaatgacaaaactaataaactcacaagtcagtactatgtgcattctgtactaataaatatatatggacatagaattggaagtttgagaccattgtccaatccaattgaggcatccttccttcatcctgacactggttatccagtttaaatacttctagtgacaagcagcttgtgaccacatgaaacaatttcttctatttttggacagaactaatggttttaaatgctgctctttatattaaactaacatggacatcactagtaattctatttagtcatcacagtacatgctttcttggactctatataccatattctaatttttattacgtgtgactagttttcacatatgaaaatacccataatgtccttccaagtgctccttactcaccgtatatataaagcaacttattggaaatatttctgaaacttgccggacttctggttgaaaggtgaatagcaaatgtattacattgtatctggaatactgtccgaaaattagaattcaaactctttcacaat

SEQ ID NO: 6444 - DNA, 808 bp, Homo sapiens
agaacacttgggactactgaagaattccactttcaggcaaaagacaggaagtgtgaagacactgtctgggtgttaaaatcactgtatttcataagaaacaaatagaaagatcaatccctcgatcagactctatctctcgttcttctacaccttctcttttattattttataaaagaatcaaaatagccaatagaaggaaagcatctcaaaatggggcagactcataaaaaactattattttgtatacatccttatcctatctgaccatgatttcttctggaattaacaatgacaaaactaataaactcacaagtcagtactatgtgcattctgtactaataaatatatatggacatagaattggaagtttgagaccattgtccaatccaattgaggcatccttccttcatcctgacactggttatccagtttaaatacttctagtgacaagcagcttgtgaccacatgaaacaatttcttctatttttggacagaactaatggttttaaatgctgctctttatattaaactaacatggacatcactagtaattctatttagtcatcayagtacatgctttcttggactctatataccatattctaatttttattacgtgtgactagttttcacatatgaaaatacccataatgtccttccaagtgctccttactcaccgtatatataaagcaacttattggaaatatttctgaaacttgccggacttctggttgaaaggtgaatagcaaatgtattacattgtatctggaatactgtccgaaaattagaattcaaactctttcacaat

SEQ ID NO: 6445 - DNA, 1458 bp, Homo sapiens
ccttgtctaaaacatgttcttttttaaaaatctgtatcttacgtattattagggattccttccaaaacaggatttaccgttttggaaaattctactgtgcaggtgtttctgttaatgtggaagtttaatggatttaggaaaagagtaagaagatgtggtctaaagtgagaaaaaagccaagcacgctagggactgccgtttggttcggcatgctttcatcctcgactccttcacttcatgcgcttggccgagacctgtctaaatcttttgtttgtcttcttaaagaatgtgtttcatgatatctacatgtgctcctttccgcttccttgttgtaagagcagaagatgggcaaggggctgcatccagtccttagttgtaagactgtggtttcccatcagatgacaatgactgctgacagctcccaggctcgcctgaaaagcagtgctggcttctggcgttgtgggaacctgcctctctccttctctcttgaaaaatgctgtttttcctctttaaaactccaattcacattctatgtgggtttgggagacttttaaactagaagctctgtgaatcatctgttacatccattgaatgctggaatacaacattgtggtggaattcagtttcttcctactgtgcagagacacagcttgccttccctaggaatttattttacatatttgccctcgttatcttttaaatggatcccttcagatgtgagaagctagtccagcatatcagaacttttctgcttcaaactaaaaattttcaaaaatattatttttgaggaagattttccaggtaacgctaaaagtctggagcattttacatttcaaatcagtcacaatgygctccatttccagtgacatttggatttgaggaggtggagggggagggagagaaaaggggaggataaaattagaataaatttaacaaatttgtaggggaatcatacttttttttcttcttggttgttgtctgaaattgaaaattgtccacaattttatctatctctggaaatgcaggaggctttgtgggctggggacaggaagacacatagttcattttatagaaataaaagatacagtggcaaggaaacattttcatcccatttaacatatggcatttaatttggtaatagtcccgggcaagcacagggaaaggaaggagaaaggagggggtattgctgtctataccaaggcacagaactgctgctcacacttcagtgatccctgcagatgggaagtatgtgttcatggttattgtagaaacctccagaatctttctttgttacagctttaatagaattgttcctaagaggcgactcagaaaacatacagattgaatgccaagttgtggaagtcacttttcagcttgtgtctaacaacccagcattctcagcaaagcagtttcctcatgagaagagtggaggagaccttttttttaaaaaaattattt

SEQ ID NO: 6446 - DNA, 548 bp, Homo sapiens
gtccttaatgctattaaacgtattcctgaatagtctgagttgcatagtaggcttatattaaggaagtaccaatgataaatacacaaggttttatctgtaatgatagtctattagaatgaagaaggaagctcaaggaattgttgatggtgtcaaagcaagtatttgagtgcttattccatttgaggtccagtcagaagaaaacatattccatgtttttaattctgattcattatgtttggtagygttttcctgtaatcgttagactttggcctacccactctccaggaaaaactagttgagccaccttgtcttttccatggtaggatgccataagaacttcagaattactggttgagtgaattttgaatttgaattttggtaccacgggcttcccccccgccccccttaacattcccttctaagcattgagcatttgttgatccaattctgtgttacctcctgaatgccagagatactgtcttactgtcatgccaaacattggtgtattttgacataatgaaacacttaaattccaagttaaggagtgg

SEQ ID NO: 6447 - DNA, 851 bp, Homo sapiens
gatccttgaaaatttcctagacacagagcctacagtaaagtggccatgctagaaatgcttctttatttctctcctcttcctctcccttttataggaataaaactcagacgaaaaaggacctctgctatctcagatataaatctgactaactgactaaagattgaagagtttcacaaagtcataccctccttgttttcagaaataatcccattacaccttgaggacctaaatcccaacttgctggtactggcagcttcctaggttcaccttgcccaactttttcctcctctctgaacctaaccctctttttaaaggcaattccctccttgaacacctccatgatgattctgttacagtaggtagctagtcagaggtgagcagggcaggagagggccactctcagcccccaccaccaggaatgtcaggcaataatcaggtgatggtcaggcagttgttgcattgtctctaaaaaataattggtcacagccagcaccagcgaaagcaacctcccaatagatagaaacacccaaacctagtaattagcagcttcccaataagatctcaggattaggcaagtaggctcaagaatgcaccctaagagrcaaaatggcagacaaccttcctctaggaacactggactggtaagggaaaaacacctcatatgagcgtgcctacaactccagcaaacacgctgcacatgtggcctctcccaagtgctagcagtccactgtgtatgcagagagcccatcccaagggaagaatcaggagagaaggactgcaagatcccagaggtatgccaacatataaaaccccagtcaaaccatgtgcttgatctctcaggtcgatgattg

SEQ ID NO: 6448 - DNA, 491 bp, Homo sapiens
atcaagagagctttattgtgggggtttggctcacaccatcrtggagcctgagaaatctcacggtccaccatctgtaagcccaggacccaggggagctgagagtgtaaggcccagcccaggtctgaaggcctgagagccctgagtgctaacttccaaacatatacccagaaatcatgttttcttcatggtgttgaaggtgtgtccacgaggagcacaaatgccctaggcactgggcactcattgcccatcccaggtgccacgcaagtctgtggcctgcgcttccccctttcagtttcacactgacactgtggggtgggtactgttcccaacacgttttatacaaggggagaccagagctcagagaggtcaagccacctgcctgaggtcgcacagctggcctgtggagaagccggggctctgctacccaggtccgcctgatcttgccatcatccgatgctcttgccgacggcaccacatggctgcggaaaggg

SEQ ID NO: 6449 - DNA, 607 bp, Homo sapiens
agcaggcaggcccggctgtgtaatgtgcaggcccagtgtgaagtgaaatgcaagcccaccgtgggaaaattagtaagatttggcacagcaggggcagcacgytagagccagctggggccttctgagcacgggccgtctgtgaccactcaggttgcctcctgtgccgtcatcagctctgttgcaggcccaggtgtcctttggggtctgcaggtgtggatgtgtggcttcggctgagtggctttcttcctctgtgcctcagtttcctcatctgtgaaatgggaggctgtggggcccgaatgggatggggcaggggtgtgaccgtgcttcagggggcgcagggaggatgagtcaaggtgactcactttcctcctgtccttctgcctgcaggaggaagcttcctccctcagcaggtggtcacctattgcatttcagacacgggtctctggcctgggacccagtgggagcccctgccttcccgaacgaagatggagcacagggtatgggggagtgtgtgccatctcagtgagaaaagtgccttcgagggcatcaagcaagcctgagggcggaggagaggggcatcctttcccgctggatggcagggaggcct

SEQ ID NO: 6450 - DNA, 563 bp, Homo sapiens
agcacctactgtgtgctgggtaagacagaacagtgataaagaagataggcatacggctgggcccacgcctatagtggcccacgcctatagtcccagcactatgggaagctgaggcaggagtattgtttcagcccaagagttcaagactagcctgggcaacacagagagaccctgtctatgttttataaaaaataaaaagtctatttaaaaaattacaaaaaattagccgggcgtggyggtgtgtgcctgtaatctcagctacttgggaggctgaggcatgagaattgcttgaacctgggaggcagaggttgtggtgggccaagatcacgccattgcactccagcctgggcaatagcttgagactgtctcaaaaaaaaagaaagaaaaagaaaagaaaggaaaggaaaggaaaggaaaagaaaggaaacaggcatagtgtttgtcctcatgaagctcaagctctagataatgacataatcacataagtgaatatgtaattacaaattgtgatacattctgggaaggacatcataagatgctaagaggagaataacatgaggatt

SEQ ID NO: 6451 - DNA, 692 bp, Homo sapiens
aaatataaaattagccaggcatggtggtgcatgcccataaccccagctacttgggaggctgagacagaagaatcacttgaacctgggaggtagaggttgcagtgagttgagatcgtgccattgcactccagcctgggcaacaagagcaaaattccatcttaaaaaaaaaaagaaaagaaaaagaaaagtatagcttatttctctgcggtggtttatatgtgtcaggcactatttaattccaggaggtagatttctatttgacggatacaaaacctgaggaacagagaggttaattatcttgcccaaggtcacacagctagtgagagtggcttctccatccctccatccaataccttcaagcactctgtcaaagtgcccactgtcttgtttccccactccctcttgcttccagatgtgaacatggaggctccagatgagaagtccatcatcacctacgtggtctctttctaccactatttctccaagatgaaggctctggctgtggaggggaagcgtatcgggaaggtataaggagccaaggagtgggtgagtgggaagctggaagctggtggcaggcacgggtgggatgaggctgaccccccttcctctgctgtgtcaggtcttggaccaggtrttggaggtggggaagatcatagaacgctacgaggagctggcggctgagctgctggcct

SEQ ID NO: 6452 - DNA, 835 bp, Homo sapiens
gatccttttacttcatgactccccagcatcttcagagttaagtcccccatccagggtcctatatgccctggcccctgcggacccttccagtcttgtcatttaccttactgctttcctcctccttccagccaaacccagcagcttagagatccctgaaaatgttgtagggtctctctctcagtgacccttgctgtttccttgcccaccagaacaatagttctttggggcagatactgttactgttccagtttacaggtgaggaccccgaggctcagagaagttaagtaccttgcctagagtcacacagccacagagcggyaactcttttttcttttcttttcttttcttttcttttcttttcttttcttttctttcttcctttcttttctttctttcttcctttctttcttttctttcttcctttctttctttctttcccttccttccttttttcttctctctctttcctttctttcttccttccttcctctctctcccttccttccctccctccttccttccctcctgccttccttccttccgtccttccttctttctttctgacagggtcttgttctgtcacccaggctggagtgcagtggtgcaatcatggctcattgcagcctcaaactcctggcctcaagtgatcttctcacctcaacctcctgagtagctgggactacaggcgtgagccgtcgcatctggccaaagctggggttcaaacccaggcagtctggctttcaggaacagtctcttctctccagcttactgcttcaataatatctctgttagatttctaaagtgtgccgggactgcataccataggtgctcaata

SEQ ID NO: 6453 - DNA, 835 bp, Homo sapiens
gatccttttacttcatgactccccagcatcttcagagttaagtcccccatccagggtcctatatgccctggcccctgcggacccttccagtcttgtcatttaccttactgctttcctcctccttccagccaaacccagcagcttagagatccctgaaaatgttgtagggtctctctctcagtgacccttgctgtttccttgcccaccagaacaatagttctttggggcagatactgttactgttccagtttacaggtgaggaccccgaggctcagagaagttaagtaccttgcctagagtcacacagccacagagcggtaactcttttttctttwcttttcttttcttttcttttcttttcttttcttttctttcttcctttcttttctttctttcttcctttctttcttttctttcttcctttctttctttctttcccttccttccttttttcttctctctctttcctttctttcttccttccttcctctctctcccttccttccctccctccttccttccctcctgccttccttccttccgtccttccttctttctttctgacagggtcttgttctgtcacccaggctggagtgcagtggtgcaatcatggctcattgcagcctcaaactcctggcctcaagtgatcttctcacctcaacctcctgagtagctgggactacaggcgtgagccgtcgcatctggccaaagctggggttcaaacccaggcagtctggctttcaggaacagtctcttctctccagcttactgcttcaataatatctctgttagatttctaaagtgtgccgggactgcataccataggtgctcaata

SEQ ID NO: 6454 - DNA, 768 bp, Homo sapiens
gcaaattctcaccctaaatagcccccataaatgtgtttaaactttactcatcaatacctgctctcccctcttaagggtagatggagagttcctcgaaggcccttcccctagaatcctagtggttcccaaactgcagatatcatgtatcagtaaaattacaaaaaaataaaatggtaaagtgtggacacttgacaatattttatattgccaggaaaagacaaaggaaacaaaaaaaattaccgtctcttattaataccatttaataacagaaggaatatgttaacactaaaaattaatgaaggaaacaattacaaacaaaggtctgtcctttaaatggaaaagttccatgtcctgaaaactcactacacaacgcttatctttccttcttttcccattgatgagtgaaaactatcacaaaccagttccagctcattggatgagccgtttgggaaccactgatttaatcccagctttttatctagctcgtgaatttcctccatgttattcctgacaaacagttgtcccatgaacaacatcccaacaratcatacttttcaagtagcaattatcagagggtgctaataattccaggtttgccgtcatactaagcagcaatctgtgtccctgtggctttgtctccctgatctaattctgccctctggcatctcagagaataacgctaattcctcttccactgacaaccaacctcaagtttccatgtgagtcctgcttgctttgaagtggcccactatctccatgatccctgga

SEQ ID NO: 6455 - DNA, 711 bp, Homo sapiens
ctgatttttaagaaagaacaataatacaactatttcttaaagaactaccttgattgaataatgaatattcctgcttgagtccaacactgtttattccattatcaaaaataaagttatacatagggaatgtcacttttaccacagcatagaaagtttatcactaccataatttgtgacaagaaatagtgactcaacttctcttcaacttaaaatctgggcctgaacacagggtcagatgcataacagatatcaagtaatatatatggaatgttttagtttccaagatggctgactggaagcatttccagcatgcctcatccacttagatgaaccaaaataatgtgtagacaatcatattttgaatatattattcaagataaaacataggagttaaacagaaaagtgaaaggaaactttaaaatctaggaaaaagaaggaaaacagacagcccacatggctaggaaaatctaggarccagaagtgaatgccaatacaggacagggtaagtgctttctgcaatctacttttccatgaatccaggccacaggagagtaccttgactcacccagtccctgaatctaagttaggaagcagaagggagattaccagagggaactgcacaggaagtgtcacatgcctttttgagacctaaccagctactgtaagatgtcattcctgaccctagctcttcacaaattgcacatggtcctg

SEQ ID NO: 6456 - DNA, 825 bp, Homo sapiens
ccaagtgttcatcaacctgcaaggactctgcatatttatcagatgtgtggacaaaagttgcagaatgtctgctggaaaagtaggtactgacaggattgctgtcaagtttaccagattttaaagggcacaacttgatgtattgtggtggagaactgcagaatgtttcaaagcacaggaaggaaaggttcaggtttcaattgtaaaggtcagtgtgatggcaggggaaagcatggattgaggaagggtaaggagtgggcgtggggctagcagtcctccatcagggtggagaaggaagatatgattgagactctggccaatggagtgaagaaggggccagggatttctaaatgaaaagtgacatacttaacaactaacgacacatgggggaagtggaaagagggacacctaggagatctgggtgtaaatctgagtgtaaaaaaaatattaattgatacaagaatgggggaataaatgggactgaaacacttacagtatccagtgctcactggtgtcagacttcatgctracccctttgcatgaattattttatctatacaataaccctaaggaagaaggcactattaaggtttgcattttaagagaagaaaattaaggcttagaaaagttatgcaattctcccaaatcatataattattaaatgacagaaagagcaataaataaatccctgcctcactcagacctgtggttctacaaagtcgtaaaggctgggcattctggattgatccttcctttcttctgcctctcctcaatggaattcagttccattctcctcaatagaatccaaagttttaaaggaaaagatct

SEQ ID NO: 6457 - DNA, 800 bp, Homo sapiens
cggtggtggtgaaaaacccatgaacacgacacattcatacccctggacttcccctcactccgttcgcttcttctacagcagcccttggacaagcaaagacaaygccaacaacatcagccatcatccctgagatctttcccatcatggacaccagccaagtaataagtgaccccagcccccagtgttattttgctttgggagggtatatccagggtccttggtgtctagatttatccacacaaccacaaaaccaaccacacaaagactgatgggcagattaagtcaatcacctaggaactcaaggaatgggacatttcttgcagcaactcaatggatctaattcttcatgacctagaacaccctcccttcccaccaaagaagcttccagcttcatcccatctgtcaccttgtagccctcccttcagctccattaacaagccagcatccaactcgccctcactcccactactgcccccagcctactaaagggactacaagaaatacaccaattattaagagccccagggagggcatatgaataaaagacaccacctgtcaccaacctctgagctgagagatggaggtaccctgggtttcctggacagctggtaagggtgcaggttacaaggggttctcgtagtgtatgtcttgtttttgtttcttttctctatttctaaagctatttttttttatcccttctttttggctctttctctctttcctttcatatgaattataaacatatgtatatatttctctgataatcagtatgcctggctatacttgaccaagacttttgt

SEQ ID NO: 6458 - DNA, 667 bp, Homo sapiens
tggacacagctacaatcacagaagcgatcttggaagccactaagccagccctaccattttgcagatgaggaaactgaagactgcgagggaggatattcagcttgaatttagggtcagcaaaaggatgcattgaggaaagagcccaaggtgatcagtgtccagttggcatctctatacctcatggtgctgtcttcctgccccattgccaggcttggattgtcaaaataaggaactgatctccaggagataaattcgtcaagtagaagacaggcttcaagaaaagaaaggcactctgttttgcagtggggagcactctgctgggggcctatgtggctcagacgttgatggaaccgtcatctctgtaagtggagacagtaagcactgtcctaactaaatcacagctctttactgcttttatataaagattactcatgttgtaataatagcccataaattagtaagtaccattaagtttatgggcttctcctagtcagagtcctttctagctatcartttggtagagtttaataaactctccatgacttataaaaccacggtagtcaagttttggtctgtactgagtggcgtttctgatactgacttccttctctacttgcgtgaaatgaaggcaaaaggacccataacaacacaattagaccacaagaca

SEQ ID NO: 6459 - DNA, 796 bp, Homo sapiens
taggacttttatagacttgactctttcccatgattcttccctttgggtgagcttcctgcatgtatagtgctttccttacccttttccctttccagttgtaaaaagtaaagtagaggttcctcttcaaaaactttcctttccatctaattaagaataaataataacttctcttagaagcaaaatttattcaaagacctgtgctaacattcttaaatatctgctagctgtaataargaaatcaatgtactttatgttcttagctcccacaatttagcctaaatatttgtcctggcatgtttatactagtcctagcaagcaataggtcatagcctgttcctcttccttatttgaaggtgtttttacctttctcagcattccataagttacctcctccttcctttgttctcctctgcctttgcctcttttaaaaagttctaagttgctagccagtcgggacaaatatagaatgcgaggtcccgttccagccaatggaaactgcacacagtagtagggtggacacgtcagattataaatgaccctgtctcctttgttcggtgtactgtcatggcaaaactgctggtgagtgtatcctttctgcagaaagtataaaaatggccttgctgagaaaattaaatttatgttcaagtgctatttctttatggcaccagggaacaagcatttcaaacacagtggagtgttcccccaccctggaagatcatacttcaccatttttgcctcttaacatgcatacccaggatgctgcttctccctggggcctgcattcggttaacatttt

SEQ ID NO: 6460 - DNA, 819 bp, Homo sapiens
gcccgcctcggcctcccaaagtactgggattacaaatcaatcatcttttatattgccaaatctggttgggtccttacttcatctcagttactgggaaggagtattaattaattgcaagtgtaggattccctgcctccagaccaaggaacaaccaatcaggcattgtgtaaatatatttctaatcatacccwgtagatatagaaagaattggcactccctggccaaaggattaaagggcttttctgatgctctcagctggcaactagcccagaattgccttgttctcatgtcctggtcttttttgcttggatttcttcaatattaggaatttctctgtcctggtgaaagagtgcagctttctcattgccttacccctgggtactgggacaaggtgtaggtggaaaagttctaaaatgcattaattctacaaacatttattgaccactgactgtgtgccaggcacccttttaaatgtttgtggtacaccactgagaaaacagaaaaagaatcctgcattcatggacctttacctagcagaagatagatagtaagcactaaaagcaatcaagaagtaaaaaatgtattttcttagaaggtcataattactatgggaaaaagcacaatagaggcacaagggagataagagatgttcaggagctggatggacagattgttgtattaagtaaactgaccaaggaggcctcaatgagaaggtgacatttgagaaaagtcttaaaggtgaaggagtgagtcatgaaaatcatttgctagaatcccaggcagaaggaatgaagtaaaggccctgaagtgggagtgaga

SEQ ID NO: 6461 - DNA, 728 bp, Homo sapiens
accctgccatccagacacctcccaccaggccccatctccagcagtggggattacaattcgacrtgagatttgggtggggacaaatattccaccatgtcacttggctgtatcagtttagggaaatgttatgacttgctttacactcagtcagcctctgttttgccattgtgcatgaataatttgcttgggtgtattagtgcctgattctgctgactcattcgttctgctcctcagggaataaaatgatgaaaagacatctctgcttttgctctgagattttgtttttgtctcgttcctatacagcgactgcttcctctacctcctcttcagctagcagctgccacggggaactctgtggctcaagcagcagcagttgaaagatactctcactgcccacttcctgtagacaaggaggttttggtgggctgcttaggaactgtgccagccttgtgtctgactggtaactgactcatgagaaaagcagccttatgtcggaaagataagggccaacaaattgcctccaggtggtggtagtttggaggtgactgaccattcatttcctttctttgggaggagacagtggggagggaattggtgaataagtggtcttgcctgcgtttttctccagctcttagtgatgcagccaggcagatagttggttctctgggctggaatggctcgtggaccccagtgccctcagaatcccctctgctgctatcagagcatca

SEQ ID NO: 6462 - DNA, 400 bp, Homo sapiens
cagccttggtcactggggacagatgaccacaaagtgttcagttttttcctctccttttaacaagctactttttgttaatcatattattgggttttctttttcttaatgactctattgaagtataatttacatattataaaattcacccatctcaagtgcacaattctgcattgttttaagaaactgaatgagttgtacagtcatcactaccacacatcatckggtaagattctgtttacaattaacccccactcctgcacccagcccccggcaaccaccagtctgctttctacgtctatagatttgtcttttctgagcattttatacaaatggaatcatacaatctgtgctctatgtttctggcttttttttttcaattagcacagtgttttcgctcatc

SEQ ID NO: 6463 - DNA, 811 bp, Homo sapiens
aaccaagccagcatagatttggtccagggtcttagaaggagaggtagaaggaatcagattctgtatacagtttgaaggaaataaggacaggattcatttatgtgattaatgtgagcaacgaagcaacaaaggatgactccaaacgttttgggcttcaaagagattacatgattaagtgaactaaactgatgctatacatttaaaagttttcttgtgatagagaaactttgaataacactaagagtttttcatgatctttcagtgggacatttgtaaaaactacatttaaatatttaccttcatttttatttattttcctttccatagttcttgccagtagtctcagtccatttcgtgaaggaagatttatagagaggagactgcgatcctcgtcagaaggcactgcagggagtagcagaatgattttgaaaccgaaagatggaaatatagaagaagttaatagtttaagaaagcaaagagcaggttcttcatcttcaaaaatgaacagtttggtaagtatatacatatgtctgcctctaataaaataatgctgtctatatccgrcatgttcatgtctcttgcaaaatgaacacagactacaggatagacacctcatatttgaagggaaaatttgtttccatagttgacattacaagtcagagaaacaaatttttcacctaggtcaggatggagttcaccatgacagctgtctttagttcctgtcttccttgcttccatggaaagtttgacattctttattctagaacaagacacttgaatacagaaactagggaaaatgctgaacatgagg

SEQ ID NO: 6464 - DNA, 605 bp, Homo sapiens
tgggacacgaggttctcaaccttggaagggtggtgggctgagttgacaacagaccctccagcatggtggtccattagataatgacttatcttacagtagatcacataggaagtttaacaacctgcagagtttccagcttcacagaatcaccgttttaacttccataaatgtaatgtaaaagaaaaatgttactgctacctgactggacagtcattacaatgttttataaatagaagtcaaccataagaaataactgcaatgagcaccattctagatatgtgctgcygtatgccaaggctgcaagccgaactcctggccctgctgtgctagaagggaggcgagcgagagcgggagcatcacagccatgccagtgcccaaagagactctgaccttggagggtttacaaaggagaaatgctctcactatgtgatctaattactccacagagaatcagaggaccatagctcctgctttggggcagcactgtcataatctttcctgtgaagttcagggagaaaaagaagctgtcggaagccaaagagaagcctttctgcctgacctcctgtgatcaggaagggaaagggctctgaagaaatatcgagtga

SEQ ID NO: 6465 - DNA, 1173 bp, Homo sapiens
taccaggctgttttctttcctgggatcttacagcctgagtaatatcatttaaagttaaaacaaaatgctgaagcttagttaatttatgtcaacttcctacagtctgtttaatacatgaactacttctgtaacttattgggtgattttggagactggccacagagtgtattgtccagatgacatttcagctttttattaccagttttactttgaaaacaagcaaaaaaaatatgatattaaaccaatcaaagatgaaaacttttattagtggaaaagggataaagaaacccacacaagcatctttgtgacttttctgcactcatgagctggctatttcaagtgttagttgtatataaatgatttggtctaagatgctctagatggacctcaaaactgattatagtctacgaaacaagaaacrtttctacattctctgagtcctgagaaatggtgtgcataagttattggccactgtaatatatacaaatttcaagagcagatggcttggagttaactgccttagtattgttgtctgagaaaggtgatatccatcaagaccaatgggaggattaaagagccaatttgatgagtttcagaaaggaaggagggcttggaaggcaggagcatgtgagaacaatatgactgccataaccataaagtttaatccatggaaggttcatgttccattgtaaatgtcttgggaattgctactgcttcaataacacccagatacagcgctgttaattctatgattttgagcaaatcactttgcctcttcatcattttaacttctttgtctgcaaaatgggcacaatgatagtattaacctcagagaaccattgtgaagcacaaacaaaaatgtgaatgaaggccgggcacagtggcacacatctgtaaacccagcactttgggaggccgaggcgggcagatcacttgaggtcagaagtttgagactagcctgagcaacatggtgaaaccctgtttctactaaatatacaaaaacttagccgggtgtggtggtatgtgcctgtagtcccagctactcaggaggctgaggccggagaatagcttgaactcggaaggtggaggttgcagtgagctgagattgtgccactgcactcccagctgggtgacagagtgagtctccgtctcaaaaagaaaaaaaaaaagtga

SEQ ID NO: 6466 - DNA, 545 bp, Homo sapiens
ttgtagtgatgtaagtattctgcatctagactgtatcaatgkcagtatcctgcttttttgtactgatgttttgcaagatgttgccagtggaggaaactgggcaaagggtactaaaagaactctgtattatttcttacaactacatgtgaatctatattatttcaaaataaaagtttgaaacaacaataaacacaatagacccttcacatcaaaatattaatagaacttttattgcttcttttcctaaattacttttactaaataatttctctgaactgagttggtcagtgaggacatctggtttcttccagacttgctgcatttctctccaccactctgtcctcaccctagaccctttcaggaaaaagttacctgggcactttcagccttcccctgctcagtaggcctggtcagatttccagactcagttctcagagctttcttcccttatcatacagcactggagggcattctggaggccacctctctactaaaattaggggtaattaaggaaacagacataatccagtttcattcatttgaaa

SEQ ID NO: 6467 - DNA, 545 bp, Homo sapiens
ttgtagtgatgtaagtattctgcatctagactgtatcaatggcagtatcctgcttttttgtactgatgttttgcaagatgttgccagtggaggaaactgggcaaagggtactaaaagaactctgtattatttcttacaactacatgtgaatctatattatttcaaaataaaagtttgaaacaacaataaacacaatagacccttcacatcaaaatattaatagaacttttattgcttcttttcctaaattacttttactaartaatttctctgaactgagttggtcagtgaggacatctggtttcttccagacttgctgcatttctctccaccactctgtcctcaccctagaccctttcaggaaaaagttacctgggcactttcagccttcccctgctcagtaggcctggtcagatttccagactcagttctcagagctttcttcccttatcatacagcactggagggcattctggaggccacctctctactaaaattaggggtaattaaggaaacagacataatccagtttcattcatttgaaa

SEQ ID NO: 6468 - DNA, 545 bp, Homo sapiens
ttgtagtgatgtaagtattctgcatctagactgtatcaatggcagtatcctgcttttttgtactgatgttttgcaagatgttgccagtggaggaaactgggcaaagggtactaaaagaactctgtattatttcttacaactacatgtgaatctatattatttcaaaataaaagtttgaaacaacaataaacacaatagacccttcacatcaaaatattaatagaacttttattgcttcttttcctaaattacttttactaaataatttctctgaactgagttggtcagtgargacatctggtttcttccagacttgctgcatttctctccaccactctgtcctcaccctagaccctttcaggaaaaagttacctgggcactttcagccttcccctgctcagtaggcctggtcagatttccagactcagttctcagagctttcttcccttatcatacagcactggagggcattctggaggccacctctctactaaaattaggggtaattaaggaaacagacataatccagtttcattcatttgaaa

SEQ ID NO: 6469 - DNA, 826 bp, Homo sapiens
gcatacmcagagggccccccagggaaggggaagagttctactacaatcgtattgctgtaatgtgtaatttaagtaacaaaggtgctgtgtttcactgggggcactgttattgatttggaatatgtgctgacaactgtctggtgggagaaaccccagagtgtcattggggaagccatttaaggcccccaaacaaagggggggccataaggagtccagctaccagtatgacaggttccccgtatacgctgttccaggcatatcaggtaggatacaaaagcttttgactcattgcaagggtggatttcgccttttgttgaatttgggcaagaatagactgtttagtttggttaaaagaagttcaggttgtactacaggtgctattctcccaaccccattggtagcgacatagccacttggaaatattagcagagataatattctaaggtaatccattccctgcagcctctggcaactcgacacataccagcactgactgcggttgagctcttttgcagcagtggctaccaggtaataaattcattctaggcctcagacacaaagacacaagacacatcagtagataggtcattccctgtaatagcaaaagtggaggggaacatgatattgttttttcatatttaggaaattgtactatgccttcattttctgctcccatagctacaaggtcaccagcctgaggggtgggatctgatggacgctgtacctatattttggctccaggatttaagccactagtaccagtggatctgaataacctggttctgtatgtagcctctgttggggcagagatttcctacagggttaa

SEQ ID NO: 6470 - DNA, 665 bp, Homo sapiens
ctaaaagcgtgtactctataaggcaagtattagtatttcaattgcacagatgaagatgaagctgaagctgagaaagattgattcatgtgtcccaggtcacaataacagaggaggaaatgtaagatgtgacaggtttgacctggctcctattcctgcactcttgccactacccccatgttctatctgttcaccgatgttcaaacagccaccaaagtactamaaatgctaacattgcagaggaggcacatcacaggggctcccagggccactgcttgaggagggtgcaccctgcacaaaggtgctgggctgaagaggcaagcagggctgaaataagccttagcttggttgttttgtaatttgcacaaaggagccgtatgggctggtaatggcatggaaccaccggtggccacagcttaaggaattccatcagcctcttgatttctgttttctgtctatcctttgagcactatttgccaatttcctggaagtggctctgcctcaagaaagcttcctggctcttaaatgtagagtttacaatcctctgaggccagtgtgaaatgcccagttgtcctgactgttgtcaggaacatgaccagcattccctcagaagctcatcattctgaaaattagacacagaccacttattaatatgtatggcaaatctg

SEQ ID NO: 6471 - DNA, 813 bp, Homo sapiens
aaaaagaggaattattactgatattcaatgaaggctttttatgagctaggcactgttttaagtgctttaaaaagcattaatttgttgtctaaaagagttaactcactttatttaaatgtatacttgccacgagccaggtgctttgcctatgtgtctcatttctcatttaatcctcacttcaaccctgtgaaataactattataatcaccagtttagagataagaaaactgaggttcaaagaaagcaagttccctaggttatatggccagttagaggtggaaatgaagtgcaaatcagacggggctgattctaaaacccacattgtctctgctacaccatactgcatagaatccacactgccatgcaaaacaagccagccaatgcctgactctctgagagctttcacaatggcatctcaactgctcctggactgaaccattatttagacactgttgagcttttgctgctggcaaaggcagcagtagaaatttttgtgcagtgttagaatgttttaagtaacccagtagatgataaacgcccgctatgcttataaggttgccattggtggccaagttgattttgtctrtcttgcagagcagttgagctctactacacaaatactacatggggaaattcctattctgctggttctgaaacaacaaaatcctaaggtgtacagaaagagcacgtggagactggccacaagctgggattttgcgctgaggagccagtgggccaccaggttgtgaaaaactcaggctgtccagataaattaacacaccaaaaccacaaacagaaagcacatttcttagt

SEQ ID NO: 6472 - DNA, 638 bp, Homo sapiens
accttgtgaccaggactatatacataggcatccctttgtatccccaggcaattggtttctggaccactcctccttatccccctactttcctataccaaaatcctcagatgctcaagtccattatataaaatggcatagtgttttcatataacctatgcacattctcctatatactttaaatcatctctagattacatccagtaccctaacgcaatgtaaatgttatataaaccgttgttacactgtcttggttttttatttgttatttttattgttgtattatgtttttttttttkaatattttcaatactcaattggttgaatctgtggatttggaacctgcagatacggagggctgactatatatttggcattcaggtgacttttgttttgcagtatattcattcaataggggtagaagactgtaatattagttataggagaggcactaagctttagggtaaattttatattagaaatgtattttattgtctaatcattgaggatctgatctcatcaattcgctgactttcattatatccacctggaaagaatggccatgaatatggaaacttatgttgtccttggccacaaatgtttgaaactctccaatctggactagttgtcttttcttccta

SEQ ID NO: 6473 - DNA, 761 bp, Homo sapiens
aagaatattaacattttaagaccaactactttcttgacaggttgtaacaatttccacrgcagcctatgagtaactgcttcagggcactgaatgctatcagttttttactttccgctatttttttttttttttgagatggagtcttgctcagttgcccaggctggagtgcagtggcatgatctcggctcactgcaacccccacttcctgggttcaagcgattcttgaagcaattcttgtctcagcctccctaatagctgggattacaggtgcccgccaccaggcccagctaattttttgtgtttttagtggagacaggatttcaccatgttggccaggctggtcttgaactcctgacctcaagtgatccatctgcctcggtctcccaaagtgctgggattacaggcttgagccactgcatctggccatctctgctaatttgctgggtgaaaaataacattgtttagatttgcatttatttaattactaatggggttgaactttttttcttcttatttggtgcttatattctgggagttgtctattcctagccttttgatgcttatatactggaaagaagtttttttttttttttttttaatcaagctgtatgagctctttgtattaagggcatgattctttgttggatttttttttccttaggcaacttgccaattatcatttttaagaaagtttctcaaaatgcaggagctttaattttgatataattttatctctcttttccttagtaatttcttctaaa

SEQ ID NO: 6474 - DNA, 761 bp, Homo sapiens
aagaatattaacattttaagaccaactactttcttgacaggttgtaacaatttccacagcagcctatgagtaactgcttcagggcactgaatgctatcagttttttactttccgctatttttttttttttttgagatggagtcttgctcagttgcccaggctggagtgcagtggcatgatctcggctcactgcaacccccacttcctgggttcaagcgattcttgaagcrattcttgtctcagcctccctaatagctgggattacaggtgcccgccaccaggcccagctaattttttgtgtttttagtggagacaggatttcaccatgttggccaggctggtcttgaactcctgacctcaagtgatccatctgcctcggtctcccaaagtgctgggattacaggcttgagccactgcatctggccatctctgctaatttgctgggtgaaaaataacattgtttagatttgcatttatttaattactaatggggttgaactttttttcttcttatttggtgcttatattctgggagttgtctattcctagccttttgatgcttatatactggaaagaagtttttttttttttttttttaatcaagctgtatgagctctttgtattaagggcatgattctttgttggatttttttttccttaggcaacttgccaattatcatttttaagaaagtttctcaaaatgcaggagctttaattttgatataattttatctctcttttccttagtaatttcttctaaa

SEQ ID NO: 6475 - DNA, 761 bp, Homo sapiens
aagaatattaacattttaagaccaactactttcttgacaggttgtaacaatttccacagcagcctatgagtaactgcttcagggcactgaatgctatcagttttttactttccgctatttttttttttttttgagatggagtcttgctcagttgcccaggctggagtgcagtggcatgatctcggctcactgcaacccccacttcctgggttcaagcgattcttgaagcaattcttgtctcagcctccctaatagctgggattacaggtgcccgccaccaggcccagctaattttttgtgtttttagtggagacaggatttcaccatgttggccaggctggtcttgaactcctgacctcaagtgatccatctgcctcggyctcccaaagtgctgggattacaggcttgagccactgcatctggccatctctgctaatttgctgggtgaaaaataacattgtttagatttgcatttatttaattactaatggggttgaactttttttcttcttatttggtgcttatattctgggagttgtctattcctagccttttgatgcttatatactggaaagaagtttttttttttttttttttaatcaagctgtatgagctctttgtattaagggcatgattctttgttggatttttttttccttaggcaacttgccaattatcatttttaagaaagtttctcaaaatgcaggagctttaattttgatataattttatctctcttttccttagtaatttcttctaaa

SEQ ID NO: 6476 - DNA, 629 bp, Homo sapiens
ccacttcagctctcgggtatctggaccacagcacatgccaccacacctggctaattttttgtatttttggtagaaacagagtttcaccatgttgcccaggctggtcttgaattactgagctcaagtgatcttcccgcctcggcctcccaaagttctgggattacaggcatgagccactgcgcccagccaaaaattaagtcttaatcatcccctttgggtatatagtagatggtctctttatttgtttttgatttaaaatgttttacagttktctttacacgggtgcctcagtttttgtcaatactggatgcagagagaaggacaagaaaggttggatgttgattgtaaatcactgtaattgagcaaaatgttcaagaacaataattaacagttacagaggacatcattgcctgaaactcatacatttaaaaactacaaaataatgcaaaatacatttctttctactggactgaagcacatcttatggtcttacatgtcttttttgaactgttgttattagaatctgactgccacctaatgtcacaatagcacatgagaaattggggcccaaaggggttcattgtgtggctcaaagtcttcatagctagtgaagggcaaagccagaattt

SEQ ID NO: 6477 - DNA, 629 bp, Homo sapiens
ccacttcagctctcgggtatctggaccacagcacatgccaccacacctggctaattttttgtatttttggtagaaacagagtttcaccatgttgcccaggctggtcttgaattactgagctcaagtgatcttcccgcctcggcctcccaaagttctgggattacaggcatgagccactgcgcccagccaaaaattaagtcttaatcatcccctttgggtatatagtagatggtctctttatttgtttttgatttaaaatgttttacagttgtctttacacgggtgcctcagtttttgtcaatactggatgcagagaraaggacaagaaaggttggatgttgattgtaaatcactgtaattgagcaaaatgttcaagaacaataattaacagttacagaggacatcattgcctgaaactcatacatttaaaaactacaaaataatgcaaaatacatttctttctactggactgaagcacatcttatggtcttacatgtcttttttgaactgttgttattagaatctgactgccacctaatgtcacaatagcacatgagaaattggggcccaaaggggttcattgtgtggctcaaagtcttcatagctagtgaagggcaaagccagaattt

SEQ ID NO: 6478 - DNA, 629 bp, Homo sapiens
ccacttcagctctcgggtatctggaccacagcacatgccaccacacctggctaattttttgtatttttggtagaaacagagtttcaccatgttgcccaggctggtcttgaattactgagctcaagtgatcttcccgcctcggcctcccaaagttctgggattacaggcatgagccactgcgcccagccaaaaattaagtcttaatcatcccctttgggtatatagtagatggtctctttatttgtttttgatttaaaatgttttacagttgtctttacacgggtgcctcagtttttgtcaatactggatgcagagagaaggacaagaaaggttggatgttgattgtaaatcactgtaattgagcaaaatgttcaasaacaataattaacagttacagaggacatcattgcctgaaactcatacatttaaaaactacaaaataatgcaaaatacatttctttctactggactgaagcacatcttatggtcttacatgtcttttttgaactgttgttattagaatctgactgccacctaatgtcacaatagcacatgagaaattggggcccaaaggggttcattgtgtggctcaaagtcttcatagctagtgaagggcaaagccagaattt

SEQ ID NO: 6479 - DNA, 615 bp, Homo sapiens
gtgttgggattacaggygtgagccactgcatctggcctaacttgtaattttgattataattattttaaactcataaattaatctgggaaagtagttatctttataatatgcagtttcctcaactagaaatattccccattcttttaattcattttttgttttattctgttgtatgcatattatgtttcagttttgaaacatttgttaattatgcgttcttagtagtatataattcttgcatacggcaatttggactgattttaaataatattggaaggtcacatacaataataagcaaattaataatagcataaaggaatccacctctcattttgagaaagattgcttgtattgtagaaaatagctgttagcatataatgtaaaataagattctagtattctgttaagcactttaagtttttcagttgcatatactacccctattttattaaactatatttaatttttttatttgggaatgcttttcttttctatacctaaaagctctgcaatttgttggtctgtaggttatcatgcaagaagttctcaagcctttttgatttttgtgcaataaagtacagctttgcataagagtgaaattgggctagcttaaat

SEQ ID NO: 6480 - DNA, 615 bp, Homo sapiens
gtgttgggattacaggcgtgagccactgcatctggcctaacttgtaattttgattataattattttaaactcataaattaatctgggaaagtagttatctttataatatgcagtttcctcaactagaaatattccccattcttttaattcattttttgttttattctgttgtatgcatattatgtttcagttttgaaacatttgttaattatgcgttcttagtagtatataattcttgcatacggcaatttggactgattttaaataatattggaaggtcacatacaataataagcaaattaataatagcataaaggaatccacctctcattttgagaaagattgcttgtattgtagaaaatagctgttagcatataatgtaaaataagattctagtattctgttaagcactttaagtttttcagttgcatatactacccctattttattaaactatatttaatttttttatttgggaatgcttttcttttctatacctaaaagctctgcaatttgttggtctrtaggttatcatgcaagaagttctcaagcctttttgatttttgtgcaataaagtacagctttgcataagagtgaaattgggctagcttaaat

SEQ ID NO: 6481 - DNA, 778 bp, Homo sapiens
caagttcctaacataaaatagtgtattacagtatagttgttggtattacaggcatttacaaactgctatgtatctaaatgtttatgtctattatagaaaaagctaataacgtagtaaatcaacctacagactatcgtaatttttaattttctttcactaaagaaaattatatatttatatagctataaactaatacactaatatatatttatatggctataagccaatatacttctaattaatgttctgataagaatctgtctcatataaagtattttattaagtgttttttaaaaataactaacaattacgaggttcagaaaaaaactggaccagttacctaaattacatcatgttcctcccttcatagatttacaattgtaaatagttagacccaaattttatcagcaaatttcttaaatgtgttatttttcatgattagacagcttactaaggaaacatttaaataatgacacagcacagaaacctaatatacctsatttgaatactatctgaacactaacaatccaaatatcagattacattgcagtcagaaaaattaaaagaatatttaggaaaaataggccaggcaaggtggctcatgcctgtaatcccagcactttgggaggccaaggcaggtggattaccttgagtccaggaattcaagaccagcctgggcaacatggtaaaaacccagctctactaaaaatacaaaaaatcagctgtgtgtggtggcacaagcctgtagccccaactactcgtcagggctgaggtggga

SEQ ID NO: 6482 - DNA, 839 bp, Homo sapiens
cttgtcctaggtactacaaaggaacccatttgcctagggaggaataaattgaacagtaattatcaatgatttgccatagctcatgaaagatatattggtaactcttactggacatataaaaaaacaagattagcaatgagagattttcaacacagagaggactttctttacaagatggacattacaagtgaagtatttaacctatacataaacagtaaaatatccttataagcaagtaatacttagtgcctaagaaaatgtctactaagcatctccaatgcatttcctttatgaaatttggtacatatgacctttaaagaatagaatttttgtgcaaatcaatayatgctaagatctccaatgttaaacatctaccattaaataattttgccactaaaataccaatagtgtttgagaaaaagtccaaatttaagcaacacattcaaggtaaaaaataatagccaatattacaaagaatgtttagtaagctcttaatataaataatccattcaagtggtttttattctaaatagactctctttaagcatttggtagaaaattagtggaaaggcataaaaatatttggttatataatattaaataagattataaatacatagtctgaaatctcccagacacctgtaagagttgattcctcatttgcctatcattaaaagagataatatacatgtcttcctcatttttgtacttcaggcaaggtactatctaaattgatgggtcaagtgttacaaaacagagaaaagactgaaagatactgcacccagatttatgcagaccttgctgatatgcaaattaatctcttgtaggtaaaccaaata

SEQ ID NO: 6483 - DNA, 703 bp, Homo sapiens
atattcacaattccaaacattaaaaagagtcagtaaaacacatttatgaattttttttctgatcacaagatgaatatgcatgcccttcttgaaaaattctacattaaaaattatggcaggaacaataaaatcttccaaaatcctccttgagataacctctacttcatttaaagatgtaaggtattatggctaaaaaataaataggcaaatacttgattaaatttggttctaaattgcaattctcaaattttagagaagtctayatagaaaatatttgtttaggtcatcagttaagatagaggtacatattatttgttccaggaatctttatttgattctttattcaacaaattccatttgaaatatactaaaattcaagtactttcctaggtgataggaatgaactaaacacatgcaaatttctgccttcacagaaaaattacattttattaaaggggatgaaaccaaataataattatctttaaaagacaatattttacaagaaactgaatgtattgatgaaaaataaagcagagaagggagaaagagcctgccaaggagtaaacaaatgctgcaacttgaagtagggtggttagggatggcctcactgataggatgacggttgagcaaaaagctgaagatgaagaaatgaggtatgtctgtctaggaagcagatttcagatatatctcacatgctgtcatg

SEQ ID NO: 6484 - DNA, 703 bp, Homo sapiens
atattcacaattccaaacattaaaaagagtcagtaaaacacatttatgaattttttttctgatcacaagatgaatatgcatgcccttcttgaaaaattctacattaaaaattatggcaggaacaataaaatcttccaaaatcctccttgagataacctctacttcatttaaagatgtaaggtattatggctaaaaaataaataggcaaatacttgattaaatttggttctaaattgcaattctcaaattttagagaagtctacatagaaaatatttgtttaggtcatcagttaagatagaggtacatattatttgttccaggaatctttatttgattctttattcaacaaattccatttgaaatatactaaaattcaagtactttcctaggtgataggaatgaactaaacacatgcaaatttctgccttcacagaaaaattacattttattaaaggggatgaaaccaaataataattatctttaaaagacaatattttacaagaaactgaatgtattgatgaaaaataaagcagagaarggagaaagagcctgccaaggagtaaacaaatgctgcaacttgaagtagggtggttagggatggcctcactgataggatgacggttgagcaaaaagctgaagatgaagaaatgaggtatgtctgtctaggaagcagatttcagatatatctcacatgctgtcatg

SEQ ID NO: 6485 - DNA, 750 bp, Homo sapiens
aaatggtgccattgcactccagcctgagcgacagagtgagactcggtctcaaaaaaaaataaaaattaaaaaaaaatcatacgatgtgtgcagttttgtagctgtatttttcacttaacgctatactaacatgtaaccatgtccctaaagagtctttgaattcctgatttttaaataccgcatggggtttccttgtgtgtttataccatactttaaatattctcccattgctggttattgtctccaaatttctgttactattaacaacacaataactaaaaggcttggacatgaatatttacaggcattaatgattatttccacaaatttgattcacacaaaattgcttaatcaaaggtttgtctttttaatactattttacatagaactagttcctcagggaagttatttttctgctttttgggttttttgctgtgttttttttttttaatttatctaaatgcttttactttattttacccagccgaatcaaggctttgttatgcttacatttagtacatatttttttctcacaacgttttcttagtttgccattctgttgggttggcgcaaaagtaattaccgtttctgccatttcaaaataacagcatttaaaaataatggccaaaaaatgcaattacttttgggcyaacctaatgcattcacagtgaaattattggattaatgtctctcttcccccactggaatataagctcctaaagggtcggcactggacccatttatttctat

SEQ ID NO: 6486 - DNA, 823 bp, Homo sapiens
cgaatgaacccaaaaacatcatgattaagcccagggcgtaccataagtggtttgcggttgttaccactgatttttcacagtgtcttcccactgtgcaagtctctgtcaggaaaatagagtggtttggctggagatgactgaggtttgctatgagtggggtggagctgtcagatttatatggctttttctcttaaaaatacatggcctttctttttcattcacagtaaccgtaaagcccatttggggctgctgcttcccaatcacttggctccccatgttctaatgaatgcacagcacttccctcggaaaggctgcccttccggctgacacataataggataggaaactcagagggatttggtcccgaaattcattctgggtgtccaggtttccgtagttccttcctttcatttaccagtcaaaggttattataactaattgggtgtctgttctcctccggctctcctggtttgatctgcacacaccatgcttcactgatggaatcaccatgtggcctgggaaatgagtgttgatcaaagcatcatccatcctctttgctctcctgctttttttttgtaattccagctctgcctccggaaatgccctctaaaactcacatcatatgcttttttgagaaaatgacatgactcagagaatgtaagtatctagaattataaagctcagctttcaaaacttaagtgtatttgaatctaagccagtcaaatgaactaaaagctggctgggagaaggcaaacacaggagagtgatgagtggctctggctgagcaggragtgcctgctgggaggctgtcagggatgaggat

SEQ ID NO: 6487 - DNA, 813 bp, Homo sapiens
atgtcattgatggcaagaggcattccttttccagagatgtgaaaaatgtgaaaaaagtcatcatagaattgatgaaatgttgtcgaagaattttgataggttgaaataagacaaaaagcccaccaagtagaggtccttctgttttttatatactgtaggtccatacattcttagatcattcacttctgtgacttcagtcactccctctaggatcataactcagaagccttagtcttctctcctaaaatgcagacccttatatcccgcttttttcattcatttctctgccacttatgtagtacctatatgtgccaggcacagttctaagtgcgttaatattaagtgtcataaaaccctatgaataggtattataattactaagatgatgatgatgatgatgatgatgatctccattacacagagaggctaagtaacttatccaaggtcacacatctagtaagtggcagcaccatttactagctacctattttcccttaaatatcctgcattatctaaatatcagcatrtcccaaaactaaattcattgttcccctataaacatgcttctccttagcttttagagcatcatcatcctgttagtcactcaagtcaggtccctctcctcatccaccacatccaacttatcactatgtctgtcagtttctttgtttttctttccctgctgtctttgccctagttaggtgtttgccaagtttgcctggttattaaaacctaccagaaaaaatgtattaatgataaagattcctaggctgttcccctggggttactgattcagtgattttggctagggta

SEQ ID NO: 6488 - DNA, 627 bp, Homo sapiens
tcgaagaaataattgaaacaataatgactgagaatttagtagtagatggaccccaacaattctaataacaaaagacagtcgtaagtactataacagggctacaggagccttgaagaaaaaagctttatttcctgaatggtttcaaagggaagcagtgcagttttattttaaaagattttattaatttaggttcagctgggaggtccatctgaagatagtggtatggaaataacatattgaaatgaatcagaaaacttcagagctgaagggaaactcagattgtccaattcaacctctacattagagacagacccagagcrcccagtgccctacaatgagtgagttggtgtcagaatgtggaatcagatccagaactcctggtcttccagtaggtgagccttctatcccaaggccttcctgccttcctgctgtcacttcattatggtgccctggggtaaggagccttctcaggaacatgtattatttgggtaactaatattacaaatatctgccaatgacgtcttgttgcacagtctttccaagtcttccctttagctcctcccttccagccagtagtaatatctcctacctcagacatctaaaaaatctattgtctactgatcattt

SEQ ID NO: 6489 - DNA, 761 bp, Homo sapiens
tagcagtgctgccattaataaatgggagcacctggggatctctattcttttactacctcgatgaacatttacactgtcatgaaaaaaatgacatggctgcaaatctctacaaaaacaatggtctgtggacagcatcttcagcagccaagcatggtcacaggactctgcaggggtgcacatctcctggtaatcggaagccagcaatctgcagatgcagtgatgggggtggctgggtattctgatgattcagcttcaggccctttgtgtgttttagctgacctgctagaaatcagtaccctggggacagcgaagggcaggggacagagtcagggggcaatggtttggagtttgaaaaaaataaaagtctagataaggtggcttggaattcttctggcattcccagattcaaattcctcaaagccatctayttcatagcgttttacaaccaccactgctggctcctccccagaccttgccactgtggtcactgcagatggtcatgcttatttctgttttacacagtcatcagccctggattcccccagaggttactagcctggaaaaatggctttcaaatctaatgagatgggtgttctcctcaagacagagtaagttaatgaccacagcaactttgctgaattccatttcacctgactgcaggacttggcatttgaaaccgagattagctagaggggcacactgtctctttgacctctatttccccctgccccctgccgagtcactggggagccatatggaca

SEQ ID NO: 6490 - DNA, 761 bp, Homo sapiens
tagcagtgctgccattaataaatgggagcacctggggatctctattcttttactacctcgatgaacatttacactgtcatgaaaaaaatgacatggctgcaaatctctacaaaaacaatggtctgtggacagcatcttcagcagccaagcatggtcacaggactctgcaggggtgcacatctcctggtaatcggaagccagcaatctgcagatgcagtgatgggggtggctgggtattctgatgattcagcttcaggccctttgtgtgttttagctgacctgctagaaatcagtaccctggggacagcgaagggcaggggacagagtcagggggcaatggtttggagtttgaaaaaaataaaagtctagataaggtggcttggaattcttctggcattcccagattcaaattcctcaaagccatctacttcatagcgttttacaaccaccactgctggctcctccccagaccttgccactgtggtcactgcagatggtcatgcttatttctgttttacacagtcatcagccctggattyccccagaggttactagcctggaaaaatggctttcaaatctaatgagatgggtgttctcctcaagacagagtaagttaatgaccacagcaactttgctgaattccatttcacctgactgcaggacttggcatttgaaaccgagattagctagaggggcacactgtctctttgacctctatttccccctgccccctgccgagtcactggggagccatatggaca

SEQ ID NO: 6491 - DNA, 636 bp, Homo sapiens
ggaaagaaagaagagaagagaaggaaggaaggaaagaaggaaggaaggaagtttgggaaagcagtatcacaccttcagataaaatcagtacttccggctttcctcttgcctgtgtacaatggaatacaacatgtgtgtttaataaaaataaataaacagataaatttagggactaaatactattttagtcacgttaacttcagtgttcgactaggtatagatgatctagatgactaggaaaaatcaatcaattaggaattcacactcaatcaacacaacctcaatgatgagaatgacactctaaaggacagaacttaaactaacttcaagggaccaacacctttgaacaaaaagccacgttatgaaccaaaaaaaaaaaaaaacccaaaagtaaaacgtttgataacagaatgtggtgctgggacatgaggcagacagtagkaatttacagtgtcatttatcggttgccatttacatgtcggttgagtttctagtattttaatcaaatgttgtttcaagtcatcagcacattagtcaatcaagttttagagtccttcattcccagactctgcaacactgtgatcagtctctccccatttctgggccaggcaaactctttgttgatttcattggggt

SEQ ID NO: 6492 - DNA, 659 bp, Homo sapiens
atccagggagrcagttgcctgttctttttctcagacatttgccaatccttcagaaagggtccaccacaccctgtcctgtgttatagtgggagacattattttggccatatttatttttctttgctcaagtcctactatggtatctgtgctactattttctctttctcagagaaagagaacacaggattttctcatatttacatttatttatttttctgaactttttgttgtatttggggtatagacatttgaatatggccaggatagacgtgccataaaactaggaagcttgagtttcaaggcccctcacttgtgcagcctccatacaaagttctagacttgattttgacttttatatttttaaaaaagaaggttccaaacatatgtataaactcttggcttcacaaaccctgaatctgctcttaggatggctcacctaaagtcctggcgtttgtgacgttgcagtaacttaataatatctgaatgattggcttcatgttgttaatagtaagacaatacaccttttaaagcctagcccctgtaattatcagatagattaatcctctgctttttctgcctttaactcttctccctaccccttaatttatttgtttctctactacccctgtaatttctttcccctgaatgcctagttcttg

SEQ ID NO: 6493 - DNA, 659 bp, Homo sapiens
atccagggagacagttgcctgttctttttctcagacatttgccaatccttcagaaagggtccaccacaccctgycctgtgttatagtgggagacattattttggccatatttatttttctttgctcaagtcctactatggtatctgtgctactattttctctttctcagagaaagagaacacaggattttctcatatttacatttatttatttttctgaactttttgttgtatttggggtatagacatttgaatatggccaggatagacgtgccataaaactaggaagcttgagtttcaaggcccctcacttgtgcagcctccatacaaagttctagacttgattttgacttttatatttttaaaaaagaaggttccaaacatatgtataaactcttggcttcacaaaccctgaatctgctcttaggatggctcacctaaagtcctggcgtttgtgacgttgcagtaacttaataatatctgaatgattggcttcatgttgttaatagtaagacaatacaccttttaaagcctagcccctgtaattatcagatagattaatcctctgctttttctgcctttaactcttctccctaccccttaatttatttgtttctctactacccctgtaatttctttcccctgaatgcctagttcttg

SEQ ID NO: 6494 - DNA, 736 bp, Homo sapiens
agcaaactatcacaaggacagaaaaccaaacaccacatgttctcactcattggtggaaattgaacaatgagaacacttggacacagggtggggaacatcacactccggggcctgtcatggggttgggggagggaggagggatagcattaggagaaacacctaatgtaaatgacgagttaatgggtgcagcacactaacatggctcatgtatacatatgtaacaaacctgcacgttgtgcacatgtaccctagaacttaataaataaattaattaaataaaatataaacatatgcaattttatatgtaacacaatatacatgcacacaatgcaaagaagacaagaatacattaaatttttttttttccagcaattggatttcttttttattttattttattttattttattttatttttttattgatcattcttgggtgtttctcgcagagggggatttggcagggtcataggacaatagtggagggaaggtcagcagataaacaagtgaacaaaggtctctggttttcctaggcagaggaccctgsggccttccgcagtgtttgtgtccctgggtacttaagattagggagtggtgatgactcttaacgagcatgctgccttcaagcatctgtttaacaaagcacatcttgcaccgcccttaatccatttaaccctgagtggacgcagcacatgtttcagagagcacagggttggggataaggtcacagatcaaca

SEQ ID NO: 6495 - DNA, 802 bp, Homo sapiens
acaatcctgcacttcatacctcccatgcacatactctaaaatggatcatttacttgtgtcacactctgtacatccttctatttccaatgtttttctgtttatttatctagctcttctactactagactgagcgccacaagggcaggaatgctctccaattcatcttggaattttttaggttcctggccattaagctataaataattatgcctggtggaaataaataatcaaatacatttaatgaatggctgtggaagcaaagagattcatacatttttatagctgggaacttagaattcacctaatcctgtgaggtaaaatatgtttcgcaggaatagcaaaattatagattctacgagaataaattttttaatttcatcagaactcatcacatgatagcattctgtattwtatacttgcataagtatagtaatgtatcacaaagtttaagaatctttattctttaaatttgtctatcttctttttctaagttaaagaccttctttctattctctttaagcattttattcatatgtcagagtgcttctcagatctacacactatttgtgattacataatattttattatcgccaagaacccaaacattagttcaaatagtaaataaattcagataccttaaagagccaagctaaatataactgaaaaatgactctccacccattttatacaaacacacacacgtacatacacacacgttcatatccatgatctttagtaatcccacaatttcaacatctttgtgtaggaagggagttgctgtcacatgaaaaggttacagat

SEQ ID NO: 6496 - DNA, 827 bp, Homo sapiens
gctttaaagaaaagaaaaatcttcaaaggctccaccaaaggaaagaacggggcacctcacattcggcctaagacaggagtgaaaagacaggagatttgacattcgcatggctgttctctatcccacccacttacaactttatacttatcctcccgaagtctcaatccagcttcaattttatctgaaaagggtcatttgggatacaaaaagctgctcctccaatgccaccaaacaactgctggtgccctctattaaccatctgagaaagcctaaacatctctccagcacaagtagaccaggaattcccagcccccatcccatataaaatccaaatgatgacagtaattgaatgacacagtgtattcaataaccccaccgtaccttccttctcacttccaggggtgatcacattgacatctcacctcatccgtgggctgcccacagcctggctatgtccaggacttctggtctctctctctctctctctctaaaagatagggtctcgttatgttgcccaggatagacgtgaactcctgggctcaagcgaccctctcctctcagcctcccaaggagttgtgactacagtctcacaccaccatgcccagctaagctcactgcacatgtcaatgtcttatctcccggcccttcccttcttccgtttgtcctcccctcccctgttctcactattcacctttccttcarttgcccacctacttccatgttcggaggccagtgctctttggatctgacatgttgtgtgtgggtcccaatggttcatagaaggccagagggtcagacacttctgctcagtaaggggaaggatgaga

SEQ ID NO: 6497 - DNA, 841 bp, Homo sapiens
tttctctggtttttaccattccagaatttccacacttcttcaatatttgccattgtctggctttacttttcagttctccagaccagaaacactgcacattttcccatgagagcccctctcaacactctatgcagcatgtggaatgcacttggcctcaggctaaaagccagaaaagatgggaactaatttgtggaacatacccttttcctgactccatgagagtgtatacttcctatcagatatgatgtgttctgttcattctccagtaccttcagatagttgctttttaaatgtctctcaaagttctaagttgctttctgcagaggagtccatstagtagactaaatttgtcctacttggaggtggaaagttccaatgtaatctgaaccttggctgttaaggacacagtggtcactattggtttcatttttatttccctctcagagaaaggcaatattctcaggatcataggctcccggcacatcctgcagttccactatacagagaggccatgggtaccatatgctgccagtggtatccctcttgagatttaggcataaactctacaattacaaaaattctgggcgttattttcttcacctacttagtagtagaattgtagttcacattattttcattttttcatttaacaaatattgagattctactaagtgtctggcatgatgctatattttgggttataacagtaaacaatgcatacatggcatatttacaacaacatatacctgataggacagtttatgttctgttgagaaagacattatcattaataaaataaagtgtgatgtaagatattatagggagagttcagggtggtaca

SEQ ID NO: 6498 - DNA, 1156 bp, Homo sapiens
cttgacccagacctttgggcctgtgtcatccagcctaggaagggaggttatatcctgtattaacttgacatgtctgataacatccactatactggaaggattaaacgctccctgcctccaggggaaccctagcatcctggtattccttggtcttgttctccacctctgtggaatcccatagaggagaagaacccaggagaagtatcaccttgaagttagggagccttgtctggggtactagggtggcctaaactgcaaaccaccctccaggacatgcactgtaaaggggaagaacaaaaatcatagtttggaacactggaattgggattttgcaggcacagcctaatcaggcagctacttagtccacctccacctccaccaagctctgcatctctgtcaacctccaggcagctacttagtccacctccacctccaccaagctctgtcaacttgagctgcagtaccatgtttcccttggattagagtgcagtgtttagtgaccacattgctctagtcagaaggggttgtcactccattagcaggccatcttgatgtcatttcttcagttgttttgtgagttggctccaccaccattcaacagctccattggcctgaggatgacaaagtgtatggaaagtccattgtattttaggagaatgcacacattgttgtgttatttgggtagtaaccattccttggtcagagtgaagttccgtggggtaatcaaaaacatgacatgtgttccttttaagagaagctatgttagtcccatcctccacatgagtgacatatatactttcccattccagacagcaagttattgtaatagtacttgtcctttaataatccatccacttagttgcctttcttctgacgagatgtctaggttgttggcaacagctgatgagtcmgtgaaaatgtagcaagatagggtggtagaggaagtctatgtggctatcaccactgcatgtagtttggcccattgttcaaaatgcccatgtccagtctcagccatgagatacctatccactggctagatggctaccacagcccagggaaccctgcctgcttgccatttggaagagccatcagtaaacaagccatgtcatactgtcagtaggcacgtctcagtcttgggccccaggtatccatagga

SEQ ID NO: 6499 - DNA, 1282 bp, Homo sapiens
cttgaggtcaggagtttgagaccagcctggccaacatggtaaaaccccgtctctactaaaaatacaaaaattagccaggcatggtggcacatgcctgtaatcccagctactcaggaggccgaggcaggagaatcacttgaacccaggaggcggaggttgcagtgagccaagattgcaccactgcactccagcctggtcaacagagcaagactctgtatcaaaaaaaaaaaaraaagaaagaaatccttcacatacactactcttcaatccatttatgtggcctgatttttcctggacgcaacacaagaacctgagtgtcaagagggcaggggcttggatgctgctgcggaggctgcacagagccgggtcccatcagagaggagcaatgtgctggttctagtgctcattctctctggttcccacacttgcttcctcgcacattccctcttccaaggagtggccagtggtgggctgagagaaaggaacactccagttcccattcacgaccggagtcgaggtcaagggaatgatcccgtctcaatactatctagaaatgttttcatactgaaggccacataaggataggacaaaagcaggaaaaccttaatctctgacagcttagcaattttaaacatcttaaactggccctgattatgacttttacttactttacgtgattgttataagacatatatacatacatatatatgagaaatgttaaatgattcatcagtgttcttttagtcacaatgttaaagtagttaaaatttagcttttaaaagagaaaagataaatgtcatttttatatattaatacatatatataaaattcctggaactggtgagattgcaaacccctgtgcatgcttgcacccttgtatgcttgcatgtgctaaaatacactgattaagaatgtagcctctggacttagaagacagtttcaatttggttctgtcacataatattatagttgtatgaccttggaaaactttcttcacattttagagtttcagttttctcatctgcaaaatagagataatgttagtacttctcatgaaattagtgtgaaagattaactgaaataattcatgtaaagcatttaaaacattgcctggcccatagcaagttttccaaactagtagttttaaaaaaaataacaagcaattgttactgtggcaaatgcacatggatttgcagcaacctcaattcttgcttctgcagaagaaagaattcaactgaggggcctaaggcacaaggagagaccaagacaagttttagagcag

SEQ ID NO: 6500 - DNA, 795 bp, Homo sapiens
tgtggggtggtgggaggggggagggatagcatcgggagatatacctaatgctagatgacgagttagtgggtgcagcgcaccagcatggcacatgtatacatatgtaactaacctgcacaatgtgcacatgtaccctaaaacttaaagtataataataaaaaaaagaatataaatttttatgattttaagatagtgctatataaattatctgtaaaatatactacaaacatagtggctttaaaaaaaaaaagacacatctttattctctcacctatttctattgaacaaacatctcagcatgatttatctcattcttccactcagggtctaagaagrgtgccttctggaatcagccaggccacatttttatctggaggcttacctggagaagaatccacttgcaagcttggtcaggttgttggcaaaatttatttccttacctcggtagtaggactgagagctctagatttttcctgactgtcacctggaagctacactcagctcctggaggctatgcacagttcctccacgtgtgttcctctccacgagcagtgagcaatgtggtggcttgcttcttcagagccagctggagagcacaatggtgaatctgctagaaagatagtatatcatataaagtcctataatgatgggagtgacatctcagcactttaccatattttagtggttagaagcaaattctatctttcccacactaaagcgaagggattataaaaatgcataagcaccaatgggttggaaaaatgagagcatctcagattttgtttgccacaggat

SEQ ID NO: 6501 - DNA, 636 bp, Homo sapiens
ctgtgtatctattagatactttgcattacaagtacggaaatttcttctctagggactctggtaattacgggcttaatattttaggggtccctcaagtatgacagtatatcctcgtggcattcatcatacaggaagccttttttgacttccaactctgttgggtgcctcaacactaagtaaygtatttggacagtgagccctctatgaccattctttcctagggccgacacattatgcaatattagtggctactctgtttagtttcttaatatataaatatttcagtttctcaccttaaccaaccatatgagtggaggttatgcgataattcactttcctttctttcagccaaatgacaagtttgttttgacaaccaccatctcattgttgagaccctgctcagtatgagcctttctggctccaccagcttctagcttggcaccaaccaagaccttgtcagccttcagtctacatggcatgggtacagaaatcctatcacctaagatttccctaaggagccgggctttcaaggtgaagcaagattatgtacctttttagagagagtggcaggttgttttgcaaaacagcttggtttctaatttaagtcttagtagaggctttggccttaggaatttt

SEQ ID NO: 6502 - DNA, 636 bp, Homo sapiens
ctgtgtatctattagatactttgcattacaagtacggaaatttcttctctagggactctggtaattacgggcttaatattttaggggtccctcaagtatgacagtatatcctcgtggcattcatcatacaggaagccttttttgacttccaactctgttgggtgcctcaacactaagtaacgtatttggacagtgagccctctatgaccattctttcctagggccgacacattatgcaatattagtggctactctgtttagtttcttaatatataaatatttcagtttctcaccttaaccaaccatatgagtggaggttatgcgataattcactttcctttctttcagccaaatgacaagtttgttttgacaaccaccayctcattgttgagaccctgctcagtatgagcctttctggctccaccagcttctagcttggcaccaaccaagaccttgtcagccttcagtctacatggcatgggtacagaaatcctatcacctaagatttccctaaggagccgggctttcaaggtgaagcaagattatgtacctttttagagagagtggcaggttgttttgcaaaacagcttggtttctaatttaagtcttagtagaggctttggccttaggaatttt

SEQ ID NO: 6503 - DNA, 782 bp, Homo sapiens
aggcagaaccagaggctggggtactgacaactgacttgtctgtttttttctctatttttccatgattatatctactgtctcgtctttgtttacaagcaaaacctgggaaacttacaaaaacaagtgctttgttgtttatctagaaataatatggaaaattttattattatttttggtgaagaaaatcaatttgcataggttatttcaatctaaattaaatgtgaattttattttttaaaaagtcaactctttaggcaggcarcaataaacatttagagatggcatttgagttgacacttgtgcactatattaacataatatttggacaaaaagaaacgtaaggaaacattatttataatatgtgcttattattttacagtggtctgtgggggaaacaggaatccaccaaacacaaatttgaaatgactgtatgacaggagaacaaagatagcagtacttaccaagacatgcaaatgtatttttatcagatcttccgtagcctcagggttcactttgctgtatatgataaatcaaagattctcagatctgaaggccacctcctctgccctcaacctggtacataagtctcctctcgctcactcttagaagtgaatattcaggttctgcactgggatctgcacaaccttgggaagttgcagcttcctaaagcagcccactttcatttggggacaacttaaattatgatttaaaactaaaacaaaaacagctgggcacagtggctcacagctttaatttcagtactttgagaggttgaggcagga

SEQ ID NO: 6504 - DNA, 553 bp, Homo sapiens
  misc_feature (1)...(553): n = A,T,C or G
attcnnnnnnnnnnnnnnnnnnnnnnnnnnnnnnnnnnnnnnnnnnnnnnnnnnnnnnnnnnnnnnnnnnnnnnnnnnnnnnnnnnnnnnnnnnnnnnnnnnnnatagctcttcccttagatattaccagttacttttaaatgacattttgctttctgactcaaattattatttcctcttcttttttttttttttgagacggagttttgctctgtcgcccaggctggagtgcagtggcgcgatctcgactcactgcaagctccgcctcccgggttcatgccattctcctgcctcagcctcccgtgtagctgggactacaggcgygcgccaccatgcccggctaatttttgtatttttagtagagacggggtttcaccgtgttagccaggatggtctcgatctcctgacctcatgatctgcccgtctcggcctcccaaagtgctgagattacaggcgtcagccaccgcgcccggcctatttcctcttctttttaaccacccttccactgaacacaaattaaatgaaaaatatctagtggactaaatatatagct

SEQ ID NO: 6505 - DNA, 553 bp, Homo sapiens
  misc_feature (1)...(553): n = A,T,C or G
attcnnnnnnnnnnnnnnnnnnnnnnnnnnnnnnnnnnnnnnnnnnnnnnnnnnnnnnnnnnnnnnnnnnnnnnnnnnnnnnnnnnnnnnnnnnnnnnnnnnnnatagctcttcccttagatattaccagttacttttaaatgacattttgctttctgactcaaattattatttcctcttcttttttttttttttgagacggagttttgctctgtcgcccaggctggagtgcagtggcgcgatctcgactcactgcaagctccgcctcccgggttcatgccattctcctgcctcagcctcccgtgtagctgggactacaggcgcgcgccaccatgcccggctaatttttgtatttttagtagagacggggtttcaccgtgttagccaggatggtctcgatctcctgacctcatgatcygcccgtctcggcctcccaaagtgctgagattacaggcgtcagccaccgcgcccggcctatttcctcttctttttaaccacccttccactgaacacaaattaaatgaaaaatatctagtggactaaatatatagct

SEQ ID NO: 6506 - DNA, 553 bp, Homo sapiens
  misc_feature (1)...(553): n = A,T,C or G
attcnnnnnnnnnnnnnnnnnnnnnnnnnnnnnnnnnnnnnnnnnnnnnnnnnnnnnnnnnnnnnnnnnnnnnnnnnnnnnnnnnnnnnnnnnnnnnnnnnnnnatagctcttcccttagatattaccagttacttttaaatgacattttgctttctgactcaaattattatttcctcttcttttttttttttttgagacggagttttgctctgtcgcccaggctggagtgcagtggcgcgatctcgactcactgcaagctccgcctcccgggttcatgccattctcctgcctcagcctcccgtgtagctgggactacaggcgcgcgccaccatgcccggctaatttttgtatttttagtagagacggggtttcaccgtgttagccaggatggtctcgatctcctgacctcatgatctgcccgtctcggcctcccaaagtgctgagattacaggcgtcagccaccgcgcccggcctatttcctcttctttttaaccaccmttccactgaacacaaattaaatgaaaaatatctagtggactaaatatatagct

SEQ ID NO: 6507 - DNA, 760 bp, Homo sapiens
agccattcctagcacggtgttccgctaatgcaaaccttaaggcagccaatcagccatttaatgatgtcagtgatcaataaatggcaattagtaattgacacgaatccaactctttttttttctggaatgtcttttattcattatgaagaaaaaaaaaactcacaccctttacattttaaagatgaagcttatgggacagcacgacgtcccatgagccggcgtcggttctgggtatcctccacgtggcctttcctggacttgcgttatttaaaatatgcgatttcactacttgaggttaccgagtactrattttacaatactgtgtagctacatgaagcggctcgaaatatactattatcactccgttttaagcagcacgatgtctggatgaagcatcaaagcgagatgggtcaacttaaagggcctttaaaacatcttgaagcaataataagccatacactgaagcaggggcggttttaaacattacacagaacttaaaacaatcgaacgaattcgtcctttgttctttttattacattaattattacattaatactgtttaaaaagaaactcaaaaggcattaaacttaggtaccaatctacacaaagtcctcgaaggggcctggcttggaccgaacgcgcttttgtgccgccccgctcgctcgcagcaccctgaaggccactgagcttagggcgctaggtccctagaagcgacttgaaatgagggggtcgccaggccaggccctcgctctgcagggga

SEQ ID NO: 6508 - DNA, 760 bp, Homo sapiens
agccattcctagcacggtgttccgctaatgcaaaccttaaggcagccaatcagccatttaatgatgtcagtgatcaataaatggcaattagtaattgacacgaatccaactctttttttttctggaatgtcttttattcattatgaagaaaaaaaaaactcacaccctttacattttaaagatgaagcttatgggacagcacgacgtcccatgagccggcgtcggttctgggtatcctccacgtggcctttcctggacttgcgttatttaaaatatgcgatttcactacttgaggttaccgagtactaattttacaatactgtgtagctacatgaagcggctcgaaatatactattatcactccgttttaagcagcacgatgtctggatgaagcatcaaagcgagatgggtcaacttaaagggcctttaaaacatcttgaagcaataataagccatacactgaagcaggggcggttttaaacattacacagaacttaaaacaatcgaacgaattcgtcctttgttctttttattacattaattattacattaatactgtttaaaaagaaactcaaaaggcattaaacttaggtaccaatctacacaaagtcctcgaaggggcctggcttggaccgaacgcgcttttgtgccgccccgctcgctcgcagcaccctgaaggccactgagcttagggcgctmggtccctagaagcgacttgaaatgagggggtcgccaggccaggccctcgctctgcagggga

SEQ ID NO: 6509 - DNA, 793 bp, Homo sapiens
ctcagtgacctaatgaggtaggtgttcttgtttctcagggcttgtcaggagaataccacaccaataattggaaaagagaatctaactggttaaccggttgtaatgttttaatgaggtaatgaaaagggtaaaaagaagggtagaaagagagctgtaaggtatcaggtaggtagcaagcaattccagggagcagctgccgtctccagggctgagggagcaaaggaaagagctgggattaccaacacttcctggacacttagaggaagggccccacagagctgaaattcagacctctgaggagggggcgggtgccagtatccctgaggggcacataatgaggctgattctggaaaaaggagggggcgggtgccagtgtccctgaggggcacataatgaggctgattctggaaaatctacaaactggctcggtggctctgtaggaagaagaaaaggatggtactgctgaggcgaagttcataagaagcacacgggaaggagcaagtcccctgttcgtcctcgggctctgcccctctcgctagcgcccctactggcagatattacaagaagcagctgactcagccgaaatgtggttctcagagttccagccccaagcatcacaaagcagataacagaaacgtgggcttggagatgagcgatgataatttagcaactggmacaattattagctccatttttcagatgaagaaaccaaggcacaaatatattaagctacgtttgtccagggtcatacagctaggaaaaggcagcggcagaatttaaacctagtcagtct

SEQ ID NO: 6510 - DNA, 641 bp, Homo sapiens
taaaagaaacaaacacaaacaaaacaaaactaaaaaactgacagatatataccttgatattacagatcaggaaagtaagtctcagaaaggagaagtgaaatgtacaaattcacatgtmagtgaaggacagagcttttctttaatacagtaattcattgccactgagtctatcccaaaggaagtgctcagatttataaaagagaataaaatatggctgggcgccgtggctcacgcctgtaatcccagcactttgggaggccgaggcaggcgatcacaaggtcaggagatcgagaccatcctggctaacacggtgaaaccctgtttctactaaaaatacaaaaaattagcgtggcacggtggcgggcgcctgtagtcccagctactctggaggctgaggcaggagaatggcgtgaatccgggaggcggagcttgcagtgagccgagatcgcaccactgcactccagcctgggcgacagtcgtagtcaaacacaatgtaaaccagtggtggagtcttggggcacaaggagcatgacctggggctggtggaagagaataatcccataggggtttgtttcaaggcctgcagagcagtcctgacttttctaaaactttgcatctgacaggcagaaaaggaagccttt

SEQ ID NO: 6511 - DNA, 641 bp, Homo sapiens
taaaagaaacaaacacaaacaaaacaaaactaaaaaactgacagatatataccttgatattacagatcaggaaagtaagtctcagaaaggagaagtgaaatgtacaaattcacatgtcagtgaaggacagagcttttctttaatacagtaattcattgccactgagtctatcccaaaggaagtgctcagatttataaaagagaataaaatatggctgggcgccgtggctcacgcctgtaatcccagcactttgggaggccgaggcaggcgatcacaaggtcaggagatcgagaccatcctggctaacacggtgaaaccctgtttctactaaaaatacaaaaaattagcgtggcacggtggcgggcgcctgtagtcccagctactctggaggctgaggcaggagaatggcgtgaayccgggaggcggagcttgcagtgagccgagatcgcaccactgcactccagcctgggcgacagtcgtagtcaaacacaatgtaaaccagtggtggagtcttggggcacaaggagcatgacctggggctggtggaagagaataatcccataggggtttgtttcaaggcctgcagagcagtcctgacttttctaaaactttgcatctgacaggcagaaaaggaagccttt

SEQ ID NO: 6512 - DNA, 539 bp, Homo sapiens
tggggattgaggaggagtgaggcagaagaagaaagggaygggcattccaagcagagagaatgacatgtgcaaaggcatggaggcaagatactttcagaaaagaataaaacatggctggcatgcaggatggggaatgcaattgctaagagaggatgctggagaggtaggaagaggctaggtcacaaaaggccttacctgtcattctaaagactgtgtttgcagtgggaagccatcaggggcttgagccacattttggaagccacccattggctgttgcatgaaaaaaaaatcacttagatggggcaagactggagatggggagaacagttagtagattgtggcagacagtaattcaggtgagagatatctgtggtctgacccaggcagggcaatggcgaggaatgccagtagacagagggggtggtattaagctacctatcaagtagacagattgatccgttggacaggatgagcatgttgtgaaagacaggcctgaacttgtgtcatgctttgtttctgtgcaagtcagctccatgttg

SEQ ID NO: 6513 - DNA, 1819 bp, Homo sapiens
tgaagggaaagtcatgggagggtacagtgctggaatgacccccaaactgcaaaatgagtccttgagaatgaaatagccctcacagctggaggatgggatgccaaatagcattaaggctgccagatagccctgcgacaagattaatatatcatgcaatataaaaaaaactgaagtgaaatgcacatatcataaaactaaccatttgaaagtatacaaaattcaatggcacttagtatattcacgatgttgtgccaccatcatctctatctagtttcaagtatttttatcaccttcaagggacaccccgtgatcattaagcattcactgtcattactccctccccgccttcccctggcaaccactaatctgctgtctctatggatttacctattctagatatttcatataaatggaatcatgcaacaggtgaccttttgtgtctggcttctgccacccagcattttgaggttcatccacactgtagctcatatcagaacttcattcctttttatggctgcatratattccatggtgtggatataccacattttgttcatccacttatccatgggaatttcatgggcatttggattgtttctgctttcttggttatcatgcaagcaatgccattttgatgggaagtttattaaagtagctccttattctagccaagtgggagttgaaagaactgttctcttcccattttccctctccccctctctatctgctctcattcaatcgtacatccaacatatatttctaagagccaattgtgtgccaagccctggctctgttagagaggtggctgcaggggcctggacagcaccgctaattccaactacacatcccaggagatcatagggcagtcccaaactatagactataatcaagcctctggaggcagctccccatttgtccttcagaccagaagagagaatggctggtatctggattgggcctcagagggcacagaaccctggggaacttccaaaggcctggttgctaacactcaggcctctccagtgaggatagagtgcctgtgcccccaagagactccccagagccccttggccctgagcattcatgggaacaaggctttcacttattctgagtctggaagggggtgaggcaatggagggaacctcagattaggcttctctttgttctccgtaatctgggtgcccacatgggctaagagagagagagaaagagagaacgagagagagagagagagagagagcgagcacatgagtgggcctgactgtttagcaggttcaccagaccccaagtgaaagggtgaactgaaaaaagttgaggtgattaattcactatagttttatgtttaacaaacctatccatggtttattctcatatgggtttaggtcttctccaataatcctcttcttgccctgataaagtcctgagttaaaatccaccttcagggttggtatttgagtctacatttgtggagttcagattaagattccagataaacaacacccatgcaatgtttctcaaaatgcgacccgcaggatgtgcaaaacaagaaactggagtacttgtacttattaaaagtcagattcctgggcctctcattagaacagggcccctttctcgtctttttttttttcttcctttttgtggagaacggggtctctctatattgcccaggcaggtctagaactcctgggctcaagctatcctcccgcctctgcctccctgagagctgggattacaggcgtgagccactgcacctggccaggcccttttctcaatggtcctctccccaccaaagtccaagaactgagtctcatcagtt

SEQ ID NO: 6514 - DNA, 795 bp, Homo sapiens
aaattaaatttattgtggtttttgatatatttggacttgtttttagccatcttacattgtgctgtctgccccaccacttggtttttctttcctttttttctctcgtgtcttacctgtgactagttctttgttatagagactagaaagaaaattttgaaagggaaatgggccacaatgttcatcaagaagaagaaaacaaaggttactctactaaaccccagcactaaccaggccaaatgatttttttttctccaccaaaataagggttaatcttgaaaaaatttaacctgcttacttactgctttttttttttttagtaaaataagaaaaagaacagagaaaaaaacaaagccttttttgcaatcagccaggcaacaactgttgaacaccgactttgtgtaaacccctgagccagagtctaggacagggttccctcctggagcttccatgctaaggggaaaagagacaagtgcacaatcaagctaattcacacatgagatcagtaccacgagtaaattacagagggttatggcagccagagagagactggggctgaggtggaggaagcgatttcagagaggaaggtgtgggatcrtttctctgagctgacctctgcaggagggaagggaggtgaccttgggaaagagcaggagaaaagggtgaaggtggtgcaggcagaaggaatcacaggtgataggttaagagacaggaataaactaggtcggctgaaggcaggatggaggcagggtggctggataggaaggaaccgggcagagctggatgaagtacgaggca

SEQ ID NO: 6515 - DNA, 660 bp, Homo sapiens
attccctccctccctccctctctccctcccttccttctctctctttttctctctctctctctgttctctttctttctttcaatatctctccctgtctttctttctcaccacccacatattttcttgtcctgtgttggaaagggctttggtccttgcctggtggaatcgctagaatatcttaaagcttttcttttactaacagccatcaatgattactttggtttagtccaaaaaccaagaatttgcttttgaaggagggggttattctccccttagtgtttctgcatcaagctgaaagagctccctgcttagagtaagtcaagtcaccttccttaaaaaaaaatrctcccaggtgttagagatctctttattagagtcataaaataactactggttattttaaatagttccctttggaaatgagagtctcgttttacattaaacaggcaagactttgatatatttcacatatttaagccttagctttgattttttagtcatactgagaatactggtctttgagacacaaaatgagttcatttagtagtggtttaaaataatttttaacttataacaaataactggaaacagaatttctttaagcaggggactcctgttatgggaacatgtttggtggcaggtttcccaggggagaggatc

SEQ ID NO: 6516 - DNA, 746 bp, Homo sapiens
tggaagaggaggtagggcaaggacactagcagagtcacctcaccaccaagtggaattcttcctctgcccttaactccttgcaccttccctaccagcgttttgttttgttttttttgcccaggctggagtgcagtggcacgatcttggctcactgcaatgtccgcctcctgggttcaagtgattctcctgcctcaatctcccgattaggtgggactacaggtgcttcaccacgtctggctaattttttgtatttttagtagagatgaggttcaccatcatctcctgrtggtggtctcgaactcctgacctcaagtgattcgcctgcctcagcctccgaacgtgctgagattacaggcatgagccaccaccctggcccctagcaggtttctttacctttatggtcccaattaatccctttggcagagcttgtggacctattctcagcatggtttttgttgctgttttttttagagacaaagtctcactgtctcccaggctggagtgcggtggcgaaatcatagctctgcaacctcgagctcctaggctcaagcgatcctcttgcctcagtctccccagaagctgggattacagacctgagcctccgtgtccagcctcttgacatatttttaaatgcataaagaatatattagacagcaggcactgtggctcacgcctgtaatctcagcagtttgggaggctgagatggaaggattgtttgaggccaggagtccgaccagcctgggcaa

SEQ ID NO: 6517 - DNA, 746 bp, Homo sapiens
tggaagaggaggtagggcaaggacactagcagagtcacctcaccaccaagtggaattcttcctctgcccttaactccttgcaccttccctaccagcgttttgttttgttttttttgcccaggctggagtgcagtggcacgatcttggctcactgcaatgtccgcctcctgggttcaagtgattctcctgcctcaatctcccgattaggtgggactacaggtgcttcaccacgtctggctaattttttgtatttttagtagagatgaggttcaccatcatctcctgatggtggtctcgaactcctgacctcaagtgattcgcctgcctcagcctccgaacgtgctgagattacaggcatgagccaccaccctggcccctagcaggkttctttacctttatggtcccaattaatccctttggcagagcttgtggacctattctcagcatggtttttgttgctgttttttttagagacaaagtctcactgtctcccaggctggagtgcggtggcgaaatcatagctctgcaacctcgagctcctaggctcaagcgatcctcttgcctcagtctccccagaagctgggattacagacctgagcctccgtgtccagcctcttgacatatttttaaatgcataaagaatatattagacagcaggcactgtggctcacgcctgtaatctcagcagtttgggaggctgagatggaaggattgtttgaggccaggagtccgaccagcctgggcaa

SEQ ID NO: 6518 - DNA, 706 bp, Homo sapiens
acaggacccgagccctttctgaggccatcccagggctgagcatcacatgctgcatctcttcacacactgagatagagccaagtgcatgcctaagaaaagtcagtgaatattttttttttttttttgagacagggtctcactctgtcacccaggctggagtgcagtggtgcagtcttggctcactgcaacctccacctcctgggctcaagcgatcgtcttgcctcagcctcttgagtagctgggactacaggcacgcaccaccatgcctggctaattttttgtattttgtggagacagagtctcactatgttgctcagcctggtcccaaactcttgaactcaagcaatctgcccatctcggcctcccatagcactgggattacaggtgtgagccactgcctggccaacagtgatctttaagaagtgcctggtaatagagtcagaatmtctgtctgttggttcgtttgtcccaattctatttctcggtcactgtggctttctttcactcttgtttctatctcccattctctctctctcttccttcctccccctccttgtcctccctcccctccctgccacgcttcaggccctcaagaagccaaaacccctaaccagaacccagtaggggcaacctccacccacccacttgggttccacctggctctgctcctcccagcgccaaaacaggagtgtcagctgccagagag

SEQ ID NO: 6519 - DNA, 706 bp, Homo sapiens
acaggacccgagccctttctgaggccatcccagggctgagcatcacatgctgcatctcttcacacactgagatagagccaagtgcatgcctaagaaaagtcagtgaatattttttttttttttttgagacagggtctcactctgtcacccaggctggagtgcagtggtgcagtcttggctcactgcaacctccacctcctgggctcaagcgatcgtcttgcctcagcctcttgagtagctgggactacaggcacgcaccaccatgcctggctaattttttgtattttgtggagacagagtctcactatgttgctcagcctggtcccaaactcttgaactcaagcaatctgcccatctcggcctcccatagcactgggattacaggtgtgagccactgcctggccaacagtgatctttaagaagtgcctggtaatagagtcagaatctctgtctgttggttcgtttgtcccaattctatttctcggtcactgtggctttctttcactcttgtttctatctcccattctctctctctcttccttcctccccctccttgtcctccctcccctccctgccacrcttcaggccctcaagaagccaaaacccctaaccagaacccagtaggggcaacctccacccacccacttgggttccacctggctctgctcctcccagcgccaaaacaggagtgtcagctgccagagag

SEQ ID NO: 6520 - DNA, 786 bp, Homo sapiens
ccagactagggagatcattatgacctgggttcatctctagctctggagaaacccttgtgccaatcttggaagaaactacttttaaaataaaggtagattacaaaacattgtttaaaaaaagaaaaggaaagaaaaataaaataaaggaattaggttggtgcaaaagtaattgcagttttaccaaagttaatggcaagactgcaattatttttgcaacaaccaaatagattagaccattttcccagccaaaccccccaacccctgtcttctccaaggcctgttctgaggtctgatctgcaccatcagaggtgcctagaccacccaattcctagactcctggcctgagctgaacaggccacacagcggacgtcaagggcacctgcgagggccaggcaccattgtaagcactacaggggcaggcaaacatggagcagactcaatcctggcttcaggaggttctcgcaggtaagtagacacgttccagccacaactcgctgcctgtccctccccagccagtgcaccaagagcctcctacatgctcggctctgcccgcgctgctccctgggcctgcagtgcccggcccgtgctcttctggtagctaatcctcccccaactttccagcaccagctaaaatacctaccttagtacaagtttattccgsgttctggtgcccttacctccacagagaagcctggctgagtgtgagcctcctggaaggcccgccttagcctcggatatgcttgcagccacggggcagggagctcacagagaggcttccagggagca

SEQ ID NO: 6521 - DNA, 2045 bp, Homo sapiens
tgcattgaattaaacaatgctaaagccaaataaatattggccacttagcaaaagaaccattgatttttatgatggacaacaatgccatccttcactttgctggtggagggtttcaagccagggtcttatcggatccaaaacagccagttcactggattacacagcaagatgccaccgctctttggtgggactgtgcaaagttgagagtaactgttttcactgtttcttgctcagcctagctcatgttccctctctcatttacttttttttttttttttttttttttgagacagggtctcactctctcgcccaggctggagtgcagtggctcaatctcggctcactgcaacctccacctaccaggttcgggtgattctcctgactcagtgtcctgagcagctgggaatacaggtgtgagccactgtgcccggctaatttttgtattttttttttttttagtaaagacggggtttcaccatattggtcaggctggtctcaaactcccaacctcaggtgatccgcctgcctcagcctcccaaagtgctgggattacaggcgtgagccaccgtgcctggtctcrttcacctttaaggagacctcaggctgggccttgcctccctctgcttcagtattggcagcgagggcagaggcactgaacatcctttttcccaagatctccgggtatgtctcatcttcctcctatgccacctccctcagcaggctgtccctgaaaccaaagaagtggcttgccttcagccctaagtacaaagggcccctcttcctgctctgcctgaaaatcagggcaaagaggaagacacaggaagggggacacaaaaagatctgtgttggaaagagaaagagatctacaacttccaagcacccgggatgtgcccagcaccatatcagacaccgtacagcattatcttcattaattcccccagaaacttgaaactgggcattagggaggcagacttgaagatggatattgacttccaggagtgagcatcaaaagcctgcagaccaggaatcagactctgtcaacctcacagaccccaggtgcctgtgtgtctctacccaaaaacatccacccccttcccgctggaatgcaggttccgtgagggcagaactaattttgttctcctatattcccagtgctaactggcacttgcacgtgctatgctcttagtaactatccatggaatgcatggatattacaagagaagccctgagatgtgaaggttaacgtcatcaatggagaggagcgggttgccatttggcacccagtcacacagaggcacctgccaggatggcttcaacctggaagggtgaaggaaggaacatgccaagcagccgctgtgctcaggccaggtacacacattggctatctgcactgggggttaagaacaacggagtctggcatagtctcgaaacctcccatcacatcgggctctgagatgtctgagcagagcaatcatggatttaatcagagtggggacaaggtcctttttcttgattctctactctgatgtcaaaggccaagataggatgagggcagtggggagtcagcaacacttgtctggactttggcagtcaaatagggccactagtctttggagagctatcttacaaaaatatattatgatacccatttcataggtgaggaaaccgaggcccaaagaagctaaacaacttattcagggtcttagggtctttgccaaacagtcaagtgaaaactgcacatttcaatgatccagctgtttcccctgtatcatcactgggcatcccagtgccatgctcatagggctgcctggtgtgaggacattcacagcgcagtacccaggctgagtgtgaactagattcctcccagcacagtgaaatcaactggcaggcctcaggccagccatacactctcatggtgggaggaggtgcagttgagtttggtggagggaatcctggcctgtacatgccaaggttcgctcatgcctccatcaacaagcatctgccgctgcgggcagaccccatgctagggaagcctcagcgaatga

SEQ ID NO: 6522 - DNA, 816 bp, Homo sapiens
cactgccactgtccagccctcaccctggagagccaaggctgctctgctgggagctgcatggggccgccagtgtagacaaccagggtaggtgccatgggagctggggacaggctggctgcccacactcccccacaaaagccaatagggttggggaggggggctgtgctgggtattcctgccacgactgtgagccctgggtctcaggggcacccccaccccactggggagcccctgggaccctcagtccctgacctgagacatgacccccaggtgtcacccacccagctccctgcccccgatatgatttgtctgtgttccccacccaaatctcatcttcaattgtagttcctataatccccacatgtcgtgggagggacccagtgggaggtaattggatcatgggggcggttaccctcgtgctgttcttgcgatgrtgagtgagttctcgcaaatctgatggttttgtaaggggctttcccccttttactcggcacttctctctcctgccaccacttgaaggaggacgtgtttgcttccccttcggccatgattgtaagttttctgaggcctccccagccatgctgcactgtgagtcaattaaacctctttcctttataagttacccagtctcgagtatttttcatagcagtgtgagaacagactaagacactcctcaagcatgagagttcaaggagaccaggtccactgtccaggtcttggccagggcacagtggacagtaggatctcaatcagaaagctccagtctcttgcctctaccttgtccccaggtcctgaagcccttggtgcaagtagggc

SEQ ID NO: 6523 - DNA, 664 bp, Homo sapiens
cacgattactaagaaaatataaacattttttcatatactggttaattggctttaaagaaaaaaatcccctttttaatcccatcaggatttagtttgacaaatttttcagaaacttataaagatgaaaacacctggatgtatttctctgtaaactttggctgttagcatcctttttcaatgcttgtgtagtttttcagaacagaacctaaccttcaagatgagtcatttgttcccaaacttgaattgtcatgaaacactccttgggtttccctcccgtgctgaatatgatttctaagaatgggatggcatggttactgtataaagatcatttgttctacaggtcagaaggcctgagttctcatcattaattaactttgtgatgtatgttgggtaaatcacttaacctctacagttttatcttctgtaaaatatgaaagaaagactttgagctaaagtttgtttctactgtaagaacatgagatattttatcttggtgacatcatggcttatgggcaggctgaggtgggattagtaattgcaaaagcagtggtcataaggtgaagaaacctggacatgayttcagacttaacctgggaaataaaatcagggaatgtggacaaagtcagacactactttagcacaggatgagatgccagaagatgat

SEQ ID NO: 6524 - DNA, 830 bp, Homo sapiens
acagcctgctgccctgtcagagaccagccccrgtcacttcctcaggcaccctgtgtccccatcaaacacccagaatcaagtcagatgggaccagaaaacagatccctcctctgtcctcctctcccagcaatgtctgcaatattctgccttggtttgcaagctccacacctacccatgcccatcagagcactttctcaagccagaagccactaggaatgggatggtggcattctggctgaccaagagactgagatatgaatcctcaaattcccagtgacccaaacattctgttactcagctctgtttccctaaaccacataccccagcccatcctggagccatgggctccaccctggccagccgcctggagaggacagcagccgtctgagtgacatccagggagaggccagcaatgtagaccactacagctctccccataccctggggctcaccaaaaggacaatccatcctcaacccacaatgagaagaaggcgggggtagtagttcccccaaggcctttgcacatctatatttttcaaagatcaagagttctagtgtcagctggatgcagtggctcacacctgtaatcccagcattttgggaggctgaggcaggtggatcacgaggtcaggagttcaagaccagcctggccaagatggtgaaaccccatctctactaaaaatataaaaattggccagacgtggtggcgggtgcctgtaatcccagctactcgggaggctgaggcaaagaattgcttgaatcagggaggtggaggttgcagtgagccaagatcatgccactgcactcagagcctgggtgacagagtgaga

SEQ ID NO: 6525 - DNA, 760 bp, Homo sapiens
cctcatgggatttctcatgccctctatatcatgctaagtcctgtgataccagaccgaccccttgcatctctgtcctctccttttcagcctccttagtcagctcaacctcactaccagacctcttaataatggaatttcttgatgcctggtcctgggccctcttgtcctctcactataaattctctccaaaggtgatctgttccatttctgtgcatttaattattttccttataccaattcccaaatttatgccaccagccaaaagctccagaactgtacatactattgccttcttgatatctctatctggataacccaaaggcagttcaaatttaatatatccaaaagtggactctccatctctgaccccagcccaaacctgattktctcccagattctggaatcccaggaaatggtgtgtcctgaatccagctggtcatgctgaaaaactgggagtcatccttggccttcctactactcccttccctcagtgagtctcatcagttctaccttccaaatggatgtcaaatccatacaatattctccaacctcactgccaccacgggagttcaagcctgcatgttctcaggcctgaattcacagtgacctcctaactggtcttgttcctttttcttgtgctctggttcaattcattctccatacacagaagctagaagggattctttaaatgtaatttgattctgttactgaaccctcttcattaatcttaggatgagggctctgctaatattgcctggat

SEQ ID NO: 6526 - DNA, 482 bp, Homo sapiens
gatggggcccgaggtgccatttattattttattttttttaagacagagttttgctcttgtcaccccggctggagtgcaatggcacaatctaagctcactgcaacctgtgcctcccaggttcaagcaattctgcctcaccctcccgagtagatgggattacaggcacctgccaccatgcctggctaatttttgtatttttagtagagatggggtttcgccatgctggccaggctggtctcggactcctgaccttaggtgatccacccacctcggcctcccaaactgctgagattacaggtgtgagctaccgtgcccggcttgaggtgyttttttaactaatacattgtagcactattgctggtatgtggattcacataattgagtggcaagatagtataggactcctttccgattcctaaaaccattagtatctactaaattgacgctgaaattttgtatttttagtagagacaaggtttcac

SEQ ID NO: 6527 - DNA, 482 bp, Homo sapiens
gatggggcccgaggtgccatttattattttattttttttaagacagagttttgctcttgtcaccccggctggagtgcaatggcacaatctaagctcactgcaacctgtgcctcccaggttcaagcaattctgcctcaccctcccgagtagatgggattacaggcacctgccaccatgcctggctaatttttgtatttttagtagagatggggtttcgccatgctggccaggctggtctcggactcctgaccttaggtgatccacccacctcggcctcccaaactgctgagattacaggtgtgagctaccgtgcccggcttgaggtgcttttttaactaatacattgtagcactattgctggtatgtggattcacataattgagtggcaagatagtataggactcctttccgattcctaaaaccattagtatctactaawttgacgctgaaattttgtatttttagtagagacaaggtttcac

SEQ ID NO: 6528 - DNA, 623 bp, Homo sapiens
catctgcagttcaatgtcaacccaggagtaattttacaagaaagattgtgatagtgttgaccctcgacgcttatattagtttttcaacaataatctaaatgctggtagagaaagaaggctaatacacaaaacagtaacatgagctacggaagtgagccaggactttaacaagaaaacataactgaattagtcttcaaaatgacattggtaacttaaagaaatcatttatctcagaataaagaacttaagcaaatgtacacatgagctatttaggcccatattagagctatttctctatcaatgaaaaatacacccagaaaagcttactatgaagcacaattctcagtatgtaaatctattatcttgcattaaaaataccacacaaatagcctaccgcccagcaattcctttgaggctatatagccaacagaaataagtgtttgtttccatcmaaatacatacatatgagaatgttcatagaaactttattcataaatagtcccaaactggagacacgcataatgttcacccacagtagaacgtgtaaacacactctggcatattcataaaacgaatactgctagcaagagcaaagaataagccacagataaccacaacctcat

SEQ ID NO: 6529 - DNA, 809 bp, Homo sapiens
tccaatccaaccacagcagctctatggggcctggagctcagtcaacaaacagggcaagacttcacctcctcttggtccccaccaactgacttccagcccccagccctgcctcttaggccggctaagcaccaagcaagcctcaggaaaagccatctctgcccactgtggcccctgcccacttccgccatcctgcctaaagccaggcaggcctctctcctcccgctctttctagtcaggcgcagagggaagccctgctcacccctgccttctctaacggaccctaattctcaaagggcttggacgttgggaatggaaactgagttctagaaaaaggtattgttatcagccctgaatttgaggactcagattcatatcccctcaaggtattttatatattggggttttccactcataatttattttttcagagttctgcagctttgcaaggggaaaatgaaagggaaaacccayctctaagagaagctgagagaaaagagaattaggagagtggggtatggccaggaacttccctgcggctggcgggctggagctgtaggggcttggagccaggcaagtgggtaggccgaagtgtcaggacagaaggagatgccacgggggccagctgggacatcagcagggctgagcccccacctctctttgtccaggccccaggtgagaagctcctgttccagacagcatggcaggctctcagatggaggggtggcctcaagctccttctagcgcccatccttcccgagacctagcaactccaaaacatgccttcctccctgcaaacaaccaaacccagc

SEQ ID NO: 6530 - DNA, 809 bp, Homo sapiens
tccaatccaaccacagcagctctatggggcctggagctcagtcaacaaacagggcaagacttcacctcctcttggtccccaccaactgacttccagcccccagccctgcctcttaggccggctaagcaccaagcaagcctcaggaaaagccatctctgcccactgtggcccctgcccacttccgccatcctgcctaaagccaggcaggcctctctcctcccgctctttctagtcaggcgcagagggaagccctgctcacccctgccttctctaacggaccctaattctcaaagggcttggacgttgggaatggaaactgagttctagaaaaaggtattgttatcagccctgaatttgaggactcagattcatatcccctcaaggtattttatatattggggttttccactcataatttattttttcagagttctgcagctttgcaaggggaaaatgaaagggaaaacccatctctaagagaagctgagagaaaagagaattaggagagtggggtatggccaggaacttccctgcggctggcgggctggagctgtaggggcttggagccaggcaagtgggtaggccgaagtgtcaggacagaaggagatgccacgggggccagctgggacatcagcagggctgagcccccacctctctttgtccaggccccaggtgagaagctcctgttccagacagcatggcaggctctcagatggaggggtggcctcaagctccttctagcgcccatcctycccgagacctagcaactccaaaacatgccttcctccctgcaaacaaccaaacccagc

SEQ ID NO: 6531 - DNA, 726 bp, Homo sapiens
ggaaattgaggcacagagaagttggcaaaaattgttggggccactgttgatgagtggcagacttggaatctgaatgagagtgtggttcatggtgcttgacccaggcccagaggcacccttggggctctgagtaggatggagggtggacatcacctaccccttggatacactgggttttttctccagcataaagatttttggaataaaacattccaaggtttcaaataaatttgcaaatctctggcaacagagctttatctgaaggggcagggcctgtgcactttcttctctgaaattctgattttaaggtctgaattgggacccaaggaaacacaccaggagattcgcaccttcggccaagtttaggggaaaaaaaataacttgttttgagttccagctcctctctgtcggtgttaggccatttttgcattgttgtaaagaactaccagagactgggtaatttataaagaaaagacgtttaattggcttacagttctgcaggctgtacaggaagtatcgtatcagcattttctcagcttctgggaggcctcagggagcttttactcmctgtggaaggtgaagtgggagcagacatgtcttacctggtgccagcagaagcaagagggtagaggaggtgccacacacttttaaacaaccagatctcatgtgaactcagagcgagaactcactcatcaccaagaggatggtgctgagccattcatgagg

SEQ ID NO: 6532 - DNA, 726 bp, Homo sapiens
ggaaattgaggcacagagaagttggcaaaaattgttggggccactgttgatgagtggcagacttggaatctgaatgagagtgtggttcatggtgcttgacccaggcccagaggcacccttggggctctgagtaggatggagggtggacatcacctaccccttggatacactgggttttttctccagcataaagatttttggaataaaacattccaaggtttcaaataaatttgcaaatctctggcaacagagctttatctgaaggggcagggcctgtgcactttcttctctgaaattctgattttaaggtctgaattgggacccaaggaaacacaccaggagattcgcaccttcggccaagtttaggggaaaaaaaataacttgttttgagttccagctcctctctgtcggtgttaggccatttttgcattgttgtaaagaactaccagagactgggtaatttataaagaaaagacgtttaattggcttacagttctgcaggctgtacaggaagtatcgtatcagcattttctcagcttctgggaggcctcagggagcttttactcactgtggaaggtgaagtgggagcagacatgtcttacctggtkccagcagaagcaagagggtagaggaggtgccacacacttttaaacaaccagatctcatgtgaactcagagcgagaactcactcatcaccaagaggatggtgctgagccattcatgagg

SEQ ID NO: 6533 - DNA, 697 bp, Homo sapiens
ctgtgccctgcatcccctgtgccccccatacccgaggcagctgactgcacctttctcacagttgtgtggctgagtgggacccactgccaggcctggagcctccgccgctctggactctgcctctacattgccactstcgcccacttctgctgcagggaggaggcagacagtccctggagcctgcccctgggagcctcccagagtccgctgccctgggggccactgcaatggggccgggcagagtcacctgatggtgggggagcagcacagttagaggcagaggggccagcagagaggggccctgaggcagacctgggcccagggtagagctggcaggagccgggcgtggctgcagctgcccaagttgttgctgtggacctggcctccccgtgcttttgggggccaggagcaggcaagagtcctgccctcctgggcacagctgcagtcgcccagctgtgactgtggacccaggcatctctgcagtctctggtgcctaggaaggcccccccttatccctgcaggcttgaaggtgtctgcttccactgcctggcctctccccactaccagcacccactccgatctcagagtaaggatgggaccaagcccggcgctgtcacagcccagctgggtgtgcacacactcagggtagtgctgacgtgccagccccctgcctcctcagccctctctggactttggg

SEQ ID NO: 6534 - DNA, 969 bp, Homo sapiens
ctcccctcccctattcttccctcctctcctcttacccccatcttctttccacacacactcatttctctccagctctgagctgggccttgagtgcagtgttagtgcaggaggaaggggcagcctgtaccctgtgcgtggcaagggtgcccacagtgtcctgagttcctttgaggagaggccggtcttggggtgagatggcaaataaacacacacaagatgatgcagtgagaaggagggtgtgtgggagctcccaggagagaggaggtgtctctgcctgaacagtccttggcagcaatggatcctacctggctggctttacctataagtaatctcaattaatcaaaccaccacttctctcctcccagaggcctgccccttcttcttctgctgtgtcattccagctgctgctgcacaggcctcagccaggaaagcaagggcttccccctgcccgagacctcccagatcacatcgtgagagtcatttcccctgcagcatgaggaccagaactgggaggggtcaggctgggagcaagaaaccacctacagcaaggacagggaygaattttgtcctcagaagtggcctgctctggccaggcacagtgtaatccctgtaatcccagtactttgggaggctgaggcgcagaccacctgaggtcaggagtttgagaccagcctggccaacatggtgaaaccctgtctctactaaaagcacaaaattagccgggtgtggtggtgggcacctgtaatcccagctactcgggaggctgaggcaagagaatcacttgaacccgggaggcagaggttgcagtgagccaagattgtgccactgcactccagcctgggcaacaagagtgagactccatctcaaaaaaaaaaaaaaaaaaaaaagtggccggctcattttgggcatatctaactgcttctgaggtctcagggagaggagaagggttggcggccatatccttaccaa

SEQ ID NO: 6535 - DNA, 610 bp, Homo sapiens
gccagagagagcaggagaggatgaggtggcagatttgatttttgatttcaggtctcagttagctgtggctcaccagcacttccccagtgcagggatttgcaggcctcatctcctgcggcctctcctttctgcccgtcctttgtccacaatttcccgatatcaccaaacagcttcttggccctccctcgcagatctacaggactggaagcctgggcggggcatgaggggctcaccccattcacayagcttggtcctccctgcctccactgtctggaacctgcagctgtttctccctttggataccttctgtgttccgtggtttaaggtaaactgctggagccttcaacttgagtcccaactgctggtgctcctgtatggctggggggagtccctggcaggaagtccctggcagtggggactctgtgctggctgccacctcaggacatctgccagcaagcctctggggatgggccctgacatggggatgccgcgtgtgcggatgcaggccaggcaaagacttggcagtgggggtggaaggaagcgcattcttgtgttactggggggctctgtgccaagaggagaaaaataaatgtaattaccttcactactg

SEQ ID NO: 6536 - DNA, 1390 bp, Homo sapiens
ggtgcggtggctcacacctgtaatcccagcactttgggaggccaaggcaggcagatcacctgaagtcatgagttcgagaccagcctggccaacatggtgaacccttgtctctacaaaaaaaaaaagacaaaaattagctgggcatggtggcacgcgcctgtaatcccagctactcaggaggctgagacacaaggatcacttgaacccaggaggcggaggtggcagcgagccgagatcacaccactgcactccagcctgggtgacagggcgacactctgtctcaaaaaaaaaaaaataaaggccaggtgcggtggctcacgcctgtaatcccagaactttgggaggccgaggcaggcagatcacctgaggtgaggggttcgagaccagcctggcaaacatgatttagtagaaaccccgtctctactaaaaatacaaaaattagctgggcgtggtggcaggcgcctgtagtcccagctactcgggaggctgaggcaggagaatggcgtgaacccgggaggcggagcttgcagtgagccgagatcgcgccactgcactctagcctgggcaacagagcgagactccatctcaaaagtaaaataaaatataataaaataaaataaataaaatacaaacactcccttagtccagggcagggaccagatacagagataccactctaaaggcagacattggtgttggggtttggtgagttggatggcgagtgaacagatggctagtgggaagggaaagagaagaggaaagggttctccatccagtacctggtccccaagttaatgagtggaggatcccagcctgccccaccaggagggaatacatttgcataaggtccctcatctgcatggcatcccagggaatttgcatagagatggcagcctggggccacatcagtatgacccctcctcccaagggttgaaactccagcctacattacaaaggcctagggcaataggaaagtgggaggggtgaacctcaggatctggggctccaggaagtaaagasaagttggtagtaaactacccttgctctttaaccttctgtggttcccagagcatgagccgcccttcagctggcattctggaccttctaagatactgaccctcacatcccctgctcccgctgtcaccaccctcctacctggaatgcccttccccatatcccgtgctgtgacaaagcttgcctattcttcaaagcctggacatcctgaagaattctgaaagctttcaccaccagcccctccttgccctgcccttggaaatttacaaagctctgtgcatctcccagacatgtacagattttttggggtatatagtttattagtaaggttatatttgattgcaaatgactatatatatatataaatatatatata

SEQ ID NO: 6537 - DNA, 1390 bp, Homo sapiens
ggtgcggtggctcacacctgtaatcccagcactttgggaggccaaggcaggcagatcacctgaagtcatgagttcgagaccagcctggccaacatggtgaacccttgtctctacaaaaaaaaaaagacaaaaattagctgggcatggtggcacgcgcctgtaatcccagctactcaggaggctgagacacaaggatcacttgaacccaggaggcggaggtggcagcgagccgagatcacaccactgcactccagcctgggtgacagggcgacactctgtctcaaaaaaaaaaaaataaaggccaggtgcggtggctcacgcctgtaatcccagaactttgggaggccgaggcaggcagatcacctgaggtgaggggttcgagaccagcctggcaaacatgatttagtagaaaccccgtctctactaaaaatacaaaaattagctgggcgtggtggcaggcgcctgtagtcccagctactcgggaggctgaggcaggagaatggcgtgaacccgggaggcggagcttgcagtgagccgagatcgcgccactgcactctagcctgggcaacagagcgagactccatctcaaaagtaaaataaaatataataaaataaaataaataaaatacaaacactcccttagtccagggcagggaccagatacagagataccactctaaaggcagacattggtgttggggtttggtgagttggatggcgagtgaacagatggctagtgggaagggaaagagaagaggaaagggttctccatccagtacctggtccccaagttaatgagtggaggatcccagcctgccccaccaggagggaatacatttgcataaggtccctcatctgcatggcatcccagggaatttgcatagagatggcagcctggggccacatcagtatgacccctcctcccaagggttgaaactccagcctacattacaaaggcctagggcaataggaaagtgggaggggtgaacctcaggatctggggctccaggaagtaaagacaagttggtagtaaactacccttgctctttaaccttctgtggttcccagagcatgagccgcccttcagctggcattctggaccttctaagatactgaccctcacatcccctgctcccgctgtcaccaccctcctacctggaatgcccttccccatatcccgtgctgtgacaaagcttgcctattcttcaaagcctggacatcctgaagaattctgaaagctttcaccaccagcccctccttgccctgcccttggaaatttacaaagctctgtgcatctcccagacatgtacagattttttggggtatatagtttattagtaaggttatatttgattgcaaatgactatatatatatatawatatatatata

SEQ ID NO: 6538 - DNA, 855 bp, Homo sapiens
atgacatttagaaatggagtttctgaaaatagaaaaataaaattgagaaaagttccagatgatagtcttctttcttttgcttaagatttctttttctttttcttttttttttggatggagtctcgctctgttgctcaggctggagtgcagtgatgagatcttggttcaccgcaacctccgcctcctgggttcaagcaattctgctgcatcagcctgccaagtagctggaattacaggtgcccacccccacatctagctatttttttttttttttttttttaatacagacagtgtttcaccacgttggccaggctggtctcraactcctgacctcaggtgatccaccccccttggcctcccaaagtgctggaattacaggggtgagccacagcgcccagccttaggatttcttaataggtatttattagaagcttaagttatgtgaattatcctttgaagctgatcctcctttttattgctttctaatattgatatattttttattcttgctatcaaatttttatttaatcccttaacttaatggaagatgaaggtttgttgtgttttcaaaacacacataaagctattattatatgttgactttttctaaaacttgctgggtatacaaattatagcaactattaggaagatgaggagggagctgcagtgaatgacttttccgaatatttgacatatttgtataacttctgattttgaaatctgcaaaattctattacccagcatgtggtaattaacagtctatttaactgcagaaaaatgagcttttttttactgaattataaaatacttgttatactattaattcttttcattaatacaataattgactccccc

SEQ ID NO: 6539 - DNA, 695 bp, Homo sapiens
atccatccagcaatgagtcgacactsttgccaaggtctggcagtctcggcccttcccacagccttatgccttcctttgtttgcaagtctgtttctttccctggagatctgtgccgccccgggcagtagccactgactacacgtggcccttgagcatgtgcagctgggatgtgctttcaaagacatggcactttttttaaatgtaaaaaaatcctattcataattttatgttgataattcattttcataattaaggtgtcttaggttaaatataacatattattaaaataaatgtcacccatttcttttcatttttttcactgtggctaccagaaaattaaaatcgcacatgaggctcaccttacacttctattagacagtgctgcactagacatcaagtgttgagggcagagattgcttcgctctttcttgattccctggacctccggcccatggcactatgcctgactgccctagtatttttcatcctgcggacccatcagcaatggacctgaacagttctcctccatgatctctcatggtgctggtcctactgtccctaaactcagggcttactggcttctggttcttcaaaatcctgctccctggcgtatgatctactagagaaccccagaagcgcagaatcacaggccttggagcgtgaacgtactaccttgcccaccgctgctgaatcct

SEQ ID NO: 6540 - DNA, 802 bp, Homo sapiens
acatgatagcgtgcgtagcttacatacatgggaaacctagtatcacatgcatataagcacgcacaacatgcactaattatatctgggatcaacattgggttcacatggtataaaaacactgaacttgcataattcaatgacgctgtgttcctgaacttgcataattcaatgctggtttctcctcatgctctgaatccagtctctggccagacactaggccctcactcagacactcgctcttgcatgggattcatttgacaatgatggtacccgcggtcatcaagagaggaagtctctacacccagagggtgcctcagggcccatcgagggagactcatacctagatgttagggccacggccttccatgcctctcccataggactctgtgtgtgaccaacaagcacatgaaaagtgctcaacatcattaatcatcagagagatgcaaattaaaatcacagtgagacaccaccttacactggtcagaatggctggctattattaaaaggtcaaaaaaacagcagatgttggtgtcgatgtcaagaaaatggaatgcttaaatgctgttgatgggactataaattagtrtaatttctatggaaaacattatggagatttttcaaagaattaaaatagaactaccatttgactcagcaatcccaccactgggtatctgccccccaaaaaagaaatcattatatcaaaaacagacctgcactcatatgattattgcaacactattcacaattgcaaagatatggaaacaacctaagtgtccatcagccaatgattggataaagaaaa

SEQ ID NO: 6541 - DNA, 632 bp, Homo sapiens
tttgagcccaggagttycaggttacagtgagctgtgatgcgccactgcactgcagcctgggcaacagagtgagaccccatctttaaagaaaaaaaaaagaagaatctgagacattgtaagaaaaattccttcatctcctcatcaagtgtttattgggtgcctgctgtgtgcccagccatatgctagaggctggggatataggaataaaagctaccagccatgccctaggtcagtgcctagttctgggtcagcaaatagcatccaacttgttcagtgctattctatcattaaaacataagctggagttctatttgtttgcacattttacaaaaataatgtgtaaatagatgattctataaaaatgtccaaacaatgctgttaggtagacatcactctacacacttgttttgtgggtgacattgcctcactaaggagcagctccagcagccaaccagaatcaaagctgtcctctttcatggggctctgggcttacccaggaaagaacaaaataaattgacacaatgtaggctaatcatgatattgaaaacagaaaggacttgggagcctcctgaaataaattgttaaaaattacataaacctatttatggttggatttataataagtgcctgtg

SEQ ID NO: 6542 - DNA, 632 bp, Homo sapiens
tttgagcccaggagttccaggttacagtgagctgtgatgcgccactgcactgcagcctgggcaacagagtgagaccccatctttaaagaaaaaaaaaagaagaatctgagacattgtaagaaaaattccttcatctcctcatcaagtgtttattgggtgcctgctgtgtgcccagccatatgctagaggctggggatataggaataaaagctaccagccatgccctaggtcagtgcctagttctgggtcagcaaatagcatccaacttgttcagtgctattctatcattaaaacataagctggagttctatttgtttgcacattttacaaaaataatgtgtaaatagatgattctataaaaatgtccaaacaatgctgttaggtagacatcactctacacacttgttttgtgggtgacattgcctcactaaggagcagctccagcagccaaccagaatcaaagctgtcctctttcatggggctctgggctyacccaggaaagaacaaaataaattgacacaatgtaggctaatcatgatattgaaaacagaaaggacttgggagcctcctgaaataaattgttaaaaattacataaacctatttatggttggatttataataagtgcctgtg

SEQ ID NO: 6543 - DNA, 741 bp, Homo sapiens
gatccagagttggaagacagaccatttctgccaattgttcacagcacatggaggagaggaatgtgtaaacagttacccagaaatatacatacacttctatggagaccaagattgagacgtgacctgtaacgcattaacttttaactcttatgcctcattttcttcatctgagaaatgattcagtcatcattaagtcatgacagcttctttgatggtccatggtttctagctcatttattcatctgtttccatcacagcagtgaaaaggaggctgccaaccccaagcagggaggattcgggagatccatgtatggtattctgtcctggtcatgaccctgcragggacataactgccttgtcacctggacaattgagagaagaatatcacatgccatgtttcactcaggaagcactcagtgcctatgggggatgggaagtgaagaatgtctggggacgctgtcccaactgatcctttttcactggcttttaatgggggtttctagaaagagaagcacttattcattgataaaaataaaacataattagacacagcctcctctgcccctcacctgatggagttttcagcaatatcaagaagaaccaccatactgataatgcaaatcttgattccctctgctccattacactcccttttagtctcacttttggtccatagcaattcagcaagctaaggagtcaggaagtagtaaggtcagccaactgtttcaccagggtgatgcc

SEQ ID NO: 6544 - DNA, 760 bp, Homo sapiens
tttgttcatgggctcattgggcgatgatgggtggctggggaaagaggctgagtggtgtccacagaacgggtcatcctatccacttgattattaaaatcctcctctgctgaggtcacttagcggagcactcacatggaatacaaatatcttcacagtttttgaccactcagagaggctccatccacatacctcttccccagatttctttttttctttcctttttttttttttaagacagattctcactctcgctcaggctagagtgcaatggcgcaatcttggcacactgcaacctctgcctcccaggttcaagtgattctcctgcctccgcctcctgagtagctgggtttgcaggtgcccaccaccacacctggctctaatttttgtatttttagtagaaatgaggttttaccatgttggccaggctggtcttgaacttctgacctcaggtgatcctcctgcttcagcctcccaaagtgctgggattacagatgtgagccaccatgcccaacccattttcctgaccctttctgtttgcattggaccttaactgttatttttctgcttatataaattaaataggaatgcagtaggctgcctatcaatttcacttctaggaacactgattaattagctaatgccagagttctacacgagtcagactattctgattgccactttgcctctgctgtctgttagggtagctatgcccaccttgcctttgacaattgagtgctgccacttggtstctgccaacttg

SEQ ID NO: 6545 - DNA, 728 bp, Homo sapiens
aggcacaaggctgcttggtcagcctgtggttctgtttctcaggccctggttgctggcacagggctattgggcaagccagaagcttatctgtggaggatgggataaaagagrgatgtttctcaggtcctgagctcaggcatgtagttgttccaccagctaaggagtatgtcagctcaggggcctctcccacttaggggaaggcatgcaacagtttggccagctcacaggggtattcaccctgactgggactgctagactgttcctccagctggaaattaaggcaacaatagtttgtttcactgatgtgcagaaccagagtcagctcatcctgggcccaagctctgcactactggagttgtggcattcagctacccttgtagacttgatgaagtgaagatggaaccccagtgctagcaggctataatggctactgacaccctgagcagggcaccccagagcagaggtttctctggtctcaatatggtacaaaactgcaacaacttggttcactgtggatggatgtgggtgaggattgcaaaccttgtgctcctaatcgaggacaatgcagctgtgtgaattcctggcagctcttcaaatcgggctcaggactttcaacaactgtgagattctcctgttgtaggcactgtagtgtttacaatggtaatgtggacaggtggagatcttatttttcccacaacaggaaatccccagtgactccaggcagatct

SEQ ID NO: 6546 - DNA, 728 bp, Homo sapiens
aggcacaaggctgcttggtcagcctgtggttctgtttctcaggccctggttgctggcacagggctattgggcaagccagaagcttatctgtggaggatgggataaaagagagatgtttctcaggtcctgagctcaggcatgtagttgttccaccagctaaggagtatgtcagctcaggggcctctcccacttaggggaaggcatgcaacagtttggccagctcacaggggtattcaccctgactgggactgctagactgttcctccagctggaaattaaggcaacaatagtttgtttcactgatgtgcagaaccagagtcagctcatcctgggcccaagctctgcactactggagttgtggcattcagctacccttgtagacttgatgaagtgaagatggaaccccagtgctagcaggctataatggctactgayaccctgagcagggcaccccagagcagaggtttctctggtctcaatatggtacaaaactgcaacaacttggttcactgtggatggatgtgggtgaggattgcaaaccttgtgctcctaatcgaggacaatgcagctgtgtgaattcctggcagctcttcaaatcgggctcaggactttcaacaactgtgagattctcctgttgtaggcactgtagtgtttacaatggtaatgtggacaggtggagatcttatttttcccacaacaggaaatccccagtgactccaggcagatct

SEQ ID NO: 6547 - DNA, 773 bp, Homo sapiens
agactctttgctggcttgatgaagtcaaaagccacgttgagaaagcccacatgccaaggtactataagtggccactggaaactgatggccacctccaggaagtcatgctagccaggaagctaaaggcttagtagctgagggctcaacaaatcagggctctcagccctccaaccacaaggaaattaattctgccaataaactgaatgagcttgaatgaaagttctttcccagttggcctacgatatggtaatgcagcctagctgacaccttaattacagcttgtgagaccctaagcagagggtccagttaagttgttttcagactcccgacccacagaaactgtgagaaaataatgtgtgttattttaaaccactgagtttatagaaaactaataataatcataaaatgagttaagatagtgtcaaagcattttgtaaactgaaaagccctatatatgtgttagatgttatcctcaaagtataccaaatgcttcatggagactttaaatgttgcataatcaaaaaagttacttctatgctttgaagagtccacaagtcattttttaaccaagtctttacataagcttccccaattttccttaaaattatagcatctccttttttattctgaccttgaagttctgacagctgtgtcactgattgcttttggtctgtgatatgcataayttctatattgccaccaacaaagacaaaatctggaatttaactgttcctccttagagaactatgaaaatcccagactgttttaactat

SEQ ID NO: 6548 - DNA, 773 bp, Homo sapiens
agactctttgctggcttgatgaagtcaaaagccacgttgagaaagcccacatgccaaggtactataagtggccactggaaactgatggccacctccaggaagtcatgctagccaggaagctaaaggcttagtagctgagggctcaacaaatcagggctctcagccctccaaccacaaggaaattaattctgccaataaactgaatgagcttgaatgaaagttctttcccagttggcctacgatatggtaatgcagcctagctgacaccttaattacagcttgtgagaccctaagcagagggtccagttaagttgttttcagactcccgacccacagaaactgtgagaaaataatgtgtgttattttaaaccactgagtttatagaaaactaataataatcataaaatgagttaagatagtgtcaaagcattttgtaaactgaaaagccctatatatgtgttagatgttatcctcaaagtataccaaatgcttcatggagactttaaatgttgcataatcaaaaaagttacttctatgctttgaagagtccacaagtcattttttaaccaagtctttacataagcttccccaattttccttaaaattatagcatctccttttttattctgaccttgaagttctgacagctgtgtcactgattgcttttggtctgtgatatgcataacttctatattgccaccaayaaagacaaaatctggaatttaactgttcctccttagagaactatgaaaatcccagactgttttaactat

SEQ ID NO: 6549 - DNA, 683 bp, Homo sapiens
aagcagtattcggaatgagaatatgatgatggaaaggtgaccttcatggcttctcccctgggtgcttttgccaatagtcttaaaaagcctacttttagtaaaatcttaattataggaacatgtatctgagtcctgaggccaccactgagcacctaaggcaatacttctccaaggaacatcagcaccaactggtaacttgctatgcaaatccccaggtccttccctagacacactaaatgctgagggtagggcacagccatctgttaattttgggcaaatagttagtgatgatattagatatataatatcagttatatatctgttatataacatcagttatatataatgtcagttaattttgaygcatgcccagatttgaaaaccactgacttaaagaatgactttgggcaagaacattgctggtgctttgctctgagaccatcttggagaagcaggcaactagagttggacttttcttgatgtggagacagtgtcaagatcagagtgtaccaaaacagagatatagactaatggaacagaacagagccctcggaaataatgccgcatatctacaactatctgatctttgacagacctgacaaaaacaagcaatggggaaaggattccctatttaataaatggtgctgggaaaactggctagccgtaagtagaaagctgaaact

SEQ ID NO: 6550 - DNA, 816 bp, Homo sapiens
aagtcatgggatgctttgatccgcaccatgtggtgctcggggaagagtatctgttgcactcaccgatgaaccatattctcaaatattttctctattatatttctgcatccagacttctttcagacaaattatttttacagttgtttccataaccttaaattccatcagatagaaatgtaaagctaacattgagagttctgtttcgtactcaagtgcattcccttcccgggaagggctattttgcaacttactcgactgtctctgcctgactttgaacttcaagcacaatgaatgatgattacaagaacacacacacacacacacacacacacacacacacatgcatacacacaagaggcctgtatttcatttcatattgccatcaggatgtatattcatgtattttatcaatttacattcatagagcatatgtacacaaatgccayttgtccctgacttataacacaacccacagtaagtgtattatgaacacaaaccaaggagcataaaaagtaaacacacagacacacagaactacacctgatcaaagatcattacgtctccctatgacttctgaataattttgctggaaatctaatataatttaaagataataacaagctattttgccctaccacagaaaataggtcttagaataaaaaaaaaggaaaagaaaaagaaaaaaaggtagaaaaacaacttgtaaaaatacagaaaggtgcccctcatacaagaaaggaataaaacaagggaactcaagtagctatagtgagatttatgaagccaaacaataaaaggatattctctaagcagtta

SEQ ID NO: 6551 - DNA, 806 bp, Homo sapiens
tagtagtaaaatatatcaataattgaaacaagaactacaaaacattccaggagagtttaacaagaaatgcatagtttctataagaaaaagagtataaaactactgcagaacataaaagacttgaaaaactagtttagttttgaacagaaagactcagtagtttaaaagtgttatttttcctcagattaatctacaaatttgatgttagagagccaaatcatgagtgaactcccattcacaattgcttcaaagagaataaaatacttaggaatccagcttacaagggatgtgaaggacctcttcaaggagaactataaaccactgcccaaggaaataaaagaggatacaaacaaatggaagaatattccatgctcatgggtaggaagaatcaatatcgtgaaaatggccatactgcccaaggtaatttacagattcaatgccatccccatcaagctaccaatgactttcttcacagaattggaaaaaactactttaaagttcatatggcaccaaaaaagagcccgcattgycaagtcaatcctaagccaaaagaacaaagctgcaggcatcacgctacctgacttcaaactatactacaaggctacagtaaccaaaacagcatggtactggtaccaaaacagagatatagatcaatggaacagaacagagccctcagaaataacgccgcatatctacaactatctgatctttgacaaacctgacaaaaacaagaaatggggaaaggattccctatttaataaatggtgctgggaaaattggctagccatatgtagaaagctgaaact

SEQ ID NO: 6552 - DNA, 806 bp, Homo sapiens
tagtagtaaaatatatcaataattgaaacaagaactacaaaacattccaggagagtttaacaagaaatgcatagtttctataagaaaaagagtataaaactactgcagaacataaaagacttgaaaaactagtttagttttgaacagaaagactcagtagtttaaaagtgttatttttcctcagattaatctacaaatttgatgttagagagccaaatcatgagtgaactcccattcacaattgcttcaaagagaataaaatacttaggaatccagcttacaagggatgtgaaggacctcttcaaggagaactataaaccactgcccaaggaaataaaagaggatacaaacaaatggaagaatattccatgctcatgggtaggaagaatcaatatcgtgaaaatggccatactgcccaaggtaatttacagattcaatgccatccccatcaagctaccaatgactttcttcacagaattggaaaaaactactttaaagttcatatggcaccaaaaaagagcccgcattgtcaagtcaatcctaagccaaaagaacaaagctgcaggcatcacrctacctgacttcaaactatactacaaggctacagtaaccaaaacagcatggtactggtaccaaaacagagatatagatcaatggaacagaacagagccctcagaaataacgccgcatatctacaactatctgatctttgacaaacctgacaaaaacaagaaatggggaaaggattccctatttaataaatggtgctgggaaaattggctagccatatgtagaaagctgaaact

SEQ ID NO: 6553 - DNA, 827 bp, Homo sapiens
caaaaaagttctggagatgagtggtggtgatagttgcataatgatgtgaatctacttaatgtcactgaattgtacacttaaaaatgattaaaatgggtggctcatgcctgtaatcccagtactttgggaagccagtgtgagaggatcacttgaggccaggaatttgagaccactctgggcaacatagcaagacctcatctctagaaaaaataaaaaattagctggctgtggtggcgtgcctctgtggtcccagctagttgggaggctgaagcaggaagagcacttaagcccaggaggccaaggctgcaatgagctgtggttgtgccactgtactccagcctgggcaacagagtgagaccctgtctcaaaaaaaaatggttaaagtggtaaaaattatgctatgtatattttaccacaataagacatatattataagtataacatggaaattgcagtttggtggtttttccactatttatattcactttttggtcaagaatctgcattaaaaaaatcaaaagatgtgcaaaaattgttggaggagattgtctattaatatagttttcatttatgtgtcttcttctttccaagtaatggtgagaaaatcttatttaaacagcactcaaggacacactcctactaagtaattttttcctgtgacttttgcacactaatatacaaaagaaaacatgcttaatgagtcaaatgagtatttgcaaaagttacccaataagcttgctgactgtggcaactccttgtagtwgtgccaggtaaccgagattttgcaattcatccacacacattgaataacactttttgtcttggga

SEQ ID NO: 6554 - DNA, 827 bp, Homo sapiens
caaaaaagttctggagatgagtggtggtgatagttgcataatgatgtgaatctacttaatgtcactgaattgtacacttaaaaatgattaaaatgggtggctcatgcctgtaatcccagtactttgggaagccagtgtgagaggatcacttgaggccaggaatttgagaccactctgggcaacatagcaagacctcatctctagaaaaaataaaaaattagctggctgtggtggcgtgcctctgtggtcccagctagttgggaggctgaagcaggaagagcacttaagcccaggaggccaaggctgcaatgagctgtggttgtgccactgtactccagcctgggcaacagagtgagaccctgtctcaaaaaaaaatggttaaagtggtaaaaattatgctatgtatattttaccacaataagacatatattataagtataacatggaaattgcagtttggtggtttttccactatttatattcactttttggtcaagaatctgcattaaaaaaatcaaaagatgtgcaaaaattgttggaggagattgtctattaatatagttttcatttatgtgtcttcttctttccaagtaatggtgagaaaatcttatttaaacagcactcaaggacacactcctactaagtaattttttcctgtgacttttgcacactaatatacaaaagaaaacatgcttaatgagtcaaatgagtatttgcaaaagttacccaataagcttgctgactgtggcaactccttgtagttgtgccaggtaaccgagattttgcaattcatccacacayattgaataacactttttgtcttggga

SEQ ID NO: 6555 - DNA, 621 bp, Homo sapiens
cctttctcattgtcacagtgattggtttggggtgggcatatctttcakatggaagccagtcaacatgtcctcagtcgtagtgattacctatttaagatcagtcaattagaataaaacataggacttctgttctaaggtcatggaaagcaactctgtctctatctctggccatgaacaaagtcgtctgtagtcccagttctgttggcagccactccatgcctgcaaggaaagccagccctcagaagaagccacactgtttatggaaagataccacatgctgataatatcaatgattaaccttgaagtacctttaacttctggactttataggcacatgagccagcaaattccctgatgagttaactactattagtcaccttttctgttacttgtagctgaaaatatccttcacagaacaatagccatcaaaacaccttcatccatttgacaacaagccatgagaaaatcctggaagatgatttttgagaaatgtcttcttaggattccctactgtcttgtttgtttttacttatttgagaccagattctttattgaaagtatatgaaaatgatttttaaatgaaatatttagatgaattacatttaattttacagctaataa

SEQ ID NO: 6556 - DNA, 589 bp, Homo sapiens
ggcaggtctggggttcaaatccagttgggtctaagtcctgaacctgacctcttcactatctcacaggtggttgtccatgtttgaatcaaagtctgaaggatggcatttgttttagatttctgaagcttttttttttttaaatttatatgggtacatagtaggtatatatatttatgggatatatgatatattttgatacaggcatgcaatattaaataagcacatcatggaggataaggtatccatcccctcaagcatttctcatttgtattacaaacaatctagttacactctctaagttatttttcaatagtcaccctattctgctgtcgaatagtaggtctcattcattccttctatttttttgtaccctttgactatcctcaccttctccccaggcccctactacccttccctgcctctggtaactatccttctactctctatgcccatgagttcaattgtcatgatttttagaccccataaataagtggagaacatgcgatatttgtatttctgtgcctggcttatttcacttaaaattaaygatctccagttccaatcatgttgctgcaaatgactggatccc

SEQ ID NO: 6557 - DNA, 788 bp, Homo sapiens
agggatgtacaggtatagaagaaaggacacagaagaaggcagccacctgcaagccgagaagagaggccttggggaaagcaaacctgccgagaaattcatcttggattcccagactccagagctgtgagaaataaacacctgttgtttaagcctttgggctcatgaaatgttatggcagccctagtggactaatgtactccttctcttctaaacacttctgatgatgcctgagtgctgatcttgtgatctctcctacctaggtttggagctgcaccatgcttcctcagagaaaatgccccagaagggttcatcatccatctgatgaagaacctagtctctcacttaagcactcatccgagcctgctagtcagctacaggatgcttgcaaagacgtttcagaccccaagggmatctatcaacctcttccagctgtttgcatgctaagcatgatacagaaagaaaaagatgacagtgtttgcctccaaggagcttaaaatcatacccaacaatagatattaatgacctgacttgagataatttagtgtatgtattgttttagaatctttgaattcctttctagtcctctgtttctagaacaaccacaaaaacatgtgtgaatccttagcatggggtcattgagagagggcttccttcacccagcttgcaatttgagcttctgttgtagacttggacattcgcagtctctgtggtccttgctgcagttctggcatgatagggttagaattcaccttcgcatgttcctacagccaggaaggagtggtgaagat

SEQ ID NO: 6558 - DNA, 1359 bp, Homo sapiens
tttctataggcttgctaaccatatagcaggattatttcaacaagttgggtattttccagaacccatgcaaagttttaggcctctgagcagctttagttagtcaaaatgacatacatgggggtccttttttgttagtagggctgtctaatgcagggaatggtttaggttgatatgtgccctttctgatatgttcagtttctctgtgtctggtatcaactttaacttcaaggagaactttgaacctggtggacaagaaatgagagtagaaaaggaaacctcgacttctcctatatcctgaaaaccaaactcatattgtcttaaatgtcttctatcattaatttctctctatgggtcctaatttgggaaaagaaaaatgtattttgtcatgtaacttcttctttaatagctccattcacaatcagacaaatattgaacttaaacccagtgatataacatgatcttgtttcccagtgtcttgccagaaatgaggagttgtatgtctggtaccactttatttgggatctataccaagctgagcaacacctgggggatgccagggaactctcccctcactgaaaaaagatattcaccaacagttgggaggacctaaaataaaaaggaccatcaggatatggcttcccagctcttactcactcaacaaatatttgggggatcctcttttgccccaggcattgatcttagtgctgggaataaagtgataaagaaaacacataccttggcctggaagcattcacagcttcacgtgttagccttcctctctgggatctttctgtcccggagacaagtctttttctctctgtcccagttgctttctattttaycaggaaggtggcaggtctttactgcggtgtttatacatctccttattgaaggacacctattaaagctgtaggagcagcaggacttaagaagaataaaaggactagagttttagatgactaaaaatgtaacagtcaacagcagctgcactgtgactgctaaaatctcttaagacatgtagaactgcatgaatgaaagtccagtctgtttctcatagaaatcctgttacattccactctggtcagacaacagctagagtatctggttgttctaagtatcacatactacaaggagaaaatgacaaactaggatgtgccagtaaaatattacacagaaaagtcagctcccgaagcaattccctgctacaagtctcactctctcgaaaacttaaagaaattgaaggttagaaaacaaagtgtgcattgcatgtattttaggtatttggaggattgtgatataaaatataggggttaggcttaaaattcatttcaaattttagcattaaaagagatcctatgg

SEQ ID NO: 6559 - DNA, 591 bp, Homo sapiens
gggaggcggaggttgcagtgagccgagatcgtgccattgcactccagcctggataacaagagtaaaactccgtctcgaaaaaaaaaagaagaagaaaaagaacaggtgttgtctctacgtcttatttgaggcccctatccctgccaaggatcacgctctctccaagaggcagaggtggcacctacctgtgcagttccgttcctgggcatccagggcgaagccccccgcacaggcgcagtggaagctgcccaccgtgtttctgcaggtaccgtgcgtgcagaggccagggaacaccttgcattcattcacatctgaagtacaggggcatcaaaccaccctgacgtccccaagctcaggatycatacaccaagccctccctgggttcttagtgcctcgccttacccacatccccttttcccccaaacacacttcccatctccaggcttttgcctatgccgtgcccctccccatccttccaggggcctgaccccttccccaaccgcacctttatagaatggtcggccagacaggaagtcccggctggcgaagcccagcccccgcgggcacaggctggcgaactccagagactcg

SEQ ID NO: 6560 - DNA, 640 bp, Homo sapiens
atgacaggtgtttgccatcatgcccgggtaatttttattttagtagagacggagtttcaccatgctggccaggctggtttcgaactcttgacctcaggtgatccacctgcctcagcctcccaaagtgctgggattacaggtgtgagccaccacacctggccacaatttttctttcttaaagagatggggtctcattctgttgcccagactggagtgcagtggcaccattgcagctcactacagccttgaactcttggacttaagtgatcctcccgcctcagccttccaagcagctgggactacaggagcatgccaccacacccagctaatttttgttatttttttgtagagatagggtcttggtatgttgcccaggctggtcttgcactcctggtcttgagccattctcccactatggcttcccaaagtgctaggattaccgacacaagccaccacactcgggctcagcgtgcaatttcttaatgtctatgcccctggaagctcaggagcctccrtaagctgggccatgtcccctgggtatccccagcctcctcccctattgcatcttcttggaaccattccctggcaaccacctctcctgtcagccccctcaaaacctacaaccaatactggaccatga

SEQ ID NO: 6561 - DNA, 807 bp, Homo sapiens
cctcacaccatctgctctccctgggaaattcacctgcctggaagctgcggccagcacgtccatgctgtcagtttccagatttctgctgctcccaggtcaccatcccgccaaagccaaacctgctgccccaatacctcccgtctgcgcgctgtccagacacgtcagggctgaagtcatctcccacagagccttctttcctcctcccctggcttcttggccaagatcccaccctccacccagtcttcagggacaaaattctgagagtcatctctgactccatctcacaccctctcggcactcagctcctcattaagccctacgattacgtccgtctttcccgcgacagtccctcctctgcccgatttccacggctcccatttcttgattgaatcatggtggccgcctccccactcagcacccaggtctttcttcttgcctgcaaatcagacccgcagctttgaatcctgcaagtgctcccactggcctggcackgtgctccccagcaaatggaccttggcacatgccattccctaccagtaatgccctcccttcagcctgccaaattcctcccagctcttcacgactctgttcaacagacacttcctctaggagggccgaccaatcgccgctgggctgggttaggggacactcccctcctgggttctcctacctcatctttctcagaacttttggggcaacaatttttttttttttttttttgcgatggagtctcgctctgtcacccaggctggagtgcagtggcacaatctctactcaccgcaatctccgcctcccaggttcaagcga

SEQ ID NO: 6562 - DNA, 839 bp, Homo sapiens
attttacctgggggaactgagtggggcaggagcaaccaaccgaccatttgttcattcggtagccatttctttttctttctttctttcttttttttttttttttgactggctctgtcacccaggctgaagtgtggtgacacaatcacaactcgctttagcctctacatcctaggctcaagcaatcttccctccccagcctcccgagtagctgggaccagagacgtgggccaccacgcccagctaatttttgactctttgtagggttgagggacctccctgtgttgcccaggctggtcttgaaatcctgggctcaagtgatcctcccatcttggcctcccaaagtgctgggattccaggtgtgagccaccactctcggtgagcagctgtttcttgagccccsgctgcgggccagaccaggcccaggtgcaagggacatacacatgacgtccctgcgctcaggctctgtgtcttggtggcacttagaggacagggtgacagtctccctcagccttttggacgctgcttttcctttgctgccttttcctggatttttcttgttatccgaaagaccgccagggtggctaaatggtagaaaggagagcttggcgggggtatcagtttgcaaactggaagagacggtctccagtgtgtgccaaaggtaacccctcttccaagaggggaggaacaggctgggttttatgcctaacagggcctgtagcccacaatagttgtacatattcagcaggttcgggaggaagtgatatatatttatgaagggagccgagtgcatgggcagtgggtaaacacatgtgacatacatataacgtatatcacatgtt

SEQ ID NO: 6563 - DNA, 746 bp, Homo sapiens
ttcccctctctgaatcctggccatgcccggacaatgcagaccagctctctgtaacggtgagacacgtcagacgcccggggccggccacaagaacccagcccattgcacatctactctttaggatcagattcaaattgctggcaatctctctcggcctttgaggctgcaaaatcctaaagttactctttggtgtcttctcatcattttaccagtcgactttgtgaaaacaaaaacaaaaagaaaataacatagaacatcagactggaaaatgatttttgagctctcaggaatgatgtagctttagtgaatgagaaatttcagactctcccctcaaaccctccccataattgtattgaggtcagggtagaaaactagaagctgcagatctcaaaaaaaaaaaaaagaaaaaagaaaagaaaagaaaagaaagaaaaatgaaagagcagcaatctcaagttttattttgcttgatacaatttgcacctctattttgaaccctaaacacaaatttcaggatatcaaaaaacatatgataagctaatttttgaataatacagatattcaagtaatatactcratgtttttcttcaccctcaaggacgcttttctgatgaagtattgattaaacttaaaggattaggccccagttgtgaatctgagaaaggagactgtatctatgatccagaacatctggaaacacgggaaagttgtttattatagtttgatctgatgtatcctgattttct

SEQ ID NO: 6564 - DNA, 779 bp, Homo sapiens
ccatcttcttatttcagcacacacactcctgccctcaggacaaggagggcaaggattgctggatgcagccttccctttgctgcagctgaaacagcctcctggcctctagcctccagcccagcctaggaggacaggtcatcctctttcccggagggatctgacaacagatgggtcatggcctccagggacccccgaggagcagcagagcaaggctctgcagggaggaggagtaaccaggctcgctgcatgagctgggcctccatttctsccactcctacccccaaaacagctcaatcattcgtgactgagttcacagcattccgaagtaaggaggcagaaaaggagggaggaggggagagaagagagggacatcctttcagttctcacttctcttcaggagaaggttgactcaagagctattattaatagtaaattaaatagtgcagttattctgaataataaaaagctcttctgttccaagttttcactgtcctctctcgagggaaatacctgctgtggcctgagatgtggcatctagtgaatagcattaataggacaaagcagatgctcccgctgtgcccagtcacaggccaccaagtcccctccaaaatgcctcctccacccgagcatcagggtgcagggagaagacaggcttcaggtgccccagacaccccagatcaccccgcgatgatcacaccacagagcccaggctatgttcacctcagggtggaaaccttgtcgatggcatccctgctggtgaatagtggtcctcccacttg

SEQ ID NO: 6565 - DNA, 616 bp, Homo sapiens
tccctcacccctcttcctcccccttctgtcttccccccacaccacaccaccgcctccactctgggctgtcccctccgcagcagcgggcccctggatacccgtggaccgtccccaccccagccagggcagtgctgtccacgcaggtgcagtatcgtctcagcacctgtgggaggtccgttcccagacgtcctgccttggtggagtgagcagaccccgaagcagccacaaggccgygggggctgcagcaaggtcccagggcccatgcgggaggcaggccgctcggaccacctgtggcttccctgcactccaggctgggctcagggcgcgggtgcgtgaccctggcctgtcatgggcactcagcaactgttcgtgtaccagccgggttaaggtgtccttctctggatggggcgcagggctcgctatggggtgctggggcggctgtgtcctctggtctgggcagcgctttctccttccgtttctgcatcagctgcctgcctgggtggggtccgcaggtgcgtcagccaccccgggggctcccccagcccaccttgagctgacgctggcagcccacctgggtgcccttgggatggggagctggccctggacctggcctgct

SEQ ID NO: 6566 - DNA, 616 bp, Homo sapiens
tccctcacccctcttcctcccccttctgtcttccccccacaccacaccaccgcctccactctgggctgtcccctccgcagcagcgggcccctggatacccgtggaccgtccccaccccagccagggcagtgctgtccacgcaggtgcagtatcgtctcagcacctgtgggaggtccgttcccagacgtcctgccttggtggagtgagcagaccccgaagcagccacaaggccgtgggggctgcagcaaggtcccagggcccatgcgggaggcaggccgctcggaccacctgtggcttccctgcactccaggctgggctsagggcgcgggtgcgtgaccctggcctgtcatgggcactcagcaactgttcgtgtaccagccgggttaaggtgtccttctctggatggggcgcagggctcgctatggggtgctggggcggctgtgtcctctggtctgggcagcgctttctccttccgtttctgcatcagctgcctgcctgggtggggtccgcaggtgcgtcagccaccccgggggctcccccagcccaccttgagctgacgctggcagcccacctgggtgcccttgggatggggagctggccctggacctggcctgct

SEQ ID NO: 6567 - DNA, 616 bp, Homo sapiens
tccctcacccctcttcctcccccttctgtcttccccccacaccacaccaccgcctccactctgggctgtcccctccgcagcagcgggcccctggatacccgtggaccgtccccaccccagccagggcagtgctgtccacgcaggtgcagtatcgtctcagcacctgtgggaggtccgttcccagacgtcctgccttggtggagtgagcagaccccgaagcagccacaaggccgtgggggctgcagcaaggtcccagggcccatgcgggaggcaggccgctcggaccacctgtggcttccctgcactccaggctgggctcagggcgcrggtgcgtgaccctggcctgtcatgggcactcagcaactgttcgtgtaccagccgggttaaggtgtccttctctggatggggcgcagggctcgctatggggtgctggggcggctgtgtcctctggtctgggcagcgctttctccttccgtttctgcatcagctgcctgcctgggtggggtccgcaggtgcgtcagccaccccgggggctcccccagcccaccttgagctgacgctggcagcccacctgggtgcccttgggatggggagctggccctggacctggcctgct

SEQ ID NO: 6568 - DNA, 801 bp, Homo sapiens
cggaagggtgagggagaggtgagcagctaaaagcaagaggccaggtcaatgttggcacttggagttgctggagtctcaggtgccctgtcccactcctcgcagtcagcatgagaaagaggagagaggcttgtccagcaggcacaaagaagggcaggaataaggcaactgcaggaaaggaaagagtgtgaaagattgcaccctaagcagttactcatccagacctcttcccctgaactacttccagaacactggcagccaagtgaatgcctcctcaggcaagagattataagatatttctcatgagaaactgacaagccccaaagaaaagacatctagcttctgacatttgaggtatcttcccatgaaaaaatgagctttcgtctgatcaccatacagcaaacccaccagtgagcaagcacatttttctcacccacatatagagtttctggtgargtttctattacctcattcctacttatgaaaggagaggaaaaggtttgcagacagttgatgaaagcctctaacgtgatgggacgaaaacaaatacatgagaagggaagctagagaaagccaagacaaggcaggaggcaaagaaagccctacagtaagtaaatactctcaaaagatagaaaaaactagtgcgactgtgacataatcactaaattctctttataacagacagcatgaaatgagctctttaaatagttgaggtaacaactgcagtagaaagtaaagcaagaaaatatcttccaaaataggacaaaaggtgaagacatgtgcaacaggaaaaaaaaaaaaaaa

SEQ ID NO: 6569 - DNA, 778 bp, Homo sapiens
agcctgagtgaatgtttttttagagccasgtctgatagaagcctgtttttaaggaattaccaggaactgagcatgctgtttttggccctcaggggtttctctcagaactaagaatttgggggctgtcctcagtcacaggtgcagcctgaagtctgttcccgccatgttcactctcctctatttaccatcacctgcccctgctgcgtcttcctttaaaatacagccctgggccctaagctttgtgctgattcaagctctttggaattcaagacatccaggaatccgacgctccaagaattttcccaacgacctctcagtgggccattcaggcaggaaaggatacacacattcctaatggggccaggggctgtgacttagcctgtgtgtggctgagagcctgctgaatacaaggtgctggcagttggcagggcttcccagggtggggacttcttgctgagctcatcagcaggcccagctctgtacccatttgtccagggaaaaaccaacccctaatggaactgtttgttttatactctctcatcgaagtcataaatgactcacaactagaatgttattaacgtgagaacagaggcctacctggcagaataattggttttggtcatttgctcagagtgccaggcaaatccacaaagcatatcaaattacaggttagaaacctgatgaataaacaagaataatactgtgagttctcaagggtacgtcctgtacctgttttgcccactgtcatatctccggcaagacacagtgaatacagccc

SEQ ID NO: 6570 - DNA, 765 bp, Homo sapiens
aaaggaaaaaagagacagtgttgcacaccttccttcaaagataccttgcttgagctaatattttacttccaagctttttttccccaattgggagtatgaaagaaggctttggctcaggttaaaatgctcaccaatttcaaattcattccgtcaaaatcaataagccttcaaatcaaagcacctttctttttcaaaatattatattaaatgcagacattgaaaaggttataacattggctctttgggtttccataataatgcaagaaaatctttcccaggagatcaatgcagacaattaatgatcccttatcttatctataaatcttagtgtgccaaacaaatactatagcatatagaatagcatcggattacttattaatattatagaattttagcaagataaattccctaaagatatcattatcaactcaggaacattatttttagaytgttacatgtccttacaccttttaaataacaaccttagttcagtatgtcaagatctgctaaggctgagctatttggattaacagtaatctcaaattctgaggaacaaaacctcaacgtgacccaatgagaacatttacaaaacaagaacactttatttcatattgcaagactcccattggtctccagaagtgtctaatgcactttaaacaacttttatggaaacaactaaaccatggcactttaatcaagtattacttatgagaattgaagaaccaacttcttgaacatcaaattaaattccaatgccctggggta

SEQ ID NO: 6571 - DNA, 669 bp, Homo sapiens
taactgctttagcaatactaagccactccttgccgtgtgatttcagtgtctttccttccagttggaactcctctctgccctttagcctgattttcttgtgtgtaacatggcaaattatttcatggctaatccttcttacagacctgaaattgttctttttaaaaaaaactttggtgggttttgagatcccctcctttgattctcagatgtggctgttagtagtttaatttctgtatgtggtttctgagtagcttccaacaacctatttttgttaacagttctttaaaaaaaaaaatgctcgagagaaaggaatcttaggaacggattccgtctgtgaaatgcaagggagaattttggccaaagtagaaggaatggaatggatgacataaagggtgacatttgtgctcagagttgatttcttggtgatagtctcatgtctaatttgaggttccagaagccctttaaagggtggatgagctgcayaaatggatgtgagggagttacacagtggtgggttcagcagaaagtaaaggagcagcagaatcacagagagaagccccgaactctggctgcccgggcccaaggaaccctcacccttagcgggactttgctacctttgcactcttttaacctgggtctagagctcatggatctggcaagggatgaaaa

SEQ ID NO: 6572 - DNA, 635 bp, Homo sapiens
gagtggctcttgccattttacctcttcaaggagcctgaatctaaagccaacacagcaaaaggcagacccaggaggtggagagagatcagctgcaggtgacatccttgcagccctgaatcaagcttgttcactagattcttaactacaagagacagagaggaaaacaaaatccctttgctcaggtcagttggagtcagggttttctaayatttttgcaagcgaacaagtctcaagtgattcgctctactgtttaaaaatgcatatgatgacggcatgtgtgtaccgagctggggcagaggttagagaaatttaaaaatgcgtatgaataacagcatgtctctacagagctggggcaaaggttagagaaagcgatctatgtaaacgagctgccaggcccgtacacagtaggtgctccgtgaaggctgtctccctgccccgtcctcaaatatctgcttcttgatctgggcttcaaagctgatcccattctctctccagtcacctctcaaactcctccttcttttctgttaagtagcaagtctggtctttccttctttccgagcagaacccaggctttacagttaatatcctgccgcctctgattgcagctttaagaggtgtaacatttgataagctcc

SEQ ID NO: 6573 - DNA, 584 bp, Homo sapiens
tccgattgggggagggaaggagggcactgaggggaaggctgggtgggtcccagccccctgagacgtgagcagcctccattctaaatgatgtggaagagccggcaacccagacacagctgctctgcaagcccatctgcccagctcagggctcaacctcaggacacgcccactcctcctggtccaaacgaggatggagcccctcgagcctgtgctcatgggcactgtctcactccatccgagcactgcttaaaacacactggataaatgcggatggctgtcagacgcttttaatgaggaaatattagaggaatattagaggaataatgaggaaatgatagaaaaatcagagactgtgtttttttaatctacagaatctattggcctagatttgccagacattcatttagaaacaataaaaataactgtaagggtgwctacatgacctgcagagcctaaaacatttcgtatctggtcttttacagaaaaatgttgccaaccctcgccctcccagccgccagaatttggattaaaagagactaaaacgatgtgacaatgaaatgcaatgtgtgagcctgtctcgaatt

SEQ ID NO: 6574 - DNA, 827 bp, Homo sapiens
ctttattccttttacttttagccaaatgagttagaatcaaaaccttttcttatatgttaggtggcattcaaggaggtgtactctttcccatcctgaacatggggtcaaaataatgtagaatttgtgatattggtgtggggccagttagaaaaattatgttattagacaaaaactatcctacctcatgtcgtaattctgtttatgttaaaaataaagaggctgggcacagtggcttaggcctgtaatcccagcacttttggaggctgatgtgggtggatcacttgaggccaggagttygagacaagcctggccaacatagcaaaacctcatcactactaaaaacacaaacaattagctgagcatggtggtgcatgcttgtaatcccagctactcaggaggctgaggcatgagaatcgcttgaatccgggaggcagagcttgtagtgagccgagattgcaccactgcactccagcctgggcgacagagggagactctgtctcaaaacaaacagaaacaaacaaagcaaacaaactacccttcctattctgtgtgtgttggtatgcttgcatgcaagctcactgtgtgttatgtgacctgtcatggagatgcctaaagaagttgtgtttaagggataatgaatttcatctcataatttttttttattatactttaagttttggggtacatgtgtacaacgtgcaggtttgttacatatgtatacatgtgccatgttggtgtgctgcacccactaacttgtcatttaatattaggtatatctcctaatgctgtccctccaccctacccccaccccacaacagtccccagag

SEQ ID NO: 6575 - DNA, 759 bp, Homo sapiens
ggtaataaatgattattgttttaagcattaagctttaggataattaattttaatttttattttatgttttttgagacagtctcactctgtgacccaggctagagtgcagtggtgtggtctcggctcactacaacctctgcctcccgtgttcaagcaattctcctgyctcagcctcccaagtagctgggattacaggcatgtgccaccacacccagctaatttttgtatttttagtagagacagggtttcaccatgttggccaggctggtcttgaactcctgatctcaggtgatccacttgcctcgggctgccaaggtgctaagattacaggcatgagctgctgcacctggcctattttattttttgaaacagtctctctctgtcacccaggctggagtgcagtggcgcaatcttggctcattgcaacctctgctttccaggttcaagcaattctcctgcctcagcctcccaagtagctgggactacaggcacacaccaccttgcctggctaatttttgtgtttttagtagagacgaggtttcgccatattggccaggctggtctccaactcctggcctcaagtgattggccttcctcggcctctcctaaagtgctgggattacaggcacgagccattgcacctggccactgtttggggctaatttgttttgcagccatagtaagtggagcctgcaggaaatgtggaaaccatttaaacacagagtatcaaataaataatgataaacatggctaaaattt

SEQ ID NO: 6576 - DNA, 759 bp, Homo sapiens
ggtaataaatgattattgttttaagcattaagctttaggataattaattttaatttttattttatgttttttgagacagtctcactctgtgacccaggctagagtgcagtggtgtggtctcggctcactacaacctctgcctcccgtgttcaagcaattctcctgcytcagcctcccaagtagctgggattacaggcatgtgccaccacacccagctaatttttgtatttttagtagagacagggtttcaccatgttggccaggctggtcttgaactcctgatctcaggtgatccacttgcctcgggctgccaaggtgctaagattacaggcatgagctgctgcacctggcctattttattttttgaaacagtctctctctgtcacccaggctggagtgcagtggcgcaatcttggctcattgcaacctctgctttccaggttcaagcaattctcctgcctcagcctcccaagtagctgggactacaggcacacaccaccttgcctggctaatttttgtgtttttagtagagacgaggtttcgccatattggccaggctggtctccaactcctggcctcaagtgattggccttcctcggcctctcctaaagtgctgggattacaggcacgagccattgcacctggccactgtttggggctaatttgttttgcagccatagtaagtggagcctgcaggaaatgtggaaaccatttaaacacagagtatcaaataaataatgataaacatggctaaaattt

SEQ ID NO: 6577 - DNA, 798 bp, Homo sapiens
ttatgaagagattcttatatttttaagggaagggggaaagaggaaaagtcagtaaatggcacagggcagcaggactcagggaaggaatcagagaatgggtgttgtctggatcgggaggctatggtggacagttctgtgagtttcagcagcaatgccacatgacataaagcagtcaagcaatgtgaaaactgagacaagcccactggatttcagagatacagtgcgtggccatatggtaagtatctcagtggaggtgggatggtattgctcacctaaatgcataatttcaccattgaaagattaaactcttcctcycatgcaatagaggtggcttccctcataacaggcccacagtataacaccttgaggacagaacaaccacagcccacccatgatgtaagaactagtccacacagcaatggaaaactcctttcatcatgggtctgtcatgagcatatctattgtgaatggagcatgaatgggtcagagaaagaacaatttcttcttcccaaacaactttgccttcatgaaaagcttaggttattgatgaatttcttagggcaaccatattgcttggtagctactctatggatctagggttataggataggaagtcccaaacccagaatcgcaggatttgaaaatcgtaagaagagataatcttgatgaatcttcttattttaaagataaaagaagacctagtaagattaagctatttggtcaaggtaatttttttttttttttgctatgattgggtcctagctttctggctgactgcttctcatccagaaccctttt

SEQ ID NO: 6578 - DNA, 1456 bp, Homo sapiens
ggttcaaggccagcctgggcatcatggaaatggcctgtctggccgggcgtgttggctcatgggtgtaaccccagcactgtgggaggccgaggcggatggatcacctgagatcaggagttttgaccagcctgaccaacatggttaaaccccatctctactaaaagtacaaaaaccagctgcgtgtggtggcacacacctgtaatcccagctactcgggaagctgaggcatgataatcgtttgaacccaggaggcgaaggttgtggtgagccaagattgcacccctgcactccagccttggtgacaagcaacactctgtcaaaaaaaaaaaaaaaaaaaacacacttcacctttacaaaaaatacaaaaattagctgggcgtggtggcactcgcccgtagtctcagctactcaggaggctgaggaggaaggatagcttgagcccasgaggttgaggcttcagtgaggtgtgatggtgccactacactccagcctgggcaacagagcgagaccctgtctcaaaaaacaaaaataagaaaataaatgatatgtactgaataccactccatcctaacaatgaagcacatcttactcaccgctgtataacataacgtgagggtgtcatccccactctaagaaataagggaaaagaggcagtaaacttttggagaattctcaggtgaaatcccaggtaaaatttcattattgtcattgtacttgtaaaaaatacttaaggccgggcatggtggctcacgcctataatctcagcactttgggaggcccaggcaggtggattacttgaggccaggagttcaggatccacctgggcaacatagtaagaccctgtctctactaaaaaaaaatacaaaaattaaccagtcatggtggccggtgcctgtagtcccagctacttgggagactgaggcaggagaattgcttgaacccaggaggtggaggttgcagtgagccgagatcaggcatctgcactccagcctgggcaacagagcaagactccacctcaaaaaagacaaaaaaaaaaaaaaaactataacaaatcatgagctctaaacaattttagagtaagtaacataaatctgtatccatatgaaaagcacttgttcagtttggcctagggtctatagtgggggtcttgtcctcgaagagggcatgcgctctggggacagctggatgacctgagcagtaaaggagacgaggacagagggcgctgtgagtgccgggcccagggactgactccccattcttgagtccaatgtgcttttgttctgcccagctcttggaagactcggccccccagagtcttggcagtgtggatgtgacagggtccccagcgggacatgggcacaggaagagctgggggagggtccccaagcatgggctttcccatcagggagccaacagagcaaaatgtttggagcgtgacaaaatgttaacatttaaa

SEQ ID NO: 6579 - DNA, 564 bp, Homo sapiens
aaaaactacctatggggtaccatgcttattacctggtgacaaaataatctgtacaccaagccccatgacacacaatttacttacagaacaaacctgcccatgtatccttgaacctaaaattaaagttaaaaataaatacataaaaataaaaccactgagctttcagttgatttgcatcaactatttccattccacaaaccagacttagtgctttatgataattgaaagaaatcattctttgttgttgttgttttgttttgagatggagtcttgctctgtttcscaggctgaagtacagtggtgtgatctcggctcactgcaacctccgtcttctgggttcacgcgattctcctgcctcagcctcccgagtagctgggattacaggcgtgaaccaccgtgcctggcctccttttcttttcatattttttcataggcctagaccaagatttctcaacttttttttttttaatcacccactcaataccccttaagagatgtcttttcctaaacctcactccacctattaaatattaatgctacatatatcctggatatcttgctatg

SEQ ID NO: 6580 - DNA, 779 bp, Homo sapiens
tcccttgagcacaggaggcaggagtttgcagtgagctgagacagtgccactgcactgcactccagcctgtgcgacagagcaagaccctgtttaaaaaaaaaaaaagaagaagaccggaaggatggggtatacccacattttgtataaacagatgtatgcctatatgacttcacaattacatagggacggtcgctgctattcatagtctcattctgttatatatccctctgcacacacagactcctgcaaacccacagatatgcacccataagcacagkgctcactgcatatgttttcatatgcacagacttgcattcaacaggcaggtaaatatatacccagaaacgtgcattccaggtagaggggggattgtcttgaagagaaaagcctttgttaacagcacagtggtcaaatttttgatgggaaatggaccctaccctgtcagacctgccttcctgcctcacattctcctagacctctcagccctccccctccacccttagactttccagggagtgaaaagtagaggagaggatcttgataaaggatgtaggagccaagccaggcatatgccagcaatcccagctatttgggaggctgaggtgggagaagcgcttgagcccaggagttagagaccagcctgggcaacgtagtgagacctcgtctaaaaaaaaaaggatgtaaggttttgatatgagttttgcatctgccaggaaccctcagtgtattattgggacaatcactgaacctctccttttccccagttttaaaatgaggct

SEQ ID NO: 6581 - DNA, 782 bp, Homo sapiens
aggattagaataagacttcatcaattgctacagtacatctatttagcactctgccattaatttttaaattatgttccaaggaatcctaaatgtcctctcaagatattcaaggctgttaagaggattgagggtgggtgggggaagagaggagggagaaagaccgcaaggtagcctcagtccctgttcatgtcttgtctgtcgtgctcacctgccaaatttaagcccagcatacactcttttagctattttatgtactgcattaggattccacatactatttctcascttaaaaaaaaaaaggttcaaaaaccattgaacatacagtgtgctttctccaatgtcctactgaaaccatcccagcttttgtctatttataactaattgacatttacatatgttaattgatcctaccactgaagaatgattaatagaaaacaaatcattgtacatctttacctacatcgtccttagttacagacttggaaatgctctggtggaaattgattattcagaggcatgtgaggccgatccatcagaaaaggaaagaaggtgcctgggatattgctgcttgctttctctcaaaaaataaattaggtttagacaagatgatcatttgatgtgtgatggcccttggatgaacaaaatatattcatttaacttccttccaaacagatgattttctcaatcagaggtaacaggattgactttcaaagtagggcttgttcactctttttctcatttattaaccaactacaggatttatggcctcgtagtttttctat

SEQ ID NO: 6582 - DNA, 782 bp, Homo sapiens
aggattagaataagacttcatcaattgctacagtacatctatttagcactctgccattaatttttaaattatgttccaaggaatcctaaatgtcctctcaagatattcaaggctgttaagaggattgagggtgggtgggggaagagaggagggagaaagaccgcaaggtagcctcagtccctgttcatgtcttgtctgtcgtgctcacctgccaaatttaagcccagcatacactcttttagctattttatgtactgcattaggattccacatactatttctcagcttaaaaaaaaaaaggttcaaaaaccattgaacatacagtgtgctttctccaatgtcctactgaaaccatcccagcttttgtctatttataactaattgacatttacatatgttaattgatcctaccactgaagaatgattaatagaaaacaaatcattgtacatctttacctacatcgtccttagttacagacttggaaatgctctggtggaaattgattattcagaggcaygtgaggccgatccatcagaaaaggaaagaaggtgcctgggatattgctgcttgctttctctcaaaaaataaattaggtttagacaagatgatcatttgatgtgtgatggcccttggatgaacaaaatatattcatttaacttccttccaaacagatgattttctcaatcagaggtaacaggattgactttcaaagtagggcttgttcactctttttctcatttattaaccaactacaggatttatggcctcgtagtttttctat

SEQ ID NO: 6583 - DNA, 885 bp, Homo sapiens
attcacatataggccaagaggtgcctgcgtataataggatctccgtgtattttggaccaacattttggaacaatgaacattatgatgggttcaggacatgctaccccaaaatgttaccttggcatatcgaatgtttaagctgaagaaatttgagaaaaccacagaagcaggaaggtctctctgaccttccccctttcttcccccactgaagcaagtcataaaacctaggaaggattttcagaccttccctgaagcaggtcataagaccctcaggtgagaggtgcctttcctataccatgaaggaaaggagcattcttatctctgaagacacaggaacmcagagaagaatctgagcaaacatgtcttgcttagtttactaccattagatcacaccccttttgtgctctcacatttcttcatgactcttctctcttcatcaaatctattataaaaaaaattaaagttacctgttttttgcggtctttattttcttatgaaggcccccctgctacataaaacttatattaaatatatttgtatggcttttctcttgttaatcttttgttacagtggcctcagcaacaaacctagagtgggtagaggaatatttttcttcctcctacaaacgttagttacttggtgcaagacgaagctgccctcagtaacctacttgttcaatccattcaccaaacagcgatcaacaataataaccaaatatcttttatgagtagacagagagggaaatcggagatgttcagacaggagataaatgactgcttgacaaataaattgtaaagcagattccagcaaagactataaaatcagagttttagaaatgtagaggccatttcttcttggaattctgtgcttgtagccataagattt

SEQ ID NO: 6584 - DNA, 789 bp, Homo sapiens
ggatcccgctgtgctgagcatgtctggggctgtgggctgcggagcctctggaggctgaggggtgcttcaggcagggaggtgtgcttggtgtggcactgtcacttagctctagagaccctggccagcccccagggacacagaggtgcctgggaaacagtggaagagaggttctgtctagtgccagtccccagctcgtgtctctgacatggctgctgccctggccttgtggctggccgccgagtctgaggaggggacatgaggctgtctttcctacccgaccacagcaggagggggcctgccagcagtggctggggtcactggggcagtccatggagaagggccctggggggtcccacgtttggctccgcatcgcacagtcagggaaactgaggcccagggcgagggtctgaggctgagccagcctcacacaccacatggaggcagagctgggacctcgccctgggcccacctctccttctgagcccctttgggtctctgtgcctgcagacactgggggggccgctcctgtgggtgttgccttcgttgtctgtcyggcaggggtgtggggggcagggccacagctgcgcccagtccggccaccctcagtgaccacctccatccttttgaagggcccttctttgtcctgtgtcctgaccaccatgtgagagtgatgacgggtccccgggatgcaggaaatggcccccaggccctcaggcaggcttcgggggcaccccagggagaggcggccccggaaacagactcttcaccgccgagccccagcgtgtcctc

SEQ ID NO: 6585 - DNA, 757 bp, Homo sapiens
ccaggggatgtgaggacaggtgacatgcaaactcctgttcacttgctgaagcggggggcattaacttgggttggagcttcctggtagccaaagcaaagagagaacctcaatctcttgatttgcagtgtctcaagtgacaggctgtggcttggcttctctcattactgagacccaagaggagcttctcctaagaatccttcctatgtgctctggccagtggtgtcccaacaggggacactgagagtgttctgccatctgggaaagagggattgtcagtcatctagtccagcttccttttttttctggctgaaggaactgaggctgagagaggagtgatctgtccaggttatatggcaaagtcacagtggtactaggatttgaatccaggcctccagagccccaggctgggatctccctcacccctcactgtgtggagctgggggaggcaggtgctttggaggtctgcagggttccaggcccacaggggtggtggtgtttccaggacacgggccctaggctgaggggtgcggggctccctgggggcagtgccacacgcacggggcctgaaggccacacacctgggcaggcrtgtgtgtgtgtgtgtgtgtgcacgtgtgtgtgttgggggaggcgagggacctgctcaggttgctgggggctgctggcctgtccagtctctgcacaggatgtatctgccccaaatctgaaatcccgcagcaaagacctccctcttccggctccaggtgggctcttagga

SEQ ID NO: 6586 - DNA, 425 bp, Homo sapiens
  misc_feature (1)...(425): n = A,T,C or G
cacagcggtgaggagatggtcatggaggacaagcaccccgaatcagcagcagagctctcctcctacacaaggagcaagtatcacgggcacctccaggcaaaaggcaaagatgctaaactgctaataacaataaggaatagctgtataatagcagactgcataggagctctacaaatacaactytttaaaacccacaaatcataaatgaaaagatccctaaatatgatgacattgacccaaaaccctgcactcagccaaaacaccatcaacaaatttatagacaagcctcagctggggaagtgatactcgcaaaacctgtaacttaccactcaccaaaaactagtgtccacatttaaggactcctacacatcaatgaaaacaatgagaaaatgggggaaaagggtatgtanaggttaattcacaaa

SEQ ID NO: 6587 - DNA, 788 bp, Homo sapiens
tactctgtttggaaccctatcctcttacaacttgataaactactggaagtaccattatagacacctcctcagctctctgccactgccaggcccccagatggatgtctctaattggcacttgtcctagctgccttgctgccaggagacagaccctaaatgttctggctgtcaccaacaccactggtttgctgttgttgctgctgctaatgatgatattaatagcaactgatacttagtcctgatattaactgatattaataacaactgttacttagtcctgtactaagacagaccttcctgagtgctctacccacaattacatgtacatacacatgtatgtacatacacacacacacacacacacacatacaagcttaaccaatttaggtatttgttctgcayaggtatttattattgtaacaccattgtatagataaggtccagatgtgctgtaaaccctgttctaacaccttcaaccactgaagaatggccagaaactaatgttctaagaaactaatatggcaacatcatcgtcaacatcactgtcaccataatcattatcattgccataacaggaactatgtttaccttcaaactaagctatttaacatttaacataaacattaacatatatttaacatttaacatatatattaaatagcttagttctaagttaaacatagttcccacatttggaaccttcaacatatgttaaattactcaatgaataatagctcattaatcagtgggtttgcaaagtatcagatgctgcactaagtgcaaagaat

SEQ ID NO: 6588 - DNA, 673 bp, Homo sapiens
tttgggttgtgtgcttgctactacatgtccatgcctatggggatataaaatcgctgccagttcctctatttacctcaacatcttcattactgattaacattttcccactatggacttaaatacttaaatttatgttgaaaagaagttttgcatttgctatttattattttctaagtatacttcccctattttttttcttaactttcatcaatggagtcactgctttttaatctagttattagctgtcttcttgactaagtctttctaccacatgggcttcattttatggccatagttatgagagagcgtagagcaaacaggaaacccaggctttggcttcggtcagcatgattgtaaatacacyggcaagtcattttcttacaaagagaaacaataaaatacaggactatgctttgcagtaactaaatgaaaactaacactcagctctcttttggtcttaattgaatatttgttacttgtgcaagaacagagtagtactaggtttaatacatgggtagaattgtgaattatttgactgttgcctgtgtctctgtttattctgggggaaaatgtgagaatcttgggaattgaaatattataccttgctgtgcagtgaggtcaagccttgaaatgaactactgtgtgctctccatcctggtggggataaaaggga

SEQ ID NO: 6589 - DNA, 801 bp, Homo sapiens
actaacacaaacatgaagacctaaaaaagtaatcatgggccrggcgcggtggctcacgcctgtaatcccagcactttgggaggccaaggcgggcggaccacgaggtcaggagatcgagaccatcctggctaacacagtgaaaccccgtcgctactaaaaatacaaaaaattagccaggcgtggtggcgggtgcctgtagtcccagctactcgggaggctgaggcaggagaatggcgtgaacctgggaggcggagcctgcagtgagccgagatcgcgccactgcactccagcctgggtgacagagcgagactccgtctcaaaaaaaaaaaaaaaaaaaaaaaaaaatggggtggcatcaaaaagataaggtgaggctgggcccggtggttcacatctgtaatcccagcactttgggaggacgaggagggaggatcacttgagcccaggaatttgagaccaacttgggcaacacagcaaaaccccatctctacaaaaaatacaaaaagtagccaggtatagtggcgcacgcctgtagtcccggctacttggaaggctgaggtgggaggatcacctgagcccagcaagtttgaggctgcagtgagcagagatcacaccactggactccacccctgggtgacagagcataccttgtctcaaaaaaaaaaaaccaaagctgaggaaaaaaaaaaaaaaaaccaaagctgagaatatggaaaggtggagagaactgctgaccacaagggctggaagaggtcaaggccttttgagttttctgatttggagcatcaaggcgtaatgaaa

SEQ ID NO: 6590 - DNA, 608 bp, Homo sapiens
tggatccaagcccaatttcatggttttgtgtttttttttktttgtttgtttgtttgtttttgcaggggggcggggagaggagctgtattccctgcaaaaaatccactgatttgtatttttaaaatttggagcctttctttttggtacctagttaatctccctttgaaattggtcaaaaactgaagccaaaagagtaggaacagcaccatagcctaattccatatcacaatcccatctgtggcacagcattaactgggtctctgaccctttcatggcttctcattgcctccagaatcaagaccaaacactttaacaaaccttcacttcttttcatcattaacagacaatgggtgacttaatgtttgttgaatgaatgaagaaataaatgaatgcatgcacacacaaaaagatacatctgtatgagggctcagagttcagtaattgctgcctttctaaaatcacatttctgccaacttgatcatgaaataaaaatataaccctgccaataatctcagagatatgtttcctaaatatcagacaaggtttaaaaacccaaaatataaaattttataaggattctcatgtatgttaaatgatgacaaattttc

SEQ ID NO: 6591 - DNA, 480 bp, Homo sapiens
tgggttagcagttcccaagactgccactttttcctggttgtggactagtgtggaaggctgtggtcactgagggtgtgtctgcasaaaactcggatctggtcttgtggttgatgtttgaagggagattgatggggtgagatctggatgtcagagctctttggctgcagggaggcggctgtagccgcagtccagtgggaggtctagtggtgacttaaactcagtgatagcagtgacagtggggagaagtgggcagattttccaggacctcgtggaaggactggacgcaagttactaagggaagaggcggcatctacggtagtggccaggtttccggctggagcccttggaaggtggcagggccagggctgacagggaaaaggagaggcaggctggggatggctgaggtcatttggaacaggatgagtttgagaggcccgaggacgtcagagtggagatgtccaggggctggtgcgcagggga

SEQ ID NO: 6592 - DNA, 763 bp, Homo sapiens
tcccacttcagcctcctgagtagctgggaccacaggcagaaaccactacgctcagctgatttttgtactttttgtagagaargtatttcactgtattgcccaggctggtcaccaactcctggcctcaagtgatctgcccacctcagcctcccaaagtgctgggactacaggtatgtgccactgtgcctagtggattttatttttttaacatgaagtcttactctgttggccaggctgaaatgcagtagcgtcattttaactcactgcaactttgaacttctgggctcaagcaatcctcatgcctctgcctcccaagtagctaggactactgacatgtgccaccattcctgaataactttttaattttttgtagagacaggatctggctttgttgcctgggctggtctcaggcaacctcttgacctcaagtgatcctcccacctcagcctcccaaagtgctgggattacaggcgtcagccactgcatctgacctatttgttttaagcagtcagaaattcagtggatatattttgtattaatgtctgacagagctagtcttcaccatagttattcttttttttttggtatttttctgggtattcttgcatttttttctatgtaaatattagttatcaattacataatgccatataaaagcttattggtacttttattgggattgcattaaatttataaagtaacttaagaaaagccaacatctttataatgttgagttctacccgtttatgtaagtctatctttg

SEQ ID NO: 6593 - DNA, 829 bp, Homo sapiens
tcccccaccttttttttttttttttttttgtcattgctatttatttgttaaaaaaaaaaaaacaccagtcatttgtcctatagtttcccacagtctagattttgctgacagtacccctatggtggtgtttaacatgttcctctattctctttttctcttgtaaattggtatctagatctagaggtctgaacagtttcagtttgattttctttttagatggagtcttcctctgttgcccaggctggagtgcagtggcgtgatcttgtctcactacaacctccacctccccagttcaagcaattctcctgcctcagcctctgaagtagctgggattacaggtgcttgccaccacacctggctattttttatatttttagtagagacgggtttcaccacgttggccattgttggccaggctggtcttgaactcctgacctcaggtgatccacccaccttggcctcccaaagtgctgggattacaagcatgagccaccatgcccgactattcagtttgattttttttggccagaagacatcataagttgtcacaaacttttacctaatgtctggttgtctctgctttggtgacattagcagccatttctgattattacttaaatctgttattacatcaggggttgcaaaaagggtgatactctaattcttgtcattcctgcttggtttattggctggaacatttctataaagagaaacttccccgttacctatttgaaaagataggatacctgcttggatctttatttttcagttttcaacctccawgtgactaatgatattttgattttaagtatcattaggattcattcta

SEQ ID NO: 6594 - DNA, 727 bp, Homo sapiens
catgaattacatgagagcgacattgggtcatcatccaatttttggttctgtttgcataaaagtcaagatctttgctcagaggtctgtctcaggttcaagagcgtgcccctgtgcttctgtcaatcggttcccgcttctcccctctgacctgttcccgttctcccttctctcaggttgtttttgtagccattttgcttcacagtcacctggaatgccgggagcccctgctcatcccgatcctctccttgtacatgggcgcacttgtgcgctgcaccaccctgtgcctgggctactacaagaacattcacgacatcatccctgacagaagtggcccggagctgggggtacgtctaccaacccaacagcagtctgtctgagactcagagtagaataaaactgtattccacctctatgtaaaatgagaaatcagtgacatcaaaacatgaagttggccaggatgtcatacccagaggccaagtgctagatgtctgcagggaaagacagttggaggattaatgaactctaacagatggatgtgatctgagatgtcactgtccagcctccttatcccataggaggagacagaggcacagagaatctgtggccaaggaatagatacgacattcatggtttttcttgctcttataagttattctgcagtcagcaaaggttttaggacccacgatacctttgagtttrtatttcattgtgtttgattttacagcag

SEQ ID NO: 6595 - DNA, 729 bp, Homo sapiens
gtttgtgatccgccccccccccccaaatttttatgtttaaattctaatccacaagcgatgagattaagaggtagaacctctgtgaagtgattagatcatgagaatggaaccctcatggaccaaattagtgcccttataaaaaaggtccaaggtggatcacctgaggtcaggggttcaagaccagcctggccaacatggtgaaaccccatctctactaaaaatacaaaaattagctgggcatgatggtgggtgtctgtaatcccagctactcaggaggctgaggcaggggaatcacttgagcctgggggtggaggatgcagtgagccaagatcaygccattgcactccagcctgggcgacaagagcaagacactatctcaaaaaaaaaaaaaaaatggcccaagagagactcctggtactttccaccatgtgaggacacagtgagaaggtgtcatctataaaccagaagtgggtcctcaccagacaccaaatctgcccatgccttcacgttcatcttgggcttcccaacctccagaactgtaagaaataaagttctactttctgtaagccacctagttgatagtattttgttacagtatcccaaaccgaccaaggcatatacccacttcgatgatatgccatgatggtagccaatgctagcacagacttaaggcttaataaaaatattatcatgtcacaattctgacctcagtaatagtaccaggctcct

SEQ ID NO: 6596 - DNA, 729 bp, Homo sapiens
gtttgtgatccgccccccccccccaaatttttatgtttaaattctaatccacaagcgatgagattaagaggtagaacctctgtgaagtgattagatcatgagaatggaaccctcatggaccaaattagtgcccttataaaaaaggtccaaggtggatcacctgaggtcaggggttcaagaccagcctggccaacatggtgaaaccccatctctactaaaaatacaaaaattagctgggcatgatggtgggtgtctgtaatcccagctactcaggaggctgaggcaggggaatcacttgagcctgggggtggaggatgcagtgagccaagatcatgccattgcactccagcctgggcgacaagagcaagacactatctcaaaaaaaaaaaaaaaatggcccaagagagactcctggtactttccaccatgtgaggacacagtgagaaggtgtcatctataaaccagaagtgkgtcctcaccagacaccaaatctgcccatgccttcacgttcatcttgggcttcccaacctccagaactgtaagaaataaagttctactttctgtaagccacctagttgatagtattttgttacagtatcccaaaccgaccaaggcatatacccacttcgatgatatgccatgatggtagccaatgctagcacagacttaaggcttaataaaaatattatcatgtcacaattctgacctcagtaatagtaccaggctcct

SEQ ID NO: 6597 - DNA, 604 bp, Homo sapiens
tgtcagacagatcatatgacacttaggatctccagactagctccagctgctgatttttctagttcccagtttctaggatttctgttccttgcattcaaaggattcacgagtagaacctatcgcctcaagacttctggtcctcaaaggcttccacggccctccacagtaagtacaacaagaggaggcaaaaayaaggagctccttgatgggaggggaagctacgggtggggcagaatgggtctgagtcatgtgtgatgcctggggaacttccgccaccttcacagttcctctcccagaatgaccctgacttactgaacactgggcagcatgactgttcaaggttacacctctaagcactggggatgcagacgaaggtgtccaggggtccaagatttatctgagtgtctagagccatgtagcaaccagcaccatgtccgagggtttcaggagcctaggctggaataacacaacacttaaaagtgaaattctggtattcagtaatcctcagagattcactgagagacaggtgggaataataatataatagtagccttaaaatagtgttttatgtctcacaaatcccttttaattaaatcatctcatt

SEQ ID NO: 6598 - DNA, 604 bp, Homo sapiens
tgtcagacagatcatatgacacttaggatctccagactagctccagctgctgatttttctagttcccagtttctaggatttctgttccttgcattcaaaggattcacgagtagaacctatcgcctcaagacttctggtcctcaaaggcttccacggccctccacagtaagtacaacaagaggaggcaaaaataaggagctccttgatgggaggggaagctacrggtggggcagaatgggtctgagtcatgtgtgatgcctggggaacttccgccaccttcacagttcctctcccagaatgaccctgacttactgaacactgggcagcatgactgttcaaggttacacctctaagcactggggatgcagacgaaggtgtccaggggtccaagatttatctgagtgtctagagccatgtagcaaccagcaccatgtccgagggtttcaggagcctaggctggaataacacaacacttaaaagtgaaattctggtattcagtaatcctcagagattcactgagagacaggtgggaataataatataatagtagccttaaaatagtgttttatgtctcacaaatcccttttaattaaatcatctcatt

SEQ ID NO: 6599 - DNA, 604 bp, Homo sapiens
tgtcagacagatcatatgacacttaggatctccagactagctccagctgctgatttttctagttcccagtttctaggatttctgttccttgcattcaaaggattcacgagtagaacctatcgcctcaagacttctggtcctcaaaggcttccacggccctccacagtaagtacaacaagaggaggcaaaaataaggagctccttgatgggaggggaagctacgggtggggcagaatgggtctgagtcatgtgtgatgcctggggaacttccgccaccttcacagttcctctcccagaatgaccctgacttactgaacacygggcagcatgactgttcaaggttacacctctaagcactggggatgcagacgaaggtgtccaggggtccaagatttatctgagtgtctagagccatgtagcaaccagcaccatgtccgagggtttcaggagcctaggctggaataacacaacacttaaaagtgaaattctggtattcagtaatcctcagagattcactgagagacaggtgggaataataatataatagtagccttaaaatagtgttttatgtctcacaaatcccttttaattaaatcatctcatt

SEQ ID NO: 6600 - DNA, 2349 bp, Homo sapiens
tcctattcaatcttaggtctcatattttctctaattctctgaactcctaggcaattatttcctgaaacatttcttcccctctatttatttttactatatctttctggaggttctgttatatgaatgttaacctttcaatttttattcatctttcaactatatacacatatttctgtattatagaaacatatttgttgtatatttaaaatacataatatttaacctctttagctcttcctgatgcattctgagagttccttgactgttgttatggctctcactaatctgttatacagctaaccaatccagcattcaacccatttattatgttattttaactaatacatttttttttacttctaacctccagttgttgtttttttttaactgattctttttgctttgtttccagtactgcaactttcctgggttacacttctgatgaattcagaagtgtgaatctggggagggagtggtcactcttcaaagcaggtcacttgtgtgtggtcactcttcaaagcaggtcacttgtgtgttaacaatctgtatccactctggcactgttctaagtgtggtctctcttttttaatcatcttggtttaagatttgaaggggggtggcagtaggagaaaatatgtttttacctactccctaacccagttaggcttccctgccaataggacattttgttgttgcccctagctgtgctgtggtgtactaactggcaaaggatggacaatagcccattcagagttgagttgatggggaaagtacacacctaaatattttcttccactttatctcctattcatggcgtccagggttgttcagtgttgctgcttcctcttgttgggatctaaccatcttacgtcacctcagggatttataatgatttctatattggtttgatgaatccaaaactggtttcagagagagaattgggagcctgtgctaatctgccatcttaccaaaaactgcataaaaccagtatttgaatgtagggattctgacttcagagacaataccaatatcttatctataatactacatgattttctgaatctgtttatccctccttacatatgttttactacttttcatgattacgcctttgtgtgattacaacttacacctggaattctgaacaggcttttttcactatttctaactcagagaatctttaaaatacgcgaaaacattcttctttaatagagaccctctagtggttctttacaatcatttttcctgtgatccttcaacacttgtatgatactaatttacttttgatatgttcctctataaatggtttttaatttgttccatgtgcatatctgctgttggtccaaatagactaaaaatgcctgctctttgaaaaattttctaaaatctaatagacggtgatgaattagcattgactagctaagatatatcattgatatgacttagagaaaaaaactcactttgttcaaatcctccatttttacccatgaagtcaaagaaagcatcaagaattctgcagagggttatgacgactgttatgtcctccataggatatggctgaaatttctgacgattccttataaattgtagtccgtctgtgacactatttttaatcatgaattcaagacaatccactcctgattgacttataattttagaagttttcagaagccatgacttaacataaggttcccatcccagatcaacaggatcctaataataaggagcaaaatataawcttatgtaaataaataaaaatatggtatccttctactatcttactctctttttacttcaccactgccctctcataaatatgacttagaattgtcattcattaaagggcaaatgatcaaagtagcttaaggaattaacattctctggaatgatttgtgacttctatctatggtcttacaagaaaacaattggggtattatgtgtaggaaggtgtattgaggctatgtgtatgtggtgaggggtactgcttacccagaagtcagccctatacttagatttattcataacattcagttaagtagattagagcatagggttaattatagctaataacttcatgtatagagaatagagactatagctaataacttcatgttatattttgtacttccctcccactgtcttcatagtgtgtttcccaagttcttaagagtcagagtgagtatgaaaaggcctcaggaccatcttcctctattgaaaaaataattcacatcagcagtctaacctgtctatttgtttacccacagttgtggaaaatactgacactccaattactaagagtagtattaaaacagtaataattaaattcacattcaattgtggattatgagg

SEQ ID NO: 6601 - DNA, 1397 bp, Homo sapiens
cttttctttgtgccagctcattgaaacacaccacttgctctgagctacagaactctgaacccggttgtgttcttggcttctccaccgagatgactcaaaagctcccccaaatsagaatgtccaaaacctcatgcaatactctccccaccccgaccccagctgtggtggacatcaccaaccaacggttccacagccagaggcccaggtcacccgtggcacttcctttccctcacatgcccccgtgtgtgacccagcaccgaaggctgttgactggcctcctccatatccctggagctgtccaattctgcccactccatggccacgccaccctcatctctcagctgaattacgcaatcgcctcccaactggtccagacacatcccatccaggccactctattaccggtctctccaaaacacagaacagttcacatctctccctgcttaaaatacctcaacattgcccatcacccatatgagaaagagccacagcctcatcaggccatcgaggcccagggttgtcctctccttccagccttgcctcacaggatgtcatccctcaatctcgacacccctgcaccgtgggcctccctgcagtctctggaatgggaggtgtgttctcacctcagggcctttgcacatgctattccctcctcctggggctctgcttttctctgccctcttctcccggttaattccaactcatccttcagatccctgtacgaatgtcacttcttcagagaacacttccctgagaccctgcccctcagttcaaagcactgtgtacccttcttttgtagcaggagtcacagtttctagtcatacatgtggacgattagtgactccccaagagatggcagtccccttgacaacgagcatcattcctgcttttgttcacctggtacagtgcctggtgcggacaactcttacttaacatctgttgaatgaagatggggaagggcggggaccctttcagagccctggactgttgtcctcgtgtgctttcataggctcttgttccatgaaacacactttggaaactgcccttcacaggtgaggaggataaggcttacagggcagggctccccagggtctcacagctggtaatggagaaaagcaggggacatcccaggaaccctggctcctcatccagtactccttcccctgccctgtgcagtcctcctgaacccagaacttccatgcccatctctcagaactctcatgtcccatgcactacatgaaggaatctcatgtacgtctccaaaccaccctaggcacttcccaccataaggcccacattatagatgaggaagctgaggctcagagaggctgagtgctggccacagtcatgcagttgcctgctgagtgccagtgctcaggttcaaaccctggccactg

SEQ ID NO: 6602 - DNA, 1397 bp, Homo sapiens
cttttctttgtgccagctcattgaaacacaccacttgctctgagctacagaactctgaacccggttgtgttcttggcttctccaccgagatgactcaaaagctcccccaaatgagaatgtccaaaacctcatgcaatactctccccaccccgaccccagctgtggtggacatcaccaaccaacggttccacagccagaggcccaggtcacccgtggcacttcctttccctcacatgcccccgtgtgtgacccagcaccgaaggctgttgactggcctcctccatatccctggarctgtccaattctgcccactccatggccacgccaccctcatctctcagctgaattacgcaatcgcctcccaactggtccagacacatcccatccaggccactctattaccggtctctccaaaacacagaacagttcacatctctccctgcttaaaatacctcaacattgcccatcacccatatgagaaagagccacagcctcatcaggccatcgaggcccagggttgtcctctccttccagccttgcctcacaggatgtcatccctcaatctcgacacccctgcaccgtgggcctccctgcagtctctggaatgggaggtgtgttctcacctcagggcctttgcacatgctattccctcctcctggggctctgcttttctctgccctcttctcccggttaattccaactcatccttcagatccctgtacgaatgtcacttcttcagagaacacttccctgagaccctgcccctcagttcaaagcactgtgtacccttcttttgtagcaggagtcacagtttctagtcatacatgtggacgattagtgactccccaagagatggcagtccccttgacaacgagcatcattcctgcttttgttcacctggtacagtgcctggtgcggacaactcttacttaacatctgttgaatgaagatggggaagggcggggaccctttcagagccctggactgttgtcctcgtgtgctttcataggctcttgttccatgaaacacactttggaaactgcccttcacaggtgaggaggataaggcttacagggcagggctccccagggtctcacagctggtaatggagaaaagcaggggacatcccaggaaccctggctcctcatccagtactccttcccctgccctgtgcagtcctcctgaacccagaacttccatgcccatctctcagaactctcatgtcccatgcactacatgaaggaatctcatgtacgtctccaaaccaccctaggcacttcccaccataaggcccacattatagatgaggaagctgaggctcagagaggctgagtgctggccacagtcatgcagttgcctgctgagtgccagtgctcaggttcaaaccctggccactg

SEQ ID NO: 6603 - DNA, 1397 bp, Homo sapiens
cttttctttgtgccagctcattgaaacacaccacttgctctgagctacagaactctgaacccggttgtgttcttggcttctccaccgagatgactcaaaagctcccccaaatgagaatgtccaaaacctcatgcaatactctccccaccccgaccccagctgtggtggacatcaccaaccaacggttccacagccagaggcccaggtcacccgtggcacttcctttccctcacatgcccccgtgtgtgacccagcaccgaaggctgttgactggcctcctccatatccctggagctgtccaattctgcccactccatggccacgccaccctcatctctcagctgaattacgcaatcgcctcccaactggtccagacacatcccatccaggccactctattaccggtctctccaaaacacagaacagttcacatctctccctgcttaaaatacctcaacattgcccatcacccatatgagaaagagccacagcctcatcaggccatcgaggcccagggttgtcctctccttccagccttgcctcacaggatgtcatccctcaatctcgacacccctgcaccgtgggcctccctgcagtctctggaatgggaggtgtgttctcacctcagggcctttgcacatgctattccctcctcctggggctctgcttttctctgccctcttctcccggttaattccaactcatccttcagatccctgtacgaatgtcacttcttcagagaacacttccctgagaccctgcccctcagttcaaagcactgtgtacccttcttttgtagcaggagtcacagtttctagtcatacatgtggacgattagtgactccccaagagatggcagtccccttgacaacgagcatcattcctgcttttgttcacctggtacagtgcctggtgcggacaactcttacttaacatctgttgaatgaagatggggaagggcggggaccctttcagagccctggactgttgtcctcgtgtgctttcataggctcttgttccatgaaacacactttggaaactgcccttcacaggtgaggaggataaggcttacagggcagggctccccagggtctcacagctggtaatggagaaaagcaggggacatcccaggaaccctggctcctcatccagtactccttcccctgccctgtgcagtcctcctgaacccagaacttccatgcccatctctcagaactctcaygtcccatgcactacatgaaggaatctcatgtacgtctccaaaccaccctaggcacttcccaccataaggcccacattatagatgaggaagctgaggctcagagaggctgagtgctggccacagtcatgcagttgcctgctgagtgccagtgctcaggttcaaaccctggccactg

SEQ ID NO: 6604 - DNA, 746 bp, Homo sapiens
ctaactggcatgacatgaatcccagggctatccctaagcctagaggagaaattcatagacaggacatctctaactcttgttgaaggttttcttgcctgacttcaaaactgcgtctgaccacagaatcattactcrccaccctgagagctggagccatgagctagtctcagacgagtgcaaccacaaggtagctactttttttttttttttttttgagatggagtctgtctctgtcgcccaggctggagtgcagtggaaccatcacagctcacagcagcctcgacctcctaggctcaaccaatcctcccatctctcagcctcccaagtagctggaactacaggcatacaccacctcacctggctaatttttgtattttttgtagatacaggtttcaccatgttgcccaagttgctctcaaactcctgggcttaagggatacacctggcttcccaaagtgctaggattacaggcatgagccacagcacgcagccctaaatttcattctggttaaattgcacgtttagagtgtccaattagaataatctgtaatccatttccacgtggccatcagttgctaaatcttaaatctgtgtcattggacaagtttttgatttccctaaacccatttgttcttgcgtaaactgaggataatattggcagggattttgtaattagagtaatgctaagatcttagcacagagcctggaacacagaaaaagcccaccaaatggtagctagtatcatt

SEQ ID NO: 6605 - DNA, 431 bp, Homo sapiens
acataatcccctagagcttgggcaatgctgaggcaacacactgaagttttcccacccactcatgtctttagacaacagctggaactgacacatgaaacattgtcccrgggaagaaggaaatgtcttcgtgttttaagaataaagaacaggtctgagtacagatcttcctgagatgagtagcaccaactgcttccagaaggaggagaggctgtccatgcatccctccccaggtagagcgtgacacatgcttggacagggcagaggagctggctgtgcctggcatggaatgacagctgctgaagctgttggccacagctttccttctcaaagagcctgtgctctttggctgcccacagtttacacagaagctgaatctgatgtggcgtttgctcaaaatgagctctgagtccattctacaccagccacttctt

SEQ ID NO: 6606 - DNA, 483 bp, Homo sapiens
atgtgtttgctaatggctttgagcccgtgctccctcccttttatgtgcgggaaggtaaatgcacaggtctcacatgcagacacctctttctcatgctcagcacacagctgggtggggcacagctaagaagcagctgygattgttcctcatccccaccctgcccccacccagggtccaccagggatgctgcaggagagagccccagccccacagcagcctggggaccgccaggatgagcagaacctcgtaagtgacctcgtttacacaggcaggtcatttagctcatggcaatggctctcgatggcagctgacagatgctgaatggcgcctgtgcccgtggcccacagcacagccaggaaagcgccagccagaaaagtgcctgcccccagccattagctggcctccccagacccacaccccgcccgggccagttctgctgcccaccggttcctgctcccacccatcacgccactgacattgcct

SEQ ID NO: 6607 - DNA, 483 bp, Homo sapiens
atgtgtttgctaatggctttgagcccgtgctccctcccttttatgtgcgggaaggtaaatgcacaggtctcacatgcagacacctctttctcatgctcagcacacagctgggtggggcacagctaagaagcagctgtgattgttcctcatccccaccctgcccccacccagggtccaccagggatgctgcaggagagagccccagccccacagcagcctggggaccgccaggatgagcagaacctcgtaagtgacctcgtttacacaggcaggtcattyagctcatggcaatggctctcgatggcagctgacagatgctgaatggcgcctgtgcccgtggcccacagcacagccaggaaagcgccagccagaaaagtgcctgcccccagccattagctggcctccccagacccacaccccgcccgggccagttctgctgcccaccggttcctgctcccacccatcacgccactgacattgcct

SEQ ID NO: 6608 - DNA, 483 bp, Homo sapiens
atgtgtttgctaatggctttgagcccgtgctccctcccttttatgtgcgggaaggtaaatgcacaggtctcacatgcagacacctctttctcatgctcagcacacagctgggtggggcacagctaagaagcagctgtgattgttcctcatccccaccctgcccccacccagggtccaccagggatgctgcaggagagagccccagccccacagcagcctggggaccgccaggatgagcagaacctcgtaagtgacctcgtttacacaggcaggtcatttagctcatggcaatggctctcgatggcagctgacagatgctgaatggygcctgtgcccgtggcccacagcacagccaggaaagcgccagccagaaaagtgcctgcccccagccattagctggcctccccagacccacaccccgcccgggccagttctgctgcccaccggttcctgctcccacccatcacgccactgacattgcct

SEQ ID NO: 6609 - DNA, 1461 bp, Homo sapiens
cccttggagctggccagggtcagttgaaagttatatttgggcactttaagtttttggcccccccccttatggttggccgcctccaaatgcacactttacaatttgtggccccaggcaaatgggaaacccaaatattccctttggatcaaaaccaacctttcaggggccccaaaaaaaaaaaaaaaaaaaaaaaaaaaaaaaaaaaaaaaagatgaagaaccttatcccattttattggtgactgacaggaaagtttaggaaagtttgtccagatggatgctggtttggtaagaattgcagctcatcagttgtggagcaagctgagacactcttagaggagcaaagcctgtgttctgcactgattctccytctgataacagacaacactttagacgtatctcataaaacagaagcacaaaagagaacaaaaaggaatgaaaagaaatggcagtatttttccaagggtgccaaacaaatgggaattggtagcaaaagctgagtaccaagctgatagtcaataaccaaggatctcaatacaaagagaacagagttgaagcccaactctgttctctcacagacactgtgtcaacacagacttgacaggcctcaagaagcaaggcacaagaggcctccatagatagcacacttgatcagggtccaaagtccatagtgatgagcagttaagaatgtgtctcagtggagcttctaggaaaattacagaaatacagaccaggcatggtggctcatgcctataaacccagcactttgggaggctgaggcaggtggatcacctgaggtcaggagttcgagaccagcctggccaacatggtgaaaccctgtctctacaaaaaatacaaaaattagacaggtgtggtagcacatgcctgtagtttcagctacttgggaggctgaggcaggagaatctcttgaatctgggaggcagagattgcagtgagcccatatcgtgctgctgcactccagtctgggcgacagggcaagattcagtctcaaaaaaattaaaaaattaaaaaaaaacagaaaattacagaaataaaggagacaacttaatgagaacagaagctatttatttcttgcttgctagagaaagggaggcagtcactatcatttatgtttgacagagactcaggctgggagaatgggaaagctttatagtgaaaaggggcaaggctttggggtaggaggctatgggcatggagaggcgcaggtaggctaaagagaagcaaggcatctgatgggataggtttggagagagtatttggctttctttaattagtactaaactagaagcaggggcaatcttagagaagttggcagtcattgaccaacctctgattgttttcggcaaattgctactgaatttgtggcttgcattcctgaactggctgctgcagagattgtggtttgccttcccaagctggttgctgcagtggttgtgggtca

SEQ ID NO: 6610 - DNA, 635 bp, Homo sapiens
ctctctttatctggaaatattactttgctggctatgctgacttaggtcattgacatcagatcagtgttctaaatctgatcctagtaatcccatctacaatcttcccacacaagccaagggaagagacacacttgattaaaaaccttgcactctctttcctatttggctattttttctcctcttggagaaagagtttccccaaaatactatatgaagtgttattttgtaagcctacttaacttagttttatatactgtgcacaaactttacatataatttgaataggctcagttytttgttacttttttttagtttttcactgaattttatatgacagactaagctaaataatttgttatagttagaagactgttttctcatttacataccaaaatctaccaaaatgaatttattacacttaagaatttttgttaattaccattaccacttctgtaaaataaaataaatctgtaagaattttatgagcaaagctttttcaagtctactatttagtttagcaattattctaaatatcaatctcaaaattagagtaagggatttccccttttaggaaaagatatcaataattatatagtaaaaatttaaaattaagatacagacatttattccgtgtt

SEQ ID NO: 6611 - DNA, 665 bp, Homo sapiens
tttaaaccttgcttatgtaagctatgcacagtgaggcaagaaagacttcaaggatttgcaagggctgaaagaggaggtctctgccagggcaacagcagttcgaatgtgcaccaccacatctgtacatttggcacagtcatctcagtctccacttggcagctacggagaagggaaggcaggaagggaccatagagaaagaagcctatttcttaccataaaaccacaaggacagaataaattgcttttcctaggatgcagagaaggaaaaagcagcctgcagacttgcaaggggagagacactgctgacattcaatagccatagtggtctcaatactatccacctggtcactgccatcaatgtggttacaaaaatacggtgagtcatggaggcaaaggtgaaactctatgtagtcataattataatcttgggagccaaaaatcgctggctccaggacctcacctcctaccacctcttttagattttgtagggttaggtttgggccctggaakccatataccatgagtgagctcacatagatactgcggcaggcgtccagtggttcacgttggcatggaaactcatcgtggactaaaacctgtaagtaaaggccagtgaatacccaatgagagagcacagactggttctccagaattcacacatgatg

SEQ ID NO: 6612 - DNA, 806 bp, Homo sapiens
tcccagcccttgccctctgtgtctcctcatttgtctggtcctgacttgcatccttgacaataaaactgtaagtatagcactttcctgagttctatgatttattctagggaattgtcaaacctgagttgtagtcatgggaatcctctggatttgtagccagttggttagcaatgcaggtagcttggggctccaatttttcatctggtatctgaagtgagggcaatcatgtcagggaccatgtccttaaaactgtggagtctggtactcaccttgggtggttagtctcagaaccttattgcagtacgtcaccactgaagaagagaatgcctcctgtaggtatctaaatgcctatggttttacctgaaactggttaagaaaaaactaagaacactgtgttgactgtcgtagttatataactggagcatgtcagaagaagaatgaaacctgactctccaaagctagaatgcctctaacacatattataccatcagatcattcatgcttctatcatgctagacccagttttaatatcccccaaaaatatattggcaatgttgttttataacyctgcaagacatcaagtttgatactggtctctagaccagtatcgtaacattgtttttaaagaaatttgagataaataatatagtttctatcttcacaattcataaaatactgacagggatatctacttattagattaaaacatagctgccttttaattacctagaattctttggacatatccattttctgcttcttgattttattttctaacactatagtataaaacagactgaaacttt

SEQ ID NO: 6613 - DNA, 785 bp, Homo sapiens
tcctgctgtcataaagcttacacttctgcagaaaatagatcattaaagatctccaaataattaattaaatcattattagtgttgcaaagtgttttagaagagaaaaagaaactcaatctcctgaaatcgtaaaagacagaactgatagtatctttgtggcatttccaaagtgaataatgctaggaagtcgaacatagttgagcagaaaaataaaattacatgtttttggcaaagtaaagcggattaaaaacaaggaaaaatgctttaaaaatagagaccataaatcccctttcctccagtagccaaattgaactaatacacaaaatagagtgcacamaatattgaaaggcagatatttcctccagcacatttggcttgtgacgttttgccaaattaactggtataaccgtagtgaaactgttctactcttattataaatcaacatcaaatggtgtttcacagatccatcagagatcatattacaaatgtaacacaaatgatcaaataccatacaaagggtctactcccaactacagatatcttaattttattccatagttctatgttctgtggcagaaagatcaaacatggtctttctatccattcccaaagatttagattttttttttgcaatagcacactgaggagataattatgatacaatttcttctccagcaaacactcaaaatataatttctcctacttgcttcaagttctagaaaacttaatttttattccttttaaacagtaaatacaagtctctcaacatacagtgaaaattttaa

SEQ ID NO: 6614 - DNA, 772 bp, Homo sapiens
aaccattcttcttccatttgrtgttctctctcaccacttcccacaatgtcctctgaccctacagaatattccttaccatgacccatgctggccttggcttctggctaacttttcattcttccagattcagcaaaggcattttctcttccatgaagtcatccccagctcctcacctgagctttcttaggaacctggttttacctctagcagagcatataccacatgggttggggtttgtaggaaggtaggccctggcatggaacctctaattttacttcactcactctgtctacaaccttggctcagttactgttgttgactgttttattaatggtccccccacaaatcacacctgccaatacccacacccttgcatgggtcccctcctacactaattctgggcttggctgtgtgaacttgctttgaccaatggggcatcagtaaactctgcccaagaagaggtttgagaagcactggtgcataagatcttgtgatcttggaatgctgccatgacctaagaaactcgctcgagagaccacatagagtagaccttaggtgacagtcttcatcgactgccagatgtgagtgaatcctttttcaacatctctcccccattgagccttcagaataatgcagccatttgagtgaccctggggagactagcctgcccacttgaacccagtccaaattgcagaattatagacaaataaatgatagttatttcaaaccaatgagtttggggagtactgatacacagcaatagagaactgaa

SEQ ID NO: 6615 - DNA, 772 bp, Homo sapiens
aaccattcttcttccatttggtgttctctctcaccacttcccacaatgtcctctgaccctacagaatattccttaccatgacccatgctggccttggcttctggctaacttttcattcttccagattcagcaaaggcattttctcttccatgaagtcatccccagctcctcacctgagctttcttaggaacctggttttacctctagcagagcatataccacatgggttggggtttgtaggaaggtaggccctggcatggaacctctaattttacttcactcactctgtctacaaccttggctcagttactgttgttgactgttttattaatggtccccccacaaatcacacctgccaatacccacacccttgcatgggtcccctcctacactaattctgggcttggctgtgtgaacttgctttgaccaatggggcatcagtaaactctgcccaagaagaggtttgagaagcactggtgcataagatcttgtgatcttggaatgctgccrtgacctaagaaactcgctcgagagaccacatagagtagaccttaggtgacagtcttcatcgactgccagatgtgagtgaatcctttttcaacatctctcccccattgagccttcagaataatgcagccatttgagtgaccctggggagactagcctgcccacttgaacccagtccaaattgcagaattatagacaaataaatgatagttatttcaaaccaatgagtttggggagtactgatacacagcaatagagaactgaa

SEQ ID NO: 6616 - DNA, 445 bp, Homo sapiens
gtttaccagcccaaaacaatccctgcgctgcatccgaagcgccgtccacccttaactggagctctggaatgttcctgctcccctctagccccgtcacaggcggccgtcccggtggttttcactgaggatttgggtggtcagattttattattaataataaactgtrtacagttgggtacttggcaagcttgtgtcggctctgcagccctcagagtgtggtcttgtggtgaggacgcagggccgcaggcccctgtggtggacgccactcgggggctcttatgtaagcggggcccaagccggcgtcttcccccatgaaggaggttcttgtctgtgcaggctggaggagcagtggcgggccggcgcgggggacacgaagcaccgccagcatctaagcatttgaaaacacggtgcacagcatctgtttattctcttgggttttttttaa

SEQ ID NO: 6617 - DNA, 1329 bp, Homo sapiens
ttctgctttttcaggtgttcctgcacttgtacctgtagcttttccagttcaatagaactacaggatcagcctctgctccaccatctgggcaggataaatagagaggtggcttttcagggttggaggagacctgggggtctaattgttctacacactgacttcaaccaacatctccttctcagctcagcccctccactgtctctgaggtacccagtgcctcccatcgccaagccttctgcgggctttgctgggtgaattggctcctgcctcacaggcaccctctgaggctctcagagcacagctttctcaactctgcaaggacagttgctgctcctcttttcccaccccaccttgaaaaagtggattgaaatatcttatctgctactgactcctgtctcattctctgtttccctgctggcttttatcatttatttcatcacattagagggtttcgcacgctcaatttagcattttaatcagaaaacctagtatacattttggtacaaaaaaaatgctatgcaatctgttgtatgcccattgttgcctaatgtggcaggcattccatgaagacctgttgacttaattagtaattccaggtctgacacatggaactatcaagtccaatgctgatcctggggcacaaggaacagaggatccctctgggagagagggaaggaggccagaaaatagatttccataaggtgggtaggtaagaactgctcttcgttctagatattagttgatgaggagtgattggaacacttggttggttttgcacctaatttatcagttttggacaaattggctgtgccatttggactgcacagtgagagctgtgactggctaatataggaaggaacaccgcccctaaagttttctgcccgttatccttgcattagggctattttccaaccacttggaattaagccattaaatcaacaagcagattggaagccctactgaaaagagcccatgaaccatgatggaatgcacctgcaacatgatggaatgcacctgcactgtgatggaaagcatctgcaccatggtggaatrcaggggtcatagccaggcatctagggatgacctctgcttccctctgactggcaacagatcaatcagacttatgtttcccctttgtctgggatttcacagggtctctggggagatgacagccataggaagtttggggatgattctctggccacaagtcccttatagtcactgatgagagccctgcacagtggatggctctgctgtttccatgccaacattgggcacagggatcttggccaaggttctcaagccactgactccatgtatgtttccctt

SEQ ID NO: 6618 - DNA, 699 bp, Homo sapiens
ttccaaagacatgttccttaacctggaagccccacacaccctcctgccactcagccttatcctgcctggacttcagggcccatgtccagtcccaccctctccacagaccctgtcctgactatactacacaagcctacagggccatttatccaccaggaggtaggctgtgcctttaaaaatgtgggtaagggaggtagttatatgctggagaaatggcagacagtgtcaagcaagtttatggcaaggaccaaacagagtgtccgaattgcctctgccccaaagaggtgataagtacatggcccaggccttcagtgggagtgggggttgatgcytctaacatgcagctggggaatagggatgtgggaaagtgctacaggcaggtccatggtcccaaaggagccatccacaggcaggttacaaaattcctacaaggccaataaaggaaaagccagcaggaaccctagggacttcagggagctgctttatgaggccctttagagtgggccacccaaaagccaggcctagaggaaaggccagggcaaaaaagcaggcaacagaaccacttccccatctgcttctgtggccccaggtgaggtcatgctctgaacccttaaaggatatgcagagaagacgcgaaagagcccaaaatcgggtgggctagaaattgacaggccagaagaccccaaagccaggcagagt

SEQ ID NO: 6619 - DNA, 790 bp, Homo sapiens
ctcctgtaagtccagtgcctgccagataatagaagtctagtaaatatcgaattattattattattttttgagacagagtttcgctcttgttgcccagaatggagtgcaatggtgcgagctcagctcaccgcaacctctgcctcccaggttcaagcagttctcctgcctcagcctcccgagtggctggggttacaggcatgcgctaccatgcccaactaattttgtatttttagtagagacagggtttctccatgttggtcaggctggtctcgaactcccgacctcatgtgatccgcctgcctcggcctcccaaagtgctggcattacaggcatgaaccaccatgcccggccgaattaattttataggtgagaaacaggcttggagaggytaagcagtttctccagggttctgtggctaggaagtttaaggggagaaggagctgaaaccccacacattctgtgatggattggatagcattttatgggcagccttaggatttgaacatctccgttccctctgggaaactgctggccaaattgcagattagattaagaaaatttgggatgtaacacgcatgtaaattgcacttggtctaatttcatttatgatttgacgattttctagactgaagttttggctttctaatcacagattaaaaccaatttggacagaattcttttatttatttatttatttttatattttagagaaaggatcttgctctcacccagacgggagtatagtggcgtgatcttgactcactgcagcctggaactccctgggctcaag

SEQ ID NO: 6620 - DNA, 643 bp, Homo sapiens
ttgccagattaggggtgcataaccatcccttattggttttgagatatgttggaaaagaatcctttctttaaattctgcaatgactacccccttttgagtgtgacattttatttcctagtctgatatctgccatatcctagcactacccagaagacagcatgcttagattaatgggggcatgtgtctagtgattgtggcaggtagtccttcatcatggaggtgacagccccagatcttagagctcaatgagaataaactctggtcttcctatctaactccacctgcactgattccaggagccctgaaagaccagccaataccttgattccccaggtatcttcttgtcctgtgagaggaaagatctggtcaagctaaagtcagcttagctgttttatgacytttttttttttttttttttttttttgagatggagtctggctctgtcacccaggctggagtgcagtggcgccatcttggctcactgcaacctctgcctcctgtgttcaagcgattctcctgcctcagcctcccaagtagctgggattacaggcgcccagcactatgcccggctaatttttgtatttttaatggagacagggtttcaccttgttggccaggctggtcttgaactcctgacctcaga

SEQ ID NO: 6621 - DNA, 838 bp, Homo sapiens
tgttgttgctgtgtaatgggggtgggtgtgtgggtcactaattccatcaactttgattcgatatgtttctgttatactagttaacaaattgccccaaaacgtactggcttaaaccaatcatcatatttgcttatgtttctctgagtcagcaatttggacagagctttgttgggtggttattctgttcctcatgccactggctgaggtcatttactaggcttcatttacctagtggctagacagaaaggtctaagaaaatttcacttacgtgtctggcacctcagcacttctccacttggtccctctctccacgtggtaaggttgagctttctcatgatatagaagtttcaaggtaaccagatttcttatatggcaactgctcccaaatgggacaaaattggaagctacggatatcttagggcccagccttagaagttatacagtgttactgcagcctcaacctcctgagctcragcaatcctcctgcctcagcttcccaagtagctgggattataggcatgtgccaccatacccagttaattttttaaatttctttgtagagacaaggttttgccactttggccaggctggtctcaaactcctaggctcaagtgatccacctgccttggcctcccaaagtgctgggattacagatgtgagccactgtgtttggcctccagtgtattctatttgtcaaaaccagtgtcagagttggtctgtttcaaagaaatagaaaatagaccacacttcttgatagtaagagaggcaaagaattttaaaccttctttaactcactacagtgaatatgatgaatacaataggattatagcgttctcct

SEQ ID NO: 6622 - DNA, 579 bp, Homo sapiens
ggagcccttcttggctatccccgtttcagttactgtgatgatgcagggagtttcttcatcatacacacttccatcttagagctactttttttttttctttttttttttttgagacggagtctggctctctcgcccaggctggagtgcagtggcatgctctcggctcactgcaagctctgcccccaggttcacgccattctccygcctcagcctcccgagtagctgagactacaggcgcccgccaccatgcccagctaattttttgtatttttagtagagacggtgtttcaccatgttagccaggatgctctcgatctcctgacctcatgatccgcctgcctcagcctcccaaagtgctgggattacaggcgtgagccaccccacctggccagagctacttttattttttacagggttatccaagcactgagtatggtctacatttaatatctagttattagttgactgattcccacttgattgccaaaagatgctgctattttgtacatagcatccctggaggaaagccatttggaggttaatatgtgggcaaatgggccacatgaggagcagaaagtt

SEQ ID NO: 6623 - DNA, 339 bp, Homo sapiens
cctgycttggcctcccaaagtgctaggattacaggcataagccactgcgcctggccctaaatatgttttcttattttcacatctctttaatgtaatggactattaaaatatttttaaatttccattattatttattctttggtttctttttagaagtgtgttgttcaatttccaattctttgaggattttcaagatatctttttctttttgacttttagtagtatattcctttgtggttagacaacatagtttgcatgatttcactactttttatttatttttttttagatgggggtctcactatgttgcctaagctggtctcaaatcctgagctcaag

SEQ ID NO: 6624 - DNA, 816 bp, Homo sapiens
cactcccacaatgactcattcacatgactggcaaattctgctggttgttggtaggagatctttatttctacccatgtggagtgctcaatagggttatttacagcatgacagctgacttccccaaaagtgagagatcccaaaaatagcaaggtaaaagtcacaatgtcttttataatttaacctcagcagtcacatactgtcatttctgcactattgtactggttacacagaccagtcctattcagggtgtgaagggacyacactagagcataaataccaggacagaagaatcactaaagatcagtttggagacctgctaccacagtcctccctctggccaccacagatttatgcccctcccatatgaaaaatacactcactctctcccaagtcccaaaaagtataatatcattccaacattatctcagagcctggaatcacctgatctaaatcatgccctggtgtagatgaggctcctctattacagtttcttaagtacagaccctcgtaaatactttttcttgctccaaagacctgtcaactaaagagaaaacctacctgccgttattagtccattttcacactgctataaagaatattacctgagactgggtaattataaaggaaagaggtttaattgactcacagttccacaagaagcatgactagcaggcctcaggaaacttacaatcatggtggaaggcgaaaggtaagcaaacacctttcaggttttgagaaagagagagcgagagagagcgaaagagagcgaagaggggaggtaccagacacttatcaaacaaccagatctcatgagaa

SEQ ID NO: 6625 - DNA, 816 bp, Homo sapiens
cactcccacaatgactcattcacatgactggcaaattctgctggttgttggtaggagatctttatttctacccatgtggagtgctcaatagggttatttacagcatgacagctgacttccccaaaagtgagagatcccaaaaatagcaaggtaaaagtcacaatgtcttttataatttaacctcagcagtcacatactgtcatttctgcactattgtactggttacacagaccagtcctattcagggtgtgaagggactacactagagcataaataccaggacagaagaatcactaaagatcagtttggagacctgctaccacagtcctccctctggccaccacagatttatgcccctcccatatgaaaaatacactcactctctcccaagtcccaaaaagtataatatcattccaacattakctcagagcctggaatcacctgatctaaatcatgccctggtgtagatgaggctcctctattacagtttcttaagtacagaccctcgtaaatactttttcttgctccaaagacctgtcaactaaagagaaaacctacctgccgttattagtccattttcacactgctataaagaatattacctgagactgggtaattataaaggaaagaggtttaattgactcacagttccacaagaagcatgactagcaggcctcaggaaacttacaatcatggtggaaggcgaaaggtaagcaaacacctttcaggttttgagaaagagagagcgagagagagcgaaagagagcgaagaggggaggtaccagacacttatcaaacaaccagatctcatgagaa

SEQ ID NO: 6626 - DNA, 742 bp, Homo sapiens
aacccgggaggcggagcttgcagtgagccgagatcgcgccactgctctccagcctgggcgacagagccagactccgtctcaaaaaaaaaaaaaaaagaaaaaaagttttagggtccaaagtcctcctttcattttgtagctttctgtccctttaaatgcaagctagcagtgtttctttcaaataattatttttcaaactttgcatatatcctrtgaatattttggggggttcactccatggaacaaaatctcctcaagataagcctttttctaccctgagcttctactgagactctcgagggacaacaatcttcaacctcttggaagtcttattgtttaactaaatggatctctgaggcactattttgcatttttttaaggtcttaaagaattttacagacattctgagcttttcttttgtactctgtttttctgactgtgacctggatttgatacttgccccaaagcaatttcttaatttcaataatgtctgccatctggagaggctggaaattttcaaaaccagcaagcctggctccattttgttttacagtccttcctgaagcttaccactcttttctcatattttgttgtaaacagcaagaagaaaccaggagaccccctcaacattctgcctgaaaatctccatagctagatcatgcagttcttcaggtactatattttctactttccacattacataggtgacagtgttgcttaactttcaacacttgtataacaa

SEQ ID NO: 6627 - DNA, 742 bp, Homo sapiens
aacccgggaggcggagcttgcagtgagccgagatcgcgccactgctctccagcctgggcgacagagccagactccgtctcaaaaaaaaaaaaaaaagaaaaaaagttttagggtccaaagtcctcctttcattttgtagctttctgtccctttaaatgcaagctagcagtgtttctttcaaataattatttttcaaactttgcatatatcctgtgaatattttggggggttcactccatggaacaaaatctcctcaagataagcctttttctaccctgagcttctactgagactctcgagggacaacaatcttcaacctcttggaagtcktattgtttaactaaatggatctctgaggcactattttgcatttttttaaggtcttaaagaattttacagacattctgagcttttcttttgtactctgtttttctgactgtgacctggatttgatacttgccccaaagcaatttcttaatttcaataatgtctgccatctggagaggctggaaattttcaaaaccagcaagcctggctccattttgttttacagtccttcctgaagcttaccactcttttctcatattttgttgtaaacagcaagaagaaaccaggagaccccctcaacattctgcctgaaaatctccatagctagatcatgcagttcttcaggtactatattttctactttccacattacataggtgacagtgttgcttaactttcaacacttgtataacaa

SEQ ID NO: 6628 - DNA, 759 bp, Homo sapiens
ttgctgctgcaaagtggcactgattctagctctgtcccttcctccttggctttctggcttcgatagggccagtggcagggtccactcatacaaacttgattggaagccacattcctctggttcacatatacttccagcatgtagtaaacggtccagaagacggtgaaacagcctaccagcaccarggtctggggccgaggcaagcacctacgtgaggcactgtttcccgaagcctacagcctttctcagtccaggacaatgagctcagaaagtctttttccttctagggactgcctttttcacccaaactgttccctctgccccctcccccgacaaggcctgtcctgtaagagttaggctagcagggtaggagcaatgctatgaaaccactgctgggacccaggtcttcccagtccttcaccccgcaggtcaccctgagaaacacactaagaactccatcccccagacaggacagtcccatctacccgcagcttgagtcttggccctagtaccttgagggtgttgggggtgatggtgtaaccatcttcctcaggaattttcagccccggtgggcagggcagggcgaagtcatcgtgcaggtattttccactcatggcactctctaacagcctgtggagaagaaaagaggtgaggatgccccactgactatggttcctataccatctgccctcacccattttcctgccttacaggtgaagacagggaagccccacagcaaaaaggagaggcccagactgt

SEQ ID NO: 6629 - DNA, 759 bp, Homo sapiens
ttgctgctgcaaagtggcactgattctagctctgtcccttcctccttggctttctggcttcgatagggccagtggcagggtccactcatacaaacttgattggaagccacattcctctggttcacatatacttccagcatgtagtaaacggtccagaagacggtgaaacagcctaccagcaccaaggtctggggccgaggcaagcacctacgtgaggcactgtttcccgaagcctacagcctttctcagyccaggacaatgagctcagaaagtctttttccttctagggactgcctttttcacccaaactgttccctctgccccctcccccgacaaggcctgtcctgtaagagttaggctagcagggtaggagcaatgctatgaaaccactgctgggacccaggtcttcccagtccttcaccccgcaggtcaccctgagaaacacactaagaactccatcccccagacaggacagtcccatctacccgcagcttgagtcttggccctagtaccttgagggtgttgggggtgatggtgtaaccatcttcctcaggaattttcagccccggtgggcagggcagggcgaagtcatcgtgcaggtattttccactcatggcactctctaacagcctgtggagaagaaaagaggtgaggatgccccactgactatggttcctataccatctgccctcacccattttcctgccttacaggtgaagacagggaagccccacagcaaaaaggagaggcccagactgt

SEQ ID NO: 6630 - DNA, 787 bp, Homo sapiens
caacggcttcaatgactggaccttctccactgtgcgatgctggggggagagagcccgagggacctacaggcttgtcatcagggatgtcggtgagtctcgtgccctcacaccaggccctacctttcctgcttgttatctggtccctctgcatctcagagtccccacagaaagtgtcccgtgtgcaatatatagggttgccattggaccaagagagttgatgccaagagtgtgcccatccgtgaaatgggcattgctctctgmaactgttcatttatactacctctcatattccctggaggagtgacccatccatctttcctcaggatagcaacaaaaagtccttgtcgaaaccacatttcaagtccttttacgtataaccatccttcggccagccccggtaggcaggtaagggcaggactcatttcaccattttttttaaactggcccagaggtttgaggtgacttgtggaaggtcaccatatcagtgaaggccacaatatccatgaattgtgaatatctttagtatcagcctatagactggaaattgagctccaccctcccatcctccagtcagttaggtattctctaggccagtggttttcaaagctttctttaatttggtggaaagacatttttttctaatcccagctgaacccccaaaatacgggagagaaaagcaagactctgctttggagtacagcctttcaaccctttccatccctaagggcacccagtgaggcccttctgcagaacctggggtcagtgggacacagtgaggcagctcctg

SEQ ID NO: 6631 - DNA, 825 bp, Homo sapiens
gatcctggagtaaataggcaccatatcatttacatgactgaaacagggcctcaaccagatgggagtccataattttacatatttccctttccctagccagaaaaactgaacatagcattaaagattataacttagaagatagtgtgttgctaagaactttgaatatctttacttctaatttaatgtcatatttttataccttttagtttttaaggtaaaatggtatttgtgattagctgtatagttatcagctttcctgagatcaataatgtagaagatgcaacttacggccgggcgcagaggctcacgcctgtaatcccagcactttgggaggccaaggcgggtggatcacgaggtcaggagattgataccatcctggttaacacggtgaaactctgtctctaccaaaaatacaaaaaaaaaaaaaaaaaaaattagccgggcgtggtggcgggcgcctgtagtcccagctactcgggaggccgaggcaggagaacggcgtgaacycaggatgtggaggttgcagtgagccaagatcatgctgctgcactctagtctgggtgacagaatgagactccgtctcaaaaaaaaaaaagaaaaaaagatgcaatttacaaaaggatcaacatgttatgtattgtcagtggtcatcagtgcctcgcacacagtaaatgctcaataaatctttgactgagtcagagaagactcagaatttggtttagtgttctatctacttcatatctgagatgctcttttatggtactacaaagagtgtaaagatggggaaaaaaggaagttacaggtccagtatggttatttccagtt

SEQ ID NO: 6632 - DNA, 825 bp, Homo sapiens
gtgctcaattccaaaggctaaggaaagcattgcgcatgcgggaaacccacgctgagggaagaatcatgggaaagaggtgagcctgtaaagttttaggatcaaggttaaaggcccttttttgctctcttctctcttggaccttcaggcgacggcttgggtatcttccaagcgaattttcctttctttcctgttcttttttttttttgagacggagtcttgctctgtcgcccaggctggagtgcagtggcgtgatgtcggctcactgcaagctccgcctcccgggttcacgccattctcctgcttcagcctcctgagtagctggggctacaggcgcccgccaccacgcccggctaatttttttgtatttttttttttagtagagacggggttccaccgtgttagccaggatggtctcgatytcctgacctcgtcatcctcccgccttggcctcccaaagtgctgggattacaggcttgagccaccgcgccccgctctttcgtgttccaaaggctttttaaataaacttccactcctgtcctggattctgctttatggccctcagtcgaattctttcttctgaggaggcaaggactgaagttgcttctgaccagtacaggtacgccgcacgtaacttggatctcttccaccgctaatagtttcttaatctgtaaaatgagataatgtgtgtattgcattaacccattcattgtgtgggtttaatgagatgatgtacgtaaagccctgagcatagtgcctggaattaagaagtcccttagtaaatgttaattgctgcattttcattattactacatcttccacacccca

SEQ ID NO: 6633 - DNA, 534 bp, Homo sapiens
atcagtgttctgagaccagagacagmaatcagtaccttgggcacatccttgaaagatctgagcattggtcatgtcgtcaaatgtccttcttctctagggagaatctgaaagctttccttctgatcttatggcattgtgatggggttagggattatggctaaaggaattctgaagtttttctaccaactatgatgaatctgatttcacactcacccaaagcgcagaaatctctcaactagtatttgaatttaccatgggaatttgtccatgtattactgttcaatctgtgtgttcttaatcagaaggaagttccagggctttctattctgccacttggataacatttatcaatatcatttttaccatgtgtttcaagttttaattttttaaattcctattttaaatttttgcatatttttcagtaatattagtatgcaaagttttaaaaattgttcttatagctgagttttgacgtaaaatttatattaacattccaaaactaagtgaaggaatttctctctttccttgcattga

SEQ ID NO: 6634 - DNA, 798 bp, Homo sapiens
ctgcacctgtccacacaggaaggtggaacaaaggggaagggtatattttaagcagcatggattcatttattcattcatttaattattcagaacacttttataatatctactcttttccaatcactgttctgggagctataactacaaggctgaaaagacaacatgtccctactttcaagtttacaatctagtggtggatgaggcaggcaatatacatatgaacaaacagataaacaaggtaggtgtagatagtgataagttctccagaattctaaggacagctctcctccaccttccagaaactagtagggcccaccaggttaggagccatagatcctgaggggacccaatagtctgtgagttgcccccaggatcttatatgtggctgacacatacaatttttcagttttaatattttatcgtcttggttaaatacctatctcatttaagtgacaagtgcctggggtgctacttttagcaagtttgtaaagaggaaatgtcaactcattctatgtagaggagagatcttttttwattttgttttattttattttattttattttattttattttattttattttattttattttattatactttaagttttagggtacatgtgcacaatgtgcaggttagttacatatgtatacatgtgccatactggtgcgctgcacccaccaactcgtcatctagcattaggtatatctcccaatgctatccctcccccctcccaccaccccacaacagtccccagagtgtgatgttccccttcctgtgtccatgtgttctcattg

SEQ ID NO: 6635 - DNA, 802 bp, Homo sapiens
ggatcctccctcccacagcctcccatgtagctgggaccacaggtgcacaccaccataactggctaattaaaaaaatttttttttgtagagatggcgtctcactttgttgcccagcctggtcttgaacttttgggctcaaatgatcctcccacctcagcctcccaaagtgttaggattagaggcatgagccactgcacctggcagagtagacttttttttttttaaagcagttttaggtttatggcaaaattcagtagtaagtacaggctcctttttctgcccccagatcgaatctaggacccaggatttgttgagtttccttagcctctactgccctgtgtgaattktctaatttgtccttgtttccacactcttgtgtgtgcttgtgtatgggaagtttaaagcccctcgaaaaacaccgtagggcactagtgctgtcagcatttggatggttggacggagtgtttccagtgggtatgggccgggttcataggcacctgcttcttgtctcctgtgtgggcttgtgcctgctttgctgtgttcctcgactctgtgccatgctattttcctggaagaaatccacaaggggccacagacacactttctccggggtgtagattgctttccttcactgatggatgcagctcattttccgtgaacttccaaggtccatctggaggcctcctgccgcagcccattgtggccaggtggtgtcggagtggtcggcatgctcaggtgtgttggaaggggccttgtgctggcttggcccacggaagacacttggcatccagccagaaggcgg

SEQ ID NO: 6636 - DNA, 802 bp, Homo sapiens
ggatcctccctcccacagcctcccatgtagctgggaccacaggtgcacaccaccataactggctaattaaaaaaatttttttttgtagagatggcgtctcactttgttgcccagcctggtcttgaacttttgggctcaaatgatcctcccacctcagcctcccaaagtgttaggattagaggcatgagccactgcacctggcagagtagacttttttttttttaaagcagttttaggtttatggcaaaattcagtagtaagtacaggctcctttttctgcccccagatcgaatctaggacccaggatttgttgagtttccttagcctctactgccctgtgtgaattttctaatttgtccttgtttccacactcttgtgtgtgcttgtgtatgggaagtttaaagcccctcgaaaaacaccgtagggcactagtgctgtcagcatttggatggttggacggagtgtttccagtgggtatgggccgggttcataggcacctgcttcttgtctcctgtgtgggcttgtgcctgctttgctgtgttcctcgactctgkgccatgctattttcctggaagaaatccacaaggggccacagacacactttctccggggtgtagattgctttccttcactgatggatgcagctcattttccgtgaacttccaaggtccatctggaggcctcctgccgcagcccattgtggccaggtggtgtcggagtggtcggcatgctcaggtgtgttggaaggggccttgtgctggcttggcccacggaagacacttggcatccagccagaaggcgg

SEQ ID NO: 6637 - DNA, 775 bp, Homo sapiens
taccttcagaacagatccatgtctgaccatctcagcaccggagggtgccctgtgctcatccggatggaggtcacagcctccctgcttctatcctccctgctccattctattctcagaacactgtccagaggggtcacatacaacccaaattagatcacattgcaccttgaagcgacactctccaggggtcacctgtctcactgagagtaaagccagactctaaagaggcgctgcaagggctgacaccttctcactcctgtccttctctaatctcctgtctggccacattctactcacacacctagctgtggccacacacacatttcctgctctctcttaaacaccctggggccttggaacttgctgtgccctctgcatagaatgccagatattctcaaaggtgactcaccttcttcctacgggacttttgttaaatctcattgacattgtagactccatatccagccatcaccacctccttctttccctccttcccaccaaggcacttgccattacctgatttcatacagatggctacctggagagatgatagatacattaggtagatgacagataaagataggcagaaaaaagatacagagatgatagatgagcagtgatagatagwgacatatagacgagatatatatatatatatacagatgacagatcatacatagaatgacagatacagacaaagatagctgatagatataactttgtattttttgcagagacggggtctcaccatgttgcccagcctggtctcaactct

SEQ ID NO: 6638 - DNA, 788 bp, Homo sapiens
cacctggggcatcctgtcaggcctcaggcaggcttcaaagggagcagtgctcattctggtgtcctgctactctaagagatgatgggctgaggatgctctgagcaccataaaatcctacaggacggagggctttctcctccaggctccctctagtccacaggagacaagctgccatacggaagcagtctcagaatgagatgcctcccccaccagcatcccaaccagcaacaagaactcctccaaggagcctccttgaagtgcagagtctcaggacccacgccagacctgcggcctccttcagatgcagagtctcaggccacactccagacctgcagcctccttgaagtgcagagtctcagttcccactccagacccrcagcctccttgaagcgcagagtctcagttcccactccagacccgcagcctccttgaagtgcagagtctcagttcccactccagacccgcagtctccttgaagcgcagagtctcagttcccactccagacccgcagcctccttgaagggcagagtctcagttcccactccagacctgcagcctccttgaagtgcagagtctcagtacccactccagacctgcagcctaagaaactctggctgtctggctgtctgtgcttaacaggctgtccacgtccctccaggggaaactggagtttgagagctgctggcccagagcattatcttgagaaagactttgagactcagtttggagtcagtggaaaaatgtgtcaggatagattagaggcgtcagcagggggcagggacgggatc

SEQ ID NO: 6639 - DNA, 788 bp, Homo sapiens
cacctggggcatcctgtcaggcctcaggcaggcttcaaagggagcagtgctcattctggtgtcctgctactctaagagatgatgggctgaggatgctctgagcaccataaaatcctacaggacggagggctttctcctccaggctccctctagtccacaggagacaagctgccatacggaagcagtctcagaatgagatgcctcccccaccagcatcccaaccagcaacaagaactcctccaaggagcctccttgaagtgcagagtctcaggacccacgccagacctgcggcctccttcagatgcagagtctcaggccacactccagacctgcagcctccttgaagtgcagagtctcagttcccactccagacccacagcctccttgaagygcagagtctcagttcccactccagacccgcagcctccttgaagtgcagagtctcagttcccactccagacccgcagtctccttgaagcgcagagtctcagttcccactccagacccgcagcctccttgaagggcagagtctcagttcccactccagacctgcagcctccttgaagtgcagagtctcagtacccactccagacctgcagcctaagaaactctggctgtctggctgtctgtgcttaacaggctgtccacgtccctccaggggaaactggagtttgagagctgctggcccagagcattatcttgagaaagactttgagactcagtttggagtcagtggaaaaatgtgtcaggatagattagaggcgtcagcagggggcagggacgggatc

SEQ ID NO: 6640 - DNA, 259 bp, Homo sapiens
acacacacacacacacacacacacacacacacactcattgtttttactgcacattatttgtacaggcactaacatagtattaggttagtacaaaagtaatttactaaataactaatactattagtaactaatactatgttagtgcctgtactttacatttaaaagtaatgrcaaaaatcacaattacttttgcatcaacctcttcactcatctgacattgccagggactgagcctttctatatcactgagtcattccag

SEQ ID NO: 6641 - DNA, 811 bp, Homo sapiens
atatctcacactacataccagagtaaactacaaatgaattatatatctaaatttaaaaaaataaaatcataaaagtattagcaggagacataattacaggaaagcccttacagctatgacttataatccagatccaaggaaagaccaatcaattacataccataaaattaaaagttgggggcagggaggcagaaacttctgtatggctaaagaaaagtcaaaagactaaaaatgaagaaaacatctgcaacatgtatcccaaacataagactaaatctttaaaactttaatagataaaagctcttcaaaaattaagaaaaaaacccacaaaatctcaatagaaaaaaaaaagatgaaatacaaagttttaaaaaaatacatacaaatttcttggcccttaaacataagaaaatatgcaattmtcaaaataagagaaattaaaattatgactacagtaagtcctcacttaacatcttccataggttcttggaaactgcaactttaagtgaaacaacatatactaaaaccaattttactgtaggttaattgatataaacaagagttaaatttctatggcatacttctggttccaaaaacattgaaacaaatatgagttagacatatatttaagaaatattgataaaaacaagtaagataattatttacacaattattctagttcagggatgcaggtggccagagcttatccaggcaactcagtgctcaaggtagggaccagatctggataagagaccttccttcacaggtgcactctcacacccacactcacttagactgggactatgtcgac

SEQ ID NO: 6642 - DNA, 808 bp, Homo sapiens
ttttgttttcttttgtttgagacggagtctcgctctgtcccccaggctggagtgcagtggcgcgatctcggcagcaagctccgcctcccgggttcgcgccattctcctgcctcagcctcccgagtagctgggactacaggcacccgctaccgcgcccggctaatttttttttttttttttttttttttttgtattttcagtagagacggggtttcaccgtgttagccaggatggtttcgatctcctgaccttgtgatccgcccgcctcggcctcccaaagtgctgggattacaggagtgagccaccgcgcccggcccactctgttttaaataacttaccaaacagtaaaattcttgttctacagagacgtaccatgtctatcttgtggttttataattcctatgtcatatcataggagaatatgtcccccagtcctatggtattataacataaaaagctattaggagtcttcctccacctcaaaaccaatgtacatcacccacacagccttccatcttcagactcctagcattttgaaacacttctctctctccttattctttgacctctcagactctctttaggcaatgaaaatgctcaaatctctttctaaaataagcaaataaaaaactaaactgttccctactcttgactttgcatttatctcatttcccactttcttttctcagattaagcttttttttttttttttttgagacaaagtcttgctctgttgccggggctggagagcagtgaggtgccctggtgcaaacctagctcactgcagccttraatgcctaggctcaag

SEQ ID NO: 6643 - DNA, 599 bp, Homo sapiens
tgactaggcaataattacacaaaaaatttttgttgattatgttttgttaaatgtgataagggcatcatggttaaacaagaatatggccctgtttttagagatgtattctaaatatttaagtgtaaaaaaaaatgagatttgggctttacaaaaaactacagaagaggaaagatgaagcaaatatggcacaatttttatctttatcattgttgaatttggattatgtatatatggtgtttcattatattcttctttagtgtatgtttgaaagtttcaccgtaggtttttttaaagcgaatatgtgtcccagaaatagaacctcagaaatagaacatctgtccctgagatttgcaatgtgggctcctatttgaaatcacctgtttccttctgtcacctgttttacttctttaaatatatatgtttaagcagagtagacagaaggaaacaggtgattaggctgctaatttattatatayatatgcctctcagtgtacctgttttagctactttgaaagaaaactgtatcttcaaagtcaattccttggatctgtcaatgtgaattttgcacattccatatggtttatacattgaggacacat

SEQ ID NO: 6644 - DNA, 636 bp, Homo sapiens
ggcactgatgagacattcacgttgcctggagagctttattttaaacaacgaaggagaaagaagaaaagaagaagaaggagaaggagaagaaaaagaagcagcagccgccaccaccatctcatgcccatttaaatgagaatttctgagcgtgggaccccaggcatcagatttttttcagtttctccttgggccaccaaggttgagaactggtacctcctgtagcagtggttctgaaacgccagctgcctcggaagctcctggagggcttgttagataggactgtgtcccaccacagagtttctgattcaggaggtctgggttgggctggkgctttgcttttctaacaagttcccaggtgaagctgctagtctgggggccagactttgagagcctctcgcctgcattctcaggactccttttgtggcttgtggacccacagcctggggtgtctcccagaagcttgttagaaattcagaatcttggcgcagtagctcacacctgtaataccagcatttgaggaggctaaggctggaggattgcttgagcccagaagtttgagatcaacctgggcaacatagagacacctagtctctagttaaaaaagcagtctatggccatactaccaggaacgtgcct

SEQ ID NO: 6645 - DNA, 1426 bp, Homo sapiens
ttataaatgcctaaggcactataagagtttgagagaattgtggggaaaaatattaattagagcagattctacttgagactcattctcttgtttaatcaggaatctcaacagtctcttgtaaatcaattgaagacccttacttgtagggactaaactgaaagagataaacataaagtgataacacattctgggagctcaataaatggtagctattcatattattctggggctaggatcagccccaacacatagttggttcagaatattgtatattatcacattctcatttcactagaacatatttcacttcttccttttyctacaaaaaaaataaaactcatcatttctgttgtctagcttacattaaccaattaaccatgccctatagaatcagatgagacttgaccagtaaccagaacaacattctctacaggatgttacaacacctgtagaggatgtttaaaagcagatgaactgtgtgctcccattccaggaacagacaaatggcaattcactgagtccagcctggggtgcagccagtatagtctctaccatcatattttccagccttcaaaccttttgcaaaataaattctaagcagctcagtaatgcaaattatttatgaaggatccatgctccaaaaacacatatgcacatgaggaaagagcagtctcagctcaattgcattttccttcactcaagtaacatttaatcaagatacaatagctgaaggtcacaaatcatggatgatgacaccttcgtggtcctgaagatttctaattgttcccttaattccaataacaagagtttctccctcagtctcacagctgacgtcttgttcggcagtttaaaaaacaaaaacaaaaacaaacctgtgtatcagtgagtacgtgttcagcattaagtaacaacaacaacaaatcactacccctgttggcaccattctcatatttgttatttatcaacaaggagttgggttggctagcaagctctatagcatcatcaaagacccatgctcctttcaatctcccactccatcatcctcggggtactgatttgcatcccaaggcattgcaggttcatggttacaagtggctgctaatcttccagagagagtatctttaaacgtcagcattcaaaactatttttatttgattcaattttttaatcagagatttaaaaaattttccccagctccccatatcccaccccctctccaacctagtagactttccatgcctctcactgtccggagatacatggtcgcccttagttcaatcactggtgatgtggaaataattatcatgatttgcttagatctattatgatttatgattcaccaactaaatcaggcaccttgtctctcaaacactgtcagggttctgacttcaagaaaggaaggctaaaagctattgagtaggcaacc

SEQ ID NO: 6646 - DNA, 1426 bp, Homo sapiens
ttataaatgcctaaggcactataagagtttgagagaattgtggggaaaaatattaattagagcagattctacttgagactcattctcttgtttaatcaggaatctcaacagtctcttgtaaatcaattgaagacccttacttgtagggactaaactgaaagagataaacataaagtgataacacattctgggagctcaataaatggtagctattcatattattctggggctaggatcagccccaacacatagttggttcagaatattgtatattatcacattctcatttcactagaacatatttcacttcttcctttttctacaaaaaaaataaaactcatcatttctgttgtctagcttacattaaccaattaaccatgccctatagaatcagatgagacttgaccagtaaccagaacaacattctctacaggatgttacaacacctgtagaggatgtttaaaagcagatgaactgtgtgctcccattccaggaacagacaaatggcaattcactgagtccagcctggggtgcagccagtatagtctctaccatcatattttccagccttcaaaccttttgcaaaataaattctaagcagctcagtaatgcaaattatttatgaaggatccatgctccaaaaacacataygcacatgaggaaagagcagtctcagctcaattgcattttccttcactcaagtaacatttaatcaagatacaatagctgaaggtcacaaatcatggatgatgacaccttcgtggtcctgaagatttctaattgttcccttaattccaataacaagagtttctccctcagtctcacagctgacgtcttgttcggcagtttaaaaaacaaaaacaaaaacaaacctgtgtatcagtgagtacgtgttcagcattaagtaacaacaacaacaaatcactacccctgttggcaccattctcatatttgttatttatcaacaaggagttgggttggctagcaagctctatagcatcatcaaagacccatgctcctttcaatctcccactccatcatcctcggggtactgatttgcatcccaaggcattgcaggttcatggttacaagtggctgctaatcttccagagagagtatctttaaacgtcagcattcaaaactatttttatttgattcaattttttaatcagagatttaaaaaattttccccagctccccatatcccaccccctctccaacctagtagactttccatgcctctcactgtccggagatacatggtcgcccttagttcaatcactggtgatgtggaaataattatcatgatttgcttagatctattatgatttatgattcaccaactaaatcaggcaccttgtctctcaaacactgtcagggttctgacttcaagaaaggaaggctaaaagctattgagtaggcaacc

SEQ ID NO: 6647 - DNA, 868 bp, Homo sapiens
catgccctctctggtggcttgactgtcaaatgtgagtcagagagctgccaatggccaaattcccaccactgctgaggatacagtttaagagaacagaacaggtttcagaaacaagagctggagaggaagagatcatgagctggcagtgtttatgtccctgcttctagctgtgcctgaggcccaactgcaggcctcattgcccaaggatttaggaactgagccaacacattccccatgtcacccatgagagtataatgtgagtataatggctcatttttagacagatgggactcaactactccaggctccaaagaatttactatcagtctgggaagccaagacttttactcctaagaagggaactaatatccaaggaccaaaggataagcttagcctgtaagtgccataaggtttcagagtggagagggatgataatgsgttggtgtgtttgaagaaaagtgatgaaggaaggtaaatttgagagagaccttaaggttaggtcagaacttagagaggaaagagacaggaatctcacagctgaagaattttctgggcagaagcaaagatgaaaacaagcaaagcagattcagagtaggccaatctaaccaattttgtagcctgtagctgagtcaagggatgttggaagccacatgaatccactgaaagttgacaagcagggtcttccatgatgccatttgtgggtattatgatgatttgtccaaaccttacagtagcttcacttacatatctggaatgtatagtaaaattctgaattctcttttatcatgtgtatgctaataaccataggcctatcctccttagaaaagcactattggtagagtatagattatttttaatgtccttccaa

SEQ ID NO: 6648 - DNA, 715 bp, Homo sapiens
acctctctgcaaggtcccagtctcttgtgcccactgggaaccagattggcccttggcaaaactgtgaaatggccgacatttatctttcaggcctcctatatctatattttagagagttttttctttttttcttttctttctttcttttttttttttttttttgaaagagtcttgctctgtctcctaggcttgagtgcagtggcacaatcttgactcactgcaacttccgcctcctgggttcaagcaattctcctgcttcagcttcctgagtagctgggattacaggtgtgtaccaccacgcttggctaatctttgtatttttagtagagacagggtttcaccatgttggccaggctgttcttgaactcctgacctcaagtgatttgcctgcctcagcctcccaaagtgctgggattacaggcgtgagcctccatgcccagccttcatctttcttctaaatcatctctctcaactttctacctttctcaggctcctggaggctaatcactgcaattttgttgccaggatctcacactgtaacattatatgaaacacctcatagtgaaaattatctggattctgccaatagcctctggttagccgtcctctcccagctgcagtccctgcaagtcaatactccatattgcggccacctgagytttcagaattgtaaacttgatcccatgaccccctcccacctacattaaaaccctcc

SEQ ID NO: 6649 - DNA, 667 bp, Homo sapiens
ttaatgggtgcagcacaccaacatggcacatgtctacatatgtaacaaacctgcacgttgtgcacatgtaccctaaaacttaaagtataataataataaaattttaaaaaaaggaatgaaccttaaaatattacactaagtgaaataacccagacataaaaggacaaatattgtatgattccagttatacgaaatatcatagagacagtaagtttaaaacttgttaccagggactgcgggagaggatgcagttgttgtttaataatggctgattgacttgccccttgtattgctatcattattaataactgcatcctctgtttctgtttgcaataatgaaacattttcgaagtaaatagtggtgaaagttgcacaatattgtaaatgtaatcaattccacagaattgtgtgcttaaaaaatggtttaaatggtaaattatattttatatataattttattttatgtatatgtacctaawtacaatagttttaaaaaatcatgctttctaacataaccaaattccctttggtttttgggagcatagattgcctcaagcattgttgaaagttatgtacagtcacccaagaaatgaacatatatgccacattttatttgcaatgccagggggttcatagtttttataaaagccctcctagatgccagaat

SEQ ID NO: 6650 - DNA, 667 bp, Homo sapiens
ttaatgggtgcagcacaccaacatggcacatgtctacatatgtaacaaacctgcacgttgtgcacatgtaccctaaaacttaaagtataataataataaaattttaaaaaaaggaatgaaccttaaaatattacactaagtgaaataacccagacataaaaggacaaatattgtatgattccagttatacgaaatatcatagagacagtaagtttaaaacttgttaccagggactgcgggagaggatgcagttgttgtttaataatggctgattgacttgccccttgtattgctatcattattaataactgcatcctctgtttctgtttgcaataatgaaacattttcgaagtaaatagtggtgaaagttgcacaatattgtaaatgtaatcaattccacagaattgtgtgcttaaaaaatggtttaaatggtaaattatattttatatataattttattttatgtatatgtacctaaatacaatagttttaaaaaatcatgctttctaacataaccaaattccctttggtttttgggagcatagattgcctcaagcattgttgaaagttatgtacagtcacccaagaaatgaacatatatgccacattttatttgcaaygccagggggttcatagtttttataaaagccctcctagatgccagaat

SEQ ID NO: 6651 - DNA, 632 bp, Homo sapiens
acactattacatttcttccttgctatatagactcctagttttagtggttcggggggatggacttgagactgatctctcatctcctcagctgcagcacccaattaaagygttcttccttggcaatacttatcatctcagtcattggctttctgtgcagagagcagcaggacctagactaaaccccagatgttttattaacacttttaaccgtttgcttgacttctgactaggaagattctagaaaaacatgctaatttctcaatgttccagtaacctcatgtgttaacttaggccaaacatgtcttccttccaagaaattgcaacaaatcacaaaaacaaggtgtattagtccattctcaaactgctaataaagacattcttgagactgggtaatttataaaggaaagaggtttaattgactcacagttccacagggctggggaggcctcaggaaacttacaatcatggcagaagaggaagcaaaaaaatccttcttcacagggtggcagcaagaagtgccgggcaaaagggggaaaagccttttacaaaaccatcagatctcaggagaactcactcattatcacaagaacagcatgaggataattgccgccataaataaactacctcccact

SEQ ID NO: 6652 - DNA, 790 bp, Homo sapiens
ctaggaggctcctctgcctctggaggcctggttaggaatgtgcgcttctaagtcccacctcagtgaatcttccctacagtttgagacccttggacctaaaagttttaagttactttaaacatttcatatgaaaatatgatatttcatggctttcctcttttttttttttttttttttttttgagatggagtctcactctgtcgcccaggctggagctcagtagckcagtcttggctcactgaaacctctacctcctgggttcaagccattgttgtgcttcagcttcccaagtagctgggactacaggcgtgtgccaccacgcccagctaatttttgtattttttggtagagaagggtttttgccatattgcccaggctggtcttgacctcctgagctcaagcgatccacccacctcagcctctcaaagtgctgggattacaggagtgagccactgcaccgggccagttcatggcttttctaattcaataggtgaaaaaaaaaaaaaaaaaatatatatatatatgatatttcatatccatagaatttctatgataacaatgattgtgtctagaggagagtactggaggagggaaattttcatgtgttaagtgaaatttatgggactgtcattggcttggactaagctcttgcctgcactaggcccaacagaccagacaaaaccagaatggagtcgctcatgccaggggccatacaatcaaactgaactctcaaacaggctgatattccaaaacacaggaaccaatcacagcaaccaactaaaaggggccc

SEQ ID NO: 6653 - DNA, 790 bp, Homo sapiens
ctaggaggctcctctgcctctggaggcctggttaggaatgtgcgcttctaagtcccacctcagtgaatcttccctacagtttgagacccttggacctaaaagttttaagttactttaaacatttcatatgaaaatatgatatttcatggctttcctcttttttttttttttttttttttttgagatggagtctcactctgtcgcccaggctggagctcagtagctcagtcttggctcactgaaacctctacctcctgggttcaagccattgttgtgcttcagcttcccaagtagctgggactacaggcgtgtgccaccacgcccagctaatttttgtattttttggtagagaagggtttttgccatattgcccaggctggtcttgacctcctgagctcaagcgatccacccacctcagcctctcaaagtgctgggattacaggagtgagccactgcaccgggccagttcatggcttttctaattcaataggtgaaaaaaaaaaaaaawaaatatatatatatatgatatttcatatccatagaatttctatgataacaatgattgtgtctagaggagagtactggaggagggaaattttcatgtgttaagtgaaatttatgggactgtcattggcttggactaagctcttgcctgcactaggcccaacagaccagacaaaaccagaatggagtcgctcatgccaggggccatacaatcaaactgaactctcaaacaggctgatattccaaaacacaggaaccaatcacagcaaccaactaaaaggggccc

SEQ ID NO: 6654 - DNA, 790 bp, Homo sapiens
ctaggaggctcctctgcctctggaggcctggttaggaatgtgcgcttctaagtcccacctcagtgaatcttccctacagtttgagacccttggacctaaaagttttaagttactttaaacatttcatatgaaaatatgatatttcatggctttcctcttttttttttttttttttttttttgagatggagtctcactctgtcgcccaggctggagctcagtagctcagtcttggctcactgaaacctctacctcctgggttcaagccattgttgtgcttcagcttcccaagtagctgggactacaggcgtgtgccaccacgcccagctaatttttgtattttttggtagagaagggtttttgccatattgcccaggctggtcttgacctcctgagctcaagcgatccacccacctcagcctctcaaagtgctgggattacaggagtgagccactgcaccgggccagttcatggcttttctaattcaataggtgaaaaaaaaaaaaaaaawatatatatatatatgatatttcatatccatagaatttctatgataacaatgattgtgtctagaggagagtactggaggagggaaattttcatgtgttaagtgaaatttatgggactgtcattggcttggactaagctcttgcctgcactaggcccaacagaccagacaaaaccagaatggagtcgctcatgccaggggccatacaatcaaactgaactctcaaacaggctgatattccaaaacacaggaaccaatcacagcaaccaactaaaaggggccc

SEQ ID NO: 6655 - DNA, 790 bp, Homo sapiens
ctaggaggctcctctgcctctggaggcctggttaggaatgtgcgcttctaagtcccacctcagtgaatcttccctacagtttgagacccttggacctaaaagttttaagttactttaaacatttcatatgaaaatatgatatttcatggctttcctcttttttttttttttttttttttttgagatggagtctcactctgtcgcccaggctggagctcagtagctcagtcttggctcactgaaacctctacctcctgggttcaagccattgttgtgcttcagcttcccaagtagctgggactacaggcgtgtgccaccacgcccagctaatttttgtattttttggtagagaagggtttttgccatattgcccaggctggtcttgacctcctgagctcaagcgatccacccacctcagcctctcaaagtgctgggattacaggagtgagccactgcaccgggccagttcatggcttttctaattcaataggtgaaaaaaaaaaaaaaaaaatatatatatatatgatatttcatatccatagaatttctatgataacaatgattgtgtctagaggagagtactggaggagggaaattttcatgtgttaagtgaaatttatgggactgtcattggcttggactaagctcttgcctgcactaggcccaacagaccagacaaaaccagaatggagtcgctcatgccaggggccatacaatcaaactgaactctcaaacaggctgatwttccaaaacacaggaaccaatcacagcaaccaactaaaaggggccc

SEQ ID NO: 6656 - DNA, 627 bp, Homo sapiens
ccttataactttccctgtaaagcccttgcaattgcttcaggtcagaaggcatagctatggtgggtttgtcaaaattctaaactgtaaccatttttaatcagggacctctccccttactcttgaattcatggactttcctggataccccttggtctaaccacctagaggagaaaagcagctgaaaagtgccacttctcatttagtgtgtgggggtggggtgggggcgtgggttgtgttcctctcaactccaaacatgcttcatcgaggaaaagagtaactttcaaatgtttcttctttggtcattcagtatactttaaaaagccatcttgcagtaacccatggctaartcctgttggctccatcctgctggtgagattgtgagtgtctttagtacctttcagctcagacccaaagcagaacacttccaagacaaacaggctgtctacaacctcaccaggaaactccagagggagttgtctccctgtttgtgcctaagctgaactcagttctgcaggaaactatgagtttgtgtatcttatatgtggccaggtgttgaagttctggctaaaggctcacattaaagaaaacttggatgatagcatctggatgagggaatggtgtcctacg

SEQ ID NO: 6657 - DNA, 637 bp, Homo sapiens
attttttttccgtcacctgtataatgagatagtagtaacgacctttatttcaagcactaaatgagataatgttcagaaaatgactaacacataacacatattaagtgttcaataagcacattttctaggttttttttttaatttttagttacttaaagaaacactcttctaagtttcacagtcaaaatctattatgtatttcctactgtgmatcttgaaattttattcaacattgtataaagagtaagaatcaagcttcattttttattcaattcccttttaaaaagatgatcaagaataaaggcatatgaagtaggaaggggaataagggagaaggggaaacacatttactgtgcacctacaaaagcatcctagaaaacaagtgctttatctaaatggattatttcttttgttcctcctagaagatggctacggagaaacaaaggatttacaggaaaacttttcataaacattcataagtagcctttaaaaaagaactgttcaatttctatttaagacactggcttggttcccataaacaaatgtcgcactaagagtaaaacttatatttaaataattacaactgttccttataatttaatcaatcagaaagcagtatcttaagaattttaacgaa

SEQ ID NO: 6658 - DNA, 637 bp, Homo sapiens
attttttttccgtcacctgtataatgagatagtagtaacgacctttatttcaagcactaaatgagataatgttcagaaaatgactaacacataacacatattaagtgttcaataagcacattttctaggttttttttttaatttttagttacttaaagaaacactcttctaagtttcacagtcaaaatctattatgtatttcctactgtgaatcttgaaattttattcaacattgtataaagagtaagaatcaagcttcattttttattcaattcccttttaaaaagatgatcaagaataaaggcatatgaagtaggaaggggaataagggagaaggggaaacacatttactgtgcacctacaaaagcatcctagaaaacaagtgctttatctaaatggattatttcttttgttcctcctagaagatggctacggagaaacaaaggatttacaggaaaacttttcataaacattcataagtagcctttaaaaaagaactgttcaatttctatttaagacactggcttggttcccataaacaaatgtcgcaytaagagtaaaacttatatttaaataattacaactgttccttataatttaatcaatcagaaagcagtatcttaagaattttaacgaa

SEQ ID NO: 6659 - DNA, 1039 bp, Homo sapiens
attttgtgccagagatttatttgcttcttgcaggtcctcacagagaagaggaaaaccaggtggatgggcatgtctatatcctgaaaaataggctttgaggttttgggagacagaaacaagaaattcatttttctctgaaatctactcttgcaagtaaaagtgatgctaaccaaaggagactgtgtatacacacaaaatccagcaatcctgccctccgggaaatggggacttttggatccagaaatcttctccaaggtcaccaatgcttaaccaagccaactgaaggtcattgtactcccaataccttctataagtaatttacctactatcattataatatatttgggttttcatctttaagctcaaagcaaggaatggacatcatggtttctttactatagaacatggaacctctttctgtcaatgtgtctctaaatctaaagaagttattaaaaggggaaaaaaatgtaatctttcttaggaacttgtggtagttttgtgtattagtccattttcacactgctgataaagacatacccaagactgggtaatttrcaaaagaaagaggtttgacggagtcacagttccacatggctaaggaggcctcacgatcatggctgaaggtgaaaggcacatctcacatggcagcagacaagagaagagagtgagaatcagtgaaagcagtttcccctcataaaaccatcagatcttgtgagatggattcactaccacaagaacagtatggaggaaaccacccccatgattatctcccactggctacctcccacaacacttgggaattatgggagctacaattcaagatgagattttggtagggacacagccaaactgtatcatattgttagcctaacggttagttaggctgagaagtttcctgtcgaaataggggcacattgtttgagagacagcagacttccttactgcttttctttgttgctctcatgtccctctgttgtgtggcaacaggatctctctcttcggtcactctgtcttcaatgaattgcctctgagatccttt

SEQ ID NO: 6660 - DNA, 668 bp, Homo sapiens
gagaagaaacccttttaaagcaagcatggcaatttcttctaaataagctggataaaattaaaaactcattcatccaaagatcctaaaaaatcaacaaattcctaaatattaaatggtatagacacaagtgtttcttaaatcacataaccttctccacggacactgtgaagatgtgttgccagtggcttccctaagagatgtgaaactttttaaatagtgtatacatacaagaaaagtggattttagtgtaatcttgcagaagaacaaaacaaacatggtatctaagagtacaaaggcacaaaagttgaaatttcatagtcactcaggccttggagtactgtattttcttgaaagggaaaaaagtagrccaggtgcagtggttcacacctgtaatcccagcaccttgggaggccaaaacgggaggatcgcttgaggctaggaatttgagaccagcctgggcaacatagcaagacccctgtctctacccaaaaaaagaaaaaagaaaagaaagaaaaaagtaggtggtaaggagaagtaaggagaagatgaattttttttttaaaaaaagttctgtataccacatgaaattttactgggaggaaagtgtctgaggttttaagaggcataaattaaataaccttgaaacccattttgctctaggactaccc

SEQ ID NO: 6661 - DNA, 668 bp, Homo sapiens
gagaagaaacccttttaaagcaagcatggcaatttcttctaaataagctggataaaattaaaaactcattcatccaaagatcctaaaaaatcaacaaattcctaaatattaaatggtatagacacaagtgtttcttaaatcacataaccttctccacggacactgtgaagatgtgttgccagtggcttccctaagagatgtgaaactttttaaatagtgtatacatacaagaaaagtggattttagtgtaatcttgcagaagaacaaaacaaacatggtatctaagagtacaaaggcacaaaagttgaaatttcatagtcactcaggccttggagtactgtattttcttgaaagggaaaaaagtaggccaggtgcagtggttcacacctgtaatcccagcaccttgggaggccaaaacgggaggatcgcttgaggctaggaatttgagaccagcctgggcaacatagcaagacccctgtctctacccaaaaaaagaaaaaagaaaagaaagaaaaaagtaggtggtaaggagaagtaaggagaagatgaattttttttttwaaaaaagttctgtataccacatgaaattttactgggaggaaagtgtctgaggttttaagaggcataaattaaataaccttgaaacccattttgctctaggactaccc

SEQ ID NO: 6662 - DNA, 463 bp, Homo sapiens
  misc_feature (1)...(463): n = A,T,C or G
cnnnnnnnnnnnnnnnnnnnnnnnnnnnnnnnnnnnnnnnnnnnnnnnnnnnnnnnnnnnnnnnnnnnnnnnnnnnnnnnnnnnnnnnnnnnnnnnnnnnnaaaatagataattgtgaggctggaaatggccacaaaaatagaaagtctcagtcttttgcacagtttccggacctgagtcaagactgatacctgaatctaccgagtaaaggacaaactgggttcccagggggaatcactcagcaacaccttagcagttgcggactgtagtgggctctccagaccttcccccsaaaagatcctacaccaacaccatttctttaggtggcattacactgaagaaagggagtatatcaaaatatttcaaaggctgtttcacacaggattcaagtagatacttggaaacccaaatctttacagaggtgttttggtttcagtggagcagattgggggaaagaaataaa

SEQ ID NO: 6663 - DNA, 841 bp, Homo sapiens
tgattagctttttcccctccccaccaccctttttgcttcacttttaaacaaccagatctcatgagacctctctcaccatcacgaggacaacaccaatgagatagtgctaaaccattcatgagaaatctgcccccattatcaaatcacctcccaccaggcccccctccaacattgggaattacatttcaacatgagatttargtagggatacacatcaaaactatgtcacccatgataaatgcgattactctataggttatggcaccaatacgggaattctgccaatggttaagggtatttatgctgattatatgttcagaaaccagaaaaataacagctgggtagaaatatgaaatggacctgaacaagggctctattgattatcacagaattacctgagactgggtaatttataaagaaaagaagttgaattgatgttacagttccacaggctatatggaaagcatggctgggaggcctcagaaaaattacaatcatggcagaaggcaaaggggaaacaagcacatcttaccacggcagagcaggagagagagaaccaagagggaagtgctacacacttttaaacaaccatatctcatgagaactcactcactatcatgggaacagcaagggggaaatccacctccatcatccaatcacctcccacaaagtccctcccccaatattgggaattacaattcaacatgaaatttgggtacagagccaaaccatatcacagagtaacatatgttcttactacagtgggggccatagtagttccttgggccttctggtttcaatgtcaaagtaaatgctgtattcaacagatttctaaagatct

SEQ ID NO: 6664 - DNA, 701 bp, Homo sapiens
aggtggaagccttagtgattggatcactgcagatgccagggtctggcaattctccacctgccattgaggctagggtgttaattactatacagctgtcaatgatcttatcccctgatatggtttggctgtgtccccacccaaatctcatcttgaattacagctcttacaattctcacacgttgtggtggagggttggggggagggtggtggggaaccccagtgggaggtaattgcatcayggggtgagtttttcctgtgctgttctcttgatagtaaataagtctcaagagatctgatggtttcatgaggaggagtttccctgcacaagctgtctctttgcctgccgtcatccatgtaagatgtgacttgctcttccttgcattctgccatgattgtgaggcctccccagccatgtggaactgtgagtctgttaaacctctttcctgtataattacccagtctcaggtatatctttattagcagcgtgagaacagactaatacacccccagaagcgcatccttaaagtaagattcctaggaccaattacgacacactcttttaggttgggttctccagattgagtttcctagaagcagagcctgaggtaaagatttgtgtgcaagtgatttactgatggagtacttccaggaaaatctggaatgagaaaagctgacaagggtaggtggggaaaggtaatcag

SEQ ID NO: 6665 - DNA, 701 bp, Homo sapiens
aggtggaagccttagtgattggatcactgcagatgccagggtctggcaattctccacctgccattgaggctagggtgttaattactatacagctgtcaatgatcttatcccctgatatggtttggctgtgtccccacccaaatctcatcttgaattacagctcttacaattctcacacgttgtggtggagggttggggggagggtggtggggaaccccagtgggaggtaattgcatcacggggtgagtttttcctgtgctgttctcttgatagtaaataagtctcaagagatctgatggtttcatgaggaggagtttccctgcacaagctgtctctttgcctgccgtcatccatgtaagatgtgacttrctcttccttgcattctgccatgattgtgaggcctccccagccatgtggaactgtgagtctgttaaacctctttcctgtataattacccagtctcaggtatatctttattagcagcgtgagaacagactaatacacccccagaagcgcatccttaaagtaagattcctaggaccaattacgacacactcttttaggttgggttctccagattgagtttcctagaagcagagcctgaggtaaagatttgtgtgcaagtgatttactgatggagtacttccaggaaaatctggaatgagaaaagctgacaagggtaggtggggaaaggtaatcag

SEQ ID NO: 6666 - DNA, 904 bp, Homo sapiens
ccctccttcataaaattctgtgtatcatgattttccacagtgggactatttggtagtattctcttatacttaaacccctgttaacacttgtaagttttctattacctacccacccctaaatgatgacaaggcaaagtcagagagcgtcagtgtggaaatataaatctgacttctcaacccagccctgagcccagacatagtgttgctttgaaaaggcactaaacttgggcccccagattgtcacctataaaatgagggaattggagtgattgtttctgtttccttccggccttattctaagaatacccgttaagtgtaacaattattttaagactgaacttatggtaacttaaatgttaccgtcatggaaaattaagatgcctttgttaaacaagggaagtaccagtgtgctgtcaaatatggaattctcttgtataaatgtgactggagaaaaaaaatgtgagagagcaacctctgagcaaggcttctgatagtctctgaggtaatatcctgagaggatatggctycttattaagagatcccggcccagcacagcagaaggaggaagaagcagcaaaatgttttcccctgtgatatgttgctggtctttcacagatctgtattgtttttcctcccttgtttccatttattggttaactactaatattaatagttttcttagccttgtagtaacccccatttgtgatttagaaaacagattccaaaggcaatccttgtttcactggaagttgagattttggcttgctgtacctcgtggccttctgggttctgacggaggcttaacctgagaagaatattatgtctggttaaggaacagagcagtccctgagctgccacaactatagatccttggtatgccaggaaatatacttttgttccagga

SEQ ID NO: 6667 - DNA, 904 bp, Homo sapiens
ccctccttcataaaattctgtgtatcatgattttccacagtgggactatttggtagtattctcttatacttaaacccctgttaacacttgtaagttttctattacctacccacccctaaatgatgacaaggcaaagtcagagagcgtcagtgtggaaatataaatctgacttctcaacccagccctgagcccagacatagtgttgctttgaaaaggcactaaacttgggcccccagattgtcacctataaaatgagggaattggagtgattgtttctgtttccttccggccttattctaagaatacccgttaagtgtaacaattattttaagactgaacttatggtaacttaaatgttaccgtcatggaaaattaagatgcctttgttaaacaagggaagtaccagtgtgctgtcaaatatggaattctcttgtataaatgtgactggagaaaaaaaatgtgagagagcaacctctgagcaaggcttctgatagtctctgaggtaatatcctgagaggatatggcttcttattaagagatcccggcccagcacagcagaaggaggaagaagcagcaaaatgttttcccctgtgatatgttgctggtctttcacagatctgtattgtttttcctcccttgtttccatttattggttaactactaatattaatagttttcttagcctygtagtaacccccatttgtgatttagaaaacagattccaaaggcaatccttgtttcactggaagttgagattttggcttgctgtacctcgtggccttctgggttctgacggaggcttaacctgagaagaatattatgtctggttaaggaacagagcagtccctgagctgccacaactatagatccttggtatgccaggaaatatacttttgttccagga

SEQ ID NO: 6668 - DNA, 904 bp, Homo sapiens
ccctccttcataaaattctgtgtatcatgattttccacagtgggactatttggtagtattctcttatacttaaacccctgttaacacttgtaagttttctattacctacccacccctaaatgatgacaaggcaaagtcagagagcgtcagtgtggaaatataaatctgacttctcaacccagccctgagcccagacatagtgttgctttgaaaaggcactaaacttgggcccccagattgtcacctataaaatgagggaattggagtgattgtttctgtttccttccggccttattctaagaatacccgttaagtgtaacaattattttaagactgaacttatggtaacttaaatgttaccgtcatggaaaattaagatgcctttgttaaacaagggaagtaccagtgtgctgtcaaatatggaattctcttgtataaatgtgactggagaaaaaaaatgtgagagagcaacctctgagcaaggcttctgatagtctctgaggtaatatcctgagaggatatggcttcttattaagagatcccggcccagcacagcagaaggaggaagaagcagcaaaatgttttcccctgtgatatgttgctggtctttcacagatctgtattgtttttcctcccttgtttccatttattggttaactactaatattaatagttttcttagccttgtagtaacccccatttgtgatttagaaaacagattccaaaggcaatccttgtttcactggaagttgagatttyggcttgctgtacctcgtggccttctgggttctgacggaggcttaacctgagaagaatattatgtctggttaaggaacagagcagtccctgagctgccacaactatagatccttggtatgccaggaaatatacttttgttccagga

SEQ ID NO: 6669 - DNA, 847 bp, Homo sapiens
aagagattagattataaaaacttgattggatactgaaaaaaatgtactgattagttaattcctacagaggcctgggcttaagcttgatgtaattacagcatggtagctgttcttatagcatagctctcctgcctgtgcagccgactcataaatctatgcatctccctgctggccctggccttctggcttcctgaagacatgtccccatggccattccataaataccactatctcagccattcagaagaaggcatgtcacctccctggagccctacccctgtgcttccttcctactctgttttataatctcaacaaataggaacattattttcatgttactcacgttgaaactgtggaacattttcagctgtgctcttttcctttggagatctcttttctctcccacctgcttattctgcctccagaatgcctactccttcaatccccaccattctaaggtgctatcagccttgcaccaggccactgctgtcatgtcttatttggagtatttcagtaagcacctcactactatccttgacttcagtttctttctctccagtctaatrtgtgtgaagcacggttctgactatatcccttgcaagctgaaaaagcctttgctggtttccttttcttacaaaataaagtccagcctccttaacaagggattcaaggtcctctgtaatctcctcttatctgtctttcgtccctagtctcccttcgccctacgctttcaacatgcatactgtattataggcatagctgtgttttacattttcctgcttttgtgtctttgcctggagttttctttggcctggaattttctcccatccaatttctgctcttcaga

SEQ ID NO: 6670 - DNA, 589 bp, Homo sapiens
ggcgggggatagctaatagttgttgggtgctctctccacatgctttcccttggttttcttatttaaattttcacatgcccctgagagtgaaggggttacatgaaggtgccccagggcacagagctctatgggagagtggacccacctaggggccatcaccatcacaaagggaccctgggaagaggggcagcttccaaggagtgctccaaggagacctcttctcgagcatgggcaatctttagttcacaggcaaaaaagctgtggaagagagacaaatcgacccctgtggtacaaacgtggctgatacccaaggcatttcaagctagccagggtgggacagggtctctaggggtttactgccggggtttgcatctggccaacagggctgtgcccaccaggcagggcgccccgcctcctttacaacagggcaacgtgagggccggagggcctcacaggcagcaccatccccgtctgtggagggtcccggagccagggatgggccaatgggcaatatcgtttaaacctcaccaccttataactggcagaaggtgaggggcagmccattgcagagatgaggaaatcacatatg

SEQ ID NO: 6671 - DNA, 869 bp, Homo sapiens
cagtgggctgccacgaggtggatgcagggcacagctctcgtcatggcctgcatgcgccactgcctctggcaagcgtcactcctggtggcaggctgtggagacatcctgggctaccaggaacagtgtcagctcagaaccagccctcaatggtgccgggaggtccaggtacttctctgtccaggaggctctggaagattcacggcatatacctgtgctgttacgcaggtgaccagcctccctacaactcaaggagttttgggtctattgagagatctgggaattgggcaagaggcaatgtagtttattcagcaaatattggttgaacacctactatgcgccagatgttgttctaggcactcatggtagactcctgcctaccagacctagttttaaaaagtggttgtttgtttgtttgagacagagtctckctttgtcacccaggctggaatgcagtggcgcgatttcagctcactgcaacctccgtcttctgagttcaagcagttctcctacctcagcctcccaactaggtgggattacaggcacgcaccaccatgcctgactaattttttgtatttttagtagagatgggatttcgctatgctggccaggctggtctcgaactcctgacctcgtgattcgtccgccttagtctcccaaagtgctgggattacaagcatgagccaccgcgccaggcctagaaagcttttttttttttttttttacatttctattaatactacacacatcagataggaccctattggcattacctgttgatttcagtcctagcagtgccatgggtgagtcgtcagtgccaaggagtctcagcatgagaacatcttggtgcccctctggctgccggcacctga

SEQ ID NO: 6672 - DNA, 824 bp, Homo sapiens
tggattagcttgtgggccctctgtgcaacagtaggagtcgttgtaagagggaagcaagaggccgggcgtggtggctcacgcctgtactcccagcactttgggaggctgaggcgggcggatcacgaggtcaggagatcgagaccatcctggctaacatggtgaaaccccgtctctactaaaaaatacmaaaaaattagccgggcgtggtggtgggtgcctgtagtcccagctactcgggaggctgaggcaggagaatggcttgaacccgggaggcggagcttgcagtgaaccgagatcgcaccactgcactcccgcctgggcgacagagcgagactctatctcaaaaaaaaaaaaaaaaaaaaagcaagcaagaagtcaaaggcaggaagaggaggcttggtgacagagaagaggtgggagggatgtgctttgcagagggagcaagggcctccagccaggagaggagggcaggctgtcgaagcagaaaagaaaacagatctccctgcagggccaccagaaggaaccagccctgcctgccccttcattttggacttccgagctccagaactgcaagagaataaatctagtttaagcagcaaagttggtggtaacttcttagagcagccacaggaagctcactaccccccacacactcatcccgtttggtttttgttttcaggaagggtccagtctgtctcagaggtgctgtggttggaggtggagtgtggggcatggctgagcacccaacatccgcttcaccctctcccctgctccccagcacgttccttcaccctgtagctctaggtctctgtggcagacactca

SEQ ID NO: 6673 - DNA, 824 bp, Homo sapiens
tggattagcttgtgggccctctgtgcaacagtaggagtcgttgtaagagggaagcaagaggccgggcgtggtggctcacgcctgtactcccagcactttgggaggctgaggcgggcggatcacgaggtcaggagatcgagaccatcctggctaacatggtgaaaccccgtctctactaaaaaataccaaaaaattagccgggcgtggtggtgggtgcctgtagtcccagctactcgggaggctgaggcaggagaatggcttgaacccgggaggcggagcttgcagtgaaccgagatcgcaccactgcactcccgcctgggcgacagagcgagactcyatctcaaaaaaaaaaaaaaaaaaaaagcaagcaagaagtcaaaggcaggaagaggaggcttggtgacagagaagaggtgggagggatgtgctttgcagagggagcaagggcctccagccaggagaggagggcaggctgtcgaagcagaaaagaaaacagatctccctgcagggccaccagaaggaaccagccctgcctgccccttcattttggacttccgagctccagaactgcaagagaataaatctagtttaagcagcaaagttggtggtaacttcttagagcagccacaggaagctcactaccccccacacactcatcccgtttggtttttgttttcaggaagggtccagtctgtctcagaggtgctgtggttggaggtggagtgtggggcatggctgagcacccaacatccgcttcaccctctcccctgctccccagcacgttccttcaccctgtagctctaggtctctgtggcagacactca

SEQ ID NO: 6674 - DNA, 774 bp, Homo sapiens
tttttagtagagagcagggtttcaccatgttgcccaggctggtcttgaactcctgagttcaagcgatctgcccgcctctacctcccacagtgctgggattccaggcgtaagccgccacgcccagcaactccgtttcttacttgttggctcacattctcctgagaagtcctccctcaaccatcggcctgaaatagcagcgagcctccccagggttgcctctgccttttcttgactctttctgtcaccttctatgcttgttgtctggtccccactagaatataccttctgtaagagcagggatttgggacagtgcctagaatagtacttgcagacagtaggctacgataaatatgaatgacggccccatgcagatggtagcccctctcgctcgaacgcttcacccagttttattttcttttcatcagttaccgccctctgaaggtatccacacacaaacatgaaactggaccaaagcagggaccccccgcacgcagaatagtgctgggctcrcgtaaggcacctcagtgggtccatcagctgatgcatggacagacaaaatgggtgtatccagacactggagtatcgtgcagcgaggaaacgtgctgagtgtggatggaccttaaacacaccatgcaagtgaaaaggcgtcacagaaggccacatacgatatgatcccatttctatgaaatgtccagaagaggcacattcataaagacagaaggtgactgagtggttgtcgggctgggtggaggggatagggagtgaatgcaagaa

SEQ ID NO: 6675 - DNA, 777 bp, Homo sapiens
tgtctgctgaatgtgtaaatgtcatcrgtatcactatgtgaaaccactgtaagaccaaaacagaatggaaaaatctaaacacctcagtggatggaaattcctctctgaagagtaactgtgaagcagaagaatattgtaacatggtactctaaatggaattaagtagcttcaagcacagtggactatggaaaacagtttgattcataaattcaaaaactaagatcagaaatggaccaaaacccaagaagaaatgaaatgaaaattgattgaacttaggaaagaaatagaataaaatggttggctttatttattcatttattttttaccaatacagattaaattataaggtgtcaaagagagaatagatttgaaggaaaatcaaataggtgacactgaagaaaggcaggagaacaatgaagagaatgacaatgatccaaagaaacaagtgatgagggtgagagggaaagaggctgaaatggaagaaaggcaaagaagagccaccatatgaataactggagtccctgaagaagaaaaacaagaaaatggaacagaatgagtatttaaaattgcaatccaagagaacatttggaaataaaagacaacctgaatctacatggtgtaattatccagaatggtaatctctaagagcataataagatgattatatatagtatacattcagaaagagaataataagggtttcagagaggaaccacgaaagcaaatggagaaaaaaggaaagcgtatatgaatattctttactattattgcatcttt

SEQ ID NO: 6676 - DNA, 777 bp, Homo sapiens
tgtctgctgaatgtgtaaatgtcatcggtatcactatgtgaaaccactgtaagaccaaaacagaatggaaaaatctaaacacctcagtggatggaaattcctctctgaagagtaactgtgaagcagaagaatattgtaacatggtactctaaatggaattaagtagcttcaagcacagtggactatggaaaacagtttgattcataaattcaaaaactaagatcagaaatggaccaaaacccaagaagaaatgaaatgaaaattgattgaacttaggaaagaaatagaataaaatggttggytttatttattcatttattttttaccaatacagattaaattataaggtgtcaaagagagaatagatttgaaggaaaatcaaataggtgacactgaagaaaggcaggagaacaatgaagagaatgacaatgatccaaagaaacaagtgatgagggtgagagggaaagaggctgaaatggaagaaaggcaaagaagagccaccatatgaataactggagtccctgaagaagaaaaacaagaaaatggaacagaatgagtatttaaaattgcaatccaagagaacatttggaaataaaagacaacctgaatctacatggtgtaattatccagaatggtaatctctaagagcataataagatgattatatatagtatacattcagaaagagaataataagggtttcagagaggaaccacgaaagcaaatggagaaaaaaggaaagcgtatatgaatattctttactattattgcatcttt

SEQ ID NO: 6677 - DNA, 856 bp, Homo sapiens
cagcatcttttcactgccctaaaaattctctgtgctctgcatattcaacccttctcccacctcctcaccatcccctggcaactgctgatctttttctctttccatagttttgcctaaggaaagtactttttttcttggaaaagttgttaccttgtttgctctctccaccgtcctgtttatatctgccctcaaagacacataaatttaatttctataattctcatattttttagtgaattccactgacttctagataccttaattattctttcagcaatctgataataatttattaatttatttaacaagaatgtattgaagaattactacatgccagacacagttctagtcactggtaataagtaatgaacaagataaacaaagttgttagccacagggaagacaattaataaataaatgggcaaaatttctcctttctcctattgggagaaatagtcagattatctatctgtctatctatctataataggagaaacagccaggttatctatctgtctgtctgtctrtctatctatctatctatctatctatctatctatctatctatctatctagtctatctatcctgtaacatctgataatgctgtgaagaaaaataaagtaggtcaatgatatggagactgatggagtgagggagggtagaattttgttttaagtttggtgggcaatctctggagggatttgagaagggattgatatgatctgatcatgttgactgctgaatggagaatagagaatatctatgtgggcaaaaatgtcgaaggctgagaaactgtttcagattaaaggagattaaagagacatgacaactaaatgcaatatgcaattcagtact

SEQ ID NO: 6678 - DNA, 726 bp, Homo sapiens
ccaaaaaaaacgaaaaaaaaaaaaaagacggacgtaccgaagaacggcggtaactcctccccctcgagccgcccggcctggggccagggtgagctacgagagccgctctcccggctccgcctcccgctcacgctctgcttccgccttccgtccccgcggccgccggcgacctgggcctacttccacttccggggtcaccagggaagagacgggaaggaaaagaaatagcggttggctgagaggcaagccaatccagctagggctgcgtcgactccaaggaggcggtcctaaggaagtactggccccgccatttaaaggcccctccctccgcgtgtgggaatgggattcccgcaggttgcaccgcaggaagcaaggcargtggactctgcaccaatgcctgcagactaagggcagactctcaggattgctctgggtgtattcctaggctttgtattcctgggagatggagggcagccaccgagccacatatagtctttttcccttgcagacaaaaccagggagctcagaagagtcactgccctgatcccttccgtgccggcagctgcgaggacacaggcccctttgtatcctgcggtgcggaggtggagcagaggagagggtgccccggctggccccctccctcgccccgcagcactgcccctcctttcacagcaacccacggcctcccccgcgcttgacccagctggcgagctgccccttatacct

SEQ ID NO: 6679 - DNA, 808 bp, Homo sapiens
cgcctataatcccattactttgggaggccgaggcgggcggatcacgaggtcaggagatcgagaccatcctggctaacatggtgaaaccccgtctctactaaaaatacgaaaaattagctgggcatggtggtgggcgcctgtagtctcagctacttgggaggctgaggcaggagaatggcgtgaacccgggaggcggagctcgcagtgagtggagatcacgccactgcactccagcctgggcgatagagcgagactccgtctcggggggaaaaaaaaaaaaaagacttatctatactgatttactaaaagacaggagacaaaatatggacttcactttcatcataggaacaaaatcacttggtatactccattatgacacccacatggtccaaatccatgccctggccaaatgagggaaaaaaccctcttttttgttgtgctggcactagcacctgactgaagagctattctcctttgaaatttttggagacttttagcaaaccacatcagtcgcctccctatgatttcaaggtagcattatataatagcagtgaactggtctcactacctctggggtgkgaaccctccaatctactctatattcttccatgatgttatcccttctagagcataactttggttactatcattgcattatctgaaatctacaaataatggtttccttaatgcttattgggctagtccaaactcctgtgcctgaatggaacaagatcatttttgttaattagctactaacctgtttccttctccttcaaaactttgtttacactattcatgcttttatttt

SEQ ID NO: 6680 - DNA, 1648 bp, Homo sapiens
tgcatattataccttgaaagtgctgagaaacactaaagaatacttttgaattgttgcatccaaaattttccccaatgttatagctatggaatacgactagggtcccgacaacccttttaaagcatattatacgattccacagaacatactctaggaaatggtgcactaggacatttttttctgtgtttcctgttatccccgtgttttttaaaggcccccaggaattagcctacttgccttcctatcccctactactcaccaggcttttctgccttccttgccttactgcagaatagaacaaagtttcattatttttcctcatcctcctgactttgtggttgtctaagtcttttttctgttaagaacaatgggaaggaaggaagtttcccccagaaagacagtgatatgctgaaatggatgctggacacaaaatcaaaagagttcaaattttggctttgcatttattatgtgtcatctgtgagtcttagtttgcttatttataaaatggagtaataaaacctagcaggattattgtgaaaattaggtgaaataatttatgtgcaattatctggtatgtagtaagtgctcaataaatgtggagcaaataaatgtgttttccaaacagggatgagctatctaggaggtgggagaaagttaatcagataagacagggaaagaggttttttgtttgtttgttttgttgtggtggtggttgttgttgcctgcttcatttttccttcatagagcgatttaagaagaatgcttagtaccaaaatacttaaggataaaatatatgatatctgggatttgcttcaaaataaaatgggggtgggtgtgtatgaaataaaattggaattaataatgaattaataatttttagagctggctattaggtacgtgaggattcattatactcttctgtcctcttatgattatgtttaatttttcctattttttgagacagggtctcactctgtcacccaggctggagtggagtgacacaatcacaactcactgcagccttgaccttctgggctcaagggatccttccacctctgcttcctgaatagcaggcataggcccaagctaccatgcctggctaatgtttgtatttttttttgtagaggyggggttttgccatgttgcctaggctggtctcaaactcctgggctcaagcaatccgcacctggcctattgtgaaatttttcaaggcatacagctataccatatactatatagatttcacccatagcgtaatacttcaagatgcataaattcaaggatagaataaattaagtagattcagtgttaagggtgggaaggagttctaaaagcagaagtcagcctggttttaggtattaaaaatagagaaatgttttttttttgagctaagatttgagcaagaaaacaaaaaatgaggaccaagcctatctgaacgttttaaatgttagaatcctagaagactgctgtgaataggaccagtctctacgctgtggacaggcataagctgagacccaaagctgttaataatttctgaaatgtcccaggctggttagaagcaaaactaggacaagaatctagtggttgttttatcaccgtgctttccttttttctaaatttaaccaagttatttattgtgtattttttt

SEQ ID NO: 6681 - DNA, 664 bp, Homo sapiens
cgaacggccacattctaaacagaagagtgaacaggaaatagacaagcccttattagacttgaaagccagttttgaattatctcggttcctgactggaacaaagtgatcagcatctagtctgccagccagacaaaagcaaaaggaaatcctgtctgcattaaaatatcaccttgagtgtcaaattatttctacaaattttctttttttttttttttttttttgagacggagtcttgctctgtcgcccaggctggagtgcagtggygcgatctcggctcactgcaagctccacctcccgggttcacgccattcacaaattttcaatagaatgtttagtagtcacccaaagatgatttagtgtaataatgaacaactagaacataaaagaaaaaatttccatttacactagtatcaaaaaaggtcaaacacatagcaacaaatgtaacaaaatgtgtaagacctctacagtaaaaaccataaaacactgctaggataaattttaaaagacctaatggagagtgaaaatatgctcatggatctgaaacttgaaactgttaatatgaccattcttcctaaattagtttctagatttaccacaatcccaatcaagcatttttagtagcaatagataagttgattctaaaatgtctacgaaaatgcaaagg

SEQ ID NO: 6682 - DNA, 653 bp, Homo sapiens
aagacctgtgcctatgtgagctgtgaacagatagagagacaatgtgactggagaggagtgagcggtaagcaaggacagrcagaggacagtcagaaggattgggtcagagagaccagaggtgggagcaggaccttgagagccattgtaaagacttcacttttgccccaaaatatatgagggactcctgcaagattttaagcagaagggtgactttagctggtttatatcatcagagagactgcttcacttttatggctttagaccctaaaatggaagttaaatatggtggtatctcaaagtgattgtggctagcagtgtcactggaggtggagaaaccaggttttgtaacacattcagggtacgtgtattctactctttgtattgaagaaattcatactagtttcttttttttttttttttcagaaataaaattctccatttcccagagacctctagaaaagaactctctacctcttcatgggaatatacttttgctgcaagaaaataaaatgttttctctttatctcttcatggcagacctaagtgtgagaaaaaggttgctggtgatttaccacaccacagcctgagtacacccaggcacgcatctttaaaacatgcccaaagatatctctgtgaaatgtattcagtagtgg

SEQ ID NO: 6683 - DNA, 786 bp, Homo sapiens
tttattcctctgctgtctgggaagttttgatcaagaaaacacttctgctcattagagaattgaccagatgcagtgctattaacatttctgtgatcaaataaagctcacccagatgaaagaagaattgcaacactaacagcctggaagcactcaaccgtggagatattacccccaaaagtgaagcatgctaagatacaaaacaaactgacttcaagcacatctgattaacatggccattgttaactttcccactacttgggcagactttaaacctgcttatggataaacagtcatatgatgctggtataagaaccttcattttatatcagtgtaattcctctaatggcacatgttcttcatgttttatagaaaatctgcaatttgattatttttgtttactccctcagtacatgtaccctgagacaaaactaaactgattccatatatagaatcttcaaaaacaaattttgttaaagatgtgtttttgttagaagttttagcaaaactgtgttaagttagaaagacacaagtaatttataacttcatggccaatttaatgtcacttctttccccagtcttctctcctccatatttgtctacattcttactatcattttctgcttattctttgctcattactatatttgataataccaacaataaggcattttaaaagtttgttgctgatttgactaagaacatctcagtaatccaactraactgtacttcactgtgtgattttagaatgcttttcactaagtttagcaaaaagcttcagagaattgt

SEQ ID NO: 6684 - DNA, 755 bp, Homo sapiens
cttcaatgtagtgtgttacctggctgcatcttctggaatttgagtttatgacccctggtctattctcagaagacaaagctctgatcttgtgtaaaagtacagaaaagaagaaaagcattctgatcaatcactctttttctgccctaaattttaatatagagcaatctaatctgggctccattataaaatgtcagctataaggactaacataatttaactgatttttttatgatgttagacttttagggatttttttcattttattatgttatagagcacagctaactatatgttcaatgacaacagtgtgagttattctaaatggcacactagatcccccattcttaattgaatagcctaaggtagatttagttcatcttatctaatcaagattcctgaggttccaaaggaaatattcattcttattttggctcacatagaataacacaagatctctagggtaaaacacaattttcattggaattgtttaccctttgagagagtaaattgtcagaattttcttggctttttcaggctgcagctgtatatcttattctgattgtattttcaaagtacttttctcttttcaattgcyctacaagtgcttggagactccctggcattctcagattctcaacacaactcctcaactcagggagaacacaagtctctttcaatcctcttcctgggttttccctccagtcagtaaactgaaaccatcatagagtttaccaggtttattttccctcttttag

SEQ ID NO: 6685 - DNA, 799 bp, Homo sapiens
ctgtaaaagtaaaagcaccaagtctctgatttccctcagggagacagggaatsgcctgggtcagattccatcggattccatgtcctccccagtctgcctcgcaccttgcccctcccccagtgctcggtatttggttggcgggtggcttccccagctccctaatccaggctgtctgccacaccctatatggcttttcatggagagggtttactttaggggattctactctggagtgcttgtcccaggcagccctccacctcgacttggtaaccgcccaataggttcattttacccacttcccagatagaacagatttatcaacggaggaattgcaataattcacgcagagctggctgatcgggagaagagagttttattattactcaaatcagtctctctgaaaattccagactagtgtttttaaaggataatttgatgggtagagggccagggagtggggagtgctgattggtttggtcagagacaaaatcacagagcctccaagtggtcctcttgcgctaagcagattcctgggtaggggccacaggaccagccagccagtttctcaatctgggtgacgccagctgatccatcaactgcagggtctgaaaaatatcttcagcaccaatctcaggttttccaatagtgatgctatccctaggagcaactggggaggcttagaatcttgtggcctccagctacatgactcctaaaccataatctctaatcctatggctaatttgttaatactacaaaggcagtctgttccccaggcaagacgggggtttgtattgtgaaa

SEQ ID NO: 6686 - DNA, 557 bp, Homo sapiens
tggggctgggcaagcaggcctggcttccgctgctgcctagggccaccctgacgtggctgcacctctgctcaggtcccatcaagagaggctggtccctcgagggtgactcagatgatcgctggtggcctacagcaggcttgagtcaggcagagccggggctgccacaccccaagaggggaaggacccgaaaaagtctggcccaggaagaagactgagaaagctgtgagcctcccttcttcttyttttttttttttttttttttatgacagagtttcgctcttattccccaggctggcgtgcaaatggcttgatctcggctcactgcaacctctgtctcccgagttcgagcgattctcctgcctcagcctcctgaatagctaggattgcaggcatgcgccaccatgcctggctaattttgtatttttagtagagacggggtttctccatgttggtcaggctggtctcgaactcccgacctcaggtgatctgcccgcctcagcctcccaaagtgctgagattataggtgtgagccactgcgcccagtctgagcctccctt

SEQ ID NO: 6687 - DNA, 864 bp, Homo sapiens
tcataacacagaggttccaagctgtgagagacaagctggaatgacctgtgtctgctgccttcacccagctactcctcatcaatcagcagtgtcactctgaaagaagtggaccaccagtccttttattttattttttttaatttttaattttttttttagatggagttttgctcttgttgcacaggctgaagtgcagtggcgaaagtactggaggggttggcttagccctttctctcctttctgtcttgtgaggacatagcatttatctcctccaggggacaaagcaacaagtcaccatctaggaagaaactgggcccttatcagacaccacacttgccagccccttgatcttggactttccagcctctggaactatgagaaataaatttctgttcttcataaattaaaaaaaaaaagaaggggaccaccatcccacccccagctcaagagcagcagctyagagattttgctctggtcacaagaacagagctctgtagcttttatcaaggaaactgacttcatttaaaattgagtgtagggctcttcaagtctaaggttactgttaaaaaacaatgaagaattttgtagaaagttattaaaaggaagctggtagctccatgagaacagcaagctaaactgaaggccagctattttaccagaaagaactaaagaaagagacagatttttaaatgcctccaaggggtcagagcaaaactaaaaaaatgtgcctgtaaatgctatcagacctcagagaaatgtgtgccctagggcattgttgaaaatacagcaattagtcagctattagtgcagcctaacagctataggtgataccatcagaagtagacagttaaatagaaagatcag

SEQ ID NO: 6688 - DNA, 749 bp, Homo sapiens
gctccctcacacccctcagggagaggctctaggggacgatgacccaggggcggcccggcagggaaactgctgagtcaccctgctgcctctcgggtcctctgaccggctcacagatcaccatagccacagtgtgtgtraggccttctcatggagccctgcaaacacctccccggggaggggctgtgggacccatcttacagatgaggagaccgagggtcggagaggccacacaactcggccaggaccccgagttagcaagcgctggcccctggtccagccacggcaaggctggccctcctgccaccacacttccctgcctctggccctctgccgggagtcttggtggggaagtcactgtcttcatcctcctgcccgggcagagtccaatcctgtgcctggctcctcaagaccgttggcaaagatcctggaggcctgggggtgaaagggctgcttgggggacttaagccccaagctatggttcgcctgggagactgagccccaagccatggtcctcctggctctgcccttccaccccctcactggctgcccctcccagggaggcctcacctgtgaagtgcttcccgcccctctcaccccccacggctctcacatggcctggggcgattccagagctggcctgggtcaagcacctgcacagagcacagagcgaaggctcggcatggtatatcccccgccccttgcacctttccccagtgaagggtggcaccagtgtcctttccaaggcccgg

SEQ ID NO: 6689 - DNA, 795 bp, Homo sapiens
ttacagagctggctgtcaggttggtcctgtgtgtttgtaattagctatgatgtctggatgttgatagagtgaatctggcccattggttcccctccaaagaggggtttcctggctagctctcctgtgtcagaaatgccaagtttggagttgcctggagatgccagagatgcagatttatttggctgagctctggttgtgaagccaagtgccgagaaagcagatcagagaccaaacctgaatagtaatcagtgggcttctccaaccacttggctcctttgctttccaatgttatgtttaatgttttagaatatatttagtaaacatgtcactagcaattgccagtcctcagtcttccctcactctttttttttttttaaatggtcttcctttttcctttaggttagtatgataggctggttttacaatgtatctgagtgtgtgtgtgtttcaggctagacaaattggaagatttgtttttactagctcttagcttgttatagcatccactccttatgaaccaggtaaataatataccttcttctcttttatcatcagatttggcttgttcttctcccctgagaaagctgggcttagagtacacatcaattcacacaacttggtttgaatttatagatgcrtgcaaggcgtgctcgtttttcttgcattgagttcaaaagacaatattcctttgtgctttagtccatataggatacaactacactctgccaactaagaactgaatggtttctaaagtctttctctttaattattccaaccccagtatgagatgaagtt

SEQ ID NO: 6690 - DNA, 634 bp, Homo sapiens
tagcaattcctcctcttaccctcttgctccattcccaggaaacatttgagtggagatgcgattgctgttttgtcagctttttctatatttctgaaggccctgttgttccttgagcctggactccctggatctgctagactaatcctgagctttgctcctgcctcccactttgcccttccccagggctgcgggttttcatgttcagtgcatttgctccatattactcctgtttccttttctgaaaatgaatcttttaaactattaggataaagtgtgcctatcctaaattcatggatttctaagatttttataggaatgacacagagtttctgaattctagccactgtaacayctcattgccatgccacctctgaaatgtctgtgttgatgaccctgatttaggacccagatctgccacgaatccttggttcagtttagctcagcagaaatgtgttgcatatctgcagttgagcaggcaccacgttgcgttctgggattacgatgctgcataagaccaaacccatccactcaaagagtgtaacatctaataggctttttttttcttttttgtaaatgtggaatctgaaatccagagagttgaagcaatttgcccccaatcccacagctagtgcaa

SEQ ID NO: 6691 - DNA, 1770 bp, Homo sapiens
agaatttgaggaataaatgtattgctaaaatttattcttacaattaataaaaacgattattacaaaactcaggttggagaagaaaattgagaaagaggtagtgactggtagtttaaataagtccattcctttatcctccttagtggaacacaaatggataatattaacagttgctttactgagaaatttttctgaattaaaaatataaaagagttttcaaaaaaatttaaaaaaatcattctgaaggagaaaaactatagatcgaagggtgtaaagtagaaattatttaatattttatgttaatttgcttaatttttaatatacaccaaatactctttatttaaaaatactaaaagaataatatgccattactgtaacttagaattttacattataggccaggcgtggtggctcacgcctgtaatcccagcacttcgggaggccaaggcaggtggatcacaaggtcaagagatcgagaccatcctggccaacatagtgaaacctcgtctctactaaaaatacaaaaattagctaggcatggtggtgtgtgcctgtagtcccagctactcaggaggctgaggcaggagaattacttgaacccgggaggcagaggtggcagtgagccgagatcgcgctgctgcactccagcctggcaacagagtgagattccatctaaaaataataataatcattttacattaaaataaaagttcatttcaattattcttggcattatagcgatcagtgctctagtcaacaatttgaaccatcccttctgaatctttgtataatagagtcattttttaaataaaagatcattaaatttatagcatgcaacccaattataaaatgaagttgaatgttttgaaaaacatctataaaagtaagttgccagagacaagttatatcaaataggtatgggtaagataaatatttgggatttgattaataaatcataaacatagaattctctgttcagttgcttcactctattttaagtaattattccactttttaaataaagtaactctcttaaaacaatgcaccactgctgtgggtttacaaaataagacaactaagatgttaattttaaaagtaagttcaaacaagggaaacatattatatgtgcacatatacatacacatacacccacaagcatacatatttggctatatttccaaaataactcaattccttcttcaaaagattctgttatttgaaagttctttcttacacttagccaaaatctactatcttatacttgctaactatggttttctgtggtacaatttgtgtccaaactgttctctttaccatctgggtttcccattcttgaatatgttcgtgcgtttctctccctcttaatgtgcaacacccagaaaagaattcaatattcaaatgtactctgacgaacaaagagtggggcaagactatcacctttcccattcatgtttattgcaatctgaaatctttacgtctttattaaatcaacatctgctaatatatgtaaaaattcctcctaccttaaggagattttgatatttttaaaactaaatttagttttatcttgtagcatttgttctgttactctaggctatcaaacattgtgagatacatackcttccttcaggccagctacaatgttattattaaatacattaaaaaaatgccttaaatgagtccagatatgccatatgatctacattttatatactataactgtattactatactatagtatactataatatactacccatattgaggact

SEQ ID NO: 6692 - DNA, 568 bp, Homo sapiens
cacccaggctggagtgcagtgtcgcgaccttggctcactgcaacctccacctcccaggttcaagcaattctccccacctcagcctccaaagtagctgggattacaggcatgcgcaaycatgcccagctaatttttgtaattttagtagagatgggttttcgcttagtagagatggggtgtttgccaggctggtcccgaactcctgacctcaggtgatccgcccacctcggcctcccaaagtgctggggttacaggcataagccaccaagcccggccgaccttcttctatttttccattctcctttccaaagccatggccatgcgctcctgtgtacaggtgcataaacacatcagtgtgccatccctcacatgcatgtcgttccccacccctccttcccagggcttctcttggctccagcgttcctctgggaccctctgcagatacagcctgtgctggacccccagccagggtgagggctcattctgctctgtcttccccactgcctcagtttcccccaaaagctgctttcacgtccttctagtagggggcctcccatgggggcaagga

SEQ ID NO: 6693 - DNA, 568 bp, Homo sapiens
cacccaggctggagtgcagtgtcgcgaccttggctcactgcaacctccacctcccaggttcaagcaattctccccacctcagcctccaaagtagctgggattacaggcatgcgcaatcatgcccagctaatttttgtaattttagtagagatgggttttcgcttagtagagatggggtgtttgccaggctggtcccgaactcctgacctcaggtgatccgcccacctcggcctcccaaagtgctggggttacaggcwtaagccaccaagcccggccgaccttcttctatttttccattctcctttccaaagccatggccatgcgctcctgtgtacaggtgcataaacacatcagtgtgccatccctcacatgcatgtcgttccccacccctccttcccagggcttctcttggctccagcgttcctctgggaccctctgcagatacagcctgtgctggacccccagccagggtgagggctcattctgctctgtcttccccactgcctcagtttcccccaaaagctgctttcacgtccttctagtagggggcctcccatgggggcaagga

SEQ ID NO: 6694 - DNA, 618 bp, Homo sapiens
gggcacagagaggcctgggtccacagccttgtcttgggctgctgcctgtttctggctctagtggctccatggagcatgaagcccagctgcaccccctcacagcctggggcaggggctctaggtacttgctgggcccaggccagtgtcagggtaggggcaacatctccatgagctcccccagtggccctggcattcaggggcagctgggagctccccctcgcccagattgtggccctgcccagtgcgcacctccaggaatggattgcaggccctggtctggccgtcaggagtgtcaggcctggtggtcaccctgatgcagggcagaccctggggacagagccctgggcggccctgcrcagagccccctcctgaggcacagaaaccctccactgctggccggtccccgaagcaggcgtcacagtcagctgcctcaaggacgtggggcacaggggacccaccaccgccattgcagctcctgtagccacttctgctgccaccgtctatgcctccccactgtggatagccccctgctgccatcaggaggggaaagaggtggaagtcacagaaagaggcagaagatataataattttccaaactattggctgcaatccattaat

SEQ ID NO: 6695 - DNA, 769 bp, Homo sapiens
gggagactgagataggagaatcacctgagcctaggaggtttaggctgcagttagctgggatcacaccactgcactggtgatcggagaccctgtcttggggaaaagaaagaaggaaagaaagaaagaaggaaagaaacaaagaaaggaaggaaggaaggaaggaaggaaggaaggaaggaaggaaggaagactacttccrtaatggttggatttacctaagatttggaaacagtgttttagataccaacagggcattagaaatgacagacgcccctgacattttacacagtaaagagtgcacaccaaaatgaagatattagcaggatctgcgtcaagtaatgccagacacctttgataaattaaatccatggagtacagaatattgttagtctgtaaaacaagtcaacaaggttcatactgtcatatttcatcctaaggttttttgaagatggatgttagtagccatgagaaatgaaaaaccctctcatccaaatcccaagagctggtggaagcaaatgcaggcatgaaaaatgtagcatgagaaacgtaggggatggagttgctcagaatattttttttaaaaaacaacttctcttttttgagtggcataagagataaatttcacactgccaccatttgagttgtcacgttttcccaggctctgccgctctcctgaggcactggtgaaatgaagggagacagttggctaaagcacagagcgatggaggaagggtcaggagagggagacatgaccacaagtttcctttgt

SEQ ID NO: 6696 - DNA, 833 bp, Homo sapiens
aagtgttgacagatttggcagcatttaaaaatgcttgttgcagcttttgataaggcaggtaagggtgtcccaacaggcctatccaaactatccccaccagtgttttgtacagctaaggagactgaggcctggagacatgaagagctcttcccaggtcacacatcagagtgagagcaccttggtctggagatccctaggtaggatgtagggttgtggctactgaggccaggatgaaccctcctccatggctgcagaccacctcttgggtgtctggttggtctcacttggcttctggccaagcacattcacaacagcatctcaaagccagactgttggctcagggcctcaacctgtctgggtccaggcgcaaagttaacatgggctctgcctctcsgttcatctgcttttgagtgtggcttgtaggtcaccccataacctgggggttcaggcaaaattctgttgctgaaatgcaaaagaggcagcaccgttgggggatggagccactggcagtgcagggaaaagggctccttgcctgttctgtcatggtcttgcagcctgtggttcatcctttcagtcctccgcgccttgggattttccatttgcttggtggagaagttgaatggagctagccctgtgcttcagggctgctctcctcccccttcatcactgtaggcttcccaggcaaccgtttgaccaaaccttgtgagtcctagcccctcttactactttctctgatgataacatttgcaggccaaggggaaacccaattactgtacccttttgtcttttttgaattactccctaatccatctattaaaaaacaacctcaagca

SEQ ID NO: 6697 - DNA, 799 bp, Homo sapiens
aaacttgtttaactttctcatagagctgggtattagacctttgtcagattagatcccatttgtcaatttttgcttttgttagaatggcttttggtatcttcatcatcacatctttgccagtgcttatgtcctgaatggtattgcctaggttttcttctagggtttttatagttttgggtttacgatctttaatccatcttgagttgatttttagaaaaactaataaaaagattgaggctaataatgtttcatgttactttctttaataaatgttgaattcacttttattttctcttatctgacttgtctttaccctttctcaatccctcattctctttaccatttctcaatttctcaaggcaaaaatttgaattggctgtttgcttaacatcagccttcaatgtaactttgtactgataataataagcattgtctgaaatttcagaaggcaataaagtcagcaaccactcctggaaatattatctggctggctgtgttttactacaaaggtggttagttggatattcagtaaattaaagggaattgatgtaataaaaataaacagcaaaaasgaaaacagtgacagaaatctcaaatttaaaaagcccattctcagccagacacagtggcttatacttgtagtcccagaactttaggaggccacggcaagaggatcacttgagcccaggagttcaagactagcctggacaacatagtgagatcctgcctctacagaaaaaaaaaataactgggtatggtggcacacacctgtagtctcagctagttggctgaggtggga

SEQ ID NO: 6698 - DNA, 1952 bp, Homo sapiens
caaaagactttatttaaaaagatggttttgaattagctttgaaggatagtaatgaaatctatcactttttgatcagttattatgtgccacattcatcatgctattttctaatccttataataattccaagcagggtgtcatttcccctcctttagggatgaaatatcatccctaaagtgtcaagagagttcaaataacttgtgtaatgtccagggtgaggagttcgagaccagcctggtcaacataatgaaacctcatctctactaaaaatacaaaaaaaattagccaggcgtggtgatgtgcacctgtaatcccagccacttgggaggctgaggcaggagaatcacatgaacccaggaggcagaggctgcagtcagctgagatcgcaccattgcactccagcccaggcaacagtgcgagactccatctcaaaaaataaataaaaaataacttatgtaatgtcagttaatggtagagttatgattttgctgttcaagtgtttctactgagatggtagaaaagcatattacaaggatgaggagtaatgggagcaaaggcacagaggtgaagttatcggcctctatggagaataatggcaaaccagttcattgaaagaagagtgtgagtatagagcaagcttgtccaagctgtggcccgtgggatgcatgtggtccaggacggctttgaatgagaccaaacacaaatttgtaaactttcttaaaacatgagattttttgtgtgtgatttttttttttaaagctcatcagttatcgttagtgtattttatgtgtggcccaggacaattcttccagcgtggcccagagaagccaaaagattgaatacccctggtatagaggaataagcagcaaacaaaaaatgaaatggggagtctctctgaaactaatctgcttctgggactgcccaattaaaaaaaaattaaaaagggctgggcacagtggctcacacctgtaatcccagcactttggaaggccgaggcaggtggatcacctgaggttaggagttcgagaccagccagaccaacatggaaaaaccccgtctctactagaaatataaaattagctgggcgtggtggcgcatgcctgtaatcccagctactcaggaggctgaggcaggagaatcacttcaacccaggaggcagaggctgcagtgagtcgagattgtgccattgcactccagcctgggcaacaagagtgaaactccgtctcaagaaaaaaaaaaaaaaaatgaaaaggtaggtttgttcagatgatagatagttttgaatgataggcattcaaatctatcaaatgatagacatatcagttgtgggatgggaaagagtgttttgaagtttttttgaggcattaacatgatctgaggcttgcttgagggaaaactaatttggcagaaatgtggaagatggagtggagatattctgaagatgggaagaccagtgagaagacagttgtagtccaggatagagatgtttgaaaaatatgttctaggataatgccaatgaaatgaggcaagacaggaacaatgatgcaaggggctttatgtaggtagaatcaattactggatatgatgccttcattttacctttaagtaaaccaaggcttagagaaagtggtctatttgatctagaaagaatatgctgtagtgtcgctatctacttggaatctgttcaggactccttggtttgtcatctagtctaccatgtaaaccaagtggcaacttatcttctaatttaagatattattggccaggcatggtggctcacgcctgtaatcccagcactttgggtggctcaggtgggcaggtcacttgagcscaggagttcgagatgagcctgggcaacctggtgaaaccccgtctctacaaaaaatacaaaaattagctgggcatggtggcatgcacctgtaaacccaactactaaggaggccgaggtggga

SEQ ID NO: 6699 - DNA, 965 bp, Homo sapiens
tgaagcattgaagatctctcttaacaggtaaatattatacctgagtccccacagaagcacatcctaagacaaatattcaagtgtaaatttttacctagggttaatcctaggtgacactgatagaagggtagggaagcaagatagggaagaatgaaaacgtggtatcagagggatagtattaaaaagtcaccactggggcaactggagctcatccctctgaaaaactcaggaaaataaaaatagaatgtatgcttcagagtcttcctagaaaaattgagggggctgtgtgttcatacaccagttctttccaattactcactggggtttgctctcagggagaagatggcacacaaatatgtggcattttcagatcattgtatgtacagacagtgtgggtcttggaagacagagaggaagcctcagggaaaaggatgcaggtgctgacagtcaaaatagtacagaattgactggaatggtaaggatcaaggaaatatgggcaacacttgacttggtacaagccagtaccagtcattaatgtcatctatagaatcaattaacaaaatggaaaaaaacccatatatcccatatatatatatatatatatatatatatatatatatatatatatatatatatgttttgtgtgagtgtgtttggagaaggaaaaatatcaggaaatttaacttaggagataaaataatccatccctaaaaggcgtgtgtgtgtttgtgtgtctgtgtgtgtgtgtgtgtgtgtgtgtgtgtgtatgttttcttttcctatcaggaatatgaggggatggcagatgggatagagacacattgttaagcagargaaagtaccgtgaagttactgtgatctcagggcagaacagaaactgcaatgctaaatcagaattagagagaggctgggtgcagtggctcatgcctgtaatcccagcactttgtgcagctgaggtggggtgg

SEQ ID NO: 6700 - DNA, 1122 bp, Homo sapiens
gggcattcagttctccttctattaacagtttaaagtaagaacacaggatccgctaactgacccctaagccacataggttagacatttggtgaagaaaaaagctgagtttatgctatgtgagtaagtagagttttaaagccactctaatttggatatttaatagacatgtaactgtattttgttgacccacactgatggggctttggcaattgagctatacaacagatgatgattcatgaataataaaccaaggaagaaaataaagctatgagttgcacagaggcagtctttgctctcaggtttttcttatactagtgttcactggatcctcagaacaagcctgcaagggaggcatcattagtcacctcttactacagaggagagtgaagagtgaagctgagagaggacagccaacttgtacaagttctcagaagaggcaagtgtcaaagccagttctgcagaaactcgagctattatgctggtaaagatattttcctgttctcgaagacttctgcccaagtaaaaggtagatgaccacagagatctcaggtagtttgggacattagcaaattccatagtcttctaggagcagaatgccatcacccagcattaacctgtttggttgttggaaaatcttacttcttttcttccagacttttccagccatagcaggttgccaaaattagaaagagaatgtgctcttagttgcttcataattgcagtttaaatgtttaccctttgatttcargaaatatattaattgtaaaaattgttttgtgtgacaattctaccaaattgtatattgagagaacatatttgtgtgggggggtgtgtgtgtatataagtgaatatcagtgattgggtggtgaagaacggaagctaaagcaatattttaaggaaaagtgcatcctgtatatttcggatattttagcatgtgctttacacagcattgtctcattttatattcataacaatctcaggaaataagcattttaatccacaagggaaagatgaaaaagaagctcagaaaagttaatttatttcctaagtaggtagcactgataagtaacagaacccattattagctctaattctgaatgcttttattaacccaaagagact

SEQ ID NO: 6701 - DNA, 1122 bp, Homo sapiens
gggcattcagttctccttctattaacagtttaaagtaagaacacaggatccgctaactgacccctaagccacataggttagacatttggtgaagaaaaaagctgagtttatgctatgtgagtaagtagagttttaaagccactctaatttggatatttaatagacatgtaactgtattttgttgacccacactgatggggctttggcaattgagctatacaacagatgatgattcatgaataataaaccaaggaagaaaataaagctatgagttgcacagaggcagtctttgctctcaggtttttcttatactagtgttcactggatcctcagaacaagcctgcaagggaggcatcattagtcacctcttactacagaggagagtgaagagtgaagctgagagaggacagccaacttgtacaagttctcagaagaggcaagtgtcaaagccagttctgcagaaactcgagctattatgctggtaaagatattttcctgttctcgaagacttctgcccaagtaaaaggtagatgaccacagagatctcaggtagtttgggacattagcaaattccatagtcttctaggagcagaatgccatcacccagcattaacctgtttggttgttggaaaatcttacttcttttcttccagacttttccagccatagcaggttgccaaaattagaaagagaatgtgctcttagttgcttcataattgcagtttaaatgtttaccctttgatttcaagaaatatattaattgtaaaaattgttttgtgtgacaattctaccaaattgtatattgagagaacatatttgtgtgggggggtgtgtgtgtatataagtgaatatcagtgattgggtggtgaagaacggaagctaaagcaatattttaaggaaaagtgcatcctgyatatttcggatattttagcatgtgctttacacagcattgtctcattttatattcataacaatctcaggaaataagcattttaatccacaagggaaagatgaaaaagaagctcagaaaagttaatttatttcctaagtaggtagcactgataagtaacagaacccattattagctctaattctgaatgcttttattaacccaaagagact

SEQ ID NO: 6702 - DNA, 610 bp, Homo sapiens
catgtatatatgatggaaaagagagtgctagaagattacgccacccagtggtacagtaagtgatacacacacacacacacacacacacacacacacacacacacacacacaccatacacgttaaggaggggatgaactagtaagcaggtaaaatattaataaaggttgttactaaacgcgattgaagtggrtatcattttatggaaatgtattttagataaccacacatagtgtatgtacaccagctttccaaatttgtaaactaagaactattaggtataccttaaaatagaggtaatttaccaatgatcacagctgtcaagagcaactgcgaaattcagaaacgtagtcaaaagaagtttacaattacaaaattgaaagaccatgtataggatataaaatacaaatgcttccctaaaaatatatttatttatttggcaatgttacataggaaagaaataatgacctaagtaatgaacaggaagaaaaaagtttacaagttacgctcatatttcattctcagtctcactctctattacatataggtactattttttgagacagagtttcgatctgtcacccaggctggagtgcagtggcctgatctagg

SEQ ID NO: 6703 - DNA, 802 bp, Homo sapiens
gcagatagaagcaggagtcctcttcctggtggctggtgagctgtgagctctccgtggtggggaattctgcagttccccctctggctgggccatagagattcaggcagggcccattgtgatagcagtgactcaggcgggctggggcatctgcagaggccaggccacatgctgggggatgggggctgacccagcttcctgaggaagtcaggggaggcaaggaacttctagttgcatttgtctgaaaatgcgatcatcagcctctggaaggagtgagcccatggccctttgggtgtgcaaatgagagatgtgggttcaatggtcagtgtgaatgatggtccacccaggagggtgagtgggggatctgtcagcgccctggatacgcccacagtgaggccttccacagccaggcaggcgcacatcgctaggtgaktgcaggaccctggggccaacttcccagattcaaatcctgcctctgccccttcctagctgtggaaagtcccatccgttcttggagcctccattttcccatctataaagtgggctgagcgcagggaagactggagtggcctggcggcattcagcaagggccacgcgcatcgggcccggcagaaacgccctctgcaaagtccgattcacccgcctgtgactcccggtctccatggagattaaggaaaccagctgggttccatgtcctggttgctgccgtgaacaaagacgcgtggcgtgtactgggacaggagcgggagggcaggagccccgggagagagtggtgccttcccctacctgggcctccgttctccga

SEQ ID NO: 6704 - DNA, 735 bp, Homo sapiens
atgtgctacgattcaaaggggagagttagatctttataaggaggctccaaaaggggacccatgccaggtcactcagagctgatgcaggtctgggacaaaactgcaccgcaacatcaggactgtcatcagccaccaggaatacctcatggaccagacccacggcctgacttgtcattgctgggccccctgcatcttgcctaacttcctgcatgtagcagctgccatgacagttgccatggaatgctggggaacattctcagcctaccccaagccggtccctgtggttacctggtgacagatcacagaaagtcccaccctggtagaactcctgggcgtgggtcagagcctggacttgcgtcacagcaggaccaggcggctaagcagrgagaagagccagaggggcgtcaggtgtctgatgcggtgtgctggcagttgaggggtgaaggtagtttctagtcttggtgatggggagccctgagggttgggggacaggaaagaaacagcttgccaggagccctcccttccctgccgctcacagccttggtgattgtcctgctgtaaagatgagaagacgtggctgtggtacacggctggaggagggcggaggaagctgtgagcccagagccatctgacctcagcccatgttctgctgagcgtcaaggggcgaggtggtgggggcatggggcatgaggcagggcagcgcttcagggtagtgggggaggaggagtccagagg

SEQ ID NO: 6705 - DNA, 661 bp, Homo sapiens
gtgatccccaggctccatggcatgtagagaggaacactgctcctgcccacccccgccttgtgggagtcccatcacagtgtctcatgacatggccttcctacccctgcttgcaacccctcatgatggggaactcactctctcaaccttagggcctttcacacaaggtcatgtggtggctgaggccggtcatctccaggctccccagtggagcttgggggtggatgcgtgtgyatgtgtgtactctcagtgtctcgagtcagtgtgaggcatgtctgggccagtctgtgtgtgcacccatacagatgggtgtgggtggtagtacaagctgtcagggtagtagaatgtctgtgcatttacacattcagacaggttctgagagtgtgtgctactaagatgtagaagcatgtagggatttgtgcagtttcagtggtgacatggagtggtgtgtatgtgagtttatcaggacctttgtgctcaattactgctgtggtggagaccccaacagtgtgtgagtacatccgcgagtgtgcacgtgctgtttgagcagaacatgacatttgtgttatttgtgcactgtcaggcttgagccagtgtgtgcacgtgtgtgtacatgtgctgccaagagggagagcccattaggatggcagctccactggggcca

SEQ ID NO: 6706 - DNA, 1002 bp, Homo sapiens
agcaagccagggtgacataatatggcacaggacagcagttctcaaacttcgctactcattagcgtcatctaatggccaggatgcacctgatgccaatgaaatcagaatccctaggtgtgcgacccagccacaggttgcttcgttgttaactccccaagcaattcctacgtgtagccaagtttgaaaaccagtgtgggagagcagcacttttcaaactgcaaggtgactaagaacaacctggggatcttattaaaatgcagattcagttaagcaggcctagggtggggcctgagattctgagatgaggccacagatgctggtccggggctgttttggcaagccacacatgaccttgctctaggtgctgcctctgtgtgtgcccagagcttctggagaagggctggaaattgggctactatagtgttaggccaaggaatgtttttacaaggcgtgtaaccctcttattgtgcctctgagataattcagagatcccagcacagtcatcttgctgattctcagatccatcctgcatggcttacagaggctgcagaggctgtggggcatkctggagaaatactctgtgtgtcagtgaaggacctgctcattctttttctctctgactctaagagcagggagctcctgatcacatttagtctgctcttaaagggatccgaggctcagttctgaaaatgaaatcaggtacatgaaagatgttcactcttctacatctgtgccagcatcctgcggcacatgggacaactgagctgaaaggtttcacttcctagcatccgttaagaggacacagaaaagacaaagagtcctcagaagtaaaataattttataaattggagcccatggttcacatgatgtacactttgcacactcacattttaaatgtctttgctgtcctttttcggcatacaggccataatttccatccatgaaaatgaaaaatggcgatgcaagctatactttgtctacaatcaccaactaggtgaattc

SEQ ID NO: 6707 - DNA, 737 bp, Homo sapiens
agacagcagagatagcagtgatcagcagtaagacagcgagacggtggtgatcagcagagaggcaggaaaatgtgcccagtaaaaatcctgatggatgtggggacaatgaaaagcatcccagaggattgtcttctggggcgttttttaggctactggaacaaattcaaattcagcttaaagaaaaagaaactcattttctcctgaaacattgcttacatctattacacattagaaaaccaagagatttgtactaaacatgttcctatacattataatgctattttaaagtagaacttactctgtataaaggaaggaaaatgaaagtccctatgtacaggattttatgaccctttattggctcatgttacttccaggcaccaggaagccacacctaagggatcacttcctagctgctccccgtagaaggcctataccttccccagtctcctcagtcccacagatctgaagacagccctgccagttttctaatgcaagattccaccccagtgtcatcaggcatccttccctcttatacaactagcctcagcctataccttcactgrccaagaaagtaagtccagccagtaccaccaggattggggccccatagcccctaaagtcaaacctgtgtctattgcaggagatagctgatgggaatgggggaacacttagagtacttgtgccattttctagacctgatttgctttgtaaaaggaaatatttagccagctttcagc

SEQ ID NO: 6708 - DNA, 790 bp, Homo sapiens
ccacacacctgtaggcaaacaggtggaggtagaaactaggccttcagtagagtccaccctccaaatgccccattcccatggaccccagtgcctcaacattctatgctcaggagacaggctgaagacagcctggtttttgatgacgactgaggtcagtaaaaggttttgatgatgccgggagtgatggctcacacctataatcctagcactttgggaggctgaggcgggcagatcacttgaggtcaggagttcaagatgagcctggccaacatggtgaaaccccgtctctactaaaaatgcaaaaaattagccaggcatggtggcatgcacctgtagtcccagctactcgggaggctgaggcaggagaatcgcttgaacccaggaggcagaagttgcagtgagctgagattgcaccactgcactccagcgtgggcgacagagcgagatctgtctcaaaacaaacaaacaaaaaaaaaggttttgatgagctgagggaagcagggtccatggcagagaaaytccaatgataaagaaaaactccttcccatagctcccaggttgcagaacccagggccaagagtggtgccaaatcttctagaccttcactgcccaatacgtagcccagtcacatgtggctatcaagcacttgaaaggcggcaagttcaaactgtaagtataaaatgtacactggattttgatgacttaatgtcagaaaaatgcaaaagtctcttaaggttttttttttttattaatggaattacactgtactaaagtgataatattttggatc

SEQ ID NO: 6709 - DNA, 646 bp, Homo sapiens
ggttgctaattggcttgaaacatttaaatcctcttgcatttagttkaatatgtggatatgcctattgagaagtatgttttgaaatctaaggtttgtattcccatccataacaggaagaataaaaccttgaaaaatgtttcattttaaatacagaccccttgtgtatcaaaaagtatatttttttgggaatacaaagccaccaccaccaccaccattgcccatagaggcgcctgcagaggctggacttgctgcttctggtccgttgagctgagaagcacagaggttcagtgggttgttgagggcaccagggaccccaggtggaactggtaagaaaagctgaatccaatccttggcttttactcaccttgtttaaattactgtccttaagctttttccatattagcctggagccataaatagtttgtgtggctactttcaaaattcaattctgggccgtttgcggtggctcatgcctgtaatcccagcactttgggaggccgaggcgggcggatcacaaagtcaggagatcgagaccatcctggctaacacagtgaaaccccgtctctactaaaaatacaaaaaaattagccaggcgtggtggcgggtgcctgtagtcccagctactcgggaggctgaggcaggagaa

SEQ ID NO: 6710 - DNA, 646 bp, Homo sapiens
ggttgctaattggcttgaaacatttaaatcctcttgcatttagtttaatatgtggatatgcctattgagaagtatgttwtgaaatctaaggtttgtattcccatccataacaggaagaataaaaccttgaaaaatgtttcattttaaatacagaccccttgtgtatcaaaaagtatatttttttgggaatacaaagccaccaccaccaccaccattgcccatagaggcgcctgcagaggctggacttgctgcttctggtccgttgagctgagaagcacagaggttcagtgggttgttgagggcaccagggaccccaggtggaactggtaagaaaagctgaatccaatccttggcttttactcaccttgtttaaattactgtccttaagctttttccatattagcctggagccataaatagtttgtgtggctactttcaaaattcaattctgggccgtttgcggtggctcatgcctgtaatcccagcactttgggaggccgaggcgggcggatcacaaagtcaggagatcgagaccatcctggctaacacagtgaaaccccgtctctactaaaaatacaaaaaaattagccaggcgtggtggcgggtgcctgtagtcccagctactcgggaggctgaggcaggagaa

SEQ ID NO: 6711 - DNA, 646 bp, Homo sapiens
ggttgctaattggcttgaaacatttaaatcctcttgcatttagtttaatatgtggatatgcctattgagaagtatgttttgaaatctarggtttgtattcccatccataacaggaagaataaaaccttgaaaaatgtttcattttaaatacagaccccttgtgtatcaaaaagtatatttttttgggaatacaaagccaccaccaccaccaccattgcccatagaggcgcctgcagaggctggacttgctgcttctggtccgttgagctgagaagcacagaggttcagtgggttgttgagggcaccagggaccccaggtggaactggtaagaaaagctgaatccaatccttggcttttactcaccttgtttaaattactgtccttaagctttttccatattagcctggagccataaatagtttgtgtggctactttcaaaattcaattctgggccgtttgcggtggctcatgcctgtaatcccagcactttgggaggccgaggcgggcggatcacaaagtcaggagatcgagaccatcctggctaacacagtgaaaccccgtctctactaaaaatacaaaaaaattagccaggcgtggtggcgggtgcctgtagtcccagctactcgggaggctgaggcaggagaa

SEQ ID NO: 6712 - DNA, 646 bp, Homo sapiens
ggttgctaattggcttgaaacatttaaatcctcttgcatttagtttaatatgtggatatgcctattgagaagtatgttttgaaatctaaggtttgtattcccatccrtaacaggaagaataaaaccttgaaaaatgtttcattttaaatacagaccccttgtgtatcaaaaagtatatttttttgggaatacaaagccaccaccaccaccaccattgcccatagaggcgcctgcagaggctggacttgctgcttctggtccgttgagctgagaagcacagaggttcagtgggttgttgagggcaccagggaccccaggtggaactggtaagaaaagctgaatccaatccttggcttttactcaccttgtttaaattactgtccttaagctttttccatattagcctggagccataaatagtttgtgtggctactttcaaaattcaattctgggccgtttgcggtggctcatgcctgtaatcccagcactttgggaggccgaggcgggcggatcacaaagtcaggagatcgagaccatcctggctaacacagtgaaaccccgtctctactaaaaatacaaaaaaattagccaggcgtggtggcgggtgcctgtagtcccagctactcgggaggctgaggcaggagaa

SEQ ID NO: 6713 - DNA, 646 bp, Homo sapiens
ggttgctaattggcttgaaacatttaaatcctcttgcatttagtttaatatgtggatatgcctattgagaagtatgttttgaaatctaaggtttgtattcccatccataacaggaagaataaaaccttgaaaaatgtttcattttaaatacagaccccttgtgtatcaaaaagtatatttttttgggaatacaaagccaccaccaccaccaccattgcccatagaggcgcctgcagaggctggacttgctgcttctggtccgttgagctgagaagcacagaggttcagtgggttgttgagggcaccagggaccccaggtggaactggtaagaaaagctgaatccaatccttgkcttttactcaccttgtttaaattactgtccttaagctttttccatattagcctggagccataaatagtttgtgtggctactttcaaaattcaattctgggccgtttgcggtggctcatgcctgtaatcccagcactttgggaggccgaggcgggcggatcacaaagtcaggagatcgagaccatcctggctaacacagtgaaaccccgtctctactaaaaatacaaaaaaattagccaggcgtggtggcgggtgcctgtagtcccagctactcgggaggctgaggcaggagaa

SEQ ID NO: 6714 - DNA, 1057 bp, Homo sapiens
ctgcctgggtctaggtctggggggtactcaaaagaccaggcgggaggtgcacagaacattcccaggactactcagattggcaggattctagtgacttttttcccctgtattttccaaattttctacagcagtcagactagtgttatgatccattaaacgagaaaacaaaacaacaaaaagcacagaaggtcagaagatcagaaggtcttactgaggagagatcctggggcaggtttttctgaatgtcatgacccaactgccgtctctgtcttctgtggatgagcctccccggggacggctggggtcaggctcgcggggaagggaaagaccgcagaggtcaccgtgggtgcagtgcccctcgtgctccctgggagcagagctcagagcttggcagggtggggcccgagggcgcccgctcctggatcctgcacaacgtccctgacatgtcggccagcagcacagacccagcctcaccctcagggcaagctcagcagaccccgtcatcctcaccaggggggtgctgggtagctgagccaggtcagggccagcacggcgaggggcctcaggcggcctgggcccacagagccaacgcgtgtggagggcccctggctgtacctcacgccacctgcgagtttcagtgcccaggaatccccagaaggaaatggccrttggtgacggcaagcctgttctgggcataacacaacacactcaagtgagacggctgcatcaaccacacagtccgctaggcacagtgtgagtggagtcgcgtggtctgggaggagactccagggaagagccagaacgccacacgctggggctggatggaccctggggggcctgagaacaggagggcaggggaggccgtgcacagctcaggccgtcaccgaggacagacgggtgggctctgcctcccccatgaggaatccctgtgcctgctgggaaagaccccagtgggtaggaggaggtgggaacccagtcaggccccgcggcccagggcagagagtgcacagggcaggcagccctcatgggaatgtgctcagagcagggccccatttgg

SEQ ID NO: 6715 - DNA, 1057 bp, Homo sapiens
ctgcctgggtctaggtctggggggtactcaaaagaccaggcgggaggtgcacagaacattcccaggactactcagattggcaggattctagtgacttttttcccctgtattttccaaattttctacagcagtcagactagtgttatgatccattaaacgagaaaacaaaacaacaaaaagcacagaaggtcagaagatcagaaggtcttactgaggagagatcctggggcaggtttttctgaatgtcatgacccaactgccgtctctgtcttctgtggatgagcctccccggggacggctggggtcaggctcgcggggaagggaaagaccgcagaggtcaccgtgggtgcagtgcccctcgtgctccctgggagcagagctcagagcttggcagggtggggcccgagggcgcccgctcctggatcctgcacaacgtccctgacatgtcggccagcagcacagacccagcctcaccctcagggcaagctcagcagaccccgtcatcctcaccaggggggtgctgggtagctgagccaggtcagggccagcacggcgaggggcctcaggcggcctgggcccacagagccaacgcgtgtggagggcccctggctgtacctcacgccacctgcgagtttcagtgcccaggaatccccagaaggaaatggccgttggtgacggcaagcctgttctgggcataacacaacacactcaagygagacggctgcatcaaccacacagtccgctaggcacagtgtgagtggagtcgcgtggtctgggaggagactccagggaagagccagaacgccacacgctggggctggatggaccctggggggcctgagaacaggagggcaggggaggccgtgcacagctcaggccgtcaccgaggacagacgggtgggctctgcctcccccatgaggaatccctgtgcctgctgggaaagaccccagtgggtaggaggaggtgggaacccagtcaggccccgcggcccagggcagagagtgcacagggcaggcagccctcatgggaatgtgctcagagcagggccccatttgg

SEQ ID NO: 6716 - DNA, 811 bp, Homo sapiens
gggatccaaatattcacgtgtagattctacaaaaagagtgtttcaaaactgctctatcaaaaggagtgttcaactctgtgatttgaatgcaatcatcacgaagtagtttctcagaatccttctgtctactttttaagtgaagatattcccgtttccaawgaaggcttcaaagcactccaaatatccgcttgcatattctacaaaaagagtgcttcaaatctgctctatcaaaaggaaggttcatctctataagttgaatgcacacatcacaaagaagttcctgagaatgcttctgtctattttttacgtggagatattcccgtttccaatgaaggcttctctccaccagaaatatccagttgcagattctacaaaaagagtgtttcactgtgaagccagaaactactaactgggaacgagaatttccatttatgtataggtcttttggctaatatcaaatgtatagaaaatcattctaaattttaaatattagttctatttttcagacatagttggtaatctatataaatagcttcgggaatgcagcttaagctgtattagtagtttaagaaataagataaccagacatacaggcaaaatgtttgcaaaagaatatttttgtttgcatcatttttcatactgacaaaatttggatacaaagtaaaattcaaacaaggagaaaatgcatgaatgtattatgattaataaaatacacacaattaaaaatattcacaaagaacttaacaaacaaatatttatggcaatcattgataaaaacagtgtaaaattaataaatgcaatatgacttttg

SEQ ID NO: 6717 - DNA, 811 bp, Homo sapiens
gggatccaaatattcacgtgtagattctacaaaaagagtgtttcaaaactgctctatcaaaaggagtgttcaactctgtgatttgaatgcaatcatcacgaagtagtttctcagaatccttctgtctactttttaagtgaagatattcccgtttccaaagaaggcttcaaagcactccaaatatccgcttgcatattctacaaaaagagtgcttcaaatctgctctatcaaaaggaaggttcatctctataagttgaatgcacacatcacaaagaagttcctgagaatgcttctgtctattttttacgtggagatattcccgtttccaatgaaggcttctctccaccagaaatatccagttgcagattctacaaaaagagtgtttcactgtgaagccagaaactaytaactgggaacgagaatttccatttatgtataggtcttttggctaatatcaaatgtatagaaaatcattctaaattttaaatattagttctatttttcagacatagttggtaatctatataaatagcttcgggaatgcagcttaagctgtattagtagtttaagaaataagataaccagacatacaggcaaaatgtttgcaaaagaatatttttgtttgcatcatttttcatactgacaaaatttggatacaaagtaaaattcaaacaaggagaaaatgcatgaatgtattatgattaataaaatacacacaattaaaaatattcacaaagaacttaacaaacaaatatttatggcaatcattgataaaaacagtgtaaaattaataaatgcaatatgacttttg

SEQ ID NO: 6718 - DNA, 677 bp, Homo sapiens
tatatacacatatatatacatatatatacatatatatacacacacacacacacacacacacacacacacacacacacacagaaattagctgggcatggtggcatgtgcctataatcccagctacttgggaggctgaggcaggagaatcgcttgaactcgggaggtggaggttgcagtgagccgatatcgtgccactgcactacagcctgggtgacacagtgagagtcggtctcaaaaaataaataaataaataataaaaatttaaaaaataaataataacaataraaaaacaaagacaggaagcatttcccgtctccattcccatctccagaggagcgcctgagctcagagaggctaggtgcccagcctaaagcaacatagcagggtatgacctctctaactccccactaggtggcttgcattaaatcctaccccaaagccaggctttgaaatgtgagccattaacagctcccacgtgtcttaagcagcaagacaagagtgattcccacacagcagcagacttccagaaacactcagacttcccaagcctggggtaagaagggaggagggagatagagaaagacagggaagatgtgtccctgggccccaagggctcatgcttggccactgacatttatccaagaggggcaggagaactcagagaggggcagactctg

SEQ ID NO: 6719 - DNA, 598 bp, Homo sapiens
cacagccccgaccccagccctgtcccagaggagctctggagggtgggtggctcctctctccagaagtaaggggcttcccaccccacagctgccagtcactggctgcaaagggctgccccaaagatgagagctcccagcccttcctacagagcagctgcaggggcctgaggacaggcctccaaagacagcctcgaagacagccaggggctgcctcagaaccacagtacacaggacccagggagagcatgtagaagtgggaagtgcctgggcagcgcacagacagcctctgacccgtgccgtctcagggacygtgggaccatggacgaaccgcccagcagaatggcagggctcggccccttctgccggggacagagttgctggggagtggctgctgtcctgctccccgtgcgtctgggtggggtgtgagctggtccaggccaacgggaagtgggcaggaacggcatgggtcactggaaggccacagcgggagagtatccaggggtgttcctgtgtctgttgcccgtgcccgctggtgatgggacatcagggcactctggaagtcccaaggaagcagagaccacagcttgaagagaatccg

SEQ ID NO: 6720 - DNA, 598 bp, Homo sapiens
cacagccccgaccccagccctgtcccagaggagctctggagggtgggtggctcctctctccagaagtaaggggcttcccaccccacagctgccagtcactggctgcaaagggctgccccaaagatgagagctcccagcccttcctacagagcagctgcaggggcctgaggacaggcctccaaagacagcctcgaagacagccaggggctgcctcagaaccacagtacacaggacccagggagagcatgtagaagtgggaagtgcctgggcagcgcacagacagcctctgacccgtgccgtctcagggactgtgggaccatggacgaaccgcccagcagaatggcagggctcggccccttctrccggggacagagttgctggggagtggctgctgtcctgctccccgtgcgtctgggtggggtgtgagctggtccaggccaacgggaagtgggcaggaacggcatgggtcactggaaggccacagcgggagagtatccaggggtgttcctgtgtctgttgcccgtgcccgctggtgatgggacatcagggcactctggaagtcccaaggaagcagagaccacagcttgaagagaatccg

SEQ ID NO: 6721 - DNA, 598 bp, Homo sapiens
cacagccccgaccccagccctgtcccagaggagctctggagggtgggtggctcctctctccagaagtaaggggcttcccaccccacagctgccagtcactggctgcaaagggctgccccaaagatgagagctcccagcccttcctacagagcagctgcaggggcctgaggacaggcctccaaagacagcctcgaagacagccaggggctgcctcagaaccacagtacacaggacccagggagagcatgtagaagtgggaagtgcctgggcagcgcacagacagcctctgacccgtgccgtctcagggactgtgggaccatggacgaaccgcccagcagaatggcagggctcggccccttctgccggggacagagttgctggggagtggctgctgtcctgctccccgtgcgtctgggtggggtgtgagctggtccaggccaacgggaagtgggcaggaacggcatgggtcactggaaggccacagygggagagtatccaggggtgttcctgtgtctgttgcccgtgcccgctggtgatgggacatcagggcactctggaagtcccaaggaagcagagaccacagcttgaagagaatccg

SEQ ID NO: 6722 - DNA, 608 bp, Homo sapiens
tcgcttccaggaggtctctgtgaaataaaaccaagttaatcccactagactattttaagaagttaagttgatataatagcaaaatttctcccacccaaaactatgtcaacaattggatgtactcactgagtcaccccttactctgccactaatttatttccttgttgcttaaatgatgagagacatataatctccaccctcacggagttgtaatcaccctggagaggaagaagacagccaaaagagagaagtattgtcttgtagacttaytagattcacatagtatcatccttctccagtgtgtaaggtgttgtctaaataggtccagttaaagaactacagggtagccatttttaaaaaaaaattttggccacgttttcaaattcacaggggagggggaatgtctcatactccagccctcctgagcctaggccctctgtgagatgtgtcaccatttcttggacaccatatgagacattccccctcggattagagatgctcaacctgcatcaacaaatctaaagcctacatctggctaccctggggcgagtcctgtttacagtgcccattcctggagctcgcctctttttgccttttgtttgattatg

SEQ ID NO: 6723 - DNA, 824 bp, Homo sapiens
cgacagcgcagcggcgggctgaagggctcctccagcgcggccagagtggacgcagargccgaggaggtgccaagagcaagggagggctgctaccacgttgtcacctctcaataacatgataaactcatggccccaactactagaaccagaatattatactaacatgcctacccacgggcccctccatcatgccctatctctctgcctccctacatcagaggtcagcgccaacctcaatcatgtgtatgtgcatgtgtgttcctaaaatatatagtttttaaaatttgttttaacttcttgcaaaagttattttgctacataggaccttctgaaacttcaaatctactactgcatccattacaagaaacacaattattttatatatcatcacaatagttagaaaccacaccagttacttgagcagagaaattttatataaaacaccagtactaggtataaggttgttatccactgaaagggcaaaaagagaactctaaggtatcatagaagaaggagctatcatcccctatggcttagaaaacaaaggaaactaagggataaacttagaaaagggcccctgtggggctgaaactcagatgtctgaggaggcactgcccaattgctgctggtgcctgaccccagaggaggggccttcctaaggctgggacccaggcctctgaggtggagtgttaccacactggttctgtaaataatggaagaattacaagctgattcagctgctgctgtgggaatgaactgccactgctgctgtgaagaaagattggcagggatggaggtcacaggaacaggaagagcaaatcctt

SEQ ID NO: 6724 - DNA, 824 bp, Homo sapiens
cgacagcgcagcggcgggctgaagggctcctccagcgcggccagagtggacgcagaagccgaggaggtgccaagagcaagggagggctgctaccacgttgtcacctctcaataacatgataaactcatggccccaactactagaaccagaatattatactaacatgcctacccacgggcccctccatcatgccctatctctctgcctccctacatcagaggtcagcgccaacctcartcatgtgtatgtgcatgtgtgttcctaaaatatatagtttttaaaatttgttttaacttcttgcaaaagttattttgctacataggaccttctgaaacttcaaatctactactgcatccattacaagaaacacaattattttatatatcatcacaatagttagaaaccacaccagttacttgagcagagaaattttatataaaacaccagtactaggtataaggttgttatccactgaaagggcaaaaagagaactctaaggtatcatagaagaaggagctatcatcccctatggcttagaaaacaaaggaaactaagggataaacttagaaaagggcccctgtggggctgaaactcagatgtctgaggaggcactgcccaattgctgctggtgcctgaccccagaggaggggccttcctaaggctgggacccaggcctctgaggtggagtgttaccacactggttctgtaaataatggaagaattacaagctgattcagctgctgctgtgggaatgaactgccactgctgctgtgaagaaagattggcagggatggaggtcacaggaacaggaagagcaaatcctt

SEQ ID NO: 6725 - DNA, 783 bp, Homo sapiens
agaaactttagtagtttggagaaatacagtacagtagtgtttgcatggtctattcaaggcacttattgaaacatagcccatgtgtctgaggattattttactattaagtgtgtgtatatttgagaaccattttctggcttcactttcatgcttgaagtagaatgagaacaaatcagcaagcattgtgacctattcagtgtacttcaggggattatcatgttgttttgtgtcactcaaggttaggaagtcataaatagatcagggattagtgttggcacaagaaccagaaagaaaacaggtagatacattttcctgggtaacttttataggcaatattattgcaactcactagactacaacctactaatatgttgatcctatggaatccakgtgcttgtcatcaggggatgactcagaagggagtatgttgctaatagctactctatgattctccaagagtcccggatctgcaaattggtacagaaaacttccttaataaactgtaatccatgtttactcatataattaccattgatctgaaaaggtaaaagggaaaattgtatgtcctagtccattagtctcattaaacttttgtcaaattataataaacagaaagttttcatagttctaaaatagtatgtgtttaaatgcaacattaaatgttcataaggagaggtgacatctaagttaaatatggtttgggaattacaaacatgtaacaagcatataacatttgagctttaatctacagagaaattttgcactaaagaccagttttggata

SEQ ID NO: 6726 - DNA, 662 bp, Homo sapiens
aggagcctgggggaggggtgagcatctctgcagggctcragaaggggaagtgggcaggtttgcgctgggtggcaggttgggaaccatagagctgaagccttcccatggccccccagaccaccctcagggcccagtgtgaggtgggaagggcaacggattctggttcttggctgggggaagaaggtggaaagtagtctgtctgggtgtttgtctgtccagatctacaagtactactccctgctggcctccctgcctctcctgctgggcctcggattcctgagcctttggtaccctgtgcagctggtgagaagcttcagccgtaggacaggagcaggctccaaggtaaaggggcaggcctgggatgagctcttcctcagcacccaagacagccctactcccccgtatctgtggtcccagatacatggccgtgcttgatgtagggcccagcacagaatagatgctcagaaaatgtttgctgagtgactgcttagtcctccctccctaggcaaaagctggactgggcccttgactggcacccaggatacccgcggcactgggctgtgtgaatagtagggacttaacaaagcagaactgagtcagaagccaggagagtcatatctctgtctgtgaaacactgagatctggctggagagacagcctgg

SEQ ID NO: 6727 - DNA, 692 bp, Homo sapiens
agatataaagtcatctagaatctttaggaactgggtgttgaaccatagaaatccccctggctttgcagaacctggtgctagcaaactaattatggctgaacaacttatgacaaggtgggggaaggcagtcagccacagcaaaacagtccyttggaaggctggttttcttcaaatcttataagacagagaaggaaagtttctctttccctgcagcatgtcatagatacacgaacttggatcattctgtggcagaattctatttatttcagggtgttcttctggcttttgtgatattcctgacacatgagaaatcaagctgttgggccacagccaggccactctggctggaagatgtgctttgtgggccatataattgtttaaaacactttagggaggcatcattgaagtacaataagctgcacatatttaaagtgcacaatttgataggtttcaacatatgtatacacctgtgagaccatcattacaattaagataataagtattttcatcatgagttttctcatgcccatttagaatccgtctctctctgtccaccctatccctaagcaactacttacctgcttctgtcacttgtagatttatttgcattttatagaattatacgtaagtgtaatcttacaatacatactgtgtttttgtgtgacttcttttacttagcatcataattttga

SEQ ID NO: 6728 - DNA, 827 bp, Homo sapiens
tcaaggcagtggcaaaaaatctcattatcttttcctttcttcctctagacaatcttctttcagaccatgctaaagaaaaaggtaatgatataaaagagtaaggggtagggaacaaaaaacacattctttatttttctatgtaaatgttgacagtcattattataagtctatttttataatactgtacacasatgcacacatatatcctccattgatattactggaatttagtgtgcaatgttaaggggctgtggagcttgtggcagtgggtaaggaggtgcccaggtcaaaattcacaggcctagattaccataaactcccttcattagcctttccgccaaccattttaaaaagaagtctacatattattgaaaagtatattaatgtggtcatatgggatatatgggaatttcaagaatccacacaacctttgcatagagagaggtggtatgatacaaaggaagggtcgcaggctctggggtcagtgacacctcagatcattggtctgccacttaggttttggtttcctcatcagcaaaatgcagataacttccccttacctgattgttttcagtgttaaaacaggcaaccttaaaaaaaaatctgtcacagtgcctggaactccttttccttattgccattttgtcttcattaatttgacatttactgtgggccactgagttggacaccttgttgaagtctatctgggaagacaagtcactggctcagatgactccagattcaatgatgtcagcgtctcctctcttccctccttacatttcctccaagctggtgcaagcgtggcgtgtatctggcagacactggct

SEQ ID NO: 6729 - DNA, 828 bp, Homo sapiens
tttaatgatccccttttctcatttttcaggctggagaagagcccggttgcattttggtaagttataccaatcaaataggtccatatctcagagcacttcctccttatggctttgtaaccttagattttgttccattcctctggaatgcaggtaatttaaaaatttttaaatcaaatctgtatatctgactatcaaattaaaaaaatctttgtgatcgatcttgaggtcatatttagatttagaaagtatcccctcttttagagcactgataatattaggtttggtcttcttaagggttttctgtgrtttttgagatttttcctatgtttatcagttatttgtatttcttctttgtgtgacttgtctgttcctgttctatttgggcttttttttgatttgtgaagactctttctagataaagtatattagctctttgtcatatttgtcaccattacttttcatttgtacttccttatagtatttttctgatgcataagtgttttatttttacgtagtcaaattcattcatctttttctgtgtagtctcttccatgctttcaggtttgggaagtccttcctatcccacaaccagataaatagccactgcttccgcctctttctacacatttgctttttcttctttctctgcagaccaatttgcttaggggtggtgattgagattctcagagaagaagggaatgggttgagcagatgccccaacaatatacattatgaaaagatttgcacctctctttcaatgtattcctaaatagtttgcattttttgctgctgttcaaatgggacctgtttttttcactgctttgggat

SEQ ID NO: 6730 - DNA, 1574 bp, Homo sapiens
tcgctaagtctgggggcagagcctaggaagttgtattttttcatttaaaagatttttttcttaaagacacagggtctcactacgttgcccaggctggttttgaacttctgggctcaaagcactcctcccaaaagtgctgaggttgcaggcgtgcaccactgtgtctggccaggaatctgtattttaagagctctctctcaggtgagtctgacacccagttgggtttccgatctgctaatgatgatttccatacggatcatggaatcaggttgcctggttttcatacagagacagtccatatgtggccaatggcattttggaaatgagtattagggaataacaaaggctctgccccaggagtgtcagcaggagtttggcactcaatgtggaaacgaggaggaccagggacgaggccctcccacacccctgccaggggcagcgccgtcacctcagctcctggcttgttttgctcacacccctccagtggagttgaaaataaaagaaacagggggagtagtcaaatcatttccccatccctagagctgcctcttgccattgtcaggaaacagcagcccacaaagagggcaccccagctgggcagacccagacatctaggcagccagtcagagcctgcaagtagggcggtgagaggcagggagtaactgagcatcacacagagcactttctgcaggcaaaaccacacagcaggtagtaagggaacttgtggaactcattatgccaggaagttgtacatgctagatagtataaataacttctttagcaggttagagaaataaggagttctagaagggacctctctatttttctctattttgtgaggaaaacaaggactatcctgagctggatccttcagttccaagttgacttcatggrggataaccacgcccttccatttcatagtccccaacactgctgacagatgcagctggcagcccgtgatcctgagccggaattaaccagaatagaggtatttccttgtagttcacaaatgcctctgtaacactgatggattttaataagtgtcatgcaatctctctaaccttgtttcctcatctgtaaaatggatcacgacttcatggggttattatgaactattgtctgacaggtactaaatgttcaataagtattggttactgctattatgcaagaaaagggctccatgatccagcaaacataaaacctcagactgaaaaagcaaaacgggtttccttagcacagggcttctcggagcctttgactatgctgagcctcacagtattccaggaggggtatagtaagtaacagctggttctgggaccacttttgctcagagcattctgtggaatatgggtctccagaacattctctgagaactattactcagtctatttaaacacacaaatataactctgtataagagggaggacactggctggccgtggtggctcacacctgtaatcccagcactttgggaggctgaggtggacagatcacttcaggcctggagttggagaccagtctggccaactctgtctctactaaaaatacaaaatttagctgggcatagtggtggg

SEQ ID NO: 6731 - DNA, 1574 bp, Homo sapiens
tcgctaagtctgggggcagagcctaggaagttgtattttttcatttaaaagatttttttcttaaagacacagggtctcactacgttgcccaggctggttttgaacttctgggctcaaagcactcctcccaaaagtgctgaggttgcaggcgtgcaccactgtgtctggccaggaatctgtattttaagagctctctctcaggtgagtctgacacccagttgggtttccgatctgctaatgatgatttccatacggatcatggaatcaggttgcctggttttcatacagagacagtccatatgtggccaatggcattttggaaatgagtattagggaataacaaaggctctgccccaggagtgtcagcaggagtttggcactcaatgtggaaacgaggaggaccagggacgaggccctcccacacccctgccaggggcagcgccgtcacctcagctcctggcttgttttgctcacacccctccagtggagttgaaaataaaagaaacagggggagtagtcaaatcatttccccatccctagagctgcctcttgccattgtcaggaaacagcagcccacaaagagggcaccccagctgggcagacccagacatctaggcagccagtcagagcctgcaagtagggcggtgagaggcagggagtaactgagcatcacacagagcactttctgcaggcaaaaccacacagcaggtagtaagggaacttgtggaactcattatgccaggaagttgtacatgctagatagtataaataacttctttagcaggttagagaaataaggagttctagaagggacctctctatttttctctattttgtgaggaaaacaaggactatcctgagctggatccttcagttccaagttgacttcatggaggataaccacgcccttccatttcatagtccccaacactgctgacagatgcagctggcagcccgtgatcctgagccggaattaaccagaatrgaggtatttccttgtagttcacaaatgcctctgtaacactgatggattttaataagtgtcatgcaatctctctaaccttgtttcctcatctgtaaaatggatcacgacttcatggggttattatgaactattgtctgacaggtactaaatgttcaataagtattggttactgctattatgcaagaaaagggctccatgatccagcaaacataaaacctcagactgaaaaagcaaaacgggtttccttagcacagggcttctcggagcctttgactatgctgagcctcacagtattccaggaggggtatagtaagtaacagctggttctgggaccacttttgctcagagcattctgtggaatatgggtctccagaacattctctgagaactattactcagtctatttaaacacacaaatataactctgtataagagggaggacactggctggccgtggtggctcacacctgtaatcccagcactttgggaggctgaggtggacagatcacttcaggcctggagttggagaccagtctggccaactctgtctctactaaaaatacaaaatttagctgggcatagtggtggg

SEQ ID NO: 6732 - DNA, 816 bp, Homo sapiens
gtaatgtcgacaagggtcactcttcctcatttccggatgaagaaaccaaattgcccaagcaatttggtttgaagcaggttgcccaaggtcacacagcaagaggaggctccggctcagtattccttactgcacattcagaaatcccaagagaagggggtttgcatcacacctagagataggtttctaggttctaaaataaaccatacaatgttaagacactatttacagatagaaggaaatgctttggagccacaggggcctgggttttgaattctgcctttgtcatttcctaggcgaacttgggcaagctatttatcctgtctgtaaggacaatgtagcttcagagtattattgggattggaggagtcagtcaatgcattttaccactgcagcgagtaaaygctcaatcaatgtatgctcaatcaatgttaactattgtttattacagtcgtaagtcacctaacctctgagccttagtattcttggctacaaaattggggtaatgatacttcctgaacaaagctgttgggaatgagacaacatgagataaaatgagataacatgcccaagtcctatcctggcacctggctccccacatgttcactccttccccctgcgatgctccctcctgtcaaatttacgcttctagcataaatgacacgccggtctaagaaaagcaccacttgtgaacttgaacgcttataggcgtgagctgaggaagcatacagcgatttccctctcccacctggtgagagagcctccacgggctctagggtaaaatggtcgagtgctgtgtgggtgttcttggtgctggaa

SEQ ID NO: 6733 - DNA, 803 bp, Homo sapiens
cagcaggctgggacacagggtttccaggtcaacttttatcttcccacatggtatttgttcctttgatccttgagcagttcaaacaaagctcactaatcaatggcttccctccctgcctttcagagcagatcctcaaacacagcctgcatctctccctgctcccctcccaccctccagttttccagccagaggcatttgctctaaggcccaggctgtggcccacctatcaccgctacccaagtagtacaggtatgattgtctgtttactttctttaattcaaatcgcactagagaaatttcaggactcactcactgataaatcatggttacttacctcttgtctaggcccttgggcaagggtgcattgatgcatctactatgattgcctggttatcttggtcttggaagcacctagtaatgaaagaacccagagaaagataaacagagctgagsgagtcaaggttaatctttctgagcctatttcttcctttatgtaactgggatattgtttcctgccccaactacttcacaaggctgaaatgaggattaagcaagttaatggctgtcaaggtccaccaggaaggatggagttctagatacatattgggttcctctagtccttacatattgcaaaagacttgggtaaagcttctggaagagctaggctgaccaatcttcctgacttacccaggactgagggattccttgggatgctggaatttctgtactaaaaccaggaaaatacaaggcaaacctggttgaggttgagttggtcactctacacagaggtagcacttaaccag

SEQ ID NO: 6734 - DNA, 733 bp, Homo sapiens
tgctgtaaccagcatcacttaaactacaaacaatatttaataataatgcttaggaatgtgtacattggagtacaataatgaagaaaagagaacttattaccctcaaatttggataatgaccattgaagaaggaatcatagaggctgtaactagctaaggacacaacaggaggctccaggtttttgcagttttcattgtcataatttgggttgctacgtggttgtttgttttgaataaatggttaatctgcactttcacatttttttgtactttctacatgtgttttctgacacagaggaaaaaaatgtaattttaatgtgcccattttgatgagcagacaaacacaaaattgaccagaaaatgcgttcatagagacaatgtcatacaagggtaaagacttacctctcactctaacacaaacaaaattacaaagagacttaaagaaaaaaaaagttaggatagtatatttctttatccttrcactgctataaagaaatacctaagactgggtaatttataaagaaaagagggtaaagtggctcacagttatgcaggctgtacaggttgcatggctggggaggtctcagggaactttgaatcatggcagaggttgaaagggaagcaggcacattttacatgacccagagcaggaggaggagagagaagggagtggtgctacacacttttaaacaactagatctcttgataactcactcactattatgagaccacc

SEQ ID NO: 6735 - DNA, 584 bp, Homo sapiens
ttcagaagagacaagtgtgtgtacaaattattatgacacttagttatcatacagtggcagaaaggaagatacagtgctttgggaatagaaaagactgtagcatgcagctcacaagagctgttaagttagaattccaaaaaaaaaccagttgtacaaaaattttgccctgggagaagccaaattaacrcaagcatacttatcaacaatgaactataaaaggtacacagtaatccccacaatttcctgagtgtatcagtaagggtttggtcagaaaatcagaaataattctagatatttcaagcaagaagattttaatacacggaactgggggtactaacaaaactgtgcatagaactggcacaagggagatcagagaagaccactgctagctttaaggaagtcaagaaattacagcaacaagaaactgctggcagtactcacagctctgaggtgggtgtttggcaggaaatgtctctggagttgacgcaaaatctcatgcctgcctactggtgctggaaaacaataatacaacttctgcttctgctcagccttccaaatctcatgtgagtgcctacattacccat

SEQ ID NO: 6736 - DNA, 1100 bp, Homo sapiens
gtaacctgtgatgtgcgttggcctgagacaaaaattcgcttccatcctcagatccttgttgtgttatgaagagggcacacatttaacagaacaaagctcgtctgctttgctgggacgatgggtggctcgcccagcaaatcatcattggagccttctttattttgacgtgagttttcaaaaatagcatttctgcttttatttctcgacttaaaagcatattttaaaaaattggttttctgcatttgtgtaatcaagtacaggaatggttttatggttttgtttgacttaggaacgtcttggtgcctgccatttttcacggccatcatctgaaaggttctttccactttcacaagttgttaactgctttctttgagagcaagcaaagtaggctgcctcaaatatacacctggaatcggtatttatttccttattctgtgccctgtttcattccaagattgtggtatactgggaaataagagaattcaatgaaaagggcttctataacaaacgaactaacccattagaaagaactgaccataagcttagtaggaatcagtcatgtgatgttgcagctaaaatagcgaatgctgtggttttcaaacttgtctaaagtgggagaccccacttcctaacagtgttctgatttgggaccttgtgcacaaagtgggcagtgggagtggtgactggggaggtataaggagcttagagcctggatgggtgcctgccctgccccttccaggtaascccctgaaacttgaaaaccattatgttaatacgttaattatatagctatagggatcccttaagtaaatacaaagttttattactgtagaggcatgtttttatacattgttttatttgaccctgaagaagagaccgcaaaggcattatctctagtgtctgtatttttcatagaaggaaactgaagatcagggagattagtaccatgatcaagagcacacaggtaatgcataaggcagcagggattggaatgtgacttagtttagtgctcatttcactgggtcacaggcgtatatagatgaaataagagccttggcttcttggagctggtcagactctttctggattgttttgttcag

SEQ ID NO: 6737 - DNA, 565 bp, Homo sapiens
actgacaattaactggagcagctcatcccggtcccttttcaatgaatattaacaaccacactgactgcagatagctctgtattgctccccatcgtgcggcaaaattgagtaaacacttattcctcattagggtgttttatgaatagggcattacagtgcgctggtggcactcactctgcctttcgtgaaggaggccacgatgaacagstggagtcggaatcaccgttctgccttcttcctgttctcagcagacgcacacggcgccgagggggtgctctgtgaggcccctggaggggcagttacttgggcttctcagagagaacctggcagctctttgctgaaacccgatactccaggctcccagggccgggtggccaagatgctgtgcagcacgggtcacctgctcctggtcctcccactgcctggatggttgctccgtgtttttataaagaacatcactcaagtattgcgttttctttcttcattttgctgtctgtccctctccattcaacctttcagtgggtgttcctgagtccttccctgtgccagatgctgtgcaaggcac

SEQ ID NO: 6738 - DNA, 823 bp, Homo sapiens
tttttcactaatgtgttttaaatctaaaccagtacctgaaacattcatgctgtgcaacacagttcaaactttaataacttttgtgcactgtacctgctgattaaaaggcctctgtatgttagtagtctctagaactgcacagttaattaaatgtgaatttaatactttggtctggtactcatacttttaaagaaaaaggcaaaatrctacactaaaaccattcatcatctaaataaaagtaaaaatcttgtttaacacagcttgtgttacaatatgaaataaagtaacccatagtacagttaagtctttgctagcattcatttgttttggtaattttgcacagtcttgatatttggttcataaaaggtacatgtcaacagaatgaatatctcaagttcttacagaatttgcctaaattttatgctattttgaggcttagggacatttctaattgaagtaaaaatatatcgggatatatctagaacaagaatcaactgagaagtcaggctgactagaaacatcattggtgatctctgagactggacagtaagtggcaaactctcagaattgcagtgacaccagagataagggtactggtttcactgtcgctgcttcccccctacaggcttcagggagcataaattacaggatttttgtttgtttttttgtttgtttttgtttttttccatgtgtgtatgttttctcctcagaaagtatttgttttgttcacttatgtgacagtgttttagcaaaagacagagatacttctaacactcaatgcatcttcctcacccccaaaacatattttgctattcaggtttct

SEQ ID NO: 6739 - DNA, 823 bp, Homo sapiens
tttttcactaatgtgttttaaatctaaaccagtacctgaaacattcatgctgtgcaacacagttcaaactttaataacttttgtgcactgtacctgctgattaaaaggcctctgtatgttagtagtctctagaactgcacagttaattaaatgtgaatttaatactttggtctggtactcatacttttaaagaaaaaggcaaaatactacactaaaaccattcatcatctaaataaaagtaaaaatcttgtttaacacagcttgtgttacaatatgaaataaagtaaccmatagtacagttaagtctttgctagcattcatttgttttggtaattttgcacagtcttgatatttggttcataaaaggtacatgtcaacagaatgaatatctcaagttcttacagaatttgcctaaattttatgctattttgaggcttagggacatttctaattgaagtaaaaatatatcgggatatatctagaacaagaatcaactgagaagtcaggctgactagaaacatcattggtgatctctgagactggacagtaagtggcaaactctcagaattgcagtgacaccagagataagggtactggtttcactgtcgctgcttcccccctacaggcttcagggagcataaattacaggatttttgtttgtttttttgtttgtttttgtttttttccatgtgtgtatgttttctcctcagaaagtatttgttttgttcacttatgtgacagtgttttagcaaaagacagagatacttctaacactcaatgcatcttcctcacccccaaaacatattttgctattcaggtttct

SEQ ID NO: 6740 - DNA, 635 bp, Homo sapiens
agacaccctcccctcattcacccggttcttccagggactagtgttggcccctgtgagttccaggagccggcgtttccaaagctgcttgctgtgctggaggagattttcatcctgagccttggaccaggttggggcgggtcagatcctgaggctacaggaggccgagatcaccaacaggcactcgccggccgtgtgtggcatttggggacactctgctcagcttggagattattttcttcagttgaactaatagctcggtgtcctcgctaggrctgctgcaggaccagatttccactgacttcgtggcttacccaactggaatttatgctccctgttctggaggccagaaatctgaaatcacagtattggcaggtctggcttcctccagaggctctatgcctcttccatctcctggtggctgccagcgtcccttggcttgtggcggcatcgctcccatctctgcctctgtcttcacttggcctcctctctgtgtctgtgtcctttcctgtctcttaaaaggacacttgtcgttggatttagggtccactcaattacaaatgatctcatctccattctctttttgttttttatttttatttttttctttgagatggagtcttgatctgttgcccagg

SEQ ID NO: 6741 - DNA, 799 bp, Homo sapiens
tcatatgctatcaaatcaaaaggtgttggcttgcttgtcttgtcttttactgattctgtatgtttttgtttttactttttgagatagagtctcactctgtcattcaggctggagtacagtggtgtgatctcagctcactgcagcctctgtctcccaggttccagtgattctcctgcctcagcctcctgggtagctgggattacaggcacgtggccaccacacccagctaatttttgtatttttagtagagatgggatttcaccatgtttgccaggctggtctggaactcctgacctcaggtgacccacccattttggcctcccaaaatgctggaattacagacatgagccaccaggaccagccttgattctgtatattttaaaagaaagaaaatgctccatcacatttktgctcaagaatatgctggtgcttccagtttgttgcagagtttcaataaatgtttgataaaatgatacaatttaattttcctaggtgatccacaccctagtaaaaaccatgtttgctgaaagtcttggaacacgtgtgtgaggcagtcttagtaatgcatgacacacacagaatgatgacatctatgagtcctggttggccgtgttgggtggaaaactcattgctggctgcttctggggtttgtgttgcattttccatgagcagccgtggcctgctctggcatgtgggaggtctcagtgcagccagcacaataggcaggattgttggtcttgtccagcacagagcacacttggtcccatagcttctaggcaaggatcagatgaactcatcc

SEQ ID NO: 6742 - DNA, 251 bp, Homo sapiens
cacccatcaaccagcggcaattgtgaatgtaaacaaagggtggcaaaacaaaggctctgcagcaagaggcggatgtcctaaggaaatgtatgggctcctcactttggtgggactcacacaggaaaaaatgcccggtgaccattgctcctgtcttagatctgctttgcagggaatggcagctcctakcatgcagcaaaccctgaagtacagccctcttctgttgaaacctgccttgtagcagaaatatttgt

SEQ ID NO: 6743 - DNA, 582 bp, Homo sapiens
gggttctgtttgaaaacagtaattagctgattcttggagatagcatatcaccagaagtcatgcttactacttgaatggaataccagcttcaaacaagacgactgcattccccattctcagcttagcggcccgaaagcttataaattaggcagctatccaaccctcctgtaccccacaccagcactctaaatattacatttttaattatagctgggagttctcattcttatgtcttaaggtatgttgacagaagctgctgatcatgcattgtcatagcaatccagtaagaaatactgagatttgttttttgtcctacttcccatctgcaaagtcatgtttaatatctaactgtatgcktttatgattaaaaaataaagttgaaatccctgttccccacgtctcttacctctaccaaaaagcagtttcttatcctacttttccttactaaaacagatgaaatttatttttctactagggaactcataaatgtcatttttaatttcaaaaactatacagataaatgcattttcttgtttatttctggcaccatcgagcgtgtgcacgagccttgttctctgtgga

SEQ ID NO: 6744 - DNA, 1519 bp, Homo sapiens
aatttttttgttttggaaaactttttttttaaataaaaatgttattaatggtagtgtaatgagtttgtcattgttatttttagttaatgttttaaaaattcctcagttttcatttctaacagtaaatactgacagatacaactcacataaacagaagctctttagggtcctcaataattttgaagactgtaaagagaactgctgcgctagagaaactcttacacatatgtactagattgccgtaatgttcatagtagattgtaatagctaaaagcctggaaacaataaataaattgtggtgtaggttgagtattcctaatccaaaatccaaaacgctccaaaatccaaaactgtttgagcatcgacatgacactcaagggaaatactcacagattttgtgttttcaatttagagatcttcactggtaagtataatgcaaatattcccagatctgaaaaaactgacaatctgaaaaacttctggtgccaagcatttcagatattcaacctgtatattcattctgtaaaatactagccaacatcagcatggatggaaaaacaagagagtgaatcaaacaaaccacagagtgatgtatctgtttagatagatgctaaatggatatatctagtatcaatgttcgtattttgtatttttttataaagtatttttttagtgacaggcagaactaaataatatattgttgaaggatacatatataagcagtaaaactaaaaagcaaaggaataattaagaagacaaaagttacaataatgataacctcagggagggagggggaatgctcttgggaactggtttctaggatcctagtaatgatccatatcctaatttctatgggtaaatagtgggggttttgctgaataaactgtgcgcatatcttttacatgctcttctgcacataggatatatttgaacatatacaattagaagttaaaaggaagtataccaaaagtttaactttggttatacttgtgtggtgaaattataaataatttccgttttctttttcatgtactacaatgaacatttcctattataaacataaaattatatttttatattaaaaaaaaactctcaatgtggcagtagtcctaacttaaataccctaaactcttctgaaatgcaaccaaaatatgaaattttcctgaaacagttgaactttaatagcaaatgcttgacttgatattttagctaggctgcttctggtgactagtctaaacttttgtttgtttttagagataaggtcctgctctgtcactcaggctagagtgcagtggtgcaatcattgctcactgcagccttgaacttctgggctcaagcaatcctcctgcctcagattcccaggtagctgggactataggcacatgccaccatccccagctaattttttgtagagacacggtctcactgtgttgcccaggctggtctygaacttctgggctcaagctgtcctcctgccttaaccttccaaaatactgggattacagacatgagccaccac

SEQ ID NO: 6745 - DNA, 606 bp, Homo sapiens
agataaggtccttgcacctgtgggcttaggaagctgaacctcaagctgtcctggttttatggctccacttgtgccatctggaccttggttagactgtcccttgatggcagtgacattgaccgagtgggctggagtgcagtggtgcgatctcggcttgctgcaacctccatctcccaggttcaagcaattctcctgcctcagcctcctgagtagctgggattacaggcgtgtgccatcacacccggctaatttttgtatttttagtagagctggggattcaccatgttggccaggctggtctcgaacccctaacctcaagtgatccatctgccttggcctcccaaagtgctgggattacaggcktgtgccatcacacccggctaatttttgtatttttagtagagctggggattcaccatgttggccaggctggtctcgaacccctaacctcaagtgatccatctggaagtgctgggattacaggcatgagccactgtgcctggccagtgcaagtgcctttagccagcttcatttactccctaactccttgcctcaggttctgcatccgtaaagtgaggtcactaggagtatttacctcagagggct

SEQ ID NO: 6746 - DNA, 655 bp, Homo sapiens
attcctcaaaggcagttagttgccttttataaattttgaaagtagtgtgttgtcaggacacattttactgttgtaaaacttaycatgaaaaagcttagaggaagccacttatatgcagaactagaagagactcagaggaggtggaggggttggagaggagaggagagcgggggtcctggtcggcttgctggcttgaccacttgagcagcacctaccctgggtagtcttgggacatctcacacccagaaaactccacaagcctcctggcaccactttactcagctgtgcaaaaggacacaggacttggccaggtgcagtggctcatgcctgtaatcccagcactttgggaggccgaggcgggtggatcacttgaggtcaggaattcgagaccagcatggccaacatggagaaaccccatctctactaaaaatacaaaaattagccgggcgtgatggtgcgcacctgtaatcccagctacttgagaggctaaagcaggagaatcacttgaacccaggaggcgggtgttgcagtgagctgagatcacgccactgtcctccagcctgggcaacaacgagactccatctcaaaaacaaaacaaaacaaaacaaaaaggatacaggactgcatcagacaccctatcagcagcgtctacaca

SEQ ID NO: 6747 - DNA, 528 bp, Homo sapiens
atttgggcaaaaggcagttttacccaccattgcttctgcacaaccactgcaaatgttaacacggtgaaaaaataacatcttaatattacaataaaaatagttttgaccctatggacccattgaaaggatcttggagacctccaggattccgatggactacactttgagaaccgatgctctattttgagaaagaaaaaaactcattcactaactgaaattcacacagaggaccgaatattgccaatrccagtttccaatccacactagacaaactccaaggacatcagcagctagggactccacccactgccattcataaattaaaaggaattttcttcctcggcatgtgattcatctggaaaaagcttttagtgcaaagttctgaaagaagccaagaagcattttattataacaatctattttaatgttgagctcagttccaacaccaaagcagttttcaataaaggtttagaaaatgcatcaagataatttctcatttaccacatatgctggagtctggcttagaag

SEQ ID NO: 6748 - DNA, 528 bp, Homo sapiens
atttgggcaaaaggcagttttacccaccattgcttctgcacaaccactgcaaatgttaacacggtgaaaaaataacatcttaatattacaataaaaatagttttgaccctatggacccattgaaaggatcttggagacctccaggattccgatggactacactttgagaaccgatgctctattttgagaaagaaaaaaactcattcactaactgaaattcacacagaggaccgaatattgccaatgccagtttccaatmcacactagacaaactccaaggacatcagcagctagggactccacccactgccattcataaattaaaaggaattttcttcctcggcatgtgattcatctggaaaaagcttttagtgcaaagttctgaaagaagccaagaagcattttattataacaatctattttaatgttgagctcagttccaacaccaaagcagttttcaataaaggtttagaaaatgcatcaagataatttctcatttaccacatatgctggagtctggcttagaag

SEQ ID NO: 6749 - DNA, 599 bp, Homo sapiens
tgactcagttctgctttgttaagtccctactattcacacagcccagtgccgcgggtatcctgggtgccagtcaagggcccagtccagcttttgcctagggagggaggactaagcagtcactcagcaaacattttctgagcatctattctgtgctgggccctacatcaagcacggccatgtatctgggaccacagatacgggggagtagggctgtcttgggtgctgaggaagagctcatcccaggcctgcccctttaccttggagcctgctcctgtcctacggctgaagcttctcaccagctgcacagggtaccaaaggctcaggaatccgaggcccagcaggagaggcagggaggccagcagggagtagtacttgtagatctggacagacaaacacccagacagactactttccaccttcttcccccagccaagaaccagaatccgttgcccttcccacctcacactgggccctgagggtggtctggggggccatgggaaggcttcagctctatggttcccaacctgccacccagcgcaaacctgcccacttccccttctygagccctgcagagatgctcacccctcccccaggctcct

SEQ ID NO: 6750 - DNA, 716 bp, Homo sapiens
cagagctgcgtcacggaggcatgactgccccaatctgaaatctttcaggcttcagcccagtgacccccatcaaggatgtgaaaagatttaggctgggagagagaagctggaccagcttgttcccatggtgctttccaattctgtgagccctcagcattttatactacaaggcttcattacagacaagtgtttgaaatgaaaatctgcagcaaaagaaagaccatgcccttttctgtaaaaatgtcaccaccaccaccgctgccaccaccaccaccaccataactgtgttctctcatggtctgaagtgtggcacgtgtctgcagccagggaagttgtctgtgtaggagccgccctctgctcctgcgatctgcagccatctggaccgtgggggtgtgtagggaacacgctgttgattcatatgccattccttgctggcatctctaaaatgggccctctggctggagctgtgaagcagccagaccctccctctcccacgccttctccacgtactcgagagagaaaggggtgtgagggaagatgtgtaaagatccaggaatgtggaatgatgtttgggtggctcctgagggcaactggatggagagccagaggctttcttcaatccagttttagactctgggactcaaaatatgatgcccagaagggtggccctcaagttgtgttcagaggarccttagagtttcaagaagacacctcag

SEQ ID NO: 6751 - DNA, 626 bp, Homo sapiens
gggctcgccctcgggcaagcagatcgctgcagtcaggcgaacgctcacccggcagccggcactcgagttcctgaactgcctgggtcgtaggcgtttctctccctctcctttaccacagtccactctttgcaaggaaaaataaagtagcccccaacatctcccagctcagcccctagtcctgcaagccgagccggcctggccccgaacggagcgtgaacaccggcgctggcagtggcggcgcgggaggaaagccggcttcctggccactcttggcttcgccacgccgcctgcgagcgcctacctcccgcatcttgctgggcgattcctggagcctgggaggccggcggccagagggtggcggcggcgaggggagcgggaaaagccggagcggctgcccgggaagacgaggcggccgggagctctgggaggggggacaggctggagggtcccggctcaaagataaaacagtgagccagacgaacggagctagggaactggagaaaagaagagatttaaaagaagagaaaatacygagtcacagtagaaagagttgcggaagaagaaagaggcgagaaaaggccaccagcagctagactggctcagggatcgccagcctctggttttgc

SEQ ID NO: 6752 - DNA, 626 bp, Homo sapiens
gggctcgccctcgggcaagcagatcgctgcagtcaggcgaacgctcacccggcagccggcactcgagttcctgaactgcctgggtcgtaggcgtttctctccctctcctttaccacagtccactctttgcaaggaaaaataaagtagcccccaacatctcccagctcagcccctagtcctgcaagccgagccggcctggccccgaacggagcgtgaacaccggcgctggcagtggcggcgcgggaggaaagccggcttcctggccactcttggcttcgccacgccgcctgcgagcgcctacctcccgcatcttgctgggcgattcctggagcctgggaggccggcggccagagggtggcggcggcgaggggagcgggaaaagccggagcggctgcccgggaagacgaggcggccgggagctctgggaggggggacaggctggagggtcccggctcaaagataaaacagtgagccagacgaacggagctagggaactggagaaaagaagagatttaaaagaagagaaaatactgagtcacagtagaaagagttgcggaagaagaaagaggcgagaaaaggcsaccagcagctagactggctcagggatcgccagcctctggttttgc

SEQ ID NO: 6753 - DNA, 790 bp, Homo sapiens
caaggaacacaggaagttcctgactggtcatgtggaaaccagaatgggtcacttgtcctccaagaggctatccagagttgctcctccgcttccactctgggagtctctgggagctttgggtaacattggactgggagggttccatggataactaatyatgtattgggaactgagcctctggaaaaacttgcaaaaagtgcccaaaacttctaggcccttttagaaaggagctgaatgccccctgagagctgctgcttcttccccatccctattccatcattgctactagattattttctgtgagccagagttttcgaaatgtttcttacagcttcaacttttcttgttactcccaaccctctccccaaaagaaggagatgaaagttgtttacgatgacttttatgtaggtaaggcagcaggtaagtagtctcctgtattggaacttctggaatcagatccggcttcaggacaatggagcttgtaccatggttcctatgggagcactggtggggtgggggctcctctccctgacttgagacaagctcagattgaaatctgatgccctaagaggcaacctccacctggaaggtgttcaggtaaactgactgaggagctgcaaggtcattatgcttagaacattgggccatcaatcctccaccctggccatgatccctggggaagaggtgacagccaggattattgagaactgagaaggggcaatcgttactgacccaccccaccaaattcacacatcctctgagccggaccattatatccttctcctgaaaa

SEQ ID NO: 6754 - DNA, 790 bp, Homo sapiens
caaggaacacaggaagttcctgactggtcatgtggaaaccagaatgggtcacttgtcctccaagaggctatccagagttgctcctccgcttccactctgggagtctctgggagctttgggtaacattggactgggagggttccatggataactaattatgtattgggaactgagcctctggaaaaacttgcaaaaagtgcccaaaacttctaggcccttttagaaaggagctgaatgcsccctgagagctgctgcttcttccccatccctattccatcattgctactagattattttctgtgagccagagttttcgaaatgtttcttacagcttcaacttttcttgttactcccaaccctctccccaaaagaaggagatgaaagttgtttacgatgacttttatgtaggtaaggcagcaggtaagtagtctcctgtattggaacttctggaatcagatccggcttcaggacaatggagcttgtaccatggttcctatgggagcactggtggggtgggggctcctctccctgacttgagacaagctcagattgaaatctgatgccctaagaggcaacctccacctggaaggtgttcaggtaaactgactgaggagctgcaaggtcattatgcttagaacattgggccatcaatcctccaccctggccatgatccctggggaagaggtgacagccaggattattgagaactgagaaggggcaatcgttactgacccaccccaccaaattcacacatcctctgagccggaccattatatccttctcctgaaaa

SEQ ID NO: 6755 - DNA, 790 bp, Homo sapiens
caaggaacacaggaagttcctgactggtcatgtggaaaccagaatgggtcacttgtcctccaagaggctatccagagttgctcctccgcttccactctgggagtctctgggagctttgggtaacattggactgggagggttccatggataactaattatgtattgggaactgagcctctggaaaaacttgcaaaaagtgcccaaaacttctaggcccttttagaaaggagctgaatgccccctgagagctgctgcttcttccccatccctattccatcattgctactagattattttctgtgagccagagttttcraaatgtttcttacagcttcaacttttcttgttactcccaaccctctccccaaaagaaggagatgaaagttgtttacgatgacttttatgtaggtaaggcagcaggtaagtagtctcctgtattggaacttctggaatcagatccggcttcaggacaatggagcttgtaccatggttcctatgggagcactggtggggtgggggctcctctccctgacttgagacaagctcagattgaaatctgatgccctaagaggcaacctccacctggaaggtgttcaggtaaactgactgaggagctgcaaggtcattatgcttagaacattgggccatcaatcctccaccctggccatgatccctggggaagaggtgacagccaggattattgagaactgagaaggggcaatcgttactgacccaccccaccaaattcacacatcctctgagccggaccattatatccttctcctgaaaa

SEQ ID NO: 6756 - DNA, 2095 bp, Homo sapiens
  misc_feature (1)...(2095): n = A,T,C or G
gggggtgggtgtgcggagggaagcgcgcggcggcgccgccgccgccgcgggcctcgccctccgggctccgttaatgatccttccgcaggttcacctacggaaaccttgttacgacttttacttcctctagatagtcaagttcgaccgtcttctcagcgctccgccagggccgtgggccgaccccggcggggccgatccgagggcctcactaaaccatccaatcggtagtagcgacgggcggtgtgtacaaagggcagggacttaatcaacgcaagcttatgacccgcacttactgggaattcctcgttcatggggaataattgcaatccccgatccccatcacgaatggggttcaacgggttacccgcgcctgccggcgtagggtaggcacacgctgagccagtcagtgtagcgcgcgtgcagccccggacatctaagggcatcacagacctgttattgctcaatctcgggtggctgaacgccacttgtccctctaagaagttgggggacgccgaccgctcgggggtcgcgtaactagttagcatgccagagtctcgttcgttatcggaattaaccagacaaatcgctccaccaactaagaacggccatgcaccaccacccacggaatcgagaaagagctatcaatctgtcaatcctgtccgtgtccgggccgggtgaggtttcccgtgttgagtcaaattaagccgcaggctccactcctggtggtgcccttccgtcaattcctttaagtttcagctttgcaaccatactccccccggaacccaaagactttggtttcccggaagctgcccggcgggtcatgggaataacgccgccgcatcgccggtcggcatcgtttatggtcggaactacgacggtatctgatcgtcttcgaacctccgactttcgttcttgattaatgaaaacattcttggcaaatgctttcgctctggtccgtcttgcgccggtccaagaatttcacctctagcggcgcaatacgaatgcccccggccgtccctcttaatcatggcctcagttccgaaaaccaacaaaatagaaccgcggtcctattccattattcctagctgcggtatccaggcggctcgggcctgctttgaacactctaattttttcaaagtaaacgcttcgggccccgcgggacactcagctaagagcatcgagggggcgccgagaggcaaggggcggggacgggcggtggctcgcctcgngggggccggcccggcccgctcccaagatccaactacgagctttttaactgcagcaactttaatatacgctattggagctggaattaccgcggctgctggcaccagacttgccctccaatggatcctcgttaaaggatttaaagtggactcattccaattacagggcctcgaaagagtcctgtattgttatttttcgtcactacctccccgggtcgggagtgggtaatttgcgcgcctgctgccttccttggatgtggtagccgtttctcaggctccctctccggaatcgaaccctgattccccgtcacccgtggtcaccatggtaggcacggcgactaccatcraaagttgatagggcagacgttcgaatgggtcgtcgccgccacggggggcgtgcgatcggcccgaggttatctagagtcaccaaagccgccggcgcccgccccccggccggggccggagaggggctgaccgggttggttttgatctgataaatgcacgcatcccccccgcgaagggggtcagcgcccgtcggcatgtattagctctagaattaccacagttatccaagtaggagaggagcgagcgaccaaaggaaccataactgatttaatgagccattcgcagtttcactgtaccggccgtgcgtacttagacatgcatggcttaatctttgagacaagcatatgctactggcaggatcaaccaggtaggtaaggtagagcgcggcgaggccccgacgcggccggacggccggccggggggcctcgcgaggacgggcccggcgccccgcaagcgaggaggacgacggacggacggacgggccgcggacgggcggacgggagggagcgagcgggcgcgggggc

SEQ ID NO: 6757 - DNA, 593 bp, Homo sapiens
agtcttgctgtgtcggctgtgccagcacctgggtctctgcggccagctgctggctctcgtgcccctgcagctcccgctctgactggttgcagttggcgaaggcctggcggtagcgagcatagcagttctggaaccacacctccagccagcggtggccaggccggaggacgtgtaggcgcccgtgtttctggccacgtcatactctttgcagggcagctcgtagggtggcactgtctgtggggccagctctggtaggagcacatccgtctgcaccatggtgtctgccgcccaccacggccacgggagtgaggagtgtgtgtggtcagcttgttgcggtcagcccagtgcagtcatcggtcggctccaacggctcagtcccagagcaggacctggctcccagtcrcttgggtgacacagtaaaccaagagcttcctgttgccaagaaacgggatctcttctccagtggctaggggagggggcattcagggcggtgggcagaattgccctcttaaagggccaggcagccccagccccaccatccctgtccccacctcggggcaatcaacagtggccaagggttcctgtcacttaga

SEQ ID NO: 6758 - DNA, 515 bp, Homo sapiens
cgtggttgtagatttgttttctcactagactgtgagcttcttgagaataaggaacagatccgatttacctcagtgtacatacccagaattgcagaaaaagcactatgtgtgttactagaagctgtctagaattctgctggttatgtactgcctcttaccttctcttccacagacactcctattctctccaaccgccattgcatccgtgatactgacagtacagagaccaaccatggagcacgtggtcttccttcctcctgaaattattcctttgacaggaagttgcctatggactgggacctggagattttgcttgggatgctctggcctcacttcaggaagagttctagagcarggtaccaggccagacacttctggtttcaagaaacagagactcctaaaggaagcaaggaagattgttgtgttgtgttgtgttgtgttttggttggttggttggaaacccaatgttatgcttcttcaggagcaagcatatgccagaaacagcatccatacca

SEQ ID NO: 6759 - DNA, 515 bp, Homo sapiens
cgtggttgtagatttgttttctcactagactgtgagcttcttgagaataaggaacagatccgatttacctcagtgtacatacccagaattgcagaaaaagcactatgtgtgttactagaagctgtctagaattctgctggttatgtactgcctcttaccttctcttccacagacactcctattctctccaaccgccattgcatccgtgatactgacagtacagagaccaaccatggagcacgtggtcttccttcctcctgaaattattcctttgacaggaagttgcctatggactgggacctggagattttgcttgggatgctctggcctcacttcaggaagagttctagagcagggtaccaggccagacacttctggtttcaagaaacagagactcctaaaggaagcaaggaagattgttgtgttgtgttgtgttgtgttttggttggttggttggaaacccaatgttatgcttcttcaggagcaagcayatgccagaaacagcatccatacca

SEQ ID NO: 6760 - DNA, 747 bp, Homo sapiens
ttataaataataaaaaataaagcattaatatagcaataataggccgggtggctcatgcctgtaatcccagcattttgggaggctgaggcaggtggatcacgaggtcaggagtcaagaccagcctggccaatatggtgacactcatagtagtcactactaaaaatacaaaaaaaaattagccgggcatggtggcgcgtgtctatagtccctgctacttgggagactgaggcagaagaattgcttgaatccaggagatggaggttgcagtgagccgagatcgtgccactgcactccagcctgggcaataaagcaagactcttgyctcaaaaaaaaaaaaaagcaacactattcaccaagaacctcaatcatcccccatcagttcattcagtactatgtgattaatccttgctcctttcaatgttgggttagcaatctcatgaacctattagttttttaactgaaatcctgaaaattctgactcagtccactgataaggatatatggcctctaagttgtttaaccaaggccttcagaagcctgcacccaacgtccctcacaacattgtttccacagggctctgagattgtcctttgttgaagaaaaaccactcagacctgtggctgattgcaagacccctcagggaggcatcagagtaaagcaaaacttatctgtagatgacaagatttaaactggttgtgtttaatttatttaaaaaaacacctgtggtatctacttgcaaactggact

SEQ ID NO: 6761 - DNA, 1987 bp, Homo sapiens
gggtagtgtattttaattactttttaattgaagtatactttatatataataaagtgtgcaagactggtaaatttgtatatattgtatacttggtaaccacaaccctgaccaagatagagaacgtttccagcactctagaagattcctagagtataaaaatatttaaatcaccattaaatatcatgcaacttggagcatccaacctttgtcacctgggtagccagcccatctcagctctgggaaagtctacccctggtagcccgctgagataggaggaacaatttatcctgaagacaggtgaaagatgttgaggctcacttttccagaactgcccaccttcaaccctaccttttcaaagtaggctcataccctgagaatcttttcctgacaaggtaaaataagtcttaaaacaaaggaaaagagagtaagtggagagtgaggatggcaatgaatttgaagcttatggaaaacctagagttgggggcaggggaaaggtaacaatgaaacctgagagagtcaacttgtaaattatggttttcaataaggaatgatgtgtataagcttgttttatagatactgagtggtagaaacattggtcttaaggctgaagaaagatgcccctggtgattgagatccctaaactgaggtttgcagagagctgccttttcgctcttcttgattttctagtcaagtgccaagttttcagcttttgttatgttttttccagtgggaaattcctttcaactctaaagtcaagatttaataacatatgaaactgctgccaacccaggattttggacctgattcaccaatcttctgggacacattttaaaatccttctacctagaaggttttctctgcaaggtacataccaccctactctccaaattagaaacttacttgtatcttccaaaattcaaatccgcgttcaaaaaagaggtgcaatagctttccccacctcctgagagcacagccttgggtcctacccactgttcaacccagggcctgattaactgatgaactgtgccgagctgtactgaagacagtttaaatgagacagttgactccaggtaatgtatcaggacctttagaactggattggattagtaccccatgtagtgactataataaatagataataaatagaaggtatcatttctcagaggatccaattttctctttgtaacctgttgacttatttaggccccctttctatctgccataagtgaaaattttgaggaaatagcaactccctgtgagctcaggacttccattttcttttcctgcaagttgaggtttgagtcagctgatttcaacaagattggaagcttgtgtgtatgcatagcaggggttcccaactgagcctcaattgaagtccggctcctgctgtggaactagtgggctctggtcgaatttctgtttgcattaagctgatgtatagagaagcgttctggcatcaggagagagaaaggacgattttgtgcacagatgccagaaaagaggaaacccaccttggtctaaaggtctcctttttccccccaccatttatttataccttccttcttaggatgtttttctgattacaatacataaatatcacctgtttgttgtaaataattcaaacatcttacaaaaatgtaataagtacttttctatctttttatactttttaaaatgttttgtagatacggggtctcactatgttgcccaggctgatctcagcttcctgatawcaagtgatcctcccatctcagcctcccaaagtgctgggattacaggcatgagtcatgtgcctggccataaatactttttaaaatataaaatataataaagtatattcaccattttaagataatcaatattaatattttggtgactattttcacaaacatctctttatgcatacaagtacacatctatgtaatttttaagaagtaggatctaatatgaatgatatttttccctgtgaacctttccctaactttct

SEQ ID NO: 6762 - DNA, 869 bp, Homo sapiens
ggtcaaggattgccacataaggtattcatttcctcttacttctatagattgtgcatgagtgagtgagtgccagactggtttagcagtcatcttacagagcagtttcagagaggtctccacgcagaaggtgagacatgaagtgctaccaagggaaggtgctggaaagccacaccggtgtgacgctggtcactgcagcagtggccatagtagaaggtgagttgaagaagtgtaagttatgaggcatgagaggtgttcaatacaatcaattacaaggtctttactgggggaggtcagtggaaatttctatgagagacactacgggagagttattggaacaagctacagtcgtcctgctgcaactggactcaataccacagtggatgtgcatcatttctttaacctgcacacatttgactcccctcactctcagccagacttttactcttcatccctgctgagttggagctttggttcccttggccacagttaggcagttgtggttactgccatggcccatttacagtttcctcttggcatgaagcaccagtgtcctctcattccagacatgttattttcttaaccctgctggggagtagaaacccaacttctcatagtaattaggctcaattatccccaccaatattgttttttatggtccactggctcaagggatctaagatgactaggcagtagctgtaacttcaagttcaacagaacccacctggtacaagcatgcctccaccttttagagagcctccaatccaatagagcctagggtttcagtgtggaaaatattaattcctccagtgggtcactgggaataatggtgagagtggctactccttmtttcatgccttggttccaggatc

SEQ ID NO: 6763 - DNA, 824 bp, Homo sapiens
  misc_feature (1)...(824): n = A,T,C or G
cgggtcccatcaatatatttggtggaatcatcagcaaaccaagcatgtctctgatcgtctgggcttggttctttaaaggatttgccccattgggcaggggaggtttccttccctatctgcaggacttgctcagtggtttgctgagctggcaagttttgcacatcctcatttaaaaatgatacctgttttggttccggcttagcctggtcttgtatgtgccatttccatttactttcttgagtgtaccctatccaatgaggtttgagggagctcatgacccaagtcatattgggaatttggggcctcataaaaacatcatgattaagacaaaggtgttctgtttcctgtaaagcccagtagcaggtcaacagctgcttctcaaagagtataagctttgctagcctctgacagcttctgggtctaaaaccccaaaggtatctcttcccatcttgtttctacctaaggcyccaatgagcgtgttgatctaggacagttacttgcagttctactggcccatcctgtaagggccatactgttgctctgcttgtttggctggttgaaaagccacgctcactttctgtcttcagtgaaagtcatagcgttttctagtgaccgcatgcagaggttgtaaaatgttacccaagtggggaatatgatgtctccagaatccaaacaaaccaatacaattttgttcctccttttcagtggtagggctgcaaattnnnnnnnnnnnnnnnnnnnnnnnnnnnnnnnnnnnnnnnnnnnnnnnnnnnnnnnnnnnnnnnnnnnnnnnnnnnnnnnnnnnnnnnnnnnnnnnnnnnnaa

SEQ ID NO: 6764 - DNA, 121 bp, Homo sapiens
gctgcaaattctagtattttagcsttagcctttggtaaaatggactgtttccctgcattccataggatgccaaggaactttacagtttgtgcaggtccttgaattttactagggttaactt

SEQ ID NO: 6765 - DNA, 1514 bp, Homo sapiens
gagacgaggtttcaccattttagccaggatggtctcaatctcctgaccttgtgatccgtccacctcagcctcccaaagtgctgggattacaggcatgagccactgttcctggcccacccttctccttctgatagcacagcccctgtgtcactcaggaaccagctctcatccctgcgtcaccagtgggcaaggagggcacatgacccagcctaggccaggtagaatacgttgtcatctgactacatgaacatagctcagggatgaggacttgccacaaggtattccatgaagttaaatccaggaactattgctggaattgttggaaaggaaaagctgtttcccccgggttgttgccctgtgaggaggtaatgcagcagctgcctgcatccatttttctgcctcagagaagagcaggcctgagagtgaaatcgacacagaggagagcaaagccaagggttggggatgtgggaaaaaaaacaactgaaaatttatttgggcacctggatccagccacacctgaagctagatagttctagatatttttctttttgcagattaaccaataagtttttttttcttttttctgaagccacttttacttggatttccaacacttgaggaataacacctgactaatacactctctcttctatagcttcaaactctccatctcccggatcctcatcctcggtccctgagcaaactcaagccacctaaaatcctctgtgctcgaggcagggccacacacacatctacacaagcgcacacgtaaacactgcactcacatctaagactgcacaccctccgcagctgatgtctgccccaccgcagcatgtgtgccatgcgcaccagcttccctccactcccttgcctctcactggcccctcacctggtcagtctagcttccaccaactccccagcgaccctgcaaagccccctcttggctgctgggcctgatgccccctgccatcccaattccctgaaccccctcctcttgaacctctctcatcctttagcaggtgggcagccccgctcctaagacyccactgcctcctccacttgtctgcacatggtggggggccaaggagcacttccttccccttctgcctccctcttcctttggtgcccgcccacccaccctatgatgtggaatccacagccctccatacagagcgctcccaacccgaattctacccagaccttgcccctgcacctaggacctgcatttccagctgccagactccttccaagagacagccccagtgacaaaccctctctccaagctacccttcctctctaccacccatctgtgcaagtcaaaagctggggagtgcttttcctcagcctctccctcagcccccaggcccacagacccaagtgcctggagatcccggcctctccatgtttcctgagtagattatgctgcctctattgaaagatgttccggcagaacactggatgatccagaaatatttccattatatgtggcatgggcagaggcagatcacaaaggg

SEQ ID NO: 6766 - DNA, 582 bp, Homo sapiens
gtaattatggactatgatgtcgttcctaaacgtctcaaaataattttacaaatattcactgggattaagtggcataatccctatcataaaaatggagttatggaggtatttttccttctccactgtcctcaggggaaacagaatttctaaagagaagccaagtttctggggtttgaactttctgattctttgaacattctttaagaactccaactatatcttgctatcatttctactttccacaaaatcctggacagtaaagaaaacagagacatgtaagatcaaaaagttttgcatagctgtgtcaaaaaacagagatgctagcataaataatccagttttaatcacagtaaaaggagccccaaactcttatttcaagtggggcaggcataaagaagtaactcaccagctaagatttctttatgcgtctcagcagtcttgccacgctgtgtcttcttggggaagtgtctctagtttgctagctgaattgccgtgggtgagaactatgaagccttgsctgactacctgctctgccggccaccagatacacctgagccctttctcagtgcttgagaggaagtt

SEQ ID NO: 6767 - DNA, 582 bp, Homo sapiens
gtaattatggactatgatgtcgttcctaaacgtctcaaaataattttacaaatattcactgggattaagtggcataatccctatcataaaaatggagttatggaggtatttttccttctccactgtcctcaggggaaacagaatttctaaagagaagccaagtttctggggtttgaactttctgattctttgaacattctttaagaactccaactatatcttgctatcatttctactttccacaaaatcctggacagtaaagaaaacagagacatgtaagatcaaaaagttttgcatagctgtgtcaaaaaacagagatgctagcataaataatccagttttaatcacagtaaaaggagccccaaactcttatttcaagtggggcaggcataaagaagtaactcaccagctaagatttctttatgcgtctcagcagtcttgccacgctgtgtcttcttggggaagtgtctctagtttgctagctgaattgccgtgggtgagaactatgaagccttggctgactacctgctctgccrgccaccagatacacctgagccctttctcagtgcttgagaggaagtt

SEQ ID NO: 6768 - DNA, 841 bp, Homo sapiens
  misc_feature (1)...(841): n = A,T,C or G
aaatgactttaattcttcctttgggtctgaatgagccaagactcccacgtcgggctcctccgggtctgttgtgtggttcttgaggctagaggccccacagtgatcgtctgtcttattgccctgaccacacattctgtaagattcctcctttctgatgctggctgacttcctgtgggttggccaggaatgcagggcagacacccaaattgtaagggaaggaagtgtctgtcctcctcacagtcaggggctcccatctctccagagcctcagcccgtgtgcctgccatgactggctggcttagtcacctgaggagagatgaccaggaaaatccagagagaaggcatttgctgggctgaggggaataaactgcctgtggaaaggtggattggtccttggatctcttyacctgggggctgtcaagttgggacagagccaagataagagccctttttcaaatgtgttctttcatcttttaatggagttggtttctttggcaggctagcaaatcctgcagggcccctgtgcagccactctggagggtcagggagacactctgtggttggcacctgcgaaggagcaggggtgagaaatgaggagaaatgtctgtctgtgccgaacccncagtggagagcgtgtgggctcagagttagggtaaatgaaggcacgggcgcactgcagacccctgatgggagaggcagtgggcgatgcttccatggtgaaatggaatactgggagccaggtgccctggcgcctcatggcaacgcctccttactctaggccggcctcgctggcattcctctttgagctgatgagggaccagaccagtcccaggttagcacct

SEQ ID NO: 6769 - DNA, 493 bp, Homo sapiens
caaaggatttctggccagccgctaccctcagagagcagttatgaaggaaaaccaggtccwgaagctgatgcctgccccacaggagcgcacagactcagagccagacagccctgtcaatggggagggacctctgtggcactcagggctgcagccacagacagagaccgtgtccatggggcgtgcagtggaggcttgccgcagtcacaggcagcacaagctggaaactgcaccagttacaggcctgcaggccagccctgagctgccggtgggttttaagtcctgcagtttttctttaatctgaagttttatggctccaatgttcaaaacacacacacacacacacactacacacacacacacacacacacacacacacacgagatgacgcataaaaatgctgatgcccacatctcttcaaaccgtcttgcagccccaggcccccattctccttgctgcagcaactggagccgctggtggctcccaggcagggcca

SEQ ID NO: 6770 - DNA, 483 bp, Homo sapiens
ttccctctctccctggttaattctcacctgtctttccggttttctctcaaacatcacctctccgggaagcctatcccaggagccctctgtgtccgactcccctggaaatgttctgttgctctatgtttttccctctgagtcctggcacaggcatccctaagtgactgtggctagtagttccggttctgcctcatttcctctcagaagggaagctccgagaaggcagcgattcttgacttgttcagcgctgtctcccgagcacgcgcatcgcgttaggcacgtagtaggcactcagcaaacatttgtcaagggcacarctcgagttggaaatatgggaggagtaagtccaggtggaaggaaagaaatgtgaaaagtagactttgccttgtggcttgcaaggcctttccccttttaggaattgctcggcccacttaggaatttcacaggagcatggaatcctccagccacgggcaatttcctcac

SEQ ID NO: 6771 - DNA, 764 bp, Homo sapiens
tataaagtaggtatsattgcgtccatttcacagatgaggaagtggaggctctgaaatgttacataacctgcccagggtcacaggtatctgactctggccattatgctctttctactgtgccctaagccctccaattttagtgtcattgtcaatgagagaagattggttcatcaaaagtgagagtaaaacagtgctatacaatagaactgggtttctcaacctcagcactactacatttgggaccagataattttggttgtagggtgttatcctgtgcattgtaggatgttcagcagcttccccggcctcttccaactaggtgctcgtgccaaccacgccactctcccaacagcatgacaataaaaaaaagtcttcaaatattatcaaacgtccctggaaggcaaaacagccaccagttaagaatcactgcaatagaaatataaggtgagccacacgtgcaattttaaattttctgatagccacattttttctaaaaaagtgacaagaaataggaagttaatttcaatattctaatctattatatgcaaaatattatcattgcaacacgtaatcaatataaaaagtatcgataaaatatttgataatcattttttatactaagcctttaaaatgaggtgagtattttatatgtacagcgcagctcaatgcggacttaccacatttcaagtgccctagccacgtggcttgtgactcccataatgaacagcaaaaagctggagaaaaaaggagggaattgcccacat

SEQ ID NO: 6772 - DNA, 806 bp, Homo sapiens
ggggcccagcgcctgcatctggagagccacctcccttctactctttgggcttttatgaaaaagagtccatttaaatctgatgaataagtcaaaatgaattgaataaataaacgaatatgtgcatctctgcagaggatgtggctgcctggtggagaggccagcgggcctgccaaagaacaaaggcaggcgaggactggccacagtcctggggcctggtgggggtatggagcccaggggttatcgagagccaaggaggagtggaaatatggttggctttgcttccttccctgttcatcagtggtggtcctattaacacttgccctgtcagctccatccacggttgctttgagtgaaggcctcccagtgtcattaccgtcatcaccgcatgttggaaaatgataatgtgtttgaatttcctgagtacacatgaatttccgaggtctgaatgtggcactgggtcccaggcgagaaggggtttacacagggagagttctgttgggacgcacacgctccyatgtgggtgccgctccgcaggccactgtccctcccaagaggcgcagatatggggtctggagctgcccgttgccagcagttcttcctgctgtgggtgctggccttggtcagtgcccacggaaggtctcttctctggaccctaagtggccagttggctaaggaaggaaactagtattaactcatcactctactgaatccatctaagctccagggatggagacatgggggtggagggtggtgctgactcaagtgaaatcttgccccagctttgattctgcttggacgatggagga

SEQ ID NO: 6773 - DNA, 815 bp, Homo sapiens
agttcggggacagtggggcagggccaggagcagggccagcaacacagccaggcagccgtcctggggctggctgggagttcaaagccctgccacagagccccagccctgccacccatcgcgggggcttatggagctcctcagatgggctgggccttcctggaagatgacccctgggactgggagaggctcctcccctgtccccataggctgtcccctctctcctcatcctcagtctctgagcagaaggcacctccctcaggaagaccccmcaggacagcgaggggagggcgactgctcctccagcttccctggccctgcgtgtcttctctggagcaagctcagttctgagcgttcctgggcccacgggccccttgcggcagagacacggcttttgcgccttcacctggttttggaatcacaagccaagctcaggcaacacctggggagatgaacctggaggccccagtgggcaggtggacctcgtggtgctgaccaaactctagccaagtttcgaggcccggttctcagatgctcccccagatggcccacagctagctaatatctagggctgagatggtccgagtggggcagggcacagacccctccacgggcaggatttcttcccaaagctgtgccatccctcaagtccctggggatgctagtgacagtgcagaccccaggcccggcagtggggctgcagtgacccacagttatcatggaaactccatacctgaggtaagagcttggaccttgtcctgggaggtcccggggctgcatcactctgggcctcagtttccccttctgtcatgcaggaa

SEQ ID NO: 6774 - DNA, 793 bp, Homo sapiens
gcgtgagcccccagccattgcctgagccatccmctgacctcaacccctggccaagccccgacccagccctccctgtcacccttcagttccaatgccagtccacatgcccccaccccaaccaagcctaggacagccccctcctcccactcaaaactacactgtgctccaaaccgtgtcagccttgccttgggaaaaagagagagaccccagtgtccccagcagtttacactgcgggcaccttccacaaactgcagagccctcctgcccacactatcccctcagcacatgcctgtcattagccattcttcccagttggcactattttcaggtatctgcacacagagacatctagcaactcaccaaaagccacacagcatagctgtggctgggcgaggactcagatggccaccaagagattcctaattcactcactcagccattcagtcactaaacaaacatgcactgagtacccacatccatgccaggccctcggggtcagttattggaaaacagacatggcccctgctctcaaggggctcacaggctgggcaaagatgagacttgttccctgtaactgcaccaaacttcttgcagttgctgcctcattccctccccaacacacacacacacacacacacacacacacacacacacacacacgctccaccctccaggctggcaaagtggagacacacctgaaattagcataatgggcttgggggggtggagggaggcccaggacctctttgtccatctgtgatgctaccaggaatgaggcccgtgttggtggccg

SEQ ID NO: 6775 - DNA, 1616 bp, Homo sapiens
tgtgcgggctctgcacagggcaggatgtcagggaggctgaggacagaagcccaggggctgtccccagcttctaacatcagcgggtcatagaacttcctgcctcagcttcttgaaatcatggcgtccttgacctcaggtaccccttccattatgctccggctctcccaacttcttagaagcctcctcaactcctggccccttctgcggaggaggcgggaggcagtgaaatcgtggcatgaagaggtggcggacccaagctccagcccccatgctgcaggagcagctgtgtgaccttttgggcaggtcacccagcctcatgcaccacctcagtgtctcatctaagaaacaaggctgtgggagcccttcccacagggtggtggtgacatcagactgccactgtgcttggctaaaggctggaggcacagagggtacccagccaacgggagttccttcatcttatctcacctgccacagagccagtctcccagcaccacagccccaaagcagccccccaggtgggaagtgccttgggggtacctactgttcctttgctcaccacccctccacagcctcctcttgggtggtcttcaacttctactttccctcccccacgccctgacatctgcctcctcctccccacccctcacacagagctctcctgatgccctgaggcctccagtgcctccattcacaaggaactgcaatggtacagccttaatctgtgttccttctcctgggcctccatattttggaagctgggactgttgacctaaatgtatccaaagaaatgacttcctaatggtggaattacgggtatcgggcatcttggtaggagggagctttgagaatgagagccttcttaacacctctccaatcataccccatggctccccttcagggtaagagtcttcctacacagagatcagtggatctggaataaagccaacagccgccgcctagccctgagcatgcttggaaacccacagcctgctcttggacaggaaggttcagccacagcagccaggacagctgcagctttaagaacractcctgagcccagagaagcatggagtggaggggattgatttttgggtcctcctggagactgggatccaaaatcaatctggcaattaataggcaaggtgtgaaatggctctggtttcaggctcccagtgtccctggttgtcttccccagagaagggccctgctgcctctgtgcttccttccactccccatattctggggctctggtgacagctcctgagaagtccagctggctggccctcttccagggccttgtcacctggacagggccacaggataagcttggccagctggcagggctgggaggagggagcaggcagcctggattagtggccagggaagggaaagccaccaggggccctttcaagcccctccatctccaccccctacatcgcaggtaagaagcaggacatggcggggcttctagggactctaaatttccagagggccagcaccatgggggcaaataactgtccatcctatgtcctccaaccactctgctgaccgagcctggtggacaggccctcccccattgcacagacaggctgcttgagctcctaagaatgtgtcca

SEQ ID NO: 6776 - DNA, 851 bp, Homo sapiens
caataaagcttttgatgaatgaatgcatgcatgaatgaatgaatgaggcaccctggggtctctgttccttcatctgtcaaatgggagagtggcaactacccgccaaggttgttgggaggctgtcggaagcagtgcacacrcagcctggagcacggaggcaggccgggcgcaggtgagaggggctgtgatgacagaggctttgcctctggagaatcaccagctaattgcctctccacagtcggcttcccccaccccaactcctggatgaaccgcaggtcagcccacagccccccgaaactcaatcactgtctaataaaatcccggggcttctcacgcacccacacacatcgtgcaacatagtattgggagcagatgttatagaaaatcagcgtggcctggattggaacaattctgcatgtatttctgagttttgtttcagaaagtgaagtcatcgtgggtgacacaaatcaatataaatataaacgtcttccaacctggccagtgtgggataaaggaggtcacagagtgtccacccccagagcatgggttgcaccatctccacccgcttcattgcagcttccgccccaccccaggaagatgtggggggcccagggagggtaagggagggacctctcctatgtgctcatgcccaggcctcatgtgtaccctcatgagaaaggagtaggggtcccaggtctgatcccttcccaggtcaacccttcagtcctctttgcatcatgaggccctctgtgttctggacagaagtgggctgggggatgcttctctccctgggtcaggccatgctggaccaccagggacctaaagcagggacccccatatctcctgtctcc

SEQ ID NO: 6777 - DNA, 851 bp, Homo sapiens
caataaagcttttgatgaatgaatgcatgcatgaatgaatgaatgaggcaccctggggtctctgttccttcatctgtcaaatgggagagtggcaactacccgccaaggttgttgggaggctgtcggaagcagtgcacacacagcctggagcacggaggcaggccgggcgcaggtgagaggggctgtgatgacagaggctttgcctctggagaatcaccagctaattgcctctccacagtcggcttcccccaccccaactcctggatgaacygcaggtcagcccacagccccccgaaactcaatcactgtctaataaaatcccggggcttctcacgcacccacacacatcgtgcaacatagtattgggagcagatgttatagaaaatcagcgtggcctggattggaacaattctgcatgtatttctgagttttgtttcagaaagtgaagtcatcgtgggtgacacaaatcaatataaatataaacgtcttccaacctggccagtgtgggataaaggaggtcacagagtgtccacccccagagcatgggttgcaccatctccacccgcttcattgcagcttccgccccaccccaggaagatgtggggggcccagggagggtaagggagggacctctcctatgtgctcatgcccaggcctcatgtgtaccctcatgagaaaggagtaggggtcccaggtctgatcccttcccaggtcaacccttcagtcctctttgcatcatgaggccctctgtgttctggacagaagtgggctgggggatgcttctctccctgggtcaggccatgctggaccaccagggacctaaagcagggacccccatatctcctgtctcc

SEQ ID NO: 6778 - DNA, 722 bp, Homo sapiens
caaagggagcctggccccacaaagtcatggcacaaagtcactccaggggtggcaattaacaggggcctgacctcatctgggcagtgtggcacactgagatggacggatgaccccaggtgacgtggcagtagaaagagatgtgcagagacctggcaggggaagaagacaagacatattcaaggaaaggaaggaaagtcacatgctggactacagagtctgatgcagccctgagctggggggaaggggccgactctcatctcaggtccccagctccctagacccctcaccctatctctgtccacccacaaccatgcttgggatttcttcttcccatacacrctttcctcaaaggtcagctcatgcaaacgagtgcctgtggctactcctgccccactgtctagcaggtgcggtgggactcttgagtcccctgggacttcataggaggctttccccagctccatctcctgctcccctccccaaacacagcagccacaatcaggggcagcccgccgaccctgcgagcaactatgactcaaaacaacattgcacaaatacagtaacatttccaaagccatggaatctggccgtgtgactagcagcttaatggcctgacagtgagcacagggctccaacacgtgggagcgcctatcaagggctgaacctcagcagtgcatattttacctcaaaaagaggcgaggcaggcacttgagccctagggttta

SEQ ID NO: 6779 - DNA, 815 bp, Homo sapiens
tgccaaacattgcattggactaaagtaactgcttatgttaatggaagtttaaccttaattacttccttataggccttaactccaaatacagtcacattgggggttatagattcaacatatgaattttggaaggctcttcttttcccagaattgtctttgctgaaaatcaattgaccataaatataacgatttatttctggactgtcaattctgttccattggtctatatgtcttcttactgcaaataccatactgttgataactgcagctttatagttagttttgaaatcaaggattaaacattctccaactcctttcttcccacgcatggaaaatcactgatctcttttctgtctctacagatttacctattctaggtacttttctttttaaacagtgtcttttggctattctaggtcttttgtacwtctatgtaaattttacaatctgcttgtcagttcgtgatgaaaaaggctggtggaattttgagagggattgtgttgtctatatatcaatttgtagaaagttgccatcttaacatattgagttttcaaatctcagaacatagaatgttagaggtccctgttcttttttaattttaaatttcttttcataatttaaacattttttctattgaggtaaaattcatatagataaaattaactattttaaagtgaacaattaagtggcatttattacattcacaatatcgtacaacaactacctctatctagttccaaaatattttcatcaccacaaaagaaaactgtgtacccatcaaacagttactcctctttcctttttctcccaacctc

SEQ ID NO: 6780 - DNA, 776 bp, Homo sapiens
ttcgttagcacagtgagtgtcttcaaggttcattcacattgtagcatgtatcaacttcattccttttgatgaccaaatgatatcctattatatgtatataccacagtttgtttattcattgatgaatatttgaattctttctaccttttggctattgtgaatagtgcttctatgaatatttgtgtataagtactcatttgaatactttttttaattatttgtggtatataactagaaattgaattgctgggtcatatagtaatgctatgtttaaccttttgaggtaaagatccttgttcccatatgtcctctagggcataaaaatcccattaagctctaaattatggtttccacctagtcatttggagctcctcatgccaggagacaaacaaccaacatcatggaaaggataattaaatcttgatcttcaggagaaggtaggaatgttgtacagtgggaaaatggaagaatgcatttcgtacttgggtgattcactgaggtgtctctttacatctctttgcctaattttgatggtaaatggataaaatgcagcaaccataacttgagaaagtcaccatgtctctcagagccactccaccactgtgatggctaattttagttatcaactagactgaattaagggayacccagatagctggtaaagtattatttctggtatgtctgtgaaggtatttccggaagagattggcatttgaatcagtagtaaggaagattcctttttacccaacatgggcaggaaccagccaatcaactgg

SEQ ID NO: 6781 - DNA, 1019 bp, Homo sapiens
ttccatgactgctggaacactggatgtgtaggcatatgagacacttttttagcatcctcaacatgggcatcaggctggttttttgttactcagcctactgattctatagagtggtctaggatagttttctcttcccttttgtcttctgtatgcacaggaagaatgggatcatgaaccaaaccttctacacaactgaatagaaagcttatgattaaaaatagctaacatttacacagcactgactgttgtaaacattttccaatatatcagctgtttaatcttcacaaaacccaatgagatagacatcgttattcctggcttgcaaatgaggaagctaaggcagaaaacttatgtcccttgcccggggtcatgccactagtaagtagaggaagtggggtttatattcaggcagtctggctccaggatcaatgctctcgatcactccaggatccatgctcttgatcactcattatattgcctctgaatttcagcaaagagagatgacaagtgcatgttaccaaaagattgcttttttctgatctactgcttttttattttgcagtgtagtgtcctagcttcttggagtctctgatgtcacctaggggagagaactgaaattcttagcatgtttycccaagccatccagcctctcacttctaaagctgagatggcttggtagctagtggatctggcttcatagtttcttggttgcagtgaaaaatgtaccaggttttggaaccagcctaacgtgagtttaaatcctgctgtccatccatctatccaataaatatctatcatactcttaaatgtcaactactaggctttgtactgtgtgttgaggatacagtaaacaaaacaattccttgctctcaccgaatttagtcaagtgagacaagacaaaaacaaatacgtggatgctaagaagaaatataaggcacagggataaaaactaaggagaagcaccattttagaaatatggttaggcatttgtgcccgggagtttgaggctgctgtgagcc

SEQ ID NO: 6782 - DNA, 1019 bp, Homo sapiens
ttccatgactgctggaacactggatgtgtaggcatatgagacacttttttagcatcctcaacatgggcatcaggctggttttttgttactcagcctactgattctatagagtggtctaggatagttttctcttcccttttgtcttctgtatgcacaggaagaatgggatcatgaaccaaaccttctacacaactgaatagaaagcttatgattaaaaatagctaacatttacacagcactgactgttgtaaacattttccaatatatcagctgtttaatcttcacaaaacccaatgagatagacatcgttattcctggcttgcaaatgaggaagctaaggcagaaaacttatgtcccttgcccggggtcatgccactagtaagtagaggaagtggggtttatattcaggcagtctggctccaggatcaatgctctcgatcactccaggatccatgctcttgatcactcattatattgcctctgaatttcagcaaagagagatgacaagtgcatgttaccaaaagattgcttttttctgatctactgcttttttattttgcagtgtagtgtcctagcttcttggagtctctgatgtcacctaggggagagaactgaaattcttagcatgttttcccaagccatccagcctctcamttctaaagctgagatggcttggtagctagtggatctggcttcatagtttcttggttgcagtgaaaaatgtaccaggttttggaaccagcctaacgtgagtttaaatcctgctgtccatccatctatccaataaatatctatcatactcttaaatgtcaactactaggctttgtactgtgtgttgaggatacagtaaacaaaacaattccttgctctcaccgaatttagtcaagtgagacaagacaaaaacaaatacgtggatgctaagaagaaatataaggcacagggataaaaactaaggagaagcaccattttagaaatatggttaggcatttgtgcccgggagtttgaggctgctgtgagcc

SEQ ID NO: 6783 - DNA, 1159 bp, Homo sapiens
cggttggagccaggggtgtccctggaattttggctgacctgagccaatgtgaatcatcaacactctgagaagactcagccccagccaaggagaccagagtgaccataacaagactaaaaatcatccaaattaaaattgaactggaccaatgaagtcattggtttttccctccaagaagcagtccagattttctgttttacctctttgggctcataatgatcaaatactcgacttctcaccacctcctctttgaagttcctacaaatttcagagttttgcaggcagggataatgtttgctgggtactgatccacgtcagtgaaataatccatccactcttattctcaagaatccctgttctcatctctggatttcagttttccagatttgtaaaatggcagctaactaaaatgggtttgagttaaaaatgaaagcaatgaaacttcagtttatcgggatgttttctcttatttcaaagaaggtctgggtgacaccagatgacttaaaaccaagtagaccacaggatatcaagaaattaagggacaatgtttggggatccagtcaaactccaaccttcccacacggtttagtctcccaaaatgctggttcacttcttccatatgcaaaaaaaaaaaacacaaaaaaaaaaacaaattccatttgcaaaatcagccagatctaatctgaactctcctatttgtcacagctatctagagttatcgtgctccaccaacagaccacttcctcagacacattcttcaggaaaatcatataatttattggcataatggtattttttcaaaagaagtatttcattttaataaagatgtgtatcaccatatttaatcaatcaggctgattgacaacagcaatagttgagtcttccagcagatgctgctgctacctcattcttattccagtttcatttctcaatcaaatccatgtgtaaaaaacataatgtgctgccaacacaatgtaataaaacctcaactgaaatgcacaccagcacgtcagaaactgataactcaaagtatgggaaaaattaacttcagaaaaatcacttatgacacccgggtattcragttttatggacaagagaggcatcatctcactatagctaacatgaataggccaaattcgtggatttgtcctgaaacaga

SEQ ID NO: 6784 - DNA, 619 bp, Homo sapiens
cccctgtttcaataagaactgtagctactattttttgttcttttttttttttttttttgagatggagtttcactcttgtcgtccaggctggagtagaatggcgcaatctcagctcactgcaacctctgcctctcgggttcaagagattattctgcctcagcctcccgagyagctgggattacagatgcctgccaccgcacccggctaatttttgtatttttagtagagacggggtttcatcatattgatcaggctggtctcaaactcctgacctcaagtgatccgcctgtctcagcctcacaaagtgctgggattacaggcgtgagccaccgtgcccagcctcagcctaattttttgtatttttagtagagtcaggggcttcaccatgtcggccaggctggtctcaaactcctgacctcaggtgatccacccacctcggcctcccaaaatgctggtattacagatgtgagccaccacacccggcccattttttgttcatttatgaagtgccaggccttgagctaaacactttgcatatattattatgaagtgacataaatgaacaaaaaattcattgacaaggtgggaggggagtgtgcggaagtggagaggcacaaac

SEQ ID NO: 6785 - DNA, 619 bp, Homo sapiens
cccctgtttcaataagaactgtagctactattttttgttcttttttttttttttttttgagatggagtttcactcttgtcgtccaggctggagtagaatggcgcaatctcagctcactgcaacctctgcctctcgggttcaagagattattctgcctcagcctcccgagtagctgggattacagatgcctgccaccgcacccggctaatttttgtatttttagtagagacggggtttcatcatattgatcaggctggtctcaaactcctgacctcaagtgatccgcctgtctcagcctcacaaagtgctgggattacaggcgtgagccaccgtgcccagcctcagcctaattttttgtatttttagtagagtcaggggcttcaccatgtcggccaggctggtctcaaactcctgacctcaggtgatccacccacctcggcctcccaaaatgctggtattacagatgtgagccaccrcacccggcccattttttgttcatttatgaagtgccaggccttgagctaaacactttgcatatattattatgaagtgacataaatgaacaaaaaattcattgacaaggtgggaggggagtgtgcggaagtggagaggcacaaac

SEQ ID NO: 6786 - DNA, 566 bp, Homo sapiens
cctctgtcaaaagtagtggttttgaacagaagcttcccaagtcctttctagtttagtgagtacttacagaatgttttaaatctacaaagtatttttcactttatagcgccgaccactatttagttctgtgttctaatagttgtcagtggctgcacaagtagatgcagaactagaaccagggaggatggctaggtttttccccagagcccagtggcaggaggctctgagcccggtgggcaagagctgaaggcccacacgggccagggagggcacgccccttgaaggcaacgacgtcatggaagcttggctctggcttccagccagcatccggttctatctggttgtgctggggcccagaggactgggtctggaactcatcagccccacctgtcagccctcccctggccggcaagcaggggcctttggttatcactaaggagagtgaggctgagggtgagctgaacatgggcacaatccagaggcccaatatcccatccccgctggacaactcaggggagggrgctgtgttcctcagccaggcacccgcaatttgactgagctctatt

SEQ ID NO: 6787 - DNA, 821 bp, Homo sapiens
attattgcattattgactcactgattcttttttttttttttttttttttttgagacggagtctcactctgtcgcccaggctggagtgcagtggcacgatctctgctcactgcaagctccgcctcccgggttcacaccgttctcccgcctcagcctcctgagtagctgggactgcaggcgcccaccaccacgccyggctaattttttatattttcagtagagacagggtttcaccgtgttaggcagaatggtctcaatctcctgacctcgtgatccgccctccttggcctcccaaagtgctgggattacaggcgtgagccaccgcgcccggccaacttactgattctttacctggcccccaacatacccaaccagccttcttccctcctgcaaaataaagaattcacgtccactggcagggaagtgtgaatcactgtgataaaggtggaagcatacagtcagtccagaaaagaaatggtgtttggataatctgtgaaccttgaaattagcttgttcaagagaactttgttcactgactgtacagatccttgaagataatatgaaccgagtgagatgtaacagtgcacgaatttccctaaaagaaggacagaaaggcttggtgtgtccttggctgcacctttattttcctgctaggcaagttctttcccataggctctgcttaatgtgttgcaagagagtttacaccaaccatgatcgtcatttgattggaacctgtgctttatcatgtttgcctggacaagccttgagaaagagcctggcctgaaaactaatattaaaaaaaattgattagtgaggcaagca

SEQ ID NO: 6788 - DNA, 808 bp, Homo sapiens
taggagaatcacttgaacctgtgaggcagaggttgcagtgagctgagatcatgctattgtactccggcctgggagacagatggagattccatctcaaaaaaaaaaaaaaaaaaaaaaaaaaaaaaattagccacacatgttggcaggcatstgtggtcccagctgcttagggtactgaggtagaagggtggcttgagcctgggaggtcaaggctgcagtcagccgtgttcataccactgcacttcaacctgggcaacagagcgagactgttgtctcaaaaaacaaaacaataaccacagcaaaataaataaaaagcagatgtttaaaacaaggcataggttccttaactaggtggcacaattcatttgttatattaaaattttctttttaaacctttttgatttactgccgtaacagaaggttgggcagcttttacacagaatatcattataaactgctttgttagaggcatggtgtaaaattataggctgtgttgtaatgccatacacatgttcttgaaaaccttaagttatgcaaaattatttgctaaacctagcaaggcatataagaaaaatagaaaggcagaagaccattctaaatctgtggaactttataaccagctactaataaaaactagtgtaataattgtaataaaaataaatatcagtacatttaaattaggtatttatattgaacatcatagtgtgtttagagacttaagccctgggctcatgcctctgtctttgaaatgtagatcctagagggcatttgcttctaataaagactgttttcatcaaaacttgaaatc

SEQ ID NO: 6789 - DNA, 808 bp, Homo sapiens
taggagaatcacttgaacctgtgaggcagaggttgcagtgagctgagatcatgctattgtactccggcctgggagacagatggagattccatctcaaaaaaaaaaaaaaaaaaaaaaaaaaaaaaattagccacacatgttggcaggcatgtgtggtcccagctgcttagggtactgaggtagaagggtggcttgagcctgggaggtcaaggctgcagtcagccgtgttcataccactgcacttcaacctgggcaacagagcgagactgttgtctcaaaaamcaaaacaataaccacagcaaaataaataaaaagcagatgtttaaaacaaggcataggttccttaactaggtggcacaattcatttgttatattaaaattttctttttaaacctttttgatttactgccgtaacagaaggttgggcagcttttacacagaatatcattataaactgctttgttagaggcatggtgtaaaattataggctgtgttgtaatgccatacacatgttcttgaaaaccttaagttatgcaaaattatttgctaaacctagcaaggcatataagaaaaatagaaaggcagaagaccattctaaatctgtggaactttataaccagctactaataaaaactagtgtaataattgtaataaaaataaatatcagtacatttaaattaggtatttatattgaacatcatagtgtgtttagagacttaagccctgggctcatgcctctgtctttgaaatgtagatcctagagggcatttgcttctaataaagactgttttcatcaaaacttgaaatc

SEQ ID NO: 6790 - DNA, 768 bp, Homo sapiens
aaggggctctgtctccagggagcctgcctcgcttttggagcagacaggcttggggagggcagtgatgtgagccagccccacccagcacccctcttgcccttcctgttttcctaggggacgggccgggccatatggggaggaagggactagaccaatgctgcttaatgttacagacgctgagcagcgagctgtcccaggcccgagatgagaataagaggacccacaatgacatcatccacaacgagaacatgaggcaaggccgggacaagtacaagacgctgcggcagatccggcagggcaacaccaagcagcgcatcgacgagttcgaggccctgtaacagccaggccaggaccaagggcagaggggtgctcatagcgggcgctgccagccccgccacgcttgtgtctttagtgctccaagtctaggaactccctcagatcccagttcctttagaaagcagttacccarcagaaacattctgggctgggaaccagggaggcgccctggtttgttttccccagttgtaatagtgccaagcaggcctgattctcgcgattattctcgaatcacctcctgtgttgtgctgggagcaggactgattgaattacggaaaatgcctgtaaagtctgagtaagaaacttcatgctggcctgtgtgatacaagagtcagcatcattaaaggaaacgtggcaggacttccatctgtgccatacttgttctgtattcgaaatgagctcaaattgattttttaatttctatgaaggatc

SEQ ID NO: 6791 - DNA, 793 bp, Homo sapiens
tgtagaaaaatgttcattttagttgcagaacaagaacttgagtttctaggagaaagtttgggtggaaaggaatagccaggtcacacaggataggaagaaagaagaaaaatctgtctccttttcttagtgaaaaggtatattccgggagagtaccttcttctgtgatataaataaaataaagatgtataaagttttatttaaaaactttgtctcagaaccaggcacagtggcttgtgcctgcaatcccagcactttgagaggctgaggtgggaggattactggagttgaggagttggaagctgcagtgaactgtgattgaaccactgtactccaacctgggcaacagtatgagacccctgtctcaaaaacaaaacaaaacaaaaaaaaactttgcttcaaactgtgtagttacccaaagtgcccatgtgcatgtacacacttacatgtgtacatataaacatgtgtcagtgtacayacatccaatagatgcagcatctccggctcctcagatttcaatgcttgacctttaaggcatctgcacactccccataatcaccccagctttgcccgaatgatttttgcagggaggccgatgcccaggaattcctccttccttggcttcctgagctttcctccactttgtcttccttgtccctctagaaatctctttcatccctccacaacttttttccattttaacataggaactgcagcttagaatagtatttctcaaatttaatgtactttcttttcaattaaagaaaaaaattcaaagcagctgccaaatgaatca

SEQ ID NO: 6792 - DNA, 487 bp, Homo sapiens
ccttaccttttacatagagaatacctgtgtgttcctctctagctactgagtggaatgtgaatacttttgctgcccaaacacccactgaggtcactgtggaaaatgcaaacacccaggccctytctgacttctgaacttggcttgcctcaggaccaggcacagtggtgtagaaggaagaactgacttgcttctttcccacacgcaagtgatcagcattttagtgcaggaatgctaatactgtgttatcttagaactggaacagatcctagaggctatctagtcccactctccttgttttgtttaagagatagctgagaaatagaaaggtaatgtaacttctgagtgtcacaacaaaagctccaagatacatctcatttgcaggctgcctaattcccgtgagaaactgcagacaggactatcctgtgggagtaatctgagagtctccagcaatcagtctcacctcctttcttcccttggaaaaaaaaaa

SEQ ID NO: 6793 - DNA, 487 bp, Homo sapiens
ccttaccttttacatagagaatacctgtgtgttcctctctagctactgagtggaatgtgaatacttttgctgcccaaacacccactgaggtcactgtggaaaatgcaaacacccaggccctctytgacttctgaacttggcttgcctcaggaccaggcacagtggtgtagaaggaagaactgacttgcttctttcccacacgcaagtgatcagcattttagtgcaggaatgctaatactgtgttatcttagaactggaacagatcctagaggctatctagtcccactctccttgttttgtttaagagatagctgagaaatagaaaggtaatgtaacttctgagtgtcacaacaaaagctccaagatacatctcatttgcaggctgcctaattcccgtgagaaactgcagacaggactatcctgtgggagtaatctgagagtctccagcaatcagtctcacctcctttcttcccttggaaaaaaaaaa

SEQ ID NO: 6794 - DNA, 826 bp, Homo sapiens
aagtggcatttggaattccagcccactgagaaatgtttccacctacttcccatgactagaaagcagctgaaggaaagtcactctgaacagtaattgcatgttttgtaaaagctatcaaaagttacacacagatgcattttacaaagacctggaggggtgttcacacttcttggcaggtgtgtgagcctgtggctctaacaaacctggccctagagccacaaaggtggctcaggtgatcttgaacacatctctattagatgattttaaacattscctccacatctgtatggcttggcagcaagctgcaaatgtgtttctgtcactggagcccttcaagggctgctatcttcccgtaagccataatgaatcccacagtcaaacactgcatggtgtgcaaacttctgaacacctgcactctccaaatcctgcctttgacttatgcgatagcgtttgtcacttcattggcactgcattatagaaactaagtgtaattgcgacctagaaaggttcaacagtgaaaccaaaaaaagaataaaagtaaaggaacctcggcttaatatggagcatcaagaaccgcctcagtctcggagtgttcggaggactccagttaacagtggaggaaaaccaggcttgcgtttgaatattactttagctggaaaacactatttcattacattaatgtctgcactaattattataataatcctgagtttacaccagtaacaaatcaattgtaatgagctgaacaaaagaatctaggtggaattcttccctataaatatgctcctgtcagtgcagtcaaaacacagtgccagaacactgcctg

SEQ ID NO: 6795 - DNA, 826 bp, Homo sapiens
aagtggcatttggaattccagcccactgagaaatgtttccacctacttcccatgactagaaagcagctgaaggaaagtcactctgaacagtaattgcatgttttgtaaaagctatcaaaagttacacacagatgcattttacaaagacctggaggggtgttcacacttcttggcaggtgtgtgagcctgtggctctaacaaacctggccctagagccacaaaggtggctcaggtgatcttgaacacatctctattagatgattttaaacattgcctccacatctgtatggcttggcagcaagctgcaaatgtgtttctgtcactggagcccttcaagggctgctatcttcccgtaagccataatgaatcccacagtcaaacactgcatggtgtgcaaacttctgaacacctgcactctccaaatcctgcctttgacttatgcgatagygtttgtcacttcattggcactgcattatagaaactaagtgtaattgcgacctagaaaggttcaacagtgaaaccaaaaaaagaataaaagtaaaggaacctcggcttaatatggagcatcaagaaccgcctcagtctcggagtgttcggaggactccagttaacagtggaggaaaaccaggcttgcgtttgaatattactttagctggaaaacactatttcattacattaatgtctgcactaattattataataatcctgagtttacaccagtaacaaatcaattgtaatgagctgaacaaaagaatctaggtggaattcttccctataaatatgctcctgtcagtgcagtcaaaacacagtgccagaacactgcctg

SEQ ID NO: 6796 - DNA, 779 bp, Homo sapiens
gtaaacaaattaggattttgtagtgcctaatatagtgtgctcatacagtttctttgaataaatgtggttggttgccttaaaagttaatcaatccccacttctaaaatagttttacaactgatatggttgagcacaaagaaataattttttattctaaaacagctctgcaaagttggatagggttgactttaaaagttgctcatgtgaacgattcagtcgtttaggctcctttcacagacattaccctattgtatcctcctaacccaggaagtagataggagaggtttaaaaggttctgaaaggttaaatgagttcctgaaggtcacaatgctaattaacagttgagcaatttctagaacccagatctctgtgcaccttgtttatgacaacacattttctctgaacaggttattttttggttagatcattgayggtactatatggtgagtgctgagggaaacctaggaagaatgattccacatttaggttgttggcatgagttgctatctatgtaaacacgtctttagagtctctcagaaatgaatggaattgcttttgttcagctaacagaaaataactagtgggcaatgtcatagaagagggagaaatatcacttaagtttggggaccacttaatataagcatctaactgtgtgtgtgtgcatagatgcttgtgcatgcgtgcgtgtgtgtgtgtacatatgagtaagaaagtgaaggagaagccctgcgcggtggctcatgcctgtaatcccaacactttgggaggccgagatgggc

SEQ ID NO: 6797 - DNA, 779 bp, Homo sapiens
gtaaacaaattaggattttgtagtgcctaatatagtgtgctcatacagtttctttgaataaatgtggttggttgccttaaaagttaatcaatccccacttctaaaatagttttacaactgatatggttgagcacaaagaaataattttttattctaaaacagctctgcaaagttggatagggttgactttaaaagttgctcatgtgaacgattcagtcgtttaggctcctttcacagacattaccctattgtatcctcctaacccaggaagtagataggagaggtttaaaaggttctgaaaggttaaatgagttcctgaaggtcacaatgctaattaacagttgagcaatttctagaacccagatctctgtgcaccttgtttatgacaacacattttctctgaacaggttattttttggttagatcattgatggtactatatggtgagtgctgagggaaacctagsaagaatgattccacatttaggttgttggcatgagttgctatctatgtaaacacgtctttagagtctctcagaaatgaatggaattgcttttgttcagctaacagaaaataactagtgggcaatgtcatagaagagggagaaatatcacttaagtttggggaccacttaatataagcatctaactgtgtgtgtgtgcatagatgcttgtgcatgcgtgcgtgtgtgtgtgtacatatgagtaagaaagtgaaggagaagccctgcgcggtggctcatgcctgtaatcccaacactttgggaggccgagatgggc

SEQ ID NO: 6798 - DNA, 779 bp, Homo sapiens
gtaaacaaattaggattttgtagtgcctaatatagtgtgctcatacagtttctttgaataaatgtggttggttgccttaaaagttaatcaatccccacttctaaaatagttttacaactgatatggttgagcacaaagaaataattttttattctaaaacagctctgcaaagttggatagggttgactttaaaagttgctcatgtgaacgattcagtcgtttaggctcctttcacagacattaccctattgtatcctcctaacccaggaagtagataggagaggtttaaaaggttctgaaaggttaaatgagttcctgaaggtcacaatgctaattaacagttgagcaatttctagaacccagatctctgtgcaccttgtttatgacaacacattttctctgaacaggttattttttggttagatcattgatggtactatatggtgagtgctgagggaaacctaggaagaatgattccacatttaggttgttgrcatgagttgctatctatgtaaacacgtctttagagtctctcagaaatgaatggaattgcttttgttcagctaacagaaaataactagtgggcaatgtcatagaagagggagaaatatcacttaagtttggggaccacttaatataagcatctaactgtgtgtgtgtgcatagatgcttgtgcatgcgtgcgtgtgtgtgtgtacatatgagtaagaaagtgaaggagaagccctgcgcggtggctcatgcctgtaatcccaacactttgggaggccgagatgggc

SEQ ID NO: 6799 - DNA, 771 bp, Homo sapiens
  misc_feature (1)...(771): n = A,T,C or G
tttgactccccagtgcactctccgcactgcagccacagtgagcttttctaaatgggaaatctaatataatttactttctaaaatccttttcccctttgcataaaatctaagtttatatcatgccaaatcattcgtgatctcaagaaacataattttacgtaacctcccaacctcaaaactcaccattcctctctttgaagactattctagccacctaaatctacttgcattctagatcacatctcctttcctcaacccacgcacttggccctgcaccctttcacatamcccttaaggttcaggcacctcctggaagaagccttcctgaggctgggttaggtacctctcccacatgctcccataacaggctgttctatgtggcacttccgatattcatagtcctgggcactctcaatagataatacatttcttaaagacagagatatacctgacttgttatgttatcccttgaacacagaatggtcaatagtacatactgagtgtttaatatctatccgtttggatgaataaatttaaaaatctgttagaaacatatatcttttaagcaattttgtgaatgncttaaaaaatataagtttcttctttgactacctttgaagacaattttcagatgtgtgatcttgggcaggttaaacctcttgttatgattatttgtctgtaaaatggagataacaattatacctacctcataaagttattgtgaagattaaaagagttaacacatgaacatcgcttagaactggccttgaa

SEQ ID NO: 6800 - DNA, 718 bp, Homo sapiens
tcactcttacaaggcatgcatgagagcaactttgtcaagaggcwtaagcaacctgcttaatgctaagcattctagatttggatgccaactgtctacaggagttgtctgaagctaaggacctggggccaatggaaaatagtaaccctgtggacaggaggcagaagccacaagtcttacaagaagctgggttttggtcaagtacctacctcttagagaagagcaagcttccagtttcatctggctccttgtccaggaaagccagagtgagtttatgagatcatttttggacaaggttgcttgatgcagcagtttttaaatcaacaccttcttcagagaggacttcaaatgccatcatgcttatactttgaatctatttttaataggttgagacactaagttttccaagaatctgctcctctatcaagacaaatccaaaaatttcttctaatagcatttgtttaggtcaataatatttattaatgtgtcaggcaatgtactaaacgataagcatagaaaatttagaagtataattcctgctttcaggtatgtacagccttagaggaaaggcagatgaaaaaatacagtacaatgttatggatgcaatcatacatacatgcacaagactcagaggcattaagaaatgactctgttcagtttgagagtatattgtgcaaactatgaaataaataatttttatttacccagaatattaaactta

SEQ ID NO: 6801 - DNA, 718 bp, Homo sapiens
tcactcttacaaggcatgcatgagagcaactttgtcaagaggcataagcaacctgcttaatgctaagcattctagatttggatgccaactgtctacaggagttgtctgaagctaaggacctggggccaatggaaaatagtaaccctgtggacaggaggcagaagccacaagtcttacaagaagctgggttttggtcaagtacctacctcttagagaagagcaagcttccagtttcatctggctccttgtccaggaaagccagagtgagtttatgagatcatttttggacaaggttgcttgatgcagcagtttttaaatcaacaccttcttcagagaggacttcaaatgccatcatgcttatactttgaatctatttttaataggttgagacactaagttttccaagaatctgctcctctatcaagacaaatccaaaaatttcttctaatagcatttgtttaggtcaataatatttattaatgtgtcaggcaatgtactaaacgataagcatagaaaatttagaagtataattcctgctttcaggtatgtacagmcttagaggaaaggcagatgaaaaaatacagtacaatgttatggatgcaatcatacatacatgcacaagactcagaggcattaagaaatgactctgttcagtttgagagtatattgtgcaaactatgaaataaataatttttatttacccagaatattaaactta

SEQ ID NO: 6802 - DNA, 718 bp, Homo sapiens
tcactcttacaaggcatgcatgagagcaactttgtcaagaggcataagcaacctgcttaatgctaagcattctagatttggatgccaactgtctacaggagttgtctgaagctaaggacctggggccaatggaaaatagtaaccctgtggacaggaggcagaagccacaagtcttacaagaagctgggttttggtcaagtacctacctcttagagaagagcaagcttccagtttcatctggctccttgtccaggaaagccagagtgagtttatgagatcatttttggacaaggttgcttgatgcagcagtttttaaatcaacaccttcttcagagaggacttcaaatgccatcatgcttatactttgaatctatttttaataggttgagacactaagttttccaagaatctgctcctctatcaagacaaatccaaaaatttcttctaatagcatttgtttaggtcaataatatttattaatgtgtcaggcaatgtactaaacgataagcatagaaaatttagaagtataattcctgctttcaggtatgtacagccttagaggaaaggcagatgaaaaaatacagtacaatgttatggatgcaatcatacatacatgcacaagactcagaggcattaagaaatgactctgttcagtttgagaktatattgtgcaaactatgaaataaataatttttatttacccagaatattaaactta

SEQ ID NO: 6803 - DNA, 769 bp, Homo sapiens
cacaccagggattcaacatgggtactctggggagaagtcaggaggaaggagaacacagtgggggttttaaaaggaaaaggtatcttcttgtgaagctgtattgtcaagctgctggagagaagcaaaaaaraaaaaaaaaaaaaaaaaaaaaaaaaaaaaaaattcctcccaatctcactgcccagagagaaccatttatatcttagtaatgcaagtattttcaagatgatttcattacacaattttttgcaataaacaattttaaacaccaatttttattgtgaacatttttccatgccagtaaatattctgtggataataactttatgatcactgaattgttttatagtgttctggtaaatgttgaggctattatttatcaaccagcattctagaatagaaaagccttgatttgcagcacttgtggattttgtgatataaatactcctaaactggccaccaacatgataccactgagcccaaagttgggaggaaactacaagagcctgtgctggtgctggcacatcacagagtttattttcactcctataagtagcccaaacttcatttccctttttctgttcttggatacttaatttatatacattttcctttataaaccttttctgtcaccctagcatctagctttgaaaggaaggtactggatacaagtttataagtggtagtgacaattatcaactgtctggagaaaacagataaattgtaaatcataaataagatatgattttttgcttgttttcaattttgt

SEQ ID NO: 6804 - DNA, 769 bp, Homo sapiens
cacaccagggattcaacatgggtactctggggagaagtcaggaggaaggagaacacagtgggggttttaaaaggaaaaggtatcttcttgtgaagctgtattgtcaagctgctggagagaagcaaaaaaamaaaaaaaaaaaaaaaaaaaaaaaaaaaaaaattcctcccaatctcactgcccagagagaaccatttatatcttagtaatgcaagtattttcaagatgatttcattacacaattttttgcaataaacaattttaaacaccaatttttattgtgaacatttttccatgccagtaaatattctgtggataataactttatgatcactgaattgttttatagtgttctggtaaatgttgaggctattatttatcaaccagcattctagaatagaaaagccttgatttgcagcacttgtggattttgtgatataaatactcctaaactggccaccaacatgataccactgagcccaaagttgggaggaaactacaagagcctgtgctggtgctggcacatcacagagtttattttcactcctataagtagcccaaacttcatttccctttttctgttcttggatacttaatttatatacattttcctttataaaccttttctgtcaccctagcatctagctttgaaaggaaggtactggatacaagtttataagtggtagtgacaattatcaactgtctggagaaaacagataaattgtaaatcataaataagatatgattttttgcttgttttcaattttgt

SEQ ID NO: 6805 - DNA, 1476 bp, Homo sapiens
ttaacaggttctccagagaagctgatgagcaggtgagacccaattattcagtgagccagtcctaattcgggttttgctaccattcatggggggcttattatctgccaagacatttctgtataaatctgcccaacaaacttacaaagtagacgttatttttcccacgttacagataaggaaattgaggcccaaagacaaaataacttgctgcagagctagcagggaaggggtcaggattccaagtgggtctggctgactcccaggcatgtgtgaatagccactgcacagaacggtggcctcctgactgccaggtctagcatctgtttgctgtttaaaaagtctataaatctgtctggctttgggatctcacttgaagatacctcctttcatcctccaagtcgagttaaatgtccacaatattcaagatggctcacatttcagtcccagcatgacgttgcaaccttatcttcctcaattcccactcacatgtcctttactgtcagtttcccagcatgccatttgtttatttatcaagaccatggctcagatcatttcttcctgtctctcccgaaatctggtacattttttcaaaacacaatttttttgtgtgtttttgttttcatgaagtcttttcggatcctccacctccattaaaaattatttcctatttccatcttcaaatctcatagcattttgcttgtgcctgcctctcttaaggtatttcatcatagtctgaatgtgatcatttcttgtgggcttatctaactacttcttgtgataactggaagcccttcgagggtagaaaccatgtcctagtcatcactgcatctccagggtttagcatcatatttagaatgagggatgctcaataaatgcttgtgagatgaataattagataaatgaataattgtgaagaaacagccgggcaaattagttgggtcatgattcagaggtactccaygcaatgtcttggtgaaaggactgctatgaaagaatagagaggccaggcacggtggctcaagcctgtaatctcagaactttgggaagccaaggcaggtggatcacctgaggtcaggagtttgagaccagccagatagggtgaaaccccatctctactaaaaatacaaaaacttagccaagtgtggtggtgggcacctgtaatcccagctgctcaggaggctgaggcaggagaattgcttgaatccaggaggcggaggttgcagtgagtcgagatggtgccattgcactccagcctgggcaacagggggagatgctgtctcaaaaaaaaaaaagaaagaaaaagaaagaaaagaaaaagaaagaaggaaagaaagaaagaaagaaagaaagaaagaaagaaagaaagaaagaaagaaagaaggaaggaaggaaggaaggaaggaaggaaggaaggaaggaaggaaggaaagaaggaaggaaggaaggaaagaaagaaagagaaaaaggaagaaagaa

SEQ ID NO: 6806 - DNA, 679 bp, Homo sapiens
ggagtcagtgtgacatagtggaaagaaaacagatgtttaagtcagaagttcctggaggcaacttctgaccctacccagtgtgaggtgagtcatttaacctctttgaacctcaaactcaaataatctcatccgtaaaatgatcaggggctccaactgaaaaaaagatgtaacagtaactatttgaatttccaccttaaaatattttaccagagtttcaaacatttaaacaaaagcatccaataaaataacatcaaagacttttcaaatattccaacaaatggctrttgctgatacattaaatgtgaataacttcacttcttttttatcatttaatttccaaatttaaaaaaataacaataagggtgacagtacttttagatcatgtcatatggagtcagaaaaaaagctgaaactgttctgtgattcataaaaggttcctaaaaccaccagacaaggcttcgaggaataggaaaagggagctggaagcccagggaggaggtgttcttatgtccctcagggtcccccaatcctcaagcctatggacacgaaactgtgggagagaggagagaaggaggcccaaggcctgtagagaatttgcactccttgactagggggaagccccagtacttcccttgcactggatttccccagccacctcactttcaagtcatagttgctg

SEQ ID NO: 6807 - DNA, 679 bp, Homo sapiens
ggagtcagtgtgacatagtggaaagaaaacagatgtttaagtcagaagttcctggaggcaacttctgaccctacccagtgtgaggtgagtcatttaacctctttgaacctcaaactcaaataatctcatccgtaaaatgatcaggggctccaactgaaaaaaagatgtaacagtaactatttgaatttccaccttaaaatattttaccagagtttcaaacatttaaacaaaagcatccaataaaataacatcaaagacttttcaaatattccaacaaatggctattgctgatacattaaatgtgaataacttcacttcttttttatcatttaatttccaaatttaaaaaaataacaataagggtgacagtacttttasatcatgtcatatggagtcagaaaaaaagctgaaactgttctgtgattcataaaaggttcctaaaaccaccagacaaggcttcgaggaataggaaaagggagctggaagcccagggaggaggtgttcttatgtccctcagggtcccccaatcctcaagcctatggacacgaaactgtgggagagaggagagaaggaggcccaaggcctgtagagaatttgcactccttgactagggggaagccccagtacttcccttgcactggatttccccagccacctcactttcaagtcatagttgctg

SEQ ID NO: 6808 - DNA, 679 bp, Homo sapiens
ggagtcagtgtgacatagtggaaagaaaacagatgtttaagtcagaagttcctggaggcaacttctgaccctacccagtgtgaggtgagtcatttaacctctttgaacctcaaactcaaataatctcatccgtaaaatgatcaggggctccaactgaaaaaaagatgtaacagtaactatttgaatttccaccttaaaatattttaccagagtttcaaacatttaaacaaaagcatccaataaaataacatcaaagacttttcaaatattccaacaaatggctattgctgatacattaaatgtgaataacttcacttcttttttatcatttaatttccaaatttaaaaaaataacaataagggtgacagtacttttagatcatgtcatatggagtcagaaraaaagctgaaactgttctgtgattcataaaaggttcctaaaaccaccagacaaggcttcgaggaataggaaaagggagctggaagcccagggaggaggtgttcttatgtccctcagggtcccccaatcctcaagcctatggacacgaaactgtgggagagaggagagaaggaggcccaaggcctgtagagaatttgcactccttgactagggggaagccccagtacttcccttgcactggatttccccagccacctcactttcaagtcatagttgctg

SEQ ID NO: 6809 - DNA, 679 bp, Homo sapiens
ggagtcagtgtgacatagtggaaagaaaacagatgtttaagtcagaagttcctggaggcaacttctgaccctacccagtgtgaggtgagtcatttaacctctttgaacctcaaactcaaataatctcatccgtaaaatgatcaggggctccaactgaaaaaaagatgtaacagtaactatttgaatttccaccttaaaatattttaccagagtttcaaacatttaaacaaaagcatccaataaaataacatcaaagacttttcaaatattccaacaaatggctattgctgatacattaaatgtgaataacttcacttcttttttatcatttaatttccaaatttaaaaaaataacaataagggtgacagtacttttagatcatgtcatatggagtcagaaaaaaagctgaaactgttctgtgattcataaaagrttcctaaaaccaccagacaaggcttcgaggaataggaaaagggagctggaagcccagggaggaggtgttcttatgtccctcagggtcccccaatcctcaagcctatggacacgaaactgtgggagagaggagagaaggaggcccaaggcctgtagagaatttgcactccttgactagggggaagccccagtacttcccttgcactggatttccccagccacctcactttcaagtcatagttgctg

SEQ ID NO: 6810 - DNA, 679 bp, Homo sapiens
ggagtcagtgtgacatagtggaaagaaaacagatgtttaagtcagaagttcctggaggcaacttctgaccctacccagtgtgaggtgagtcatttaacctctttgaacctcaaactcaaataatctcatccgtaaaatgatcaggggctccaactgaaaaaaagatgtaacagtaactatttgaatttccaccttaaaatattttaccagagtttcaaacatttaaacaaaagcatccaataaaataacatcaaagacttttcaaatattccaacaaatggctattgctgatacattaaatgtgaataacttcacttcttttttatcatttaatttccaaatttaaaaaaataacaataagggtgacagtacttttagatcatgtcatatggagtcagaaaaaaagctgaaactgttctgtgattcataaaaggttcctaaaaccaccagacaaggcttcgaggaataggaaaakggagctggaagcccagggaggaggtgttcttatgtccctcagggtcccccaatcctcaagcctatggacacgaaactgtgggagagaggagagaaggaggcccaaggcctgtagagaatttgcactccttgactagggggaagccccagtacttcccttgcactggatttccccagccacctcactttcaagtcatagttgctg

SEQ ID NO: 6811 - DNA, 613 bp, Homo sapiens
ctctgggaaaagaagttctagagatgccgtattagtcacgattctctagagggacagaactaaaagaatatacatatatattctttatatatattctacatatatatagaatgtattctatatatattctttatatatattctacatatatatagaatrtattctatatatattctttatatatattctacatatatatagaatatattctatatatattctttatatatattctacatatatatagaatatattctatatatattactttatatatattctacatatatatagaatatattctatatatattctttatatatattctacatatatatagaatatattctatatatattctttatatatattctacatatatatagaatatattctatatatattctttatatatattctacatatatatagaatatattctatatatattctttatatatatattctctctacagatatataaagaatatattctttatatatatattctccctacagatatataaagaatatattctttataaatatgtgtgtgtgtgatgtatatatatatatatatatagagagagagagagagagagagagagagaga

SEQ ID NO: 6812 - DNA, 613 bp, Homo sapiens
ctctgggaaaagaagttctagagatgccgtattagtcacgattctctagagggacagaactaaaagaatatacatatatattctttatatatattctacatatatatagaatgtattctatatatattctttatatatattctacatatatatagaatatattctatatatattctttatatatattctacatatatatagaatatattctatatatattctttatatatattctacatatatatagaatatattctatatatattactttatatatattctacatatatatagaatatattctatatatattctttatatatattctacatatatatagaatatattctatatatattctttatatatattctacatatatatagaatatattctatatatattctttatatatattctacatatatatagaatatattctatatatattctttatatatatattctctctacagatatataaagaatatattctttatatatatattctccctacagatatataaagaatatattctttatawatatgtgtgtgtgtgatgtatatatatatatatatatagagagagagagagagagagagagagagaga

SEQ ID NO: 6813 - DNA, 613 bp, Homo sapiens
ctctgggaaaagaagttctagagatgccgtattagtcacgattctctagagggacagaactaaaagaatatacatatatattctttatatatattctacatatatatagaatgtattctatatatattctttatatatattctacatatatatagaatatattctatatatattctttatatatattctacatatatatagaatatattctatatatattctttatatatattctacatatatatagaatatattctatatatattactttatatatattctacatatatatagaatatattctatatatattctttatatatattctacatatatatagaatatattctatatatattctttatatatattctacatatatatagaatatattctatatatattctttatatatattctacatatatatagaatatattctatatatattctttatatatatattctctctacagatatataaagaatatattctttatatatatattctccctacagatatataaagaatatattctttataaatatgtgtgtgtgtgatgtatatatatatatatatatakagagagagagagagagagagagagagaga

SEQ ID NO: 6814 - DNA, 825 bp, Homo sapiens
agtttcagctttctacatmtggctagccagttttcccagcaccatttattaaatagggaatcctttccccattgcttgtttttctcaggtttgtcaaagatgagatagttgtagatatgcggcgttatttctgagggctctgctctgttccattgatctatatctctattttggtaccagtaccatgctgttttggttactgtagccttgtagtatagtttgaagtcaggtagtgtgatgcctccagctttgttcttttggcttaggattgacttggcgatgcgggctcttttttggttccatatgaactttaaagtagttttttccaattctgtgaagaaagtcattggtagcttgatggggatggcattgagtctataaattaccttgggcagtatggccattttcatgatattgattcttcctacccatgagcctggaatgttcttccatttgtttgtatcctcttttatttcattgagaagtggtttgtagttctccttgaagtacactcctctttttcttttatgcttccctgatggtagaacacagacatagagatgagggtatcatggaccaaacaggaacggacaacattatagaggtagcaacgcatcaaatgagaaggggtctggttcttaacaccttcaagtaacagagtcacaacacctgactttatgtcagaaattcagaaaaagaaagaaattcctttttagtgtaacactctgctatttggggtttctatctcacatagctaaatccaatttattctaactaataaaagcatcaaataaatatccaggattagaaatatgtaatactata

SEQ ID NO: 6815 - DNA, 825 bp, Homo sapiens
agtttcagctttctacatatggctagccagttttcccagcaccatttattaaatagggaatcctttccccattgcttgtttttctcaggtttgtcaaagatgagatagttgtagatatgcggcgttatttctgaggrctctgctctgttccattgatctatatctctattttggtaccagtaccatgctgttttggttactgtagccttgtagtatagtttgaagtcaggtagtgtgatgcctccagctttgttcttttggcttaggattgacttggcgatgcgggctcttttttggttccatatgaactttaaagtagttttttccaattctgtgaagaaagtcattggtagcttgatggggatggcattgagtctataaattaccttgggcagtatggccattttcatgatattgattcttcctacccatgagcctggaatgttcttccatttgtttgtatcctcttttatttcattgagaagtggtttgtagttctccttgaagtacactcctctttttcttttatgcttccctgatggtagaacacagacatagagatgagggtatcatggaccaaacaggaacggacaacattatagaggtagcaacgcatcaaatgagaaggggtctggttcttaacaccttcaagtaacagagtcacaacacctgactttatgtcagaaattcagaaaaagaaagaaattcctttttagtgtaacactctgctatttggggtttctatctcacatagctaaatccaatttattctaactaataaaagcatcaaataaatatccaggattagaaatatgtaatactata

SEQ ID NO: 6816 - DNA, 825 bp, Homo sapiens
agtttcagctttctacatatggctagccagttttcccagcaccatttattaaatagggaatcctttccccattgcttgtttttctcaggtttgtcaaagatgagatagttgtagatatgcggcgttatttctgagggctctgytctgttccattgatctatatctctattttggtaccagtaccatgctgttttggttactgtagccttgtagtatagtttgaagtcaggtagtgtgatgcctccagctttgttcttttggcttaggattgacttggcgatgcgggctcttttttggttccatatgaactttaaagtagttttttccaattctgtgaagaaagtcattggtagcttgatggggatggcattgagtctataaattaccttgggcagtatggccattttcatgatattgattcttcctacccatgagcctggaatgttcttccatttgtttgtatcctcttttatttcattgagaagtggtttgtagttctccttgaagtacactcctctttttcttttatgcttccctgatggtagaacacagacatagagatgagggtatcatggaccaaacaggaacggacaacattatagaggtagcaacgcatcaaatgagaaggggtctggttcttaacaccttcaagtaacagagtcacaacacctgactttatgtcagaaattcagaaaaagaaagaaattcctttttagtgtaacactctgctatttggggtttctatctcacatagctaaatccaatttattctaactaataaaagcatcaaataaatatccaggattagaaatatgtaatactata

SEQ ID NO: 6817 - DNA, 825 bp, Homo sapiens
agtttcagctttctacatatggctagccagttttcccagcaccatttattaaatagggaatcctttccccattgcttgtttttctcaggtttgtcaaagatgagatagttgtagatatgcggcgttatttctgagggctctgctctgttccattgatctatatctctattttggtaccagtaccatgctgttttggttactgtagccttgtagtatagtttgaagtcaggtagtgtgatgcctccagctttgttcttttggcttaggattgacttggygatgcgggctcttttttggttccatatgaactttaaagtagttttttccaattctgtgaagaaagtcattggtagcttgatggggatggcattgagtctataaattaccttgggcagtatggccattttcatgatattgattcttcctacccatgagcctggaatgttcttccatttgtttgtatcctcttttatttcattgagaagtggtttgtagttctccttgaagtacactcctctttttcttttatgcttccctgatggtagaacacagacatagagatgagggtatcatggaccaaacaggaacggacaacattatagaggtagcaacgcatcaaatgagaaggggtctggttcttaacaccttcaagtaacagagtcacaacacctgactttatgtcagaaattcagaaaaagaaagaaattcctttttagtgtaacactctgctatttggggtttctatctcacatagctaaatccaatttattctaactaataaaagcatcaaataaatatccaggattagaaatatgtaatactata

SEQ ID NO: 6818 - DNA, 825 bp, Homo sapiens
agtttcagctttctacatatggctagccagttttcccagcaccatttattaaatagggaatcctttccccattgcttgtttttctcaggtttgtcaaagatgagatagttgtagatatgcggcgttatttctgagggctctgctctgttccattgatctatatctctattttggtaccagtaccatgctgttttggttactgtagccttgtagtatagtttgaagtcaggtagtgtgatgcctccagctttgttcttttggcttaggattgacttggcgatgcgggctcttttttggttccatatgaacttkaaagtagttttttccaattctgtgaagaaagtcattggtagcttgatggggatggcattgagtctataaattaccttgggcagtatggccattttcatgatattgattcttcctacccatgagcctggaatgttcttccatttgtttgtatcctcttttatttcattgagaagtggtttgtagttctccttgaagtacactcctctttttcttttatgcttccctgatggtagaacacagacatagagatgagggtatcatggaccaaacaggaacggacaacattatagaggtagcaacgcatcaaatgagaaggggtctggttcttaacaccttcaagtaacagagtcacaacacctgactttatgtcagaaattcagaaaaagaaagaaattcctttttagtgtaacactctgctatttggggtttctatctcacatagctaaatccaatttattctaactaataaaagcatcaaataaatatccaggattagaaatatgtaatactata

SEQ ID NO: 6819 - DNA, 766 bp, Homo sapiens
cagatcgcttgagctcaggagttcaagatcagcatgggcaacatggtgaaaccctgtctctacaaaaaagtactaaaatgagccaggtgtggtggtgtgcacctgtagtcccagctacttgggaggctgaggtgagaggatcacttaagcccaggaggttgaggctgcagtgagctgtcattgtgctattgcactccagcttgggtgacagagtaagaccctgtctgaaaaaaaagtaygaattacaatttataaggttgcctattaaacagcctcatctatttttttatgttgaacttctcccacagattatttttcaattaaaaaataagattttattgtttaccaagttgaggtttctaggcaattatgtttcctggggttctcaccattcccagccttgactctagcatgctgagattggtgtacttggtacagtaccagaccctgggaaccagagagccagttttgttctttcatagcaacccttgtcatctgcagaggcattgttaattttcccaaagtccccacatctatagttgcatctcagcttcatgatagcgtcagaagtctaggcgggcagatggtatgtccttttgacagataaggagattgaggacaatggtgagaattaacttccctaagaaggctgaaacccgggactcccagcttcagcctattgtctttctcccagacctcactgggcagaatgacagagaggtttgggttatctcccattcatgatgagatgccaggggcaatgcct

SEQ ID NO: 6820 - DNA, 766 bp, Homo sapiens
cagatcgcttgagctcaggagttcaagatcagcatgggcaacatggtgaaaccctgtctctacaaaaaagtactaaaatgagccaggtgtggtggtgtgcacctgtagtcccagctacttgggaggctgaggtgagaggatcacttaagcccaggaggttgaggctgcagtgagctgtcattgtgctattgcactccagcttgggtgacagagtaagaccctgtctgaaaaaaaagtacgaattacaatttataaggttgcctattaaacagcctcatctatttttttatgttgaacttctcccacagattatttttcaattaaaaaataagattttattgtttaccaagttgaggtttctaggcaattatgtttcctggggttctcaccattcccagccttgactctagcatgctgagattggtgtacttggtacagtaccagaccctgggaaccagagagccagttttgttctttcatagcaacccttgtcatctgcagaggcattgttaattttcccaaagtccccacatctatagttgcatctcagcttcatgatagcgtcagaagtctaggcgggcagatggtrtgtccttttgacagataaggagattgaggacaatggtgagaattaacttccctaagaaggctgaaacccgggactcccagcttcagcctattgtctttctcccagacctcactgggcagaatgacagagaggtttgggttatctcccattcatgatgagatgccaggggcaatgcct

SEQ ID NO: 6821 - DNA, 1365 bp, Homo sapiens
  misc_feature (1)...(1365): n = A,T,C or G
agtttccgttgaactggaacagagcccacctatgggtgcttgcttagaagttccccaaatgattctaatgtgatatgcagctaagagcaagcaccactgcaccattttagccaggatgactttgtcctcggcggtacttaattcccatgccacgtcaatttgtcttctggctgcactttctccatttaaaaatctcaaattatatcttacaagttaagttacaatccttagctgctttctgatataatatacaaggartcatcgttaggcaagtgaatactttctgccattactcattgggcagagaatcaagctgtaaaaaacccagccaagtaatccccttcaatatgagactctcattaatcagtgatcccttctgcaagcacctgtgtgaagccagcagtcactatttgtgacttccttcccccaaatatatcagacagaagagccagcaaacaatgaccaaagctgtgcttatgtattggggtgacctgtaagttatattaagagaaaaggagaaggggcgcaaaacaaagatgatgaattaatgaggtggctctgacacaatgagttaatggcaaatatgtaaaaggaattcatgaggctctgatggtgtgtgcaagtttcatttctcttgaatgtgtgaatgaattcaatatcttctgaaaaactcttaaaaacgctatactctgacgactctctgctaacgacaggaaaagcaaccccgaggaaaattatacttatttgcctctctttggggttctacacngttattactacgtgaagagaaaccatgaggtgagaggaagaatatcctaccacccacagaactcttctgcagccaacgagctgcttatgagcacatntttattatnnnnnnnnnnnnnnnnnnnnnnnnnnnnnnnnnnnnnnnnnnnnnnnnnnnnnnnnnnnnnnnnnnnnnnnnnnnnnnnnnnnnnnnnnnnnnnnnnnnntttgcaaatcagaaaactgaggatcagtgaggttaagacctgtatttataagactcaaagtcaatatttagatatgtccttgtctttcatctttccacctggaatatgtctgtgctgaaacttatattctcaacccaaagttatagagatgtattaaatggtgcctggtatccttagagtactcattcttattgggaggctattttgcccctcaggggacattttgcaatgtctgaagacaactggagtgaggaagttactattagcatctactggatagaggtcaggaatgatgtcaaataccttccaacacactggcagcccgatacagcaaacagcaaagcttgagaaacctgccttgcagagtagttgcccatcataatagtgttta

SEQ ID NO: 6822 - DNA, 724 bp, Homo sapiens
ttcctgaccttgaacatcagactccatgmtcttcagatttggattcttggacttacaccagtggtttaccaggggatctcagtcctttggccacaggctgaaagctgcactgttggcttccctaatattgaggtttagggactcagactggcttccttgctcctcagcttgcacagggcctactgtgggacttcaccttgtgatggtgtgtgagtcaatactccttaataaactccctttcatatatacttctatcctattagttctgtctctctagagaactctgactaatacattatgccaactaaaagaaacctaatttaggaatataattttagtaacaaatagctgggtttcaggcaattacaagacagccaactggtcactaatgcccaaataaagcaaacgcctagctgtacccggtcaggtaatttctctacttggcttctgtgttcagcctttgaaagcctgttgctcacactgctggatggagctctttaaacttcttctgattgtgagtgtagcccaatttgttactcattttttgcttaaataagcccttttaaatgtattatgtctagagttttttattttaacaacagtgaacatgaaaaaagctttatgttacaaagccagacattgagatagacatatatttttccctgacgggactaaaaacaaataggtaatgattactttagcaagcctcacaattgtccctcat

SEQ ID NO: 6823 - DNA, 724 bp, Homo sapiens
ttcctgaccttgaacatcagactccatgctcttcagatytggattcttggacttacaccagtggtttaccaggggatctcagtcctttggccacaggctgaaagctgcactgttggcttccctaatattgaggtttagggactcagactggcttccttgctcctcagcttgcacagggcctactgtgggacttcaccttgtgatggtgtgtgagtcaatactccttaataaactccctttcatatatacttctatcctattagttctgtctctctagagaactctgactaatacattatgccaactaaaagaaacctaatttaggaatataattttagtaacaaatagctgggtttcaggcaattacaagacagccaactggtcactaatgcccaaataaagcaaacgcctagctgtacccggtcaggtaatttctctacttggcttctgtgttcagcctttgaaagcctgttgctcacactgctggatggagctctttaaacttcttctgattgtgagtgtagcccaatttgttactcattttttgcttaaataagcccttttaaatgtattatgtctagagttttttattttaacaacagtgaacatgaaaaaagctttatgttacaaagccagacattgagatagacatatatttttccctgacgggactaaaaacaaataggtaatgattactttagcaagcctcacaattgtccctcat

SEQ ID NO: 6824 - DNA, 724 bp, Homo sapiens
ttcctgaccttgaacatcagactccatgctcttcagatttggattcttggacttacaccagtggtttaccaggggatctcagtcctttggccayaggctgaaagctgcactgttggcttccctaatattgaggtttagggactcagactggcttccttgctcctcagcttgcacagggcctactgtgggacttcaccttgtgatggtgtgtgagtcaatactccttaataaactccctttcatatatacttctatcctattagttctgtctctctagagaactctgactaatacattatgccaactaaaagaaacctaatttaggaatataattttagtaacaaatagctgggtttcaggcaattacaagacagccaactggtcactaatgcccaaataaagcaaacgcctagctgtacccggtcaggtaatttctctacttggcttctgtgttcagcctttgaaagcctgttgctcacactgctggatggagctctttaaacttcttctgattgtgagtgtagcccaatttgttactcattttttgcttaaataagcccttttaaatgtattatgtctagagttttttattttaacaacagtgaacatgaaaaaagctttatgttacaaagccagacattgagatagacatatatttttccctgacgggactaaaaacaaataggtaatgattactttagcaagcctcacaattgtccctcat

SEQ ID NO: 6825 - DNA, 737 bp, Homo sapiens
acaggtctgcaatttctgggaaccagtgcaacaggctgagtcagccgtgcgggattcacagccctgcaggttctccaggtggaggtgacatacgtggggagaggcaggtgggcacaatctgagaagctgagaccctgaattccccagtcactcagggcaccrcttcctgctcttgccccgaccaccctctcctggcctgaaagactcgagtccactgtcacctcctatcacctagcaccagccttaagtcccacggtcagagccaggaggagggaccatgcacacaaaaagaactgcaagatcttgcctgtttttgtcgacagaaacacagggaatatacgtggcactggctcctaagggtgatggacccagggtggaagacgtggaaggttcggccaccggtgccctgactgcgtccgctggcttgtgttggtctgagtgaccatcagtggctctaacagttctgaaacacagacttgatggttgccatcgtaagatgaagccaaatgctaccaggaaagacaaacagctcaggagagggagctgtcgccgtggctgggtttcttacgcatgaccttctcacccaccgcgtcacttctcctccagagtccagaggaccccctccccacagcatggatgagaagagagcccccactgttagactccaccacagccgtgatctgaggccgccgtcaccgtgagagatgctgccattatctcagagccccccaaattcg

SEQ ID NO: 6826 - DNA, 737 bp, Homo sapiens
acaggtctgcaatttctgggaaccagtgcaacaggctgagtcagccgtgcgggattcacagccctgcaggttctccaggtggaggtgacatacgtggggagaggcaggtgggcacaatctgagaagctgagaccctgaattccccagtcactcagggcaccgcttcctgctcttgccccgaccaccctctcctggcctgaaagactcgagtccactgtcacctcctatcacctagcaccagccttaagtcccacggtcagagccaggaggagggaccatgcacacaaaaagaactgcaagatcttgcctgtttttgtcgacagaaacacagggaatatacgtggcactggctcctaagggygatggacccagggtggaagacgtggaaggttcggccaccggtgccctgactgcgtccgctggcttgtgttggtctgagtgaccatcagtggctctaacagttctgaaacacagacttgatggttgccatcgtaagatgaagccaaatgctaccaggaaagacaaacagctcaggagagggagctgtcgccgtggctgggtttcttacgcatgaccttctcacccaccgcgtcacttctcctccagagtccagaggaccccctccccacagcatggatgagaagagagcccccactgttagactccaccacagccgtgatctgaggccgccgtcaccgtgagagatgctgccattatctcagagccccccaaattcg

SEQ ID NO: 6827 - DNA, 804 bp, Homo sapiens
taatccagtatgactggtattcttaaaaaaagagtagatctggatgcagactgaggkaggaagtcatgtgaagaggaaggcagagactggagtgatgtatctctaagccaaggcctgtcaaagatggccagcaaagcaccagaagctaggagaggggcatgcaacagattccccctcatagtcctgctggcaccttgatttcagacttctagcctccggaagtatgaaacaatgtctgttggttaagccacccagatggtggcactttcattacaacagacataggaaatgagtataacccagcttcctcacttatcaggtgggatgacattgcagagtctccaagtctcctggtggttcccaggatgatagagtccaggtccccacagcagtaccatgttcattgatgcccatggtattagctttcttctcttctgtctcccatccccactccctcatcagttttctaggatcatctaccagttaaattacttggccccaaatcttgtctcaggatctccctggcttctgggaaagctaaactaagacagttgtacattccaagtcaccaagggccccaccaattgcttcacacttgcctggttcttgaaagcatttaaattttcaactcttgacctatacgcataatgtgtatggatgtgtgtttgatggcttaaattcaaaatattgaccctatttctctcttctctcaatctctgcattaattggataaaagaaaaaatggtaaatatagtatactatccgttattctaagtatttggtatatgttatctcatttaatca

SEQ ID NO: 6828 - DNA, 804 bp, Homo sapiens
taatccagtatgactggtattcttaaaaaaagagtagatctggatgcagactgaggtaggaagtcatgtgaagaggaaggcagagactggagtgatgtatctctaagccaaggcctgtcaaagatggccagcaaagcaccagaagctaggagaggggcakgcaacagattccccctcatagtcctgctggcaccttgatttcagacttctagcctccggaagtatgaaacaatgtctgttggttaagccacccagatggtggcactttcattacaacagacataggaaatgagtataacccagcttcctcacttatcaggtgggatgacattgcagagtctccaagtctcctggtggttcccaggatgatagagtccaggtccccacagcagtaccatgttcattgatgcccatggtattagctttcttctcttctgtctcccatccccactccctcatcagttttctaggatcatctaccagttaaattacttggccccaaatcttgtctcaggatctccctggcttctgggaaagctaaactaagacagttgtacattccaagtcaccaagggccccaccaattgcttcacacttgcctggttcttgaaagcatttaaattttcaactcttgacctatacgcataatgtgtatggatgtgtgtttgatggcttaaattcaaaatattgaccctatttctctcttctctcaatctctgcattaattggataaaagaaaaaatggtaaatatagtatactatccgttattctaagtatttggtatatgttatctcatttaatca

SEQ ID NO: 6829 - DNA, 804 bp, Homo sapiens
taatccagtatgactggtattcttaaaaaaagagtagatctggatgcagactgaggtaggaagtcatgtgaagaggaaggcagagactggagtgatgtatctctaagccaaggcctgtcaaagatggccagcaaagcaccagaagctaggagaggggcatgcaacagattccccctcatagtcctgctggcaccttgatttcagacttctagcctccrgaagtatgaaacaatgtctgttggttaagccacccagatggtggcactttcattacaacagacataggaaatgagtataacccagcttcctcacttatcaggtgggatgacattgcagagtctccaagtctcctggtggttcccaggatgatagagtccaggtccccacagcagtaccatgttcattgatgcccatggtattagctttcttctcttctgtctcccatccccactccctcatcagttttctaggatcatctaccagttaaattacttggccccaaatcttgtctcaggatctccctggcttctgggaaagctaaactaagacagttgtacattccaagtcaccaagggccccaccaattgcttcacacttgcctggttcttgaaagcatttaaattttcaactcttgacctatacgcataatgtgtatggatgtgtgtttgatggcttaaattcaaaatattgaccctatttctctcttctctcaatctctgcattaattggataaaagaaaaaatggtaaatatagtatactatccgttattctaagtatttggtatatgttatctcatttaatca

SEQ ID NO: 6830 - DNA, 800 bp, Homo sapiens
tagatttgttttatctgagttccttcctcaggaagtgaccttcaggcctttcaaaaaaagtttcaaagaactgaaactcaccagatcaccacatccagacaatgagatgccagatccctcagtcatcatgattgcttccttgccccatcctagttcctgttttcttacacactattacatttcttccttgctatatagactcctagttttagtggttcggggggatggacttgagactgatctctcatctcctcagctgcagcacccaattaaagcgttcttccttggcaatacttatcatctcagtcattggctttctgtgcagagagcagcaggacctagactaaaccccagatgttttattaacacttttaaccgtttgcttgacttctgactaggaagattctagaaaaacatgctaatttctcaatgttccagtaacctcatgtgttaacttaggccaaacatgtcttccttccaagaaattgcaacaaatcacaaaaacaaggtgtattagtccattctcaaactgctaataaagacattcttgagactgggtaatttataaaggaaagaggtttaattgactcacagttccacagggctggggaggcctcaggaaacttacaatcatggcagaagaggaagcaaamaaatccttcttcacagggtggcagcaagaagtgccgggcaaaagggggaaaagccttttacaaaaccatcagatctcaggagaactcactcattatcacaagaacagcatgaggataattgccgccataaataaactacctcccact

SEQ ID NO: 6831 - DNA, 800 bp, Homo sapiens
tagatttgttttatctgagttccttcctcaggaagtgaccttcaggcctttcaaaaaaagtttcaaagaactgaaactcaccagatcaccacatccagacaatgagatgccagatccctcagtcatcatgattgcttccttgccccatcctagttcctgttttcttacacactattacatttcttccttgctatatagactcctagttttagtggttcggggggatggacttgagactgatctctcatctcctcagctgcagcacccaattaaagcgttcttccttggcaatacttatcatctcagtcattggctttctgtgcagagagcagcaggacctagactaaaccccagatgttttattaacacttttaaccgtttgcttgacttctgactaggaagattctagaaaaacatgctaatttctcaatgttccagtaacctcatgtgttaacttaggccaaacatgtcttccttccaagaaattgcaacaaatcacaaaaacaaggtgtattagtccattctcaaactgctaataaagacattcttgagactgggtaatttataaaggaaagaggtttaattgactcacagttccacagggctggggaggcctcaggaaacttacaatcatggcagaagaggaagcaaaaaaatccttcttcacagggtggcagcaagaagtgccgggcaaaagggggaaaagccttttacaaaaccatcagatctcakgagaactcactcattatcacaagaacagcatgaggataattgccgccataaataaactacctcccact

SEQ ID NO: 6832 - DNA, 448 bp, Homo sapiens
cctttagagttaagactaccctctacggtagttacctcatattctaatattcccaggaatagtttgaagtccttagtaaaagtcagacaccgctaagaaaacaaatgttgttccattgtgaagtggtagacagggagagtgttctcacccatgtctgaggttctgcatctgccatctgtgcccttcccttggtggttggagaagtgtatgatgggaaactcctggaatattagaataaaggagtctagcagcaaatggacagatcagtgcagtctttcacaccaggttacagaggacaagcttggcctattcagttctgaggtatcggggggcacagtttggagtctcaaagcattgaagacttccaaaccaagtwacacaggacaaactggccctactcagtcctgagggatctaaattatagtttggatagtcttccaatacaaga

SEQ ID NO: 6833 - DNA, 1101 bp, Homo sapiens
catggacacaggaaggggaacatctcacattggggactgttatggggtggggggaggggggagggatagcattaggagatatacctaatggtaaatgacgagttaacgggtgcagcacaccagcatggcacatgtatacatatgtaacaaacctgtatgttgtgcacatgtaccctagaacttaaagtataataataataaaaaaaagaaaagaatgtaatatcaaccttgccacttatgatgcaattcttttaaaacttctgctaagtattgggctgattcttccatagaagaggttaacaattcataaactgaagatttattaatttttccttttctaatcctctctacattaaatctttttcagtggctatttatttttttaaaagatcaatgcagatgcaaagtaaaattgtcatctacttgcattcatattatctggatacttataaatgcagaaaatatagctattgaatagcatttttcttgtgaatattatgactgtattcatttcacaggaaggaatttgtctagattaatgtgttgattcagcatccttgaattttgaacttggaaacttttgctccactgacttaaaacaggcaagaattttttgaagttgtttttatttcatgttgttctaagttcaataaaagctagaatgactgctgataggtgtgtaaattattttagagaaaaatttaggaataaagaatttccaatttaaaaaattaaaggtacttgattacatttattcattcagtaattcaytgggcatttattgtgtcattagacccttgtgccaggcacttgcctaggtcttaaggatccaggattttttaaaagactaattaaatataatttttaattaaagagatactgatatcaccaaaactttttatcttagtagtaaatcaaaatattagttgatgaaactcttctcaggttccaccatggacccagaacaaaaccatagggatcttcttttcagtctttaattaagatcatttaaaaaaatatcagtaatcaagtttgaaaattaaatgtgcctttatcttttcattcttacatatacttggtcattcagttagaatttatgca

SEQ ID NO: 6834 - DNA, 803 bp, Homo sapiens
tacactcattgccatcttgattttggtgggttttagctggcttctttatttactgcaacctgttttatcagcaaggtccttatgacctgtgtcttgtgctgacacctatcttatccattgacttagaatgtcttaactgcctgggaacacagcccagtaggtctcagcctcattttacccagcccctattcaagatggagttgctctggttcaaacgcttctgacacaatggcttccagttgtacatgcacaactgaaaactccaccatgaggatgatgataatggtgatttcaaagtgttttcacagttgagccagataacagcctatgagcacacagaacaggtgaattaagcttgtgtcacagatgaggaattgaggagcagaaaggtacagggttgagtccaaggccactcagctggttccctaggaagcccagactaagagatcaaggtcctgtgaatgacgctacatcattgaatgcccattatagcactatkaccagcaggttctacaggccctcgttcatgctaaacaaatagactatcaccattattaaaatagggtaatatggcatttaaagcaagctacctttggacacattgcctaggatgtgtttccaatgcaaaaatgggactctgggcccttttcatgaatagtacactttttaagttaaaattttatttgagtgggtcattcacttacatgactcaaaagtcaaaattctaaaatatagtatacctgagaagtatactagctgccacttctttccgttaatccaatctttcctcttccttttctccc

SEQ ID NO: 6835 - DNA, 849 bp, Homo sapiens
ggagaaatgaaagcatgtgttcatataaagactggtacagatattcatataagctttatgtataatagccaaatattgaaaacaactcaaatgtccatcaaggcaaatagataaacaaattgtgatacactcatacaatggcaaacttctcagtcacaaaaggaaatacgttactgatacacacaacaacatggatggatttcaaaataatcatactgagtgaatgaaaccagaagaataaaaaaagatgaaaatggagtgtatattgaatgtgtccattaatataaacacctggaaaatgcaaactaatctgtaatgatagaaagaagatccgttattgcctgtagatgaaagtcagagagaagtgtgtgggagagactacagagtggtacaaagaaattttttggattggttaatatgttcagcattttgattgtggtaatgagtgtatatgcatgtcaaaactcatcaacctgtatactttaaacatgttcagcttactgaatatcaattatacctcaatgaagctgttaagaaaatatgaatatagcttaatatggcaaaaattatgagggtggaatgactgaattttgcaaacacatcatgaaattgttctatttcttataattttcctatccttctttcttattctytttttcttgcacctccttcttttttatcctcctctattttctctaagaataggtgataatagtttggtactaccaggtatgagagtgtataagatgcccctggcctcaatagaagaaagggctttctgacagtttctgttctctaaagattcaatagaataatctgtttcataagatagggaggtctccttcccag

SEQ ID NO: 6836 - DNA, 802 bp, Homo sapiens
aggatgaacatgttatctgttgcaggcaaagggaagaggtctgagagaggatctcttgggaatcccaggaggcagggacaccttttttttttttttaagaattttttttttcagagatgaggtcttggtattttgtccaggctggtctcaaactcctggactcaagcactcctccagtctcagcctctccagtagctaggactataggctcacaccaccatgcctgactaattttacttaatgttattttattttttgtagagatgggggtctcactatgttgcccaggctggtctcaaactcctgggctcaagcaatcctcctgcctcagcctcccagaacgctaggattacaggcatgagccactgcacttggccttcagctcggttttttaaaggtccttgcaattcttaacatgggacaacatgccaaaaatagttacaatgctgcatatatttaaagtattttcctgaaataatytactcttttaacacacaatgcaatataattgtgcttttcacaagttgattagaggatatattttttaaatcctttgattcattttgcaggatgggtggcatgggccgatatggaggcatcacctatagttgcatgaagaaagttgtctccttttaaaattgtcagagtagctctgtgaccatgtgtatgacctcatttggagataatgtcataaagccatgcgggaaaccctttgggaatgtagggtctgggtcaaatggccttgcattgagaaaccaggaaattcacttttcagctcttttccatatctgtaaagtgggaa

SEQ ID NO: 6837 - DNA, 628 bp, Homo sapiens
ttaccatagtaatggttgccactggggaggaaaaaggaatagttaattttgtaataatgtttaaaaggttttaaattgtttttgtaaaaatacaagaaacaaatgtaaaraaaaagtatgaagaatgtatttccatttagttttgattcgcttttttaacattactaaaaataaaaatgtgagaaatcaaacatgagcaagcaactcaccagtgcaaccttattttggagtaatgcaacacagtacatcagttatttgtacacacatcctcctacctccgtctgtgtattcctttgtagcattgatgatgattgtgtattctcaacaactgccaagtgtatggttcatgcaaataataatagttattacttatcaaacctttcctttgtaccaagtgctgtgctagttcacatcttgtatcttacacaattcccacaacattcctgaaaccattacctttatttttagatctagaactgacgttaagaaatctgttctaacttgatgaaagccatacaacttgtaaattaaaggctggcatttgtacttagatatttttgacactcggaactttgcattatattattcaataaatattggctgaataaacacaacatctgaaattact

SEQ ID NO: 6838 - DNA, 628 bp, Homo sapiens
ttaccatagtaatggttgccactggggaggaaaaaggaatagttaattttgtaataatgtttaaaaggttttaaattgtttttgtaaaaatacaagaaacaaatgtaaaaaaaaagtatgaagaatgtatttccatttagttttgattcgcttttttaacattactaaaaataaaaatgtgagaaatcaaacatgagcargcaactcaccagtgcaaccttattttggagtaatgcaacacagtacatcagttatttgtacacacatcctcctacctccgtctgtgtattcctttgtagcattgatgatgattgtgtattctcaacaactgccaagtgtatggttcatgcaaataataatagttattacttatcaaacctttcctttgtaccaagtgctgtgctagttcacatcttgtatcttacacaattcccacaacattcctgaaaccattacctttatttttagatctagaactgacgttaagaaatctgttctaacttgatgaaagccatacaacttgtaaattaaaggctggcatttgtacttagatatttttgacactcggaactttgcattatattattcaataaatattggctgaataaacacaacatctgaaattact

SEQ ID NO: 6839 - DNA, 628 bp, Homo sapiens
ttaccatagtaatggttgccactggggaggaaaaaggaatagttaattttgtaataatgtttaaaaggttttaaattgtttttgtaaaaatacaagaaacaaatgtaaaaaaaaagtatgaagaatgtatttccatttagttttgattcgcttttttaacattactaaaaataaaaatgtgagaaatcaaacatgagcaagcaactcaccagtgcaaccttattttggagtaatgcaacacagtacatcagttatttgtacacacatcctcctacctccgtctgtgtattcctttgtagcattgatgatgattgtgtattctcaacaactgccaagtgtatggttcatgcaaataataatagttattacttatcaaacctttcctttgtaccaagtgctgtgctagttcacatcttgtatcttacacaattcccacaacattcctgaaaccattayctttatttttagatctagaactgacgttaagaaatctgttctaacttgatgaaagccatacaacttgtaaattaaaggctggcatttgtacttagatatttttgacactcggaactttgcattatattattcaataaatattggctgaataaacacaacatctgaaattact

SEQ ID NO: 6840 - DNA, 603 bp, Homo sapiens
agaattttcttcagccaatgttattgcttagtgtctttatgacctctgagaggtggctacagttatatgattcactgtaatatatacaaatcagggcatataaaatgatttttaaaattggaaataaggactaaggactgttataaattaccttgatatctcctatattgacgaacatctggaaaaaagacatatttttgtgactaaaaggtaaaaaaattagtgcattgtgaagtagaaatgacagttatttctgacttccatcttcatatcaacaaattatattacattatatatatcaacaactgaaaccaccctatctctggacaccagccaaaaactaaacagtttgtccaccatggaagccgatattgtgcagagctgatgcagccagctaaacgtattattttgtcatataacttttttcctcaagttaggcattattwgcttgtatacaaaagcaagcatctatttaagcatcgtttgtatatattttacatggatgtattaatctgacatttctgggattttgactttataatcagttgtgattagagtagcagctgatagaaatacactgtgtctaaccaggcaggctccaga

SEQ ID NO: 6841 - DNA, 603 bp, Homo sapiens
agaattttcttcagccaatgttattgcttagtgtctttatgacctctgagaggtggctacagttatatgattcactgtaatatatacaaatcagggcatataaaatgatttttaaaattggaaataaggactaaggactgttataaattaccttgatatctcctatattgacgaacatctggaaaaaagacatatttttgtgactaaaaggtaaaaaaattagtgcattgtgaagtagaaatgacagttatttctgacttccatcttcatatcaacaaattatattacattatatatatcaacaactgaaaccaccctatctctggacaccagccaaaaactaaacagtttgtccaccatggaagccgatattgtgcagagctgatgcagccagctaaacgtattattttgtcatataacttttttcctcaagttaggcattatttgcttgtatacaaaagcaagcatctatttaagcatcgtttgtatatattttacatggatgtattaatctgacatttctrggattttgactttataatcagttgtgattagagtagcagctgatagaaatacactgtgtctaaccaggcaggctccaga

SEQ ID NO: 6842 - DNA, 806 bp, Homo sapiens
ccgggacagaatgagactctctgctctatgattaactggaagagattgcctggttacaaacagagaaaaagaaggcaattctgtggctcttttagaagctgctgaaaagcagtatttgggcatttgaacgcctgtgggccagcagctatgagacgagggctgaatccgacttcaggatgcaggaaacggggttaggaactcatggttcaaattccagctctgctatttggtgtgtcaccttgggcatgtcacctcacctctctgagcccatttccttgttgggaggttgggratcatcatagaaaccacttctcaggatgttgacaggagcgagggaggtgtgtggccagtcaggtggttcctagtctcctggggcatccctgcctgcacggagaaggctcatccagggaaggggccaggatgggcctgagacccaggttccccggggccagtcagttacagtctggctgtattcgtttcctgtggctgctgtcacaaattcccacaagtgtggtgacttttttttttttccatttttaaatattgtggttaaaaaaagcccatgtaacatgaaatgtaccctgccagccatttgtaagtgtatagtgtgctgctaagtatcttcatattgtgcaacagatccccagaacctttcatcttgcagagctgaaactcggtatcttggtgactttttaaacaacacaaatttattctcttacagctctggaagccagaagtccaaaatcattgtcactgggctaaagtcaaggtgttggcaggttggctcctgctggaggttggaggga

SEQ ID NO: 6843 - DNA, 767 bp, Homo sapiens
ttctccttcctagtggctgctactggtgggaagaaagagtggtcataacgaggagtatgaaagaacaccagggcagatcccacccgcctcccccttactcttgattcctgactctcgcctgtttttgttttttttttcttttttgagactgtcttgctctgtygcacaggctggcgtgcaatggcgtgatctcggctcaccgcaacctccgccttctgggctcaaccgattctcatgcctcagcctcccgagtagctgggattacaggtgcgggccactatacccagctaatttttgtattttcagtagtgatggggtttcaccatgttggtcaggctggtcttgaactcctgaccttaggtgatccacctgcctcagcctcccaaagtgctgggattacaggcgtgaggcaccacgcctggcctgtcaattgcctcctttctagtcttagtccagtgggtaaccttggctaccaacttcagttgagggctccccagacctgtgcatgccccaagcactgactcagaataaccaggctgtgggtggcatgcagttcagcctgctggggtttgtgcttgtgtatcccagagcatccctggctaactgtatattgtgtaagataaaaaatataaagcatccagcacagtacttagcctgctgtggttggcatttagtgaatgttaactttccttcccttaatcccattccctcaactggcaaaaggaagggggatgctgtgtgtcttttccttgagactcaggcacctg

SEQ ID NO: 6844 - DNA, 591 bp, Homo sapiens
cgagctgctgtctctctatgcaccagaacatatctgtaactcctggggaaatacatcttgttttaaccttcaagagaagtgaaagaaaaaagtaatgcacagtatttctagcagaaawtttttttttttaagaggaggcttgggccagagccttctggcatggggcgggtggagaaagtgtttttattttaatttaaattgtgtttcgttttgtttgtggaatctttctttaatgcttcgtcgctctttggactagccgggagagagggcgaggaggcgggtgctccaggccctgtaggctgggccaggcgcctgggggatctgcccgttttcggaggccctcaggggccatcagtgggattccagccgctccacacccctcccctgagcactcggagtggaaggcgcgccgactcgttgaaagttttgttgtgtagttggttttcgttgagttcttttttcatttgctacgaaactgagaaaaagaaaaaaatacacaaaataaatctgttcagatccaagtcaccgcagcctggctggttggtcggtggctttcagttttgccgtgtttctccctgaattgaaggaaga

SEQ ID NO: 6845 - DNA, 591 bp, Homo sapiens
cgagctgctgtctctctatgcaccagaacatatctgtaactcctggggaaatacatcttgttttaaccttcaagagaagtgaaagaaaaaagtaatgcacagtatttctagcagaaaatttttttttttaagaggaggcttgggccagagccttctggcatggggcgggtggagaaagtgtttttattttaatttaaattgtgtttcgttttgtttgtggaatctttctttaatgcttcgtcgctctttggactagccgggagagagggcgaggaggcgggtgctccrggccctgtaggctgggccaggcgcctgggggatctgcccgttttcggaggccctcaggggccatcagtgggattccagccgctccacacccctcccctgagcactcggagtggaaggcgcgccgactcgttgaaagttttgttgtgtagttggttttcgttgagttcttttttcatttgctacgaaactgagaaaaagaaaaaaatacacaaaataaatctgttcagatccaagtcaccgcagcctggctggttggtcggtggctttcagttttgccgtgtttctccctgaattgaaggaaga

SEQ ID NO: 6846 - DNA, 769 bp, Homo sapiens
actcaatgctaaagtcactgagtagctacagacttgctatttgtttctccattkttatattttcatagttttagaatctgagcagcatttaatttgtctatgctttatattttcctttagagaaagaacacagtgatacttgctcatagtgttagaggaataatcccaaagagagaaattattcttcgaatatccaccatgactgaatacttagtaatactgaaacctacttataaaacaaaacagaaaacctccaaaaaaccaaataaacaacaaaaaaaacttaaaaccaaaaaagtactggaagtctcagaagtatttagcagttattcttgctccttcaaatgaaaagatgctttatcgtatcctctatggagagaattctgacagtatttatcaaagaccttacatttattcaccttttgccctaaaaatttcataacttaaaaatacatacaacaatttataatatagcattttttgtaaagggaaataatcagaaagagcctaagtgttcaacaatagggcacttgttgaattatgatacaatcacacaataaggtcttcatagagcccattaaaatgatgttattgatatttatttattaataggagaaatcatttagaatttttggttaagacctttaactaagcacaaagtctatgaaataatgtgcacaacattccatattttcataaggggaatgacttttaaaactaccctgcaatcatctcattttacacaaatgtctaggcaggtttgttaccc

SEQ ID NO: 6847 - DNA, 769 bp, Homo sapiens
actcaatgctaaagtcactgagtagctacagacttgctatttgtttctccattgttatattttcatagttttagaatctgagcagcatttaatttgtctatgcttyatattttcctttagagaaagaacacagtgatacttgctcatagtgttagaggaataatcccaaagagagaaattattcttcgaatatccaccatgactgaatacttagtaatactgaaacctacttataaaacaaaacagaaaacctccaaaaaaccaaataaacaacaaaaaaaacttaaaaccaaaaaagtactggaagtctcagaagtatttagcagttattcttgctccttcaaatgaaaagatgctttatcgtatcctctatggagagaattctgacagtatttatcaaagaccttacatttattcaccttttgccctaaaaatttcataacttaaaaatacatacaacaatttataatatagcattttttgtaaagggaaataatcagaaagagcctaagtgttcaacaatagggcacttgttgaattatgatacaatcacacaataaggtcttcatagagcccattaaaatgatgttattgatatttatttattaataggagaaatcatttagaatttttggttaagacctttaactaagcacaaagtctatgaaataatgtgcacaacattccatattttcataaggggaatgacttttaaaactaccctgcaatcatctcattttacacaaatgtctaggcaggtttgttaccc

SEQ ID NO: 6848 - DNA, 769 bp, Homo sapiens
actcaatgctaaagtcactgagtagctacagacttgctatttgtttctccattgttatattttcatagttttagaatctgagcagcatttaatttgtctatgctttatattttcctttagagaaagaacacagtgatacttgctcatagtgttagaggaataatcccaaagagagaaattattcttcgaatatccaccatgactgaatacttagtaatactgaaacctacttataaaacaaaacagaaaacctccaaaaaaccaaataaacaacaaaaaaaacttaaaaccaaaaaagtactggaagtctcagaagtatttagcagttwttcttgctccttcaaatgaaaagatgctttatcgtatcctctatggagagaattctgacagtatttatcaaagaccttacatttattcaccttttgccctaaaaatttcataacttaaaaatacatacaacaatttataatatagcattttttgtaaagggaaataatcagaaagagcctaagtgttcaacaatagggcacttgttgaattatgatacaatcacacaataaggtcttcatagagcccattaaaatgatgttattgatatttatttattaataggagaaatcatttagaatttttggttaagacctttaactaagcacaaagtctatgaaataatgtgcacaacattccatattttcataaggggaatgacttttaaaactaccctgcaatcatctcattttacacaaatgtctaggcaggtttgttaccc

SEQ ID NO: 6849 - DNA, 618 bp, Homo sapiens
agggagactctcacgaggaccagtccacagctgtggccttgcttctgaggtggttccaagatgcccacgacggggcagagcagatcagaagagaaagaccatgagagagccaacccctagaggaccacttacgtttgacggaaaagaggtagacaagggaaggagggaagaaatgtggaactttagttagctgagtcctcaggtcagcttggtacccatgtcccttgttcaatgtcyctgacaagttaccacagttccacgtgaaatgtggcaggacaggaaccagacctctacctcaaaggagctcatgcctttgctggattctgggttctagaaagttcttacgctgaccccaaatcaagatatgtctccagcaactgttatttcttggcagtcagggcccatgaggaggcagggaggcctgaggcagagcagacactgatctaattccagaaccccagacccccggtttctagagaggaggaggggccagctgagcaagatgctcctgaacacagcaggagccccgaaggaacggccagggtagcgctacaagagctggagagagaagatgggaagtgcaagagggtttcctggtctctgccttggctaactgca

SEQ ID NO: 6850 - DNA, 804 bp, Homo sapiens
atgtccatcgtgctggggagaaaaaaagtgtaagcatcaccagtcgttgcttccatcttagttagaaggtcattttattgtatggaagtcaacaagcttatatttctgtagcattgaagcaccgttcatccagatgcctactgccagtttacagacttggtggtgtatacttttcctatgttgggtgtaggacctgtcatacatggtgggcatctaataagttggtttcgtaccataggacaacgatgaagaaaccgtacttggtgatttcacttgcttatgttggaaacctgctctgttttcttttggttagaatgaaccagtattttccatgctgtcttttgttaatgtaaactcagtttttcaggtgggaaaccatatcttctattttgtttttctctagggttttgcacagagtctcctaaaaaagatgtctcatcgaagttctattcctggctgtggagtgacttttgaaattgtctccaatattccagaggtgaaggatatacaatttaaatttactaaaaataaacacttaaaaagagccaactccctgaaaagtgacctacccatgacatacatatgaagtgaaagtgtatgtttagggaagstatagatttttagaggaattttctaatatcaattcatagtaaaatgtacttgtggctttaaaagttctagttttagtattttgttgaagaactttcttttgaaaagcaaatcaacaccttcttacgcagaaggtgacagaagagaaacatattgtacccaggaagggaggcagcgtcagtagagattccagtt

SEQ ID NO: 6851 - DNA, 833 bp, Homo sapiens
cagctcagatgcccagtgtggtagaattggaccaagaacagcagaggagtggctggagaggtaggtggagaccagattcaaatcatgcagggtcttagattatatcctgagagctttcaaaaggttttacttttggcatttaccttacctggtttgtactttgagatattttctgttttcagctttgtgaagaacagatttgtaggtgttactattgcagtagtacaggtgagagatgatggctagaaatggcagtggatactgaaagaggtgaatgaatttgagatgtgtattgtatgctgaaatgccaagaaagtaatggttgtggtaggtttaggaaggggaattgtcgcagatgacttttaaatttctgattttggcagctggtgagattgaggtgccatttactgagatgaagaatatagaataagaatgagttttggggagaaaaattaggagttcagcttctaatttttacttgtgaggaagacagatccaagtggaaatgtcaagtagtcagttggatgtgtggatttggatctgagaaaagagatgttggctagagatgtaaatttgtaaattgtcaccacatagatgttatgtatggtggcattacatacctggagaaagatgagaaagagaggcaggcccaagaccaagctctgaggaatccccaaactaagaggctgaacagataaagagaagctcgtctgagaatttgaagagatccagagaggtaggagtcaagtttttcaagagaagagagtattaaaaaaaaggagaaataaatgataacctccttaaaayactcctaaggggtcttctgagtttaa

SEQ ID NO: 6852 - DNA, 791 bp, Homo sapiens
tcccagagaggccgggcctgcaggagggccagttctcatgagttctyatttggcccctaccctccaggctgtggttctgaggtgggagacagagcctgacctctgtttgtcttgttttgtctttgcagcagcccacccatgtgcccgtgacaatggtggctgctcccacatctgtattgccaagggtgatgggacaccacggtgctcatgcccagtccacctcgtgctcctgcagaacctgctgacctgtggaggtaggtgtgacctaggtgctcctttggggtgatggacaggtacctgattctctgcctgctaggctgctgcctggcatccttttaaaatcacagtccctgtggcatccagtttccaaagctgattgtgtcttcctttgccctcctttcttttctactatgtgcattcggtgctatgaattttcctctaagtactgcgtttcctgcatctcacaaattttgttacattttcattttcaggtagtttgaatatttttacacttctcctgagatgacatctttggctcatgtgttatttagaagtgttgcttagtttctaaagagttggggcttttccagctgtctctctgcaactgatttctaatttaattctactgtagtctgagagcttattttatatgatttctgttattttaaatgtgttgggtgtggtgtttttgttgttattgtttttgtgtctttttgttttgttttgcttcgtttgttttgtttttgagacagtgtcttgctctgtcactcaggctggagtgcaatggcgcg

SEQ ID NO: 6853 - DNA, 766 bp, Homo sapiens
cggggtttcaccatgttggtcaggctggtctcgaactcctgacctcgtgatccgcccacctcggcctcccaaagtgctgggattataggcgtgagccactgtgcctggccattaggtgtgttttatcacccagcatcatgcagtttatcttggtgaatgttctgtgtactcttgaaaagaatgtggattctgctgttgttgggtggagtgttccagaaacatcaattagatccagttggttaatagtgctcatcaggttgtctctatccttccttcctgactgcctgcttgagctgtcagttattgacaggggtgtggagtctccaactctaatggtggatttgtttatttctcctagtagttctatctttttctctccttctacccttgatcctcttctccccctagggcttcctggtgttrgtggtgggagagtggggtagtgaagaacctggactttagggccaaagaggccagggttcaaatcctggctctgtcacttcccagttgagtgaccctggctggtgcctgaatctctgtgagcctccacttcctcctctgtgaaattgagagcacttacctggcaggctgtcatgggcatcaagtaacagggcactccacctggaccctgacacgtgatgcacaggaatgccagctgctatgccatgggtgtggcagtagtaataaagtgaccatctgtatcctcaccacagtgaagcctgtccagggctttctctcctatgcccccatgcctccaggtggcctt

SEQ ID NO: 6854 - DNA, 766 bp, Homo sapiens
cggggtttcaccatgttggtcaggctggtctcgaactcctgacctcgtgatccgcccacctcggcctcccaaagtgctgggattataggcgtgagccactgtgcctggccattaggtgtgttttatcacccagcatcatgcagtttatcttggtgaatgttctgtgtactcttgaaaagaatgtggattctgctgttgttgggtggagtgttccagaaacatcaattagatccagttggttaatagtgctcatcaggttgtctctatccttccttcctgactgcctgcttgagctgtcagttattgacaggggtgtggagtctccaactctaatggtggatttgtttatttctcctagtagttctatctttttctctccttctacccttgatcctcttctccccctagggcttcctggtgttagtggtgggagagtggggtagtgaagaacctggacttyagggccaaagaggccagggttcaaatcctggctctgtcacttcccagttgagtgaccctggctggtgcctgaatctctgtgagcctccacttcctcctctgtgaaattgagagcacttacctggcaggctgtcatgggcatcaagtaacagggcactccacctggaccctgacacgtgatgcacaggaatgccagctgctatgccatgggtgtggcagtagtaataaagtgaccatctgtatcctcaccacagtgaagcctgtccagggctttctctcctatgcccccatgcctccaggtggcctt

SEQ ID NO: 6855 - DNA, 833 bp, Homo sapiens
atcctttttagaggacaaaagtgtgttaatacatgtgaagtttacacaattcttgtaaacttctgattccctagaccagtattacatttcagagaccaaatttaacaaagcaactctgaatccacataaatgtttagtaatttgagataaataaattaaatgaatgttgttgatattctgttttgatagtgtcaaattttccttttcacaatgaaggattcctggaatgaaacccakagaaatatgtcaaggaatcagaagaaataatacagacagtaatttctttaatctgaagtatctaaagctgaaaaggcattaaacaatcacaaaaactggagaaaaaaaagcaaaggaaaatgagaagcataatactttaattctctttgttgatattttaagatagttctttactaatttattctttgctcttttccaaagagatagcttgtttcatcaccttaatgtatttatagtcatttataattatttcagaaaagcttttttggtgaattccaaactggattttagtgagaaagcactgagtggaatgctgatgtgtcttctcattgacttcatgatctccaatccaaaaattggtacaatgaaacttcattctgtataatcactaacctcaaaggacatgttattgattaaagtacgtaagtctagtttgtactccaaatatttaaaagaatgagaggtgttcaaatagaagagtctgtccacttataaaaaaatagactatcagtctattttacactagactactcaagaagaaatctctcaatgttctttcaaaaagccatttgacattgataccctgtgaggaaatg

SEQ ID NO: 6856 - DNA, 621 bp, Homo sapiens
  misc_feature (1)...(621): n = A,T,C or G
gtgcccatcagagaaaacattttttaaaaattatgtatatactatntatcatctaacaattatatttgacagaaaatgattcaagcaatcctcccacctcagcctcctgagtagctgggagggaccacaggcacgcaccaccatgcctgggtaattttttgtattttctgtagagagagggtctcactgtattgcccagactggtctcaaactcctgggctcaagccatctgccctcctaagcctcccaaagtgctgggattacaggtgggtgagtcaccgtgcccagccatgatttgtttttatttaaaaaaatctgyatttttcctttttgtttaaagaaagaaaagttatgattgaattgtcatcactgaactaaaaattactgtagcattttaaacatttaggggtgaaatctaacaatgtctgcaatgtactgtgaaatgaataaaaaaatagcttgaatggatagttctcgtcagtgagatgactaatgtaaggtgcttttccctcccttcgggacctgtattttgaaaaatctggtccctgaggttttccttgcataaattccaaagaaaagtcagatactatggccaagagtgtgggagatatttggggacat

SEQ ID NO: 6857 - DNA, 810 bp, Homo sapiens
cctgttttatataaccttgtgcttaataaggaattttctgttttttgttgtcttcttctaggctgtattcatcaccaaagaaaaaacttacaccaatgcagaaatcggttagtccattagtttggtgcaggcaagttttggattacccaagtcctgatgttgagtgtgctaaaaaatctcttatccacaaacttgatcaaactatgtcaggtatgtctataattttgcttgtaaattcatctctttgctttctttagtcaaaaaccataaatattgagcaktgtgtttttaggaagcaattctttggagcatttttcaaatctcattgttcatatcatcatgagagtttttcccatgttcacataaccctgttctatcatttacttaatagctttttaaaaaaatcttgtttttatttagcctcatcctaaagaataatatccatgaaataatgaatttcgtatgataagcttttttctaatacaagttaaataactattaaaatataaaatgtctggtattgtataaaatcctctcacattccactctttggggaaactggtgtggtagaaagatacaagtggagagctacagagaccttgttctcactctagcccttaattgctctgtcactgcattatttgacttgtgtgagctcagttgtctcataagaatgatgaaccttgaaaggtaattttcagggttaagtgttatgtgaaagagcctagcatgttttctggctaacagtaagtgctgagtaaatgtattcatttcccttgttatgtaaaactacttgacattttaggttta

SEQ ID NO: 6858 - DNA, 768 bp, Homo sapiens
ctgatcccttgtgctccggtgataacactaagagggttcccctgcatggctgttgcccttcagctgggtggtacaatgaacttatacagtgtgagcccaacctgcagcctgcagcagagccgcccagctgagcccagcggagactaagagaatctggatcgatcttcaggcccacagwtgggaaaacaggtgcttgttgatataagccactgagattttggatggtttgtttctcatttttgtggcaatagctgactgatacacagatctaaagctgaagcagaggaaggggccaagagctggtgttggaaagaagtaggctctccatatccctcccactgccacagccctgcaagggaaggatagatggagaagatgctgtgggtgttctcagttagctctaagaggccacacaagtgtggggagggcccagtgcctcactgcatgtctgtaagggagttatcatcatctccatctgaggaactccaagaactgaggctctccaagaactctctaaggttgctgaggtagaagatggcaaagctgagactagaacttggtctcttggctccagtttccaatccgccaggtagcccaaccctgagccagttgaacagtgagaccaatgaggattggaaccatggcctggcccagccacaggagccagagagaggacaaggcacagtgctgtggaagcgtcagagctgtctctgctcccaaggagcttccgcccagctaagaagatgaggttcacactgggaatctgca

SEQ ID NO: 6859 - DNA, 768 bp, Homo sapiens
ctgatcccttgtgctccggtgataacactaagagggttcccctgcatggctgttgcccttcagctgggtggtacaatgaacttatacagtgtgagcccaacctgcagcctgcagcagagccgcccagctgagcccagcggagactaagagaatctggatcgatcttcaggcccacagatgggaaaacaggtgcttgttgatataagccactgagattttggatggtttgtttctcatttttgtggcaatagctgactgatacacagatctaaagctgaagcagaggaaggggccaagagctggtgttggaaagaagyaggctctccatatccctcccactgccacagccctgcaagggaaggatagatggagaagatgctgtgggtgttctcagttagctctaagaggccacacaagtgtggggagggcccagtgcctcactgcatgtctgtaagggagttatcatcatctccatctgaggaactccaagaactgaggctctccaagaactctctaaggttgctgaggtagaagatggcaaagctgagactagaacttggtctcttggctccagtttccaatccgccaggtagcccaaccctgagccagttgaacagtgagaccaatgaggattggaaccatggcctggcccagccacaggagccagagagaggacaaggcacagtgctgtggaagcgtcagagctgtctctgctcccaaggagcttccgcccagctaagaagatgaggttcacactgggaatctgca

SEQ ID NO: 6860 - DNA, 829 bp, Homo sapiens
tgtgctgctatcaatcacatatagcagaagggaggagctgcgaaacacaaccacacactgcaaaacacaaccacacacatacacatgcacacacacacttctgcacgtatcattcacacatatataaggtttcacaatgcactttcttccctttcacatatcaccaccagaggtgaggcttaggatcatgctctcaggaatcaaattagctatttctattcatataactattattcaggcccacaaatcaccacaaactgtaagtgcagcatttgtctttcaaggtctcaatatctgtaaagttgactgtggtccagagagcctctggcaaacatggtgcaaggtctgcacatgactgggttgttcccctccattcccaagtctttactccccagacctctgctcctttcttccccttgctgacactgtgttgaagatggactcttggcccagcaacatgagtgacagatccaaastctacaacaatcagaggtctgagacatctttctcttctctccctgtgtgagtagataaaggcagtggacaatgggcgcccacagaaatcctccacggcccgcctccacattgaatggattaagaaaccacccccttcacctataccattgaccttcgatgagccgttttataacttcacagtcatggaaagtgatagagtgactgaaattgtaggggtggtgtctgtgcagccagctaacacccctctgtggtttgacatagttggtaagttcgagtcttacagagcagtatcatgcaatgtaataattgactgaagcaactaggaaaaaaaaaaaaaagaaagaaagcaaaa

SEQ ID NO: 6861 - DNA, 1218 bp, Homo sapiens
  misc_feature (1)...(1218): n = A,T,C or G
taatattgtatgtctgtgtgtatgtctggtgtctgtgtatggttttccttctcctgggcttttcttataattaaatttctctaatgattttatttttatattggatggcataagatttttatttagttgtctaaatgtaactagcacactgtaataagttaagggccttagtggctggcctgttgcctcacacctgtaattccagcactctgggaggctaatgtggacagatcacctgaggtcaggagtttgagaccagcctggacaacatggtgaaaccccatctctactaaaaatacagaaactagctgggcgtggtggtgtgtgcctgtactcccactactcgggaggctcaggcaggagaatcacttgaactcagggggcagagattgcagtgagccaagatcacaccactgtactccagcctgggcaacacagtgcaactccatctcaaaaacaaaacaaaacaaaacaaaagttaagggccttagtgagctgtgttatgaaataggattccagcatttatacaaagaaaacaaaagggttaattcttatataagcataaaaagtatttctttgcctaaaatattatggataataatatttaatcaagatgtttcctttactttccagaaaattttaaattcaaannnnnnnnnnnnnnnnnnnnnnnnnnnnnnnnnnnnnnnnnnnnnnnnnnnnnnnnnnnnnnnnnnnnnnnnnnnnnnnnnnnnnnnnnnnnnnnnnnnntaaatgataatataccgttcctaggacatttaatatgcttgatcaatattagtggtgatgaggatgacawtgatgatggggatgagttattcatcttttattaaatccctagtaattccaactgaaattaagatcaacaggcaggtcatatttttcctatttctatgtgactgtattattggtcagatctctaatctggagttatttgtctagaaccagctattgaatatatcgttgcattaaacataatttatagtttgtgcttttaagttaaataaccactaaaaagacaaaaatagcaagtgataatcctgtacatctgtaaccataaaagttttaaaaataaatttataagagtacagagtacagaaaaccagggattgggagggcgtgtgcttaattttagtcattcatgaaagatttaatccatatggtcttcttcatctttctaggtttgttttacatttt

SEQ ID NO: 6862 - DNA, 807 bp, Homo sapiens
acagctctcttcgatgtaaccaagagggtgtatccaagctctgtctctaatcaaaagtctcatgggtggggaagcctggtaagcctggactggaaaagtgagaaggcggtaatgctatgatccagctgtgcgtctctgggatctctgctactctatgatcttygccattatggggaacagactgatgctgtagcatcggtcaaattcatgccagtcagccagcagaaaccaatccaaggacacaaatggagccacacaaaagcgtgtgaaataagaaatttgatggttcactttaaatgccaccatatttttcagttctatgaaattttttattttacaactgtttttggactatcatgtagaagcaatgtgtatttacaggtgtctactgcacagacctcactctacagtccaatgatttgcttaattatgacaaaatgtaaaacaacagtaaaaacagacaaaattatattataaaataataatacaataatatgtaatagtattatttatatgtatatatatacacacacacacacacaaaaaccccacataaatcaacaggcatttgttgaatacctgccatgtatcatggactttaccatgccccaggaaacaaagatgagtcttaaacagtcctggcctgtgaggtactctctgtttactccataaccaacaggataactgtaaattcttggcagctaggggccacttttctcctatatctattgatcccacacttttgcctcatctaccacctctcatgtttactgatgcagaggcttaatatacttggcccagcactat

SEQ ID NO: 6863 - DNA, 824 bp, Homo sapiens
ggggactactgtggggtaagggggcgcctgcttgcctgatacaggatggggtcaagggacagtgggcaggtcctcactcaggagtggggggtgtaggctggccagcccccagggcttgtccaccagtcttctccccgcaaggccctcagagcagcgcctgtgggtgtcagtattacctgagcctaggccaaagctagcccaaggctggggaaggggaggagactccaggtcagaatgtgaggtctcagtctgtgatttaaggtgttgcatgtggactcttaactgtacgtgtagtttctagtggagaaatcaaggctctgatcattttgtttttagtatgaaaatgtgatttcctttctgtttgtaactcmtcatagaaacattgtggtgggaggagaggggatagtctacagctaatgagggaaacaccaaagatcacatcattaaaatgatgacatgcccctcgccaggctcctctctcttatttccaaggaggatgggggaggggtggggattgggaagtgaggggcattgaactgggccaggcccaggttctcccggcactgtttctggtgctctcctagtggggtgcagtggacccctctgaccccttcgccagagctggtcaggtgagggctgccacctctgcttcataccacttctctgtacgccaccacttcctgcttccccagggcctgctacagactggggccaccttccagtgccagggtgagtatgtaggaaggaacgacagaaggctattcatcctaatagcttcccacccaggactacaggcctgaagtgatgtaactggccagaaacct

SEQ ID NO: 6864 - DNA, 824 bp, Homo sapiens
ggggactactgtggggtaagggggcgcctgcttgcctgatacaggatggggtcaagggacagtgggcaggtcctcactcaggagtggggggtgtaggctggccagcccccagggcttgtccaccagtcttctccccgcaaggccctcagagcagcgcctgtgggtgtcagtattacctgagcctaggccaaagctagcccaaggctggggaaggggaggagactccaggtcagaatgtgaggtctcagtctgtgatttaaggtgttgcatgtggactcttaactgtacgtgtagtttctagtggagaaatcaaggctctgatcattttgtttttagtatgaaaatgtgatttcctttctgtttgtaactcctcatagaaacattgtggtgggaggagaggggatagtctacagctaatgagggaaacaccaaagatcacatcattaaaatgatgacatgcccctcgccaggctcctctctcttatttccaaggaggatgggggaggggtggggattgggaagtgaggggcattgaactgggccaggcccaggttctcccggcactgtttctggtgctctcctagtggggtgcagtggacccctctgaccccttygccagagctggtcaggtgagggctgccacctctgcttcataccacttctctgtacgccaccacttcctgcttccccagggcctgctacagactggggccaccttccagtgccagggtgagtatgtaggaaggaacgacagaaggctattcatcctaatagcttcccacccaggactacaggcctgaagtgatgtaactggccagaaacct

SEQ ID NO: 6865 - DNA, 786 bp, Homo sapiens
ctgcactgtgtcaaggtaggtagacatttaaatgagcaaatcacttcatgggtaagggtaataatagtagctcaaagcaggtgcaaataaccgggtcttgagtgaatggatgaggttgactgagggaatcttctaagagaaagtgacatttaagccgaaccaacagaatgaccaggaaatactcaggggaagaaaagaggaaaaagtgtttcaatcaaagacaatccaaccatcgatcttgacctacgcttcaagcacagctagggttactacagcccagcaagagctattmatcactgccattgatcctccctacccactagaaaactttgaaattttagagctcacatcttgttaaaatctcttcccctctcaagaactaaagcttctccagcacaacctcaattcactcagagaaggagagaaaaagaaaaataagttgtattcagaaaaactcaaaagctctccatctgtgaactgtagaggacacttgttgatcagattgccagagaaagccaacagaaaggcagagccaccttctttcctccctttcaagagcagagctcaaaactgccttcacgtctaaacacatatgacctggttgacaaggtcatgccatttctttacctgtcaaataaatggactttctcagtttccactgtggttgaaaatataatatttctgtttgcaatttcaatttcacagatgactggcatctgcagggacagagaattctaataaaattgcagaagcatttaatacaatgactggcagatggggaaaggg

SEQ ID NO: 6866 - DNA, 822 bp, Homo sapiens
tacacaggacaatttcaaaaaattatctgagtgcaaaaattaaaaaaaattatctgagtgcaccattgagtaaataaattatttatgcacacttgatttggaaattaagcaaaagtgaagtactttttaaccataatagagagccatttaaataaaaagtaggcccaataggtcactataaaattaaaagccagtattgatggaacaggatgaggcaattgcagggaaagttgctactcagctgcttaaagaagaaacatgttaaaagcacagtccgtctatcaacactccttaaatggtcccttcaaagagaaggcttaagataatcatgaagccagatatgtatgtaatttgcttgcaggcttgccctgtgatgctakcgaagtttcttgggcataagtttcaacggtgatcaatttaaaagtgttgaactagttcccaagtgctggttcttggactagaggctggatggctgtataagtatcatgtacagagtttttgttgttgatgatgttgttcctgtgattcctgggctctaaccaccaaagagtaggattcggtggggctggagtagggccagatgactaggtttgggagccatgggcctaacttatttccaactctaaagtgtactcatacaaatgtacaataagaatcccaaggcacaaacttgcatttgactaaaaatggcaaatacctaagatggagagagagagagagtatgtgtggagaaagagagagatggggtctcgttctgttgcctcagctggagtgcaatgacatcatcttagctctctgcagcctcgaactcctgggctcaag

SEQ ID NO: 6867 - DNA, 843 bp, Homo sapiens
ctaattcactgttattttatttttgagacagagtcttgctctgtcactcaggctggagtgcagtggcgcgatctcggctcactgcaacctccacctcccgtgttcaagtgattctcccgcctcagcctcatgagtagctgggattataggcacgtgctgccatgctgggctaatttttgtgtttttagtagagacagggtttcaccatgttggcyaggctggtcttgatcacctcaggtgatccacccaccttggcctcctgaagtgttgggattacaggcgtgagccaccgtgcccggccaagaaactatttttgatatttttatttcatctcatatgttaatattttcatttatagttactgcaattatacttatttttagaaaatatttcactatcatgaatataaaaatgatgactatagtatttttaaggattaattttttaaaaatttacattttaagttgtttccctttctttctttctctctcccctttccttttttattttccctccctcccttggagtggtatgctatgattataattatgaagatttatgtttttcttttaattaatattgtttcaattaaaaaatacagccaggtatatatgacttccatttccagcaatatggccatataggtcaacagaaaaatctctttgtgtaaaatacctgaaatgctggataagagacaccaaacatctttttatataattatagttaagctcagaacaatagaaggggaatcctaggggctgaaaattttaagagaaggccacatgggctctttgcctcttttaggcagcaagttgcaggggcttaaataagaaaggatcccga

SEQ ID NO: 6868 - DNA, 804 bp, Homo sapiens
tcctatttttacactagtaaaaaacaatgccaaaaagaaatacatagctgtgattacatttatcctccatacaaccaggcctcacaaattctatgctaactaaaaataatcaacgtaggcagcttatatatagcttattaacaatgttctatgaggagagacttctgcacatatttctgtgagtaagtatcattattttggattgttttcttatcaatttagttaagctgggaamtatgcttttcaaaatttattcatctggttaacttaaatgttttcattctaccttaaaataagtttttgtttcatttttatgaaaattataaaagtataaattacataataaaacatatgattttaaatgattacattattgagagcttgagaagggtaaaaatgtcacaaggaaagctgcctatataataggaatcttggaaaaagttattctgagaagcaagtagatatttggaacataagcgataggctagatagatagatagatagaatatatgtctacctttatgcttggtggtctaagtcaaactgatttcaatatatcttttaaatttataaaaccaagattcatttttatttaccacataattatatagtaagtgcaataatgtgtagaatgtttactgtaactgaggaaaataattctaaattatatttgtctttatgtaaaatgtcattaatttaattaaattttcttgaatttaatctaaaaatgaacatcacgtcataaatagagtatagaattgaaatgaaaatgtgtaattggtgtaaaggatctataatcccaat

SEQ ID NO: 6869 - DNA, 804 bp, Homo sapiens
tcctatttttacactagtaaaaaacaatgccaaaaagaaatacatagctgtgattacatttatcctccatacaaccaggcctcacaaattctatgctaactaaaaataatcaacgtaggcagcttatatatagcttattaacaatgttctatgaggagagacttctgcacatatttctgtgagtaagtatcattattttggattgttttcttatcaatttagttaagctgggaactatgcttttcaaaatttattcatctggttaacttaaatrttttcattctaccttaaaataagtttttgtttcatttttatgaaaattataaaagtataaattacataataaaacatatgattttaaatgattacattattgagagcttgagaagggtaaaaatgtcacaaggaaagctgcctatataataggaatcttggaaaaagttattctgagaagcaagtagatatttggaacataagcgataggctagatagatagatagatagaatatatgtctacctttatgcttggtggtctaagtcaaactgatttcaatatatcttttaaatttataaaaccaagattcatttttatttaccacataattatatagtaagtgcaataatgtgtagaatgtttactgtaactgaggaaaataattctaaattatatttgtctttatgtaaaatgtcattaatttaattaaattttcttgaatttaatctaaaaatgaacatcacgtcataaatagagtatagaattgaaatgaaaatgtgtaattggtgtaaaggatctataatcccaat

SEQ ID NO: 6870 - DNA, 804 bp, Homo sapiens
tcctatttttacactagtaaaaaacaatgccaaaaagaaatacatagctgtgattacatttatcctccatacaaccaggcctcacaaattctatgctaactaaaaataatcaacgtaggcagcttatatatagcttattaacaatgttctatgaggagagacttctgcacatatttctgtgagtaagtatcattattttggattgttttcttatcaatttagttaagctgggaactatgcttttcaaaatttattcatctggttaacttaaatgttttcattctaccttaaaataagtttttgtttcatttttatgaaaattataaaagtataaattacataataaaacatatgattttaaatgattacattattgagagcttgagaagggtaaaaatgtcacraggaaagctgcctatataataggaatcttggaaaaagttattctgagaagcaagtagatatttggaacataagcgataggctagatagatagatagatagaatatatgtctacctttatgcttggtggtctaagtcaaactgatttcaatatatcttttaaatttataaaaccaagattcatttttatttaccacataattatatagtaagtgcaataatgtgtagaatgtttactgtaactgaggaaaataattctaaattatatttgtctttatgtaaaatgtcattaatttaattaaattttcttgaatttaatctaaaaatgaacatcacgtcataaatagagtatagaattgaaatgaaaatgtgtaattggtgtaaaggatctataatcccaat

SEQ ID NO: 6871 - DNA, 617 bp, Homo sapiens
gtggcrctccaaggggtgagacagcagtgggcatggggctggagccagtccctaaccccgctcccgccccagacatattcctgttgcaatgagagcacctccaatcagatgtgttgtcaacattaggcctccaacaagtctttcattcaaataatgaaagagaaaagaagaaatgaaacaataaatgaaatgaagaagagaggagagaaggaaggaaaaaagtgagagagggaaggagagaggaagaaagttagcagtttgaaccaaggcaaaaagccatggccctttaaggggagcacacacatgtcaggaatcacgttgtgggcttcaaaggacttcctgactcacagcctggcttccccaggtactggctggatgaccgaacaactctgcctcattttctctatttgcaaaatggggatgttaatccctctcattttggagttgatatgaatgaacaagtcaaagtgcttagaacagaacttgatgccagcaagcatcaataaatggaagctgtttcttgtttttagcaggacttgacatcgcattcaggctcagtggctttagggttggctgcctaaagccaccattcaggcacacttttgaagcctggttca

SEQ ID NO: 6872 - DNA, 617 bp, Homo sapiens
gtggcactccaaggggtgagacagcagtgggcatggggctggagccagtccctaaccccgctcccgccccmgacatattcctgttgcaatgagagcacctccaatcagatgtgttgtcaacattaggcctccaacaagtctttcattcaaataatgaaagagaaaagaagaaatgaaacaataaatgaaatgaagaagagaggagagaaggaaggaaaaaagtgagagagggaaggagagaggaagaaagttagcagtttgaaccaaggcaaaaagccatggccctttaaggggagcacacacatgtcaggaatcacgttgtgggcttcaaaggacttcctgactcacagcctggcttccccaggtactggctggatgaccgaacaactctgcctcattttctctatttgcaaaatggggatgttaatccctctcattttggagttgatatgaatgaacaagtcaaagtgcttagaacagaacttgatgccagcaagcatcaataaatggaagctgtttcttgtttttagcaggacttgacatcgcattcaggctcagtggctttagggttggctgcctaaagccaccattcaggcacacttttgaagcctggttca

SEQ ID NO: 6873 - DNA, 617 bp, Homo sapiens
gtggcactccaaggggtgagacagcagtgggcatggggctggagccagtccctaaccccgctcccgccccagacatattcctgttgcaatgagagcacctccaatcagatgtgttgtcaacattaggcctccaacaagyctttcattcaaataatgaaagagaaaagaagaaatgaaacaataaatgaaatgaagaagagaggagagaaggaaggaaaaaagtgagagagggaaggagagaggaagaaagttagcagtttgaaccaaggcaaaaagccatggccctttaaggggagcacacacatgtcaggaatcacgttgtgggcttcaaaggacttcctgactcacagcctggcttccccaggtactggctggatgaccgaacaactctgcctcattttctctatttgcaaaatggggatgttaatccctctcattttggagttgatatgaatgaacaagtcaaagtgcttagaacagaacttgatgccagcaagcatcaataaatggaagctgtttcttgtttttagcaggacttgacatcgcattcaggctcagtggctttagggttggctgcctaaagccaccattcaggcacacttttgaagcctggttca

SEQ ID NO: 6874 - DNA, 617 bp, Homo sapiens
gtggcactccaaggggtgagacagcagtgggcatggggctggagccagtccctaaccccgctcccgccccagacatattcctgttgcaatgagagcacctccaatcagatgtgttgtcaacattaggcctccaacaagtctttcattcaaataatgaaagagaaaagaagaaatgaaacaataaatgaaatgaagaagagaggagagaaggaaggaaaaaagtgagagagggaaggagagaggaagaaagttagcagtttgaaccaaggcaaaaagccatggccctttaaggggagcacacacaygtcaggaatcacgttgtgggcttcaaaggacttcctgactcacagcctggcttccccaggtactggctggatgaccgaacaactctgcctcattttctctatttgcaaaatggggatgttaatccctctcattttggagttgatatgaatgaacaagtcaaagtgcttagaacagaacttgatgccagcaagcatcaataaatggaagctgtttcttgtttttagcaggacttgacatcgcattcaggctcagtggctttagggttggctgcctaaagccaccattcaggcacacttttgaagcctggttca

SEQ ID NO: 6875 - DNA, 731 bp, Homo sapiens
ttacaccatatgtggaaatggttagcacattcccrtcatttcccctggacatctcaagcccaacatttggcttacaagatgaggcagaaagcaatgttttggcagaggatacattgtggtggtggtgggaggagtgaactatttataattcacttttataaatttataattcaattcttcatgagtctgttcaacaggatcaccatgtacagttaaccaggtcgtgcattgtacaagcatacttcatctaaataggaggggtcattcccttttaaagacagaatggattttaatatctattccaattttttaacaggtagaattaaggtgtcctggggaaagggtaactttgattctcacgaaggcatgggatgggccagcatatagagtgaagtagatatgtaactcctttgccctgtattctggacctcaggcctgttgggatggaagaaatattactggtaaaggggataacatctggaaacaggtgtgatggattttccttgtgtcctgccaatcccacaggtgttgtctccactgtctgactccatcctggcagagaagacaataaccgtgctagatgacaaagtatcggtgacagacttggccatccagctcgtggctgggctgtctgtcgccctttaccccaacgcagaaaacagcaaggccgtaacagctgtggtcacagctgaggaggtgctgcggacccccaaacaggtagggggccaaat

SEQ ID NO: 6876 - DNA, 731 bp, Homo sapiens
ttacaccatatgtggaaatggttagcacattcccgtcatttcccctggacatctcaagcccaacatttggcttacaagatgaggcagaaagcaatgttttggcagaggatacattgtggtggtggtgggaggagtgaactatttataattcacttttataaatttataattcaattcttcatgagtctgttcaacaggatcaccatgtacagttaaccaggtcgtgcattgtacaagcatacttcatctaaataggaggggtcattcccttttaaagacagaatggattttaatatctattccaattttttaacaggtagaattaaggtgtcctggggaaagggtaactttgattctcacgaaggcatgggatgggccagcrtatagagtgaagtagatatgtaactcctttgccctgtattctggacctcaggcctgttgggatggaagaaatattactggtaaaggggataacatctggaaacaggtgtgatggattttccttgtgtcctgccaatcccacaggtgttgtctccactgtctgactccatcctggcagagaagacaataaccgtgctagatgacaaagtatcggtgacagacttggccatccagctcgtggctgggctgtctgtcgccctttaccccaacgcagaaaacagcaaggccgtaacagctgtggtcacagctgaggaggtgctgcggacccccaaacaggtagggggccaaat

SEQ ID NO: 6877 - DNA, 731 bp, Homo sapiens
ttacaccatatgtggaaatggttagcacattcccgtcatttcccctggacatctcaagcccaacatttggcttacaagatgaggcagaaagcaatgttttggcagaggatacattgtggtggtggtgggaggagtgaactatttataattcacttttataaatttataattcaattcttcatgagtctgttcaacaggatcaccatgtacagttaaccaggtcgtgcattgtacaagcatacttcatctaaataggaggggtcattcccttttaaagacagaatggattttaatatctattccaattttttaacaggtagaattaaggtgtcctggggaaagggtaactttgattctcacgaaggcatgggatgggccagcatatagagtgaagtagatatgtaactcctttgccctgtattctggacctcaggcctgttgggatggaagaaatattrctggtaaaggggataacatctggaaacaggtgtgatggattttccttgtgtcctgccaatcccacaggtgttgtctccactgtctgactccatcctggcagagaagacaataaccgtgctagatgacaaagtatcggtgacagacttggccatccagctcgtggctgggctgtctgtcgccctttaccccaacgcagaaaacagcaaggccgtaacagctgtggtcacagctgaggaggtgctgcggacccccaaacaggtagggggccaaat

SEQ ID NO: 6878 - DNA, 704 bp, Homo sapiens
ccagctttggagttgtttttttctttaatgtacgaaaatgtgtaacataagtcagagaagggttttatgtcctgtcctgatagagatgctggtgtgtactaaaatgagttattatagcattactaaatgaaatgaatagaactcttgacatcaaatctgtccaagtagttaaacaatagttaaacagtgatattgcaattaatttatgatagaacgttgtaaaatatatttctccagaatttcctcagaacattctttggttgaattttttctaatttgtttattatttcctagtatagtttccattgagcatttcttcttcaaagtccaaatatttaaaaaattatgtatttataaacaatgtttaaaatgttcctcgttagtcatgaaattaattttctagtatatagttattaaccagcatttacactctttccataaactccctggatgattaaaagaaaatgatggattataaattggtttttagtgcttataaattkcataagatataagaggttatatagctggtctttgtttagtatccacttttataatatcattttaatatttaatgaagaactaatgcttatgaaaatattgtatcatttatattttgatgttatggtcagctccaacactactcacctttcgtcaccctcaaatgcttccttcagaacctagcattatattcaacttctgga

SEQ ID NO: 6879 - DNA, 588 bp, Homo sapiens
cagcgcccactctcgaaactgagtcaccttcagacacgacctcagcgagctcctaccagcttatgcccctgccagagacaaacagggcctgggtctccaccagctcacacaacacccctaacagagcctgctccagcagatgtcagcatcaaaaacactaggagcctgtggcctccagcagacgtcagcatcaaagacactagctgctcccgagcaggggcaccagaggacacacacaggrcaggcagcctgcgggcacctctcaggggacctgtctcacatcccaacacgcgggggtgtgggggaagaccacactgtgtcaggaaacaaaggggaggatgttcttaaagaggaaaggcactttgggaggctgaggtgggcggatcaccggaggtcagcagttcgagaccagcctgcccaacgtggtgaaaccctgtctctactgaacatataaaaattagctaggcatggtggcaggcgcctataatcccagctactcgggaggttgaggcaggagaatcacttgaacccgggaggcggaggttgcagtgagccgagatcgctccattgcactccagcctgggcaac

SEQ ID NO: 6880 - DNA, 745 bp, Homo sapiens
accatcccggctaacacggtgaaaccctgtctctactaaaaatacaaaaaattagccaggcgtggtggcaggcgcctgtagtcccagctacttaggaggctgaggcaggagaatggcgtggacccgggaggcggagcttgcagtgagcagagatcatgccactgcactccagcctggggaacaaagcaagactccttctcaaaaaaataaaataaaaataaataaataaagaggaaaaagaatctgcccccaatccatcagaaaggatggctctcagtggcaaacctggtgccatgtgtgtcagataaactattgtgctttgaaataatctcaggcagggtgcagtggctcacgcctgtaatcccagcactttgggaggctgaggtgggtggatcacctgaggtcaggagattgagaccagcctggcctacatggtgaaaccccgtctctactaaaaatacaaaaattaggtgggcacagtggcatgcacctgtaatcccagctactcaggaggctgaggcaggaaaatcgcttgaacccaggaggcagaggtcrcggtgagccaagattgcaccactgccctccagcctgggggacaagagtgaaactccgtctcaaaaaaaagaaagaaagaaagaaagaatctcactcctctgcagtctccctaattcaaggaaaatcccaatggactaaactccgttaagactggaagagacaggacaggcgacctgggaggcctctcagt

SEQ ID NO: 6881 - DNA, 789 bp, Homo sapiens
agggttacagtgagctgtgattgtgccacagcaggccagcctgggcaacagagtgacatcctgtttttttttgttgktgttgttgtcgtcgtttttgttttttaaagcatctattttctggacatctgggtatgtggaaataattgttttctggatcaatgatgaatatccctgtaatatttgtgttatagctatatgtttgtgtgtgtactagcatcactttctttttactctctttatcatgatagcgtttcccatcctcacccttggtcatcaggcaacaaactagctcaaagcaccacaaggccatggttggaaaacagagaactgaagtgatttcagggatcaggagctacttcagtagtctatgatttatgtacatgaacaattccagatctcgggtatatttagagatgagggacactggccagacactatggtagcatttcttcttataatttgaattccaactcatatgacaaagaatgatgtttttccttgtcagtgcattgccatgctcaatgtgacagctggctcctgctagtgggcagaggcagggctatggctcagccccactggtgggtgtgactactgctacacagtcccacctggttcagtgaaggggcaaataccaggatgtttagctctacaggtgcttgtgtcattcttcatgtatttcctgctgtctaaccagttggtcatttaaagtttataaatctaactccaaggtggagacaagttggatggaagattgtgtgtttaggaagaatatgcctaagggacttttaa

SEQ ID NO: 6882 - DNA, 789 bp, Homo sapiens
agggttacagtgagctgtgattgtgccacagcaggccagcctgggcaacagagtgacatcctgtttttttttgttgttgttgttgtcgtcgtttttgttttttaaagcatctattttctggacatctgggtatgtggaaataattgttttctggatcaatgatgaatatccctgtaatatttgtgttatagctatatgtttgtgtgtgtactagcatcactttctttttactctctttatcatgatagcgtttcccatcctcacccttggtcatcaggcaacaaactagctcaaagcaccacaaggccatggttggaaaacagagaactgaagtgatttcagggatcaggagctacttcagtagtctatgatttatgtacatgaacaattccagatctcgggtatatttagagatgagggacactggccagacactatggtagcatttcttcttataatttgaattccaactcatatgacaaagaatgatgtttttccttgtcagtgcattgccatgctcaatgtgacagctggctcctgctagtgggcagaggcagggctatggctcagccccactggtgggtgtgactactgctacacagtcccacctggttcagtgaaggggcaaataccaggatgtttagctctacaggtgcttgtgtcattcttcatgtatttcctgctgtctaaccagttggtcatttaaagtttataaatctaactccaaggkggagacaagttggatggaagattgtgtgtttaggaagaatatgcctaagggacttttaa

SEQ ID NO: 6883 - DNA, 802 bp, Homo sapiens
actcagcccccttagctgactactggtgcttaaaacggtttttgacaaacgccagagtttcacaaatatagaagtagcagttatagaggtggttttgcaagtcccttggaacattcatgcaggtctgcagtcactcttaatttgaatgagaaagaagatggtagaaactatttttattttctcctgggagcaagagaaaaggaaggctagaactctgtactatgtaattttaaaaaaagaaaaaaatcggactccattgagattcyttcttgtttactttttgttttactctctctgtctcctagtatgtttgactaatgtaagtcttcccccaggaatatgagaatatgtggtaccgtccgcctcataaccttcctggatatttttataatttatcatcagctgacactgcttgggtagaatattcttaccactccctctggctgctggaagtctgaaattacatctttgtctttgaagtcaggcatactgttagcgttgctatggtgacagggtgggtaatggcctccgcagacaggagattggtatttagcgtttaaacactgctgtacacaaggccttgatttttagagtggttactgaactatccccttttagtaaatgtttaaaaattacatttttacatggtcttactagattaatagtcatggtttatttcattttaactgcaaggataaaagcattattccattaaatgggcagcttttttttctcttttggtttatgcattattaacacaggctttcctgttttgcttgtaacattttataggctttttcaa

SEQ ID NO: 6884 - DNA, 802 bp, Homo sapiens
actcagcccccttagctgactactggtgcttaaaacggtttttgacaaacgccagagtttcacaaatatagaagtagcagttatagaggtggttttgcaagtcccttggaacattcatgcaggtctgcagtcactcttaatttgaatgagaaagaagatggtagaaactatttttattttctcctgggagcaagagaaaaggaaggctagaactctgtactatgtaattttaaaaaaagaaaaaaatcggactccattgagattctttcttgtttactttttgttttactctctctgtctcctagtatgtttgactaatgtaagtcttcccccaggaatatgagaatatgtggtaccgtccgcctcataaccttcctggatatttttataatttrtcatcagctgacactgcttgggtagaatattcttaccactccctctggctgctggaagtctgaaattacatctttgtctttgaagtcaggcatactgttagcgttgctatggtgacagggtgggtaatggcctccgcagacaggagattggtatttagcgtttaaacactgctgtacacaaggccttgatttttagagtggttactgaactatccccttttagtaaatgtttaaaaattacatttttacatggtcttactagattaatagtcatggtttatttcattttaactgcaaggataaaagcattattccattaaatgggcagcttttttttctcttttggtttatgcattattaacacaggctttcctgttttgcttgtaacattttataggctttttcaa

SEQ ID NO: 6885 - DNA, 766 bp, Homo sapiens
gatgaggactaacaaagtgtaacgaatgatcaaagcgacagttacaacagcacgagtgcccagtgattgatctggatgacataataatgataaccaatgaggtgaggcaggcggtggtcccctccaggtaaggatggcagtgggcctggactggtcaggactttactctgtttagggaaaagaaggtcacagggtggaagcaagccacgtggaaaggaaagaaggaagcactcacacccaaagcctttggatgggaggagaacggggtagccatggctgaaaatgagattcctattcaatgacagagataaagattactggtcctggaatatcgctaacacaactcttagggtactgcataaaagcatttattatgaagacaactcagctgtctgtaaataattgagatgaaaagagggctcattttaaagtgacttttgatagtcatgttttctgaatagcacaggaatgacctctttaaaaaccaacagaaakaagctcttgaggagatgtttgcatatccatgttcatagcagcaccattcacaatagcaatgaggtgaaagcaacccaaatttccttccaccaatgaatgaataaacaaaattttgtatatgcatacaatagaatattattcagccctaaaaatggaagaaatcccatcatatgctacaaagtggataaaccttaaggacacgatgctaagtgaaatgagccaatcacaagaagacaattactacatggctacatttaaatgagatatctaa

SEQ ID NO: 6886 - DNA, 810 bp, Homo sapiens
cagcctctggatatgggctgtgcagtcaggacagcttcagtgccagtcttggctccacttaccagctggtgaccctggatatgtcacttaagtactctgagcctcagtttccccatatagcagctagaagcagcacggcatcatgcttaggagctagactgcctgggttcaaatctcagctctgccacttactgctgtgtgaccttaggtcagttactggacctctctgtgatgaacatacatcacctataaagtggaaataatggtattacctatttcatagaactgttataaaacaagtgaggtaatgcatataaagacaacatccggtacctagtgcttagtaaatgttgatwatttttattgtaacccgctcacaatgtttcttggagggttaaagctgggaatagagcccaccctgaggcatcagtccctgctacacccatatccatgtgcttctcaggactcctgtccctgggccccatgcccatcaccaggcccttggtaggagcagcgtgcatggccactggctggaaccatcaggagagggtcagtacttgatgttgtcaggattcacgaccaggctgggtggccatcagagaccctgggagcactttgtcccagccatccccagccccagatgtgcctctcaagtgctggcaggggacagatgtcattcacatatttaaatctcacccgacctcgtggtacagagcatctgtgggccatgcttgtgtcagccactgcctttgacggatgaggaaactgaagctcagagaagagaagtggcttacccaaagccacacagtt

SEQ ID NO: 6887 - DNA, 810 bp, Homo sapiens
cagcctctggatatgggctgtgcagtcaggacagcttcagtgccagtcttggctccacttaccagctggtgaccctggatatgtcacttaagtactctgagcctcagtttccccatatagcagctagaagcagcacggcatcatgcttaggagctagactgcctgggttcaaatctcagctctgccacttactgctgtgtgaccttaggtcagttactggacctctctgtgatgaacatacatcacctataaagtggaaataatggtattacctatttcatagaactgttataaaacaagtgaggtaatgcatataaagacaacatccggtacctagtgcttagtaaatgttgattatttttattgtaacccgctcacaatgtttcttggagggttaaagctgggaatagagcccaccctgaggcatcagtccctgctacacccatatccatgtgcttctcaggrctcctgtccctgggccccatgcccatcaccaggcccttggtaggagcagcgtgcatggccactggctggaaccatcaggagagggtcagtacttgatgttgtcaggattcacgaccaggctgggtggccatcagagaccctgggagcactttgtcccagccatccccagccccagatgtgcctctcaagtgctggcaggggacagatgtcattcacatatttaaatctcacccgacctcgtggtacagagcatctgtgggccatgcttgtgtcagccactgcctttgacggatgaggaaactgaagctcagagaagagaagtggcttacccaaagccacacagtt

SEQ ID NO: 6888 - DNA, 849 bp, Homo sapiens
cacaacccccacagctggagccacagcccccacagccggagccacagcctctggagcagccacagcagcccatggttctggtggattgagggtggagcaggtagaggagcaggtgagagggaggtgcaggtgtggagctccctgagcctgggctctttatatacctgtccagatgtcaggcatgacacagggtccctttcttgtgactgtttacactatttttccagagctctatttttttcctctttgctagtgacttccttctggctcagttgagcatctactttctttgttttctaaatttgtctttttccccatttgttttggcccctacaattaaaacctcagctccaggctgtctggttcttcctgcaaagctccagggtgctggtcacctgctctctgctgaccacatgtgaccaatgggcaacagcctctgcccacgtgctctaatctttcctgtgttgactccctcaataatattaattttacatttttaratttcaaaattatccacgatctttatactcatgccagtctcagctttccgggtgtgttagaccattctttgcattgctctaaagaaatacttgaggctgggtaatttataaaggaaagaggttagaatggctcatggttctgcaggctgcacaagcatggcacccacctctgctcagcttctggggaggccctcagggagttttcctcacggtggaaggcgaagcaggaacaggcacaccacatggtgagagtgggagcaaggggtgaggaggagccacacacttgtgaacaaccagatctgagtgaacacactcatcgccaagggggtggcactaagtcactcatgag

SEQ ID NO: 6889 - DNA, 528 bp, Homo sapiens
taggaaaaatccgggagtaatatcaccccactatcgccccctggatatgaccatccacatcgcggggggcacccgcccccctgcgatgggggtcctaagagccggagggggagaggggctggctcttactccctacattgcgggtggtgcctcacccccctgcactattcacaatagcaaagacttggaaccaacccaaatgtccttcaatgatagactggattaagaaaatgtggcacatatacactgtggaatactatgcagccataaaaaggatgagttcatgtcctttgtaaggacatggatgaagctggaaaccgtcattctcagcaagctatcacaggracaaaaaaagcaaacgcctcatgttctccctcataggtgagaattgaacaatgagaacacttggacacaggaaggggaacatcacatactggggcctgtcatggggtggggagaggggagagggataggattaaggatatatacctaatgtaaatgacgagttaatgggtacagcggtgttgg

SEQ ID NO: 6890 - DNA, 821 bp, Homo sapiens
tccctccctgggkcgctgagagctaattccacactcaagccatgatccccaggcccgcctaagaagcggcgccttctaatcatgccaaatcatcaggctgattctgcgacatcaactgttacccattagggaacaggctgacaacaagaaatgcatttcacttccagtcttggccctccctggacttgtagtccaaggaagctccagtgatcctgctggggacacgggcctcctgccagctcttaagagcttctgccagggtttctctccccaaaggaaaaagtgtctgggagggcctctgaggaaggggaaagggtgaaggacactagctgggagtcagtccaaattggctctgccccatgtgaaagagcctgatacattcaaggtcattgatccgaatttgtccccgcaaagcagaacaaaatgagcagagacacacactcagtagcaagtctaaggggaaaaaaaatatcctgtaaatctgtccatgttgttttcttttaagatgcggtagctaatgttggtgtcagaaaggggcccagctgtttatggtgcttacctaaacagcctgcctgactttaaagtcatttctggctgcttctgccaacccaagtactccagtccacctttttgtgtcattcccatcagaaaaatcacaccggtctgatgctcactctggcgtgctggcctcccgtgaaatgctgtgatcgagggtctccagtgggactcagagactccattcctctgcccctcccccaccatcctcctccacaccatctacccacccactgctgggtgcgatttataagcaggggaatccc

SEQ ID NO: 6891 - DNA, 876 bp, Homo sapiens
ctcattgtcaaatctaccccccccaccagtactgtccagccagagaatggaatattcccaggactctatctctatataatctgaggctttagttgctgaaaatagttgctaaaattattttttgtttgtttcgttcttttaatacctgagaacagaaataggaagaaatacccaagtgaattgtcttagttttagatataattctgaatctgtttaaagctggactctagcgcacagtttctatcacacaatttgtagctgacgatgcacaattttacaaacggatagatacgctatgcagttcacttttcaatcacttgtcttcactagggcaagtttatgaaaacatgaggagacgtgtgccagagagaaaaattcttggctctaaaatgttctagaattgtagaattccaagctgcgtctgctcctaatctaggcctttccagtgactctttgtaccatctttatacactatacatacttaaagcaccatcaaatatgctgagtaatgtggactaagtgctttttcacacatctttgagtgactacagagcttctgastctgtctcaaagcaaacaccttcagaggcacccagtaaatggggcttagctacactcctaaatgtgatatacaatgtctgtaaaatccaaagaccttcaccaaacactgatcctctttcatgaatataggatgtgaaaggtgcaaaaactcatcctttatcatagaaagcatatcccaccatattacagactatttgaattttaaagatttcaagatttcgaataaccatttaatctctgctaattttatctgtccacctctggcacacattttctttctatattgtttaggatatttgatactccatactcact

SEQ ID NO: 6892 - DNA, 578 bp, Homo sapiens
ctcacttgacctctgaagtacctctaacttcattataatctaattcccatactaaatgacactcccacagcaccatgacagttgacaatcaccatgacaatgaccagaagaaaccataaaaggacataaaggaaggcagtactccttttttgaggagttttccgcctgttcccagaaaagacatgaatattcctcccctggcttctaatgcccaaaactttcattaaatataccctgtatcggccgggcgcggtggctcatgcstgtaatcccagcactttgggaggtcgaggcaggtagatcatgaggtcaggagatcgagaccaccctggctaatgcagtgaaaccctgtctctactaaaaaaaatatataaaaaaaattagctgggcttgctggcgggcacctgtagtcccagctacttgggaggttgaggcaggagaatggcatgaacctgggaggcggagcttgcggtgagccgagattgcaccactgcactccagcctgggagacagagcgagactctgtctcaagaaaaaaaaaaaaaaaaaaaatttatatctatatatatatatatata

SEQ ID NO: 6893 - DNA, 578 bp, Homo sapiens
ctcacttgacctctgaagtacctctaacttcattataatctaattcccatactaaatgacactcccacagcaccatgacagttgacaatcaccatgacaatgaccagaagaaaccataaaaggacataaaggaaggcagtactccttttttgaggagttttccgcctgttcccagaaaagacatgaatattcctcccctggcttctaatgcccaaaactttcattaaatataccctgtatcggccgggcgcggtggctcatgcctgtaatcccagcactttgggaggtcgaggcaggyagatcatgaggtcaggagatcgagaccaccctggctaatgcagtgaaaccctgtctctactaaaaaaaatatataaaaaaaattagctgggcttgctggcgggcacctgtagtcccagctacttgggaggttgaggcaggagaatggcatgaacctgggaggcggagcttgcggtgagccgagattgcaccactgcactccagcctgggagacagagcgagactctgtctcaagaaaaaaaaaaaaaaaaaaaatttatatctatatatatatatatata

SEQ ID NO: 6894 - DNA, 744 bp, Homo sapiens
  misc_feature (1)...(744): n = A,T,C or G
tnnnnnnnnnnnnnnnnnnnnnnnnnnnnnnnnnnnnnnnnnnnnnnnnnnnnnnnnnnnnnnnnnnnnnnnnnnnnnnnnnnnnnnnnnnnnnnnnnnnnacaaacaaatgaacaaatggacaaacaaactttcatggaaactgggactttggcttcaaaagtaattttgaactaaactcttctagtaatttatcactgaagtaggagtatgttcactctattgactgaccttttaattaaatgttgtacctggctagctatattttaagaatttggcattgactttggacaaccatgggtaatctatccaaatgagatttacttgggtcttccccacagaagaaggtttagggcaccttctaatttgttaaattatgagtaaggaatccatttgatgggtggaaccagggccaccttcactgtttgagaaaggttaagtgatatttaccagcacattttcttgaatgttcgtgtcaagaaatataaaaggaaaagtgatctacattcatgtagaatgattgggccaggttatgtcaagaggagaatgaatrcactaaagacccgaatgaaagtttcccttaaggctggattctgaaagatgcactgaatataaaatgtttgaataaaggaagaacaggaagagtgttaagtatttactgctagcaacacttagcttttaatcaagagctcttttcctaatactatacgaatgattaactttgataatagaagtgtaaggatc

SEQ ID NO: 6895 - DNA, 686 bp, Homo sapiens
atattcagtaaatattcatataattattcagtaattattcattgaccaattcataccaggcattttgctcaaaactgtccacatatttggacatcatatcttcatcataatccttaaggtaatgctattatccataagaatcagctaagaaacctgaacaagagggatagctaatcatgtatttggccatatttctactttttggtttttgtgatgctggaagaatgaccagaatgagtcacgggaagagtattccttcctgtattattttccaggacagaggtgtgccctyccagagtactgggaccaaaattcagaagtgtctgcaaccttgctttaacagtatgggaaataacctctatcacctggaatttccctggaactttggaatatgcaagagaagtatgagacctgggtcttccctttgctgtgtttaattcactcttctatggaataccaatgattctcactaagacttttgcctctttataatcacaatttatgtttcatgaagaagattttactgttagctctatttagaaagaataaatataagctatggtttaggttttatgccctggacttaatatttttatgatttctgttttgagattaaatcctcatgtaaatagaaaaatacttgttattacttataagagcaaattagttattggtttgagtttttg

SEQ ID NO: 6896 - DNA, 686 bp, Homo sapiens
atattcagtaaatattcatataattattcagtaattattcattgaccaattcataccaggcattttgctcaaaactgtccacatatttggacatcatatcttcatcataatccttaaggtaatgctattatccataagaatcagctaagaaacctgaacaagagggatagctaatcatgtatttggccatatttctactttttggtttttgtgatgctggaagaatgaccagaatgagtcacgggaagagtattccttcctgtattattttccaggacagaggtgtgcccttcyagagtactgggaccaaaattcagaagtgtctgcaaccttgctttaacagtatgggaaataacctctatcacctggaatttccctggaactttggaatatgcaagagaagtatgagacctgggtcttccctttgctgtgtttaattcactcttctatggaataccaatgattctcactaagacttttgcctctttataatcacaatttatgtttcatgaagaagattttactgttagctctatttagaaagaataaatataagctatggtttaggttttatgccctggacttaatatttttatgatttctgttttgagattaaatcctcatgtaaatagaaaaatacttgttattacttataagagcaaattagttattggtttgagtttttg

SEQ ID NO: 6897 - DNA, 816 bp, Homo sapiens
atgtgttaaaatcctggctgtcctacctgctagctgtrggaacttgaggaaagcgctcggacttctctggtcctcagtttctctatattgtaaaatggaaattaatcataactacttcctgagggtgctggcagcagtaaacatgataaagtatggaaagcacacatgagcgcacatacacacaccacaccacaccacacacaccacaccacacaccacacacccagccttcctaggaaacttctattcatgcttcagccatcatttcacaagtgccacttcttcaggaaagcctttcctaaagatcaccctctctgacttcagcaggcctccctgctatattcaagcaccatgtattttcctttcgtaagtacacatcatcaatttgaattttgtgttcatttgcgcatcatttatttatgttaatctcacccactacacaccatcagttccatgagaacagggtctgcggtgacctcccacatttttctagcacttaacacaaatcttggcacacagaagataagtattcaacaaaagaaaagcatttaccaaaagctgacaatgcgccaggacctccgtaaataagagtttggcattgtgttatgtgcttctgcaggagtgagtctcgcctttaaaaaccttagagtctaacgggaaacacaacacatacagaagtcaccatctgacactgcagacggtcagcaatgcctagacagagtgccctgtgagttctgagaaggtggagatcaactgactcttgatgatgacaatccaaaaagactttacaaaggagcagtggcttaagggtaccca

SEQ ID NO: 6898 - DNA, 711 bp, Homo sapiens
gttagcaaagatcataaagctcagagtgaaaacagattggagggaaccaggggaccacatgggcgtaccgggtggcacaggtgggagagttgggggtgttggtagagggagagaggtgatggactggccggggacttaggactccatgattgactgaaggtgggggggtacaggaacagcgagggtggtgctaagaagtttctagcttgagcgatgagggaagagagtggattcatggaggccaaagcaggtgtgtgctggagtgaatgccataggtttgctttgggatatgctgagcttgagggccttcgcagcctctaggccaccagacacttgggtctggagctcaaagatgctcctttatgagtcccctgcacatgggagctaattgcaggtgaactgtggacctcgcactgccagggagaggcgcagggcagagggccccagaggacaccatgggaatttcaacagatcctgcccaggctgaagagaaggagccactggagggggctggttctggcttcttttatctctataacagggtaacagcttgaaaaaaataccgatgtccttttctattttgcatgcaagtggcctgccatcaactgatgagmttcagcacctcagggacttaatgcaatagaagcttacttccacatgaggttggcagaagtgtgcctgatgggtggggacctctgtgaagccattcag

SEQ ID NO: 6899 - DNA, 711 bp, Homo sapiens
gttagcaaagatcataaagctcagagtgaaaacagattggagggaaccaggggaccacatgggcgtaccgggtggcacaggtgggagagttgggggtgttggtagagggagagaggtgatggactggccggggacttaggactccatgattgactgaaggtgggggggtacaggaacagcgagggtggtgctaagaagtttctagcttgagcgatgagggaagagagtggattcatggaggccaaagcaggtgtgtgctggagtgaatgccataggtttgctttgggatatgctgagcttgagggccttcgcagcctctaggccaccagacacttgggtctggagctcaaagatgctcctttatgagtcccctgcacatgggagctaattgcaggtgaactgtggacctcgcactgccagggagaggcgcagggcagagggccccagaggacaccatgggaatttcaacagatcctgcccaggctgaagagaaggagccactggagggggctggttctggcttcttttatctctataacagggtaacagcttgaaaaaaataccgatgtccttttctattttgcatgcaagtggcctgccatcaactgatgagcttcagcacctcagggacttaatgcaatagaagcttacttccacatgaggttggcagaagtgtgcctgatgrgtggggacctctgtgaagccattcag

SEQ ID NO: 6900 - DNA, 1368 bp, Homo sapiens
ataggtaggtgaagagatggccaagtgactgcctcaagtaaatttctcattttactacccactacccaatgaatctgaacaagttactgaaaatgtgcaagcttcagttttcctctttgtaaaatgaggatagatacaatgcctaccttataggattttgtaaaattttaggtcatctatgttaacctcatagtacaatgcatgacatgtaataattgctcaatacacactaataattactagttttactaatactgtgatccttagcttttccaccttcatctctctcccatctgtgtcccattttatcacattgctttccagagtcgtgatgattactgaatatgagactgctagtttgaactgcccagtgcatagcagtggagctattgcctaagcttatgttaatctagcatcagagccaactatcatttgccttattgtttatcaaatatgtctcattgtaaattcttattgagcttaaaattcaattaaaacccctcatggcacgcatctgctgacctacaactgggtggtgaatatagacatttgcatttacctgtctggaacttggtcattttcgtttgggcctgtcgtgtcagcttgtccgagctctcttggatcctcttttcaacatattgccataataaattcttcctctgaggtttgtgtcacagacacatttgatcagcacatcggtggcatcctcattaaagtcagtggtctaaatagtatagcacagagagcatcacagagcctatgacctgcagcttccttgtaatttgwtatttgctgttctgtcttccatgtgatttgttctaattgatgtttaagaaccagatcatgtttatttttctgtttaagaaccagaccattgccttcttcaaaataattctagtcaaataaaaaaattatttttatgcctactgtgtgtaagtagcttgcctagataccgatgaaccatgtgacagaagcttgccttgatggtgggcaatgaggaaatcgggcatggatggctaagaaatcaaagtgccgttgtaaatatggagcagatttgtagtttggcaggatataaacccgtgttgggaaactcccaatgagaggtcaaaattgaaatggggctgtctgaaattccattttgttcatctagataacctggataaatgggctaaattggaaatttgagtcttaaaatcatttttttgagatttctcctattcattctattgacttactctccattttaaagtcttttgtcctaatcatttaccctatatctctctgttctatgcctattttatttttctttatgaaaatgggtgaaagcaggaattttgctagttttctaattatcacagcatataaatt

SEQ ID NO: 6901 - DNA, 743 bp, Homo sapiens
ggatccaaagttttcccctctgttatgagcatcttaaaattctttcttagatcattcaaaaatatgtagtcaacacagcataaataaagcagtgaatgagtcataacttaggacaagttcaggtttcataattaagggatatgtaatcatctggcctgcatccctctcagattattggccataaatcaaaaaaagaatgmtgtttcttatgtgtctttataagaccattgtataacaactttttggcggccagaagtattcaaccaactacaacattttaaaatatttcttcacagtgttctaaacctcaatcctcagtgattactgtatcccaaaaatcaagtcagtaatatgtttgtcacctgacacattctgtgtccattcacttatgtattttctgtattgcacaaggcacttttggttgaaaataagaaatccacccccaactttgctccttaaagggtttacactggaacaaacaactgcaattcccagtgataaggacaagctaggaaaagaatggatttaataatacaaaataaagtattcaggttccgtctttccctctgtcttttggttcaggttgttgctgtcagcagtctttgttagaaatgatctatgtcatgaagaattgagttagagatctgtgtttaacacattcacaacttaaccgtcagtcttagtccatttgtgttgctaaaaggaatacctgaggctgggtaatttatgtacaagaagagatt

SEQ ID NO: 6902 - DNA, 743 bp, Homo sapiens
ggatccaaagttttcccctctgttatgagcatcttaaaattctttcttagatcattcaaaaatatgtagtcaacacagcataaataaagcagtgaatgagtcataacttaggacaagttcaggtttcataattaagggatatgtaatcatctggcctgcatccctctcagattattggccataaatcaaaaaaagaatgctgtttcttatgtgtctttataagaccattgtataacaactttttggcggccagaagtattcaaccaactacaacattttaaaatatttcttcacagtgttctaaacctcaatcctcagtgattactgtatcccaaaaatcaagtcagtaatatgtttgtcacctgacacattctgtgtccattcacttatgtattttctgtattgcacaaggcacttttggttgaaaataagaaatccacccccaactttgctccttaaagggtttacactggaacaaacaactgcaattcccagtgataaggacaagctaggaaaagaatggatttaataatacaaaataaagtattcaggttcygtctttccctctgtcttttggttcaggttgttgctgtcagcagtctttgttagaaatgatctatgtcatgaagaattgagttagagatctgtgtttaacacattcacaacttaaccgtcagtcttagtccatttgtgttgctaaaaggaatacctgaggctgggtaatttatgtacaagaagagatt

SEQ ID NO: 6903 - DNA, 743 bp, Homo sapiens
ggatccaaagttttcccctctgttatgagcatcttaaaattctttcttagatcattcaaaaatatgtagtcaacacagcataaataaagcagtgaatgagtcataacttaggacaagttcaggtttcataattaagggatatgtaatcatctggcctgcatccctctcagattattggccataaatcaaaaaaagaatgctgtttcttatgtgtctttataagaccattgtataacaactttttggcggccagaagtattcaaccaactacaacattttaaaatatttcttcacagtgttctaaacctcaatcctcagtgattactgtatcccaaaaatcaagtcagtaatatgtttgtcacctgacacattctgtgtccattcacttatgtattttctgtattgcacaaggcacttttggttgaaaataagaaatccacccccaactttgctccttaaagggtttacactggaacaaacaactgcaattcccagtgataaggacaagctaggaaaagaatggatttaataatacaaaataaagtattcaggttccgtctttccctctgtcttttggttcaggttkttgctgtcagcagtctttgttagaaatgatctatgtcatgaagaattgagttagagatctgtgtttaacacattcacaacttaaccgtcagtcttagtccatttgtgttgctaaaaggaatacctgaggctgggtaatttatgtacaagaagagatt

SEQ ID NO: 6904 - DNA, 1617 bp, Homo sapiens
ggcctggtcgtgagccacttgaacctcgggaatgggtgtggcaggagagggtgggctggagtcacaggggtctccagagaggaggaggcacaggatggccgagggtcctgctgggctgtttactggagcataaagacgctcataggctgaaggacaggggaggactgggcacagtgtcactctagccattgggagccatggcaggcttttaagctgggtcatggtacaagcagcgttccagggatgggctttatgagaccaaatggtttcctgtcattcatttatttgacaaatgtgctcatcagggcatcccccaccctggtaccccatagtagctgcacacagcaggaaccccagaaaagaccttgccccttctgtccctgcagatgacgtccgcggctcccacggccggcaggtctgccgtcggcacgagctctacgtcagcttccaggaccttggctggctggtaattgctgactctccttgtttctgaaatgacaatcaccacctgtagatcagaagtgaatctgcagggaggacatagaatcatggtgacttcaattttcttatgtatttttttcttctgtgttttccaagttttctaaagtgagaatatggtgagaaagggttttgttgttgttgttgtgttttttgttttttttaaaaccatgaaaatgaagactgaatcaaccaactaagctgtcagcattgccgcagggtaactgagacctccctgcattggctacgactgcagctctgggaggtgtgggcaggggagggccggctggggaggggacacaaagtgaagatgggggttgttgggcctgagctcctgcccagccttttccgccgggggttcctgggtggattcaagcctcttgggggagacggccctgcagggctggaggatgggtttgggccctgaggctcagggaggagcacatggatgggactcaccttctcccttgccccccaggactgggtcatcgccccccaaggctactcagcctattactgtgagggggagtgctccttcccgctggactcctgcatgaacgccaccaaccacgccatcctgcagtccctggtcagtaccgtgcccatcctgcccagccccctggggtgggaggccctgcagagaggggtctggtccagccagccgggagggcagtgaggccacctgctccatgtctcgggggctttgtctgcacagagtcagtaacgtcgctaacttcccacagctctgcaggaactggtcctcatacagccacactactacacatagacccacacccaaacacggacacacgtgaacagtcgcgtatgcatgcctgttctatgcactgaacaaactcctgtgggacacttacacacctgcgtgcggcgctcagaggcacagcacatgaaacagatgtgtacactgtgtgggggctgtgtgatcttaacacacgggcccccgagtacgctggcaagtctgaccgcccgtgatatgtgygcacagtgtgtggggtgtgcgtgtgcactcacccacctgtgccgcaccacaggcaggaagcttctagatggtgtggctctcaaccttttggctttttcccgcagtttctctcttggctgtct

SEQ ID NO: 6905 - DNA, 820 bp, Homo sapiens
aacttacactttgatgtctaagtctctttctttgcccgtcagaacaaaagtcactgccatgataactaggctttgctagtgcaatgcagtatattttaaattcttacaaatattttagacttgtttccacagaggcaccattgatatgtacgtaaaacagggcctttcagcaaagtgttaagctgatcatctgcaggggtgaacctacaacaatgaaatgacacgtgtgctcgtggattagacggcagtgaatgtggtttctcttgagaacttcgttctagtggaaaaatgaagcatctctccctcgtgacacggttctcaccacagcggttctggcccctcctgttagtgatgagcaggttgtttaaaagaaaaagaaaaaatatggcttcytaagcacataaaccgcacgttgtaaaaaagcccagactatcccagtgagattataatgaacgtcttatttccaattaagtttcacttcatataattggattttatgcttcagaatgatgttcctaattatgggtgttatgtctgtgagacaactgttaaaagaaaaaccttggacaaggccaggcacggtggctcatgcctgtaatcctggcactctgggaggctgaggtgggaggactgcttgaacccaggagtttgagaccagcttggcaacacggcaaaaccctgtctctccaaaattttttttaaaaaagcattatcgtggtgtggtggtacacgcctgtagtcccagctacttgggaggctgagttgggaggatcgcctgagccagggaagtcgaggctgcagtgagctgtgattagtgcca

SEQ ID NO: 6906 - DNA, 943 bp, Homo sapiens
ccaacaaatctttctcttccaggtttttctcaggaagagaagcctactggaattacgtcaagctattctctgtatatatacaaggcagtagctctaagtagtgagaggagtggattgtggtggacacagagctgtgccctccaaatacttcttcattgtaggaattgtcaatttggctcctggaagtgtagcagacagcctacagctgtcagcaccttcacaggctgcttcagctacagaaagccactttgttcaagttcatgcatcttcctggggcagcttccatccagtcactaataaatgtgcgaatctaaaggyctagctgtcttggcgaaacttggagaactctggaaagccatagttgtgccagagctccctttgggggaaggttgagactgtccttagacctatatcacagtttaattcattttttgaccaatcctgcttccctttctttccttatacaagtattgatctcagtggcactccttaataaacatcctacattctgttctccatcccggtgtctgcttcccagggagcctaaatgtgacaactgtctactaagtggcaggatccatgcttggtgacttacatttgtcattgctgtcattccccactacaccttgtgagatgttttggatgatgtctactttttaagatttgaggtggggagcatcagaggttaattaacttgtccagggattgatcatttatagttctgactgatcccagaggtcatgtgtgtccagtctaccatgctagccacagctgttgtaggaaaataaacaaaacaaaacaaaaaacagacacgaataaccacttctcactatagaccagacattgtgttaggcacttgtacctacacacaacatcattcagttttcacagcaagccaattaaagtagaatgttagcctcatttttatgcatgtaaggtataa

SEQ ID NO: 6907 - DNA, 887 bp, Homo sapiens
agactagttctcaacaaacttgcttcctatcaacaggctagcacataaagcagatagttgaagggaaaccactcctcctggtacagccatcctgagtacccatgtccaatatgatcttattgaagttttccaggtctgataaatcctattcgcagatggtcattatttatgccaccaaaaacctataaattcatcttcatctctctgtattattattctcttactctagggtttatcctgaatgatgctagaggggcaagagagatatacttcactttagcataggagtgctatcatgcctgtgaagtaattcaggtttaacttgggatttactaccttgaaaggtaagtagatgggtaaatcatttacaaaaaagataaaaatgtaaacagaaagagacaggaytgacagattttatctgattcatggcaaggctatatctacgtatcatggaagggtcccaaaaaccaatggggataatgctgattcaacacataaaggatttgtttttcctccagctggctctgtaatcaggacaaggctatttcatgtcaccatatagccatacaaatcagccacatcccacagtctaatcagagaacaagtggtgcccagaccttcagatgataagatggccagtggtattcactatgacctcccccttgcctcccacatatgtttggagaactgaagctcccccagtcatttttctcctctatgagttgcatcccctagctttaggtttattcaatgagagccaatttgcatccaaatctgacttatatttctatcatttctttattggatttttagtttctgcttctgaatagtgaactgtatctgctgttgcaagctgataaatgacggggaaaaaatagatccataag

SEQ ID NO: 6908 - DNA, 887 bp, Homo sapiens
agactagttctcaacaaacttgcttcctatcaacaggctagcacataaagcagatagttgaagggaaaccactcctcctggtacagccatcctgagtacccatgtccaatatgatcttattgaagttttccaggtctgataaatcctattcgcagatggtcattatttatgccaccaaaaacctataaattcatcttcatctctctgtattattattctcttactctagggtttatcctgaatgatgctagaggggcaagagagatatacttcactttagcataggagtgctatcatgcctgtgaagtaattcaggtttaacttgggatttactaccttgaaaggtaagtagatgggtaaatcatttacaaaaaagataaaaatgtaaacagaaagagacaggactgacagattttatctgattcatggcaaggctatatctacgtatcatggaagggtcccaaaaaccaatggggataatgctgattcaacacataraggatttgtttttcctccagctggctctgtaatcaggacaaggctatttcatgtcaccatatagccatacaaatcagccacatcccacagtctaatcagagaacaagtggtgcccagaccttcagatgataagatggccagtggtattcactatgacctcccccttgcctcccacatatgtttggagaactgaagctcccccagtcatttttctcctctatgagttgcatcccctagctttaggtttattcaatgagagccaatttgcatccaaatctgacttatatttctatcatttctttattggatttttagtttctgcttctgaatagtgaactgtatctgctgttgcaagctgataaatgacggggaaaaaatagatccataag

SEQ ID NO: 6909 - DNA, 2139 bp, Homo sapiens
  misc_feature (1)...(2139): n = A,T,C or G
gcacctattttcccacctcttgaatcattgctggcacccccatggataatacgcagctgattgagtgtgtggccgactgcatctgtccttgcatgtttctgctccctcccttggaactgcactgctgccatgtgaacaagcctgagctagcctgctggatggtgagagacacaaggctgaaactccaccatcaccccagccaacagcctgctggcctccagatgtgtaagtgaggccatcgaagactagacagccccagacaacctgtcactgatgttagatgtctgagtgagcccagtggaggtcagctccgctggacccagatcagtggacatgcctaatttgagaaatagacttgagagcaataacaaaggcttgtcttaagcccccacatatcaaggtggtttcttatagtacaccttgctatctttcctggaaactgacctcaagtgacaccatccaacacacagggagacattttgaagcctccagagggttagggtcaacctggtcctctttttctccagcaacttggggcacacaccccaaatctgttttttgtttgtttgttgtgttgttttttttttttctgagacaaggtctcactctgttgtccatgctggagtgcagtggtgagatcatagctcactgcagcctcaaactactgggctcaagctatcctcccacctcagcctccagagtagatgggactacaggtgcgtgccaccgtacctggctaacttttaaatttgttttgtagagataggggtcttgctatgttgcccactctggtctcaaactcttgggctcaggtgatcctcccacctcagcctcccaaagtgctgggattacaagtgtgagccaccgcaaccagccccgaatcgttttttaaagacagaattataaagtgtgccccaatttttagatgatcaaattcctcttacatccttctcatctctgctttacttcttctagccctttcttctgccctaaaaagcaaaatgaaactgaatttaatttctcttccctggtctcagagtgtctgcattttgcttgcattgggatcctttcaactagcccagtgactggctctgagttcggtgtggcctgctgctcataactggctcctccatgacctccggcaaatgacttaatctctctgagcctcaacttttctcatctgtaaaatgggctgaggtgggaggattgcttgtgtccagaagtttgaggctgcagtgagctatgatcttgccactgcattccagcctgggtgacagaatgagaccccatcttcaaagataaaaagtaaacacaataagaaaccgcgagccagttgctcaggctaaggtctgacgcttaccagccacaggatattggccaggtcatttagaagtagtcagcttttagggcttttagagaggtgcttctcaaacttcaaagtgcacgatccttatgggatcttgttcaaatgcaaattctgattcactgtgtaggtgctatggtttgaatgatggtgtcccctccaaaattcttgttcagaattaatcatgccaggcacagcaggttcatgctctgtaatctcagcatnnnnnnnnnnnnnnnnnnnnnnnnnnnnnnnnnnnnnnnnnnnnnnnnnnnnnnnnnnnnnnnnnnnnnnnnnnnnnnnnnnnnnnnnnnnnnnnnnnnnagaccctgtctcaaaaaaaaaaaaaaaaagaaagaaaggaagaaagttaggaaaaaaggaaggaagggagggaggaaggaaaagaaatccatcctcactgcatatgctggcttacaggcccagcctgatcagccccygtcaaccgctccagcatcatcatctaccacaccaccctttgctccattgaacttcggccacactggctgttttaatgatctactgcggcaagacaaaccatcctgaaacctagtggcttgaaacagcaactgtggattattcctcatgattctgtgaattggtggagctcagctgggaggttcatctctgttctactctgatgttggtggaggtgactcgtggcctcatttggcctggacttttgcaggaactggagcaacctctctcacatggaggacacctggacatctctttctctccaccttgtctctgga

SEQ ID NO: 6910 - DNA, 2139 bp, Homo sapiens
  misc_feature (1)...(2139): n = A,T,C or G
gcacctattttcccacctcttgaatcattgctggcacccccatggataatacgcagctgattgagtgtgtggccgactgcatctgtccttgcatgtttctgctccctcccttggaactgcactgctgccatgtgaacaagcctgagctagcctgctggatggtgagagacacaaggctgaaactccaccatcaccccagccaacagcctgctggcctccagatgtgtaagtgaggccatcgaagactagacagccccagacaacctgtcactgatgttagatgtctgagtgagcccagtggaggtcagctccgctggacccagatcagtggacatgcctaatttgagaaatagacttgagagcaataacaaaggcttgtcttaagcccccacatatcaaggtggtttcttatagtacaccttgctatctttcctggaaactgacctcaagtgacaccatccaacacacagggagacattttgaagcctccagagggttagggtcaacctggtcctctttttctccagcaacttggggcacacaccccaaatctgttttttgtttgtttgttgtgttgttttttttttttctgagacaaggtctcactctgttgtccatgctggagtgcagtggtgagatcatagctcactgcagcctcaaactactgggctcaagctatcctcccacctcagcctccagagtagatgggactacaggtgcgtgccaccgtacctggctaacttttaaatttgttttgtagagataggggtcttgctatgttgcccactctggtctcaaactcttgggctcaggtgatcctcccacctcagcctcccaaagtgctgggattacaagtgtgagccaccgcaaccagccccgaatcgttttttaaagacagaattataaagtgtgccccaatttttagatgatcaaattcctcttacatccttctcatctctgctttacttcttctagccctttcttctgccctaaaaagcaaaatgaaactgaatttaatttctcttccctggtctcagagtgtctgcattttgcttgcattgggatcctttcaactagcccagtgactggctctgagttcggtgtggcctgctgctcataactggctcctccatgacctccggcaaatgacttaatctctctgagcctcaacttttctcatctgtaaaatgggctgaggtgggaggattgcttgtgtccagaagtttgaggctgcagtgagctatgatcttgccactgcattccagcctgggtgacagaatgagaccccatcttcaaagataaaaagtaaacacaataagaaaccgcgagccagttgctcaggctaaggtctgacgcttaccagccacaggatattggccaggtcatttagaagtagtcagcttttagggcttttagagaggtgcttctcaaacttcaaagtgcacgatccttatgggatcttgttcaaatgcaaattctgattcactgtgtaggtgctatggtttgaatgatggtgtcccctccaaaattcttgttcagaattaatcatgccaggcacagcaggttcatgctctgtaatctcagcatnnnnnnnnnnnnnnnnnnnnnnnnnnnnnnnnnnnnnnnnnnnnnnnnnnnnnnnnnnnnnnnnnnnnnnnnnnnnnnnnnnnnnnnnnnnnnnnnnnnnagaccctgtctcaaaaaaaaaaaaaaaaagaaagaaaggaagaaagttaggaaaaaaggaaggaagggagggaggaaggaaaagaaatccatcctcactgcatatgctggcttacaggcccagcctgatcagcccctgtcaaccgctccagcatcatcatctaccacaccaccctttgctccattgaacttcggccacactggctgttttaatgatctactgcggcaagacaaaccatcctgaaacctagtggcttgaaacagcaactgtggattattcctcatgattctgtgaattggtggagctcagctgggaggttcatctctgttctactctgatgttggtggaggtgactcgtggcctcatttggcytggacttttgcaggaactggagcaacctctctcacatggaggacacctggacatctctttctctccaccttgtctctgga

SEQ ID NO: 6911 - DNA, 781 bp, Homo sapiens
  misc_feature (1)...(781): n = A,T,C or G
ataaaacccatatcttctctgcaagcgtaaggtccctatcacaaaaaaactgcaacctcatatactaaaaggccacttcatgccaccttgagagacaggatttatctgaaacagagataaaattgcctaaaggaacagttttaatttcctgattagaccaaaatccataattatttatttcctcttcaactgtgagggaagagcagatgaatttataaaaattctgtttttctgaatgtatttaatacatgagtaagaattgnctttttttttttttttttttttttttttttggaaacagagtctgactctgtcgcccaggctggagtgcagtggcgcgatctcggctcactgcaagctccgccccctgggttcacgtcattcttctgcctcagcctcctgagtagctgggactacaggaacccaccaccacgcctggctaattttttgtattttttagtaaagacrgggtatcaccgtgtttgccaggatggtctcgatctcctgacctcgtgatccgcccgccttggcctttcaaagtgctgggattacaggcatgagccaccgcacccggccatgagtaagaaatttacctactatctttaggagcattgtctggcatctttaaaaacctctgtgaacatataacgaggccctgttgaaagtgatgattttatttatgagcatataactgcatccacagctgattacaaacctgtaatcttaattagagagccaaggtacattgggttcatggatgcaattccaagtgaaataaaga

SEQ ID NO: 6912 - DNA, 540 bp, Homo sapiens
tgcacccattaaccttctgaaaatacagacactatggcaaacaccaggactccaarcagaaagggggtccaggggagaaggcaggaggtgcctgtcttcagagttaacatttcgttgggatttatttagccataaaatgacttccagggaacaggaaacaggttgaatgaggctagagaacaagatgaggacattagaggcaaaacactccccaaagctgttctgagcatcctgagcattgctgtgtgatcagcacaaagaggaaggaatagcgaatggttaagaggatagactcaggagccagctggccttgggtggaacctgccttgctatgcctcaatttccttattcctataaaatggcgatgtagtactattcaattcttaagagttgttacctaatcagtatgccagttatcaatgctaaaaaaataaagcagctgaactgcccacacaaatcaggctccaactcttgccagcgacggtcaagattttggggctccaagtatgtgggcaggtccgtggctttcttccacattgt

SEQ ID NO: 6913 - DNA, 790 bp, Homo sapiens
tttgtagagacaaagtctcactatgttgcccaggctggtctcaaactcctgagctcaaggaatcctccctcctcagcctcccaaggtgttgggattacaggcatgagccatcgcacctgaccagttattttaaaatgtacaataagttattgttgactatagtcacccagttgtgctgtcaaatactcaatcttattctatctagttatatatttgtactgattacatggcatttttctcccctttgtggacctgcactttgtattacaattcttcatatataaccttatgcggagacctgtgtagcttcctgcttattcccttatgttacctagatcatcatgatgaatggaatgcctcccaatctaaagactgcaaagtgagaaaacaggtgactttaaagaatctatggtactattactgtcaccarctgatggcaacttttctctgttaggtattcactacagccttacactgtctgccactaaaaactaattgaagaagacatgagatatatcagtgtatttttagatgcgataaaatgaactagaattttttgtcacctgttagtcactcaaggactttggtggcaataggccactagaagcggggtctggggtgggggttggcagtgagggaacactgttgaagcccctggaagagtctggcttgtagttctggtttagacaggctgcacattaatcctgagaaaaaaacagaggccaagagggcaatcaaggaaggaaacaaaaaatagggcaggggagggcgatcaaagaaaggcccaggg

SEQ ID NO: 6914 - DNA, 790 bp, Homo sapiens
tttgtagagacaaagtctcactatgttgcccaggctggtctcaaactcctgagctcaaggaatcctccctcctcagcctcccaaggtgttgggattacaggcatgagccatcgcacctgaccagttattttaaaatgtacaataagttattgttgactatagtcacccagttgtgctgtcaaatactcaatcttattctatctagttatatatttgtactgattacatggcatttttctcccctttgtggacctgcactttgtattacaattcttcatatataaccttatgcggagacctgtgtagcttcctgcttattcccttatgttacctagatcatcatgatgaatggaatgcctcccaatctaaagactgcaaagtgagaaaacaggtgactttaaagaatctatggtactattactgtcaccaactgatggcaacttttctctgttaggtattcactacagccttacactgtctgccactaaaaactaattgaagaagacatgagatatatcagtgtatttttagawgcgataaaatgaactagaattttttgtcacctgttagtcactcaaggactttggtggcaataggccactagaagcggggtctggggtgggggttggcagtgagggaacactgttgaagcccctggaagagtctggcttgtagttctggtttagacaggctgcacattaatcctgagaaaaaaacagaggccaagagggcaatcaaggaaggaaacaaaaaatagggcaggggagggcgatcaaagaaaggcccaggg

SEQ ID NO: 6915 - DNA, 755 bp, Homo sapiens
ggtggcgacaggctggagggcaaggcagggcctgtggagggtggggtggtgggtggtggggtggtgggtagtgggtgggcccggtgtcctgacagggtggccccaggggctgggccagctgggtccaaggacttgagggcccctcagacattgcttgcttggagttcctagggtaaggacctgtgtacctggaggccaggaagcccgtgctgtggatggtctgatatttctccaggaagggctggcatggggagaagctccctgaggagtctttactggacccctcagctggcaccccccgcaagaaggtgccatccagagtctggcccttgctaggagctggggccagagagcagggtgggtcagctgagggcaacaggggcccagtcgccagagtccagtcaacatccagtggcctcttcactgctccttcccccagacaagttgagagcccatagcacagagggttgcggtagacaggtttgggtgctgccagtggtgggcctgggtaggagtgagcctggggactgaagggcaggagctcaacagggctggagtcctgcatcttctcagggccttctgctggcgagcggtagaacaggcagttggtcagcaggttgtctgcctgaagtgggggtcctgccataccggtagagtacaagggtgggtatggggtccaggacgccaactgctcagactcggccttaggagtaccygccatggggcaggagaagtaggaccccttgtaggtgcag

SEQ ID NO: 6916 - DNA, 747 bp, Homo sapiens
ctttgtgctgaaacagatttgcagtcctgccaaaccagacgatgctgctggcaggaagatgcacatggtctgatgttaatgcaagagtgagaaaacctctgtggcacagtcatgggaggtcagcccaaatgtagartttccttccttccttccttcctccctccctccctccctccctccctttttttactttctgtaattctaaagtggcaggaacgacttgactctttagaccatatatttttttcagaaatacatttctgaaaatatattctctgttttgtatgttttctctgttttgtctctgttttgtatgtttttcctgggtactacagatttctaaaaacattgaaagagtaaagccttttttggaagtccattcataagatgtccaagaagaattcatcacagaaacttcaacctattttttttaaaaagtagactccaacaactcccttcagatgggtattatcttgattttacagatgaagcttagaagagttaagcaatttgctcagggtcaatagccagcaaagcaacagcatcaaaacttagatccagttttgctgatgccaaaatgcatgctccattctataccattcaactaacctagctgtagcccctaattatgtgagatcagaaagctctagttacagtctttcatttttatttattatttatttatttatttatttatttatttgcactctgtcggtcaagctagagtgcaaagcgcgatctctgctc

SEQ ID NO: 6917 - DNA, 747 bp, Homo sapiens
ctttgtgctgaaacagatttgcagtcctgccaaaccagacgatgctgctggcaggaagatgcacatggtctgatgttaatgcaagagtgagaaaacctctgtggcacagtcatgggaggtcagcccaaatgtagagtttccttccttccttccttcctycctccctccctccctccctccctttttttactttctgtaattctaaagtggcaggaacgacttgactctttagaccatatatttttttcagaaatacatttctgaaaatatattctctgttttgtatgttttctctgttttgtctctgttttgtatgtttttcctgggtactacagatttctaaaaacattgaaagagtaaagccttttttggaagtccattcataagatgtccaagaagaattcatcacagaaacttcaacctattttttttaaaaagtagactccaacaactcccttcagatgggtattatcttgattttacagatgaagcttagaagagttaagcaatttgctcagggtcaatagccagcaaagcaacagcatcaaaacttagatccagttttgctgatgccaaaatgcatgctccattctataccattcaactaacctagctgtagcccctaattatgtgagatcagaaagctctagttacagtctttcatttttatttattatttatttatttatttatttatttatttgcactctgtcggtcaagctagagtgcaaagcgcgatctctgctc

SEQ ID NO: 6918 - DNA, 816 bp, Homo sapiens
gtccccttttatctctgggaggtctctccagcccagtcctcatcctgaagggctcagtcatatctaaacacctctgtgcctgtgcttcctggggcaagggtgctagaagcctgagccacagtgtgttaatttcctattgctgtagtgaaaattaaaataactttagtggctttattagctttagtggctaataaaacatagatttattatcttatatttctggagatcagaagcctcacaaaagactcagctaaaatcaaggcttcggcagagttgcattccttctggagactctaaggaagaatctagtttcttgtcttttctagcttctagagaccacctacattccatagctcatggccccttcctccatttcaaagctagcaaggtgaggctgaggccctatgctgccatctctcttattctctctcttccatttataaagaaccttgtgattacattgatttcacctggctagtccaggatactccttccatctcaagatcagcagattagcatccctaattccatctgcaaccttaattcatcttgccatgtaacctaacatattcataggtcctggggattagatggtagacacatttgggggccattattttgtataccatacacattcatccttcttccatgaggcagagttgtataggaccattgctgaaagtagtcctggtcacatgctggacttagggcagcaccacccttgaactgtctcctcctggtcattgataaatgatgatgatcagcctcccttggcagccttcccaggsatgtagtctaaatcagcttccagggatc

SEQ ID NO: 6919 - DNA, 515 bp, Homo sapiens
  misc_feature (1)...(515): n = A,T,C or G
tcccctggagccttcagagagagcagagctccgctgactcgttgttcttagacttctggactccagaaccgcgagacaaggcatctctgttgtttcagcctccactgtgtggtgctttgatagagcagccccaggaaaygcacacagtcactaagccctgttgccttggggtctggtggttctgtactgtggcccacgctagcccagcctccagcgtggacactcagcagctgagcccccagagctgaagcactgaaggccctgcaggtggctacggagacaggaagaggctgaaatggcagccctgaggtccaacagaagcagcttctccctgcaatatttgcaggctcccgtttcctgaatgctcgggagaccttcctgtcatgccagaagggaggctttgtcagaactgaannnnnnnnnnnnnnnnnnnnnnnnnnnnnnnnnnnnnnnnnnnnnnnnnnnnnnnnnnnnnnnnnnnnnnnnnnnnnnnnnnnnnnnnnnnnnnnnnnnng

SEQ ID NO: 6920 - DNA, 800 bp, Homo sapiens
agctaaaatacagattctgggacwcagcccagctcctagcaagctctcaagcccttgctgttcaggactatatcttgagtagcaagacagtaaactgcaccaaatgagataaactctgcttagaataaatacacagaaaacaaaaaagagagtgcatgaccaaaagatattgtaggattaaatgacataatacatgaaaaatacctaacttacttcaggaaaaaaagataggaagttaggaaggaagaaaattgaagaagaaagaaaaaaagagggaacaaaagaagagaagaaagcacaggaaatcacattaaaaagaccaataaaaatatgcttgggaagagagagagagagaaaaaaaaaaaagacaatccaaggggtgggggcggtggggaagacaatccaagggaaaaggactccctaaggagtgtttcattaaagatttgaagtagttgtccttctaaagattagaagtaattctgtgtagttgaacctgcctggatttgaaatccagctcagccactagttactatatgactttggccaattactcaatgtctctgagcttccatttctttgcccgaatcaaggggataaggatagcaacttcttaatttggtgttctgggaagttaagaaagattcttggagacatttaaaacagaaactggagcattaagtctatctgcaactcctttgctcataactttcaatggtttctcatatccctcagtacaaagcaaaatcccttgaatggcttccagaaccctacgtgaccaagctcactgctatttctccaaa

SEQ ID NO: 6921 - DNA, 770 bp, Homo sapiens
aatcataacagggcctaccaccgagggccactgtgaaggtggaaggagttagtatttgtaaatcatttactatgttacctaatttatagtgagcactcaagaaatgatacctgttgttattattattactaatcataataatcttgccaaatatatgttattactattcttgtttacaatggagaaaatggatggcctgagagataaagagattaattgactaataagcaacagagccaggattcacaatcaggtttttctggctctaaacttgttacctcccaatgaatagatcaggcctggacaaatgagggactaaatcatacctctgaagatcaatttgttaactgacagttawtataataagagatgtaagtgctaagccaccactgagctggtgccagcaggccagcacttgctttttcccaaaaagaaagtgcaaaaggcaacagggatggtgcttaaaaggctggagctgccttcaggaccacccagcaccccagcccttgcagattccccagaaagcactggacccagatgaggggacccagggtctcatcaggacttttcttctgacctttcaggtggctgtcattggtcccttcccctctctgaacttcagcctccacatggccaaggcagtgggcatggggagttctggtggaggtgatgtctgtggacctggcttgcttcagcaagctgggactccaggtccccactcattgctgccccatctcccaaccccaccttcccttcagtattcagaaggg

SEQ ID NO: 6922 - DNA, 627 bp, Homo sapiens
aatatttaaaagttaaatagctgattcataggatatgtacttttattagtcatttagtacgtgcttctaagttgcttttcataaacattgtaccagttgtacactgccaccattattttatcagagtgcttatcttaggtgctagatttgaatattatttaagaaacaaaacaaaatcaatttattttctagtaaggtcaaatacctttatacgtttatttcataagtttattggtgacatgggcatttctaattcatcttcttttggctatttatctttaatggtgattttttttttctttttttttttttttgagacagagtctcactctgtcgcccaggttggagtgaagtggcatcatcttsctcactgcattctctgcctcccaggttcaagcgattctcatggtctcaccgtgttgctcaagctggtctcgatctcctgagctcaggcaatccgcccacctcggcctgtcaaagtgctgggattacaggtgtgagccaccatgggtggcctctttaatatagatttataaggcccctttgttatatattttcaaaaattcaaattaaaactaaatccccaaatgtcccatttattaatgaagtattttgtcatatggatgt

SEQ ID NO: 6923 - DNA, 781 bp, Homo sapiens
aataatctatacagagtgcccactctttatttgcaggtttttaactcacacatcactttttattttttatcatacgaattaggtttactgttgtgcaaattgctttatccagttcacattcttacaatcatgagaagaatawgtatatccagaaaaatgctaaacatgtacaagttagtctttggattcattgtcactgaaatctcaccagcgctttccatgatccccttacaacactgcccttcctccatccccacgaaagtcaggcccttcccaccatgtgctggcatagaatcctgaatatgtcccttccagagcccttagaaatgacactgccatttgtatttttgtggttctctttctctctgatgaaacttgagtcctaaagaacagagactgaatctggtttgcgccgcatcttgtttagggccagataaacaggaggaaattagtgttcatgttgactgcatgtaggtttctgtgtgtaggtttctgtatgtaggtttctgtatgggggcatctgcgtgtgggcatctgcgagtgtgtatctgcatgtgggtatctgcatgtgtgtatctgcatgtgggtatctgcacgtgggtatccgtgtgtgggcatctgcatgtgggcatctgtattctgcatgtgggtatctgcatgtaggtatctgcatgttggcatctgtgtgtaggtgtctgtatgtgggcatctgcacgtcggtatctgcatgtaggtatctgcatgtcggcatctgtgtgtaggtgtctgtatgtgggcatct

SEQ ID NO: 6924 - DNA, 781 bp, Homo sapiens
aataatctatacagagtgcccactctttatttgcaggtttttaactcacacatcactttttattttttatcatacgaattaggtttactgttgtgcaaattgctttatccagttcacattcttacaatcatgagaagaataagtatatccagaaaaatgctaaacatgtacaagttagtctttggattcattgtcactgaaatctcaccagcgctttccatgatccccttacaacactgcccttcctccatccccacgaaagtcaggcccttcccaccatgtgctggcatagaatcctgaatatgtcccttccagagcccttagaaatgacactgccatttgtatttttgtggttctctttctctctgatgaaacttgagtcctaaagaacagagactgaatctggtttgcrccgcatcttgtttagggccagataaacaggaggaaattagtgttcatgttgactgcatgtaggtttctgtgtgtaggtttctgtatgtaggtttctgtatgggggcatctgcgtgtgggcatctgcgagtgtgtatctgcatgtgggtatctgcatgtgtgtatctgcatgtgggtatctgcacgtgggtatccgtgtgtgggcatctgcatgtgggcatctgtattctgcatgtgggtatctgcatgtaggtatctgcatgttggcatctgtgtgtaggtgtctgtatgtgggcatctgcacgtcggtatctgcatgtaggtatctgcatgtcggcatctgtgtgtaggtgtctgtatgtgggcatct

SEQ ID NO: 6925 - DNA, 781 bp, Homo sapiens
aataatctatacagagtgcccactctttatttgcaggtttttaactcacacatcactttttattttttatcatacgaattaggtttactgttgtgcaaattgctttatccagttcacattcttacaatcatgagaagaataagtatatccagaaaaatgctaaacatgtacaagttagtctttggattcattgtcactgaaatctcaccagcgctttccatgatccccttacaacactgcccttcctccatccccacgaaagtcaggcccttcccaccatgtgctggcatagaatcctgaatatgtcccttccagagcccttagaaatgacactgccatttgtatttttgtggttctctttctctctgatgaaacttgagtcctaaagaacagagactgaatctggtttgcgccgyatcttgtttagggccagataaacaggaggaaattagtgttcatgttgactgcatgtaggtttctgtgtgtaggtttctgtatgtaggtttctgtatgggggcatctgcgtgtgggcatctgcgagtgtgtatctgcatgtgggtatctgcatgtgtgtatctgcatgtgggtatctgcacgtgggtatccgtgtgtgggcatctgcatgtgggcatctgtattctgcatgtgggtatctgcatgtaggtatctgcatgttggcatctgtgtgtaggtgtctgtatgtgggcatctgcacgtcggtatctgcatgtaggtatctgcatgtcggcatctgtgtgtaggtgtctgtatgtgggcatct

SEQ ID NO: 6926 - DNA, 673 bp, Homo sapiens
caggagcaaagagtaacacaggtggtgcaggcctgagtcaaggctgagggcacctgggcagaatggttgaagcctatgcaggactgatgatgacaataatagctggagtggccaacaaacatctgaaaaaatactcatcatccctagtcatcagagaaatgcaaatcaaaaccacaataaaatctcatctcacaccagtcggaatggctattattaaaacgtcaaaaaataacagatgttggtgaggttgcagagaaaagggaacatttatacactgttggtgggaatgtaaattagttcatcctctgtgaaaagcagtttgaaaatatctcaaagaactaaaaatagaactatcatttgaccaagcaatcccattactgggtatatatccgaaggartataaaccattctatcaaaaagacacacgcacttgtatgttcattgcagcactatttcacaatagcaaagacaggatcaccctgggtgcccatcaacagtggattggataaagaaagtgtggtacatatacaccatggaatactgtatcaccataaaaaggagcaaaatcaggtcgcttacaacaacatggatgaagctggaagccattatcctaagggaattaatgcagaaacagaaaatcaaatatcacatgttgtcacttataagtaggaac

SEQ ID NO: 6927 - DNA, 880 bp, Homo sapiens
  misc_feature (1)...(880): n = A,T,C or G
tgcatgttttattcatgcttcctccccaaccgaggggcccctgggtggcccttctgggtagagtgattatggctttcgatgtgggcacctcacactctcagactctgctgcagcctgcatccagaccagggctgcctgactccagctcgtggggcctctctgattcttgccagctcactccaaaagccctgtccatgccattctctccctagagtgcaagctccctaacagcaggcatctcttgctgtcccccaaccccaaagtctgcacagggtctcccnnnnnnnnnnnnnnnnnnnnnnnnnnnnnnnnnnnnnnnnnnnnnnnnnnnnnnnnnnnnnnnnnnnnnnnnnnnnnnnnnnnnnnnnnnnnnnnnnnnngaattccagaggaaggcctgcgcgctggcccagccacccgggagagcgcattggacctgtccttccaggagaaygcgctggcctaggcacccaggagagcgcactggacccgtcctgaggatgacacgggctccacctgtcctttgcaaagagccctggaagggccccgtggggggtgatggggggcggccagggccacgctttccattttaggaaaaggaggctgtgaggaactcttcgagtgctgttgacggtttggggaaaggtgctttccactctaccaagtgctaatgtgtgtgaaaatcagactggagctcatgccaccttggagcaaagctcccgctgtgcccggcagacacctgcccagccttggcagctgggccctcttgcctgtccactgcagatccaggagaggcagctgcccccctctctaggtcaggtcagggccgatgtcctggggctgggacacttgctgttgctcccggggaggtcctgggggg

SEQ ID NO: 6928 - DNA, 2828 bp, Homo sapiens
ggtttctttgctcctgcagtggtggcggaggtgaacccaaagcagagggcgaggcacagaggaacctgagtgtgccggcggggctggccccggtgcagctccatccctctgcccccaagtgcagcttcacccctcttcccccaagtgtgtgccggcggggctggcccggtgtggcttcacccctctgcccctagagcctggaggagaaccagccctggaagaatcagcttccccacagcagggagagcaggatccccctttcccgaccatttaggaacctccagctgccttgtacacagggctcctccgggttctctaatcagtgctgccatccccctcccaacgctggcctggtgggaggtgatctgtttaatcctcagcatctctgcctccctccaaagccactgtggtcagacccagcacagcctggagcccccgagactctccagccctgaccctcccagagaaaaggcagctgctaagctgggcccctcagtgtggcaggcaagtggacgaggcctggggaactgccagcagtgctggcgggggaacttcctcccaccatctggccagggcacggggcagcctccttgggaccgaggcagcttctactgaggactgtggtgcagcagctgctctcggaggcccccacgggaagctacacagcaggtccaagagatccacatgattcaggagatgccccttgctttaaaatgtaggttttattatcacacaggtgggtgagatcaggagatgcctgccattgatgagaccgttcgttatagttaccaacaggaggaggggcatgccacaccgtggggccacacagcaaagaccagggtctcggaggcagacgacgtgaaggggaaacacgggcagagccttagyggaggcttcctcgggaaaagcagggaaaggcggggaaagccaggtgagcaggtttgagactggcctgtgggaatacaggcctgccctggttgtctggggtcaggtcctgaggtgattcatgcaggggatgtgggctcaagcctgggaaagcatagagcagacggctgggggtgagctgggggttgcatttgaaaggcaaccaaaggcaagtgtttctgatctctaggaagtggctggcccaggaggggcagtctctccagggtcagcaaggccctgacattaaagcgttggaaatacacagttcatacatgtgcaatgcatgcacacacacacacataccacatacacacatgcacacacagaggcatgcacacacacgcaacacacagacatgcaggcacacacacgttcatgtacacaggtatgcacacacagaggagcgggcacgctgggtggacacttgggcggagaccaggctgcagtgccggggtgactgtccagccctgtcgggtcctcagtgctcctgaaaccctcgccctgggccaggctggacatgcagggccaagcactccccatcagaggtccaagggaggaagatcacactgcacttaaccatttaaaccccaaagccagacagggtctgcagtggccagtactgcactccacaatcctgagagccacaggctggaaccctcaggatgctggtgggtattttatagatggtgtgagggctcaggacaagagcactgtgtgcactgagcctccccacagcctgtcctggggccctcggtccagccggcagattcctttggtccccacaggagagcaggtcagctcaacccagtaaacattctctggacccggcaccagcaaacggtcctccccaagctgggggagcccatctcacacacacaatcacagaatcacagcaaagtcagcaaaaacccaaacaaagcctgtatcaaaccatcttagtcccaactaatggagtccagaaacgccattgctccaaagtccccaggggcaccgcacactccctgccagatgggggtcgctccatgccacgcacttggccgccgcagagggctcctgctgccctgagcggggtggccaggcagtgggctggtgaggaaaccagagcctgtgctgctggaaagtgggggccatctgggagaaacccaggcccagccgcccgcagtgactgcagcagcccctgccccgggagcccggcagcaggccagcagacgctgctggacatcgtcaacttttagcggccactgatggctccctttcagccaggcttcccggacactagggggctgtcatgtgaggggtcactcacggcacataggcccgggttccccaggtcccaagcccaggatccaggcctggacatctcaggagcagggtctggacagtgaggacagggacgcatcactcgccatgggaacacacgtcacagataagcaacccccagcacacccagcttccaatcgacgtcagcgtccgctggctgtgaacatgaggaagaaacggagctgcctgtcaggctgagttcacccaggctgccttccggtggagctgccatcctggtggcctggagagcacgaggccccccccaaagaagacccccagggaagcccccccagggcagagcctgggctacaggcagtgctgactcaagccgcctgggtggtggcctgaaacccatgaccccaagctggcaactgagtttcatcccagaacccggacacctgcaagctcttctcagccagtgctgctcgccacctgcagcgagtccccccgatggatgaggaaccctcagaaccagctcctcccggcgtggactcagaggccacaggctcagccacggtgtcacagtcacacatggcagggtggtcctacagcagccgctggcgggttgccatagcgaccacagg

SEQ ID NO: 6929 - DNA, 2828 bp, Homo sapiens
ggtttctttgctcctgcagtggtggcggaggtgaacccaaagcagagggcgaggcacagaggaacctgagtgtgccggcggggctggccccggtgcagctccatccctctgcccccaagtgcagcttcacccctcttcccccaagtgtgtgccggcggggctggcccggtgtggcttcacccctctgcccctagagcctggaggagaaccagccctggaagaatcagcttccccacagcagggagagcaggatccccctttcccgaccatttaggaacctccagctgccttgtacacagggctcctccgggttctctaatcagtgctgccatccccctcccaacgctggcctggtgggaggtgatctgtttaatcctcagcatctctgcctccctccaaagccactgtggtcagacccagcacagcctggagcccccgagactctccagccctgaccctcccagagaaaaggcagctgctaagctgggcccctcagtgtggcaggcaagtggacgaggcctggggaactgccagcagtgctggcgggggaacttcctcccaccatctggccagggcacggggcagcctccttgggaccgaggcagcttctactgaggactgtggtgcagcagctgctctcggaggcccccacgggaagctacacagcaggtccaagagatccacatgattcaggagatgccccttgctttaaaatgtaggttttattatcacacaggtgggtgagatcaggagatgcctgccattgatgagaccgttcgttatagttaccaacaggaggaggggcatgccacaccgtggggccacacagcaaagaccagggtctcggaggcagacgacgtgaaggggaaacacgggcagagccttagtggaggcttcctcgggaaaagcagggaaaggcggggaaagccaggtgagcaggtttgagactggcctgtgggaatacaggcctgccctggttgtctggggtcaggtcctgaggtgattcatgcaggggatgtgggctcaagcctgggaaagcatagagcagacggctgggggtgagctgggggttgcatttgaaaggcaaccaaaggcaagtgtttctgatctctaggaagtggctggcccaggaggggcagtctctccagggtcagcaaggccctgacattaaagcgttggaaatacacagttcatacatgtgcaatgcatgcacacacacacacataccacatacacacatgcacacacagaggcatgcacacacacgcaacacacagacatgcaggcacacacacgttcatgtacacaggtatgcacacacagaggagcgggcacgctgggtggacacttgggcggagaccaggctgcagtgccggggtgactgtccagccctgtcgggtcctcagtgctcctgaaaccctcgccctgggccaggctggacatgcagggccaagcactccccatcagaggtccaagggaggaagatcacactgcacttaaccatttaaaccccaaagccagacagggtctgcagtggccagtactgcactccacaatcctgagagccacaggctggaaccctcaggatgctggtgggtattttatagatggtgtgagggctcaggacaagagcactgtgtgcactgagcctccccacagcctgtcctggggccctcggtccagccggcagattcctttggtccccacaggagagcaggtcagctcaacccagtaaacattctctggacccggcaccagcaaacggtcctccccaagctgggggagcccatctcacacacacaatcacagaatcacagcaaagtcagcaaaaacccaaacaaagcctgtatcaaaccatcttagtcccaactaatggagtccagaaacgccattgctccaaagtccccaggggcaccgcacactccctgccagatgggggtcgctccatgccacgcacttggccgccgcagagggctcctgctgccctgagcggggtggccaggcagtgggctggtgaggaaaccagagcctgtgctgctggaaagtgggggscatctgggagaaacccaggcccagccgcccgcagtgactgcagcagcccctgccccgggagcccggcagcaggccagcagacgctgctggacatcgtcaacttttagcggccactgatggctccctttcagccaggcttcccggacactagggggctgtcatgtgaggggtcactcacggcacataggcccgggttccccaggtcccaagcccaggatccaggcctggacatctcaggagcagggtctggacagtgaggacagggacgcatcactcgccatgggaacacacgtcacagataagcaacccccagcacacccagcttccaatcgacgtcagcgtccgctggctgtgaacatgaggaagaaacggagctgcctgtcaggctgagttcacccaggctgccttccggtggagctgccatcctggtggcctggagagcacgaggccccccccaaagaagacccccagggaagcccccccagggcagagcctgggctacaggcagtgctgactcaagccgcctgggtggtggcctgaaacccatgaccccaagctggcaactgagtttcatcccagaacccggacacctgcaagctcttctcagccagtgctgctcgccacctgcagcgagtccccccgatggatgaggaaccctcagaaccagctcctcccggcgtggactcagaggccacaggctcagccacggtgtcacagtcacacatggcagggtggtcctacagcagccgctggcgggttgccatagcgaccacagg

SEQ ID NO: 6930 - DNA, 1414 bp, Homo sapiens
  misc_feature (1)...(1414): n = A,T,C or G
ctggagtctcattggcacttagagatctgctgaaggggaagtcctcatattgtcttaatgatatcggaggccagtggtgacttatatctaactgaagttacaaacgaacccagaccyagaacaactacacatgagattgacctcaccccaaaacacacacacacacacacacacacacacacacacacacgatcagcatgacagaaggtggtgcccctcatagaagaggtgctaaatggaagtacatgatggtaaaatccgtgcattgtttaagtaagtaacagaatatttgaagnnnnnnnnnnnnnnnnnnnnnnnnnnnnnnnnnnnnnnnnnnnnnnnnnnnnnnnnnnnnnnnnnnnnnnnnnnnnnnnnnnnnnnnnnnnnnnnnnnnntgggtccattacatcacattcctatgcctgagcataggaattcatcttcatctgggcttcctcttcatgttagtggcagcctggctacagaaaagctctgcttgttgacgtcatactactagctattgaggtgagaaggtgggaattgggtggtgagaattttcctcaagaaatatagcagcttaggaaggttgaaagtagggtaactggttctactcagaatagtagatttgagtttatccttctggatgttcctaccatttgcagtgatttctttaataacaataataacaacaataatggatggtaaacatctgtgcaaacataacactaattcatctggtaggaggtgatgtggatcaatgcatttcaaataaattaaaacaaataattttcaaaattttctctttatgtgattattttgactacttatgtctgctccttgagtcatgtaataagaagtatatttcttcaaatcttagaggcaacaatgagctctgtgtttcacagcttaaacagtcaaaaagtacagggttgaaaaatagacaccggctaggaaactaaagcttttgtttacagagtacatttgtccttaatttaattaagtctcacaacatctattcgttctcttgtctttaaaatttgacctggggtggcatgtatggcaaatgcaagtatcatttttctagaaagtctcaagtgaaaagtgcttatcctttaactcttctccgtaaacaaagtgtcttgtaaaaaggccatcaccttggcaactgtcaactgaatcagctttatgaagacagagccaaactacgaataaacctgcagctaaggtgtaattattttgccattaaagaaagtgaaattttttaaaaagtgacttctgactatgctttgtgaaagatgaaactatttaaatttaaagtaaacatagtttaaatttaaaaaaagaagaagttaccctgaatggccagtttgaacattgcattgttctacagtttccttccatttatgattcgttt

SEQ ID NO: 6931 - DNA, 611 bp, Homo sapiens
  misc_feature (1)...(611): n = A,T,C or G
cagtggcatgttatactagtctgcttgggctgccgtaacaaaatacaagactgggtggctgaaacaacagaaatttattttctcatggttctggaggctggaagtctgagatcagggtgtcagcatggtcaggttgtggtgatggagcctcttcctggcttgcaaatggccaccttctccctctgtcctcacatggcagagagagagagagcactctctggtgtctcttcttataagggcactgatcccatcttgagagccctatccttctgacctcagctaaacccaattatctcccaaaggcccctttccaaaagccatcacattgtgggttaggacttcaacatatgaatgtyggggacacagacattcagtccataagtgttatggtgttgggatgatgttaggccaaggatacaggaagattcaaatccttccttggttaagctaccccaaagtttgaggaacaatggcaaaacaaagcaaataatgctactactagctaaggctnnnnnnnnnnnnnnnnnnnnnnnnnnnnnnnnnnnnnnnnnnnnnnnnnnnnnnnnnnnnnnnnnnnnnnnnnnnnnnnnnnnnnnnnnnnnnnnnnnnng

SEQ ID NO: 6932 - DNA, 766 bp, Homo sapiens
tttcaattactcagaagagaaagaaaatgtcttctgaaagaggtgaactcaatcattaccaatagaaaaagtatccactgtattcatctcttatagaaacagaaaaatataacatttccccccttagaattatatatatatatatatatatatgtatgtatatatgacttaaagttccattgtacgtagccaaacaataaaatctggaaaccagcatgaaaccctataattcacatgttaaaatgttgaaactatgaccaaaatatgaaaactgctagagctatcagaaagagacaagacaaaaagcttcttgcatatgtataaactaaatgtgataatctcaaaaaacttttcaaaattgtaattacyttccagtttaaaaacttcaatcctaaattaaaaaaaaaaaaaaatctatacacaaaccactgatttgcccagaccaaaaaaagaaagaaagaaaagtcagcggtaaggtaagcaggacccagaggagctgatattcacagttcttacatgtacaactctttcaggaattatccataaagtactttattttacaacctgcttctcttgtaaaactaaaggtccattttattacacaaaagttttatacagtgttaaaaccagaactgtatgtaaaatactgcatctaaatgtttctaaatagttagtcttgttccattggttcatcggtgacttctgtggcttcgtcatcattttccatggatgattctgaaagaatctctccagttttactggaatt

SEQ ID NO: 6933 - DNA, 802 bp, Homo sapiens
tacatttgatcttagccaaaaggctaagaagtgatgcctcctcagtttctatgggcaggaatctaggtgcagctcagctggatggttctatctctggtctctcaatcatcacaatttagcgaatcatctcaaatctccactggggtagattctacttctaagctccaccaatgaactgttggcagacctcaggtcattgctggatgtttttcgtccttttggcttctgagtagggcagcttacagaatggcaggtggattgctggaaagtgaatgagcaagagaatgctgaaaatcgaagccacagtttctttgtgatctatcctcaaaattgacatcccatctttgctgccaaattgtcttcaggaaaagccagtcaataaggccagcctacacacacaatacaagggtggggacctttgggaagcattttacagcctgcstggtacacataaccacacacttactgctcacttttaagccacaaacagggttttcaaaaagtcgatctgtattttctatctcctcttccacgcctgccagtcattcaacctgttttgtcttctgattttgttatttcactgaaaatgcttgcagtgtgatcacaatagccctcttattgccaaatacagtgggcctttcttcagactgccttttagcaaaaagattaatcttatcaatattcttccaaccacatgaattgcatgacatgactctaatttcagttgccttttagatgctgtttcttctagcttcctttattgtcccttctaacttctgtttgcatgttgatgtccccagga

SEQ ID NO: 6934 - DNA, 802 bp, Homo sapiens
tacatttgatcttagccaaaaggctaagaagtgatgcctcctcagtttctatgggcaggaatctaggtgcagctcagctggatggttctatctctggtctctcaatcatcacaatttagcgaatcatctcaaatctccactggggtagattctacttctaagctccaccaatgaactgttggcagacctcaggtcattgctggatgtttttcgtccttttggcttctgagtagggcagcttacagaatggcaggtggattgctggaaagtgaatgagcaagagaatgctgaaaatcgaagccacagtttctttgtgatctatcctcaaaattgacatcccatctttgctgccaaattgtcttcaggaaaagccagtcaataaggccagcctacacacacaatacaagggtggggacctttgggaagcattttacagcctgcctggtacacataaccacacacttactgctcacttttaagccacaaacagggttttcaaaaagtcgatctgtattttctatctcctcttccacgcctgccagtcattcaacctgttttgtcttctgattttgttatttcactgaaaatgcttgcagtgtgatcacaatagccctcttattgccaaatacagtgggcctttcttcagactgccttttagcraaaagattaatcttatcaatattcttccaaccacatgaattgcatgacatgactctaatttcagttgccttttagatgctgtttcttctagcttcctttattgtcccttctaacttctgtttgcatgttgatgtccccagga

SEQ ID NO: 6935 - DNA, 654 bp, Homo sapiens
gacagtcctttaagacgagggtcttgagagtagcagcaactttctccagcagaactccaaggggctcaagatkggtggtccacattaggatatgaatcagacgcagctcctttagctgactgaggcttgggtactgagacagacactccatgtcccgatcagttaggtaagcatcactgaatataaaggcccccaaggggttcttgaggtacctggggagagcaagaagttagttatgggcaatggtgccagttagaggaggggggtgggaaatcatctcaatggtaaacttgaagtgggcattgagtaattctgcaccttactaccacacaggtgttatagtaactgcaatggggaagcctgtttcacccaaacacaagtttgttcccatcatcagatgatggtctgcatgcaaggtgctgcctgatgaagactcagatcattcaggggccactccattttaggctcagtcctttcacccttgcctgtgtgattggtaccactctcacacctagtccctcaccctccatcccagaagcatgcacttctgatatcaattatctttcctggagttcaaaacaacgttttacagacagggaattagagcagtttgctaagctgctgaagacagagctgctactgtggaatgcacag

SEQ ID NO: 6936 - DNA, 586 bp, Homo sapiens
cctctctctgtggcatctaccccaggccatccctctgcccttatttgagtggtcttgtgatacccacttcaggatatagagcactgaagagcataatgagttgacattctagtgtcccattccctatgacatcaccggtggctggcacacagtagatgcccactaacatttactgtgaaaaagaacataagtctgtggtatggtctgcagagaaagctcaccatcatttcttacctgagcaggtgctccaggtgctctttgatattactgatcttttttatataaagcatctgggggtagtacaggcagaggaatggagagtccaagtcaggaatgcacggcyactggacgctcacgtacaactcacgctcataaccgaaggctaaaaagagttcacgaagattgctcatctggctcaggtaaggggcaaactttcccgttttattgagagagcactttttccagacttccaactcctggatactgtctgggtatatcctttccaatagatttctgaaacttgaagtgggcattgagtaattctgcaccttactacaacacaggtgcactaggcctcttctgtagt

SEQ ID NO: 6937 - DNA, 613 bp, Homo sapiens
aagcacgtgaactagtcattttgtccttcttgctggggtctgagtcactggccagtcaaggccaaatgctggatcaatgagacaggaggaggccaatgactccaggccccaggtgagtgaaagggaggcttttatgaactgggtgctatgggagaaccgcaggcccagtgggcatccctacaatgacctcatggtgtttacatgtttatgtgtgtgtgtggtcagctaggaagtcacagctctccagcatggctccatggcacagaaaagtaaaatatgccatgtctctagcagggcaagtttcccgtgagtccagcaagaaggsatgggatctgtggaaaggaggcctctgggaaaaaccccacctttgaggataatgttaaaagctgaacttgagaccctgagaatcctatgtccttcccactccccgcagggcttctcttgatccggccctgactcccggatgcagaagcccagggaggagctgggagacagggaaacttgctgggacgctccatgcatttgtctccaagagggtccccaaacccaggtgcctgcagcatcagggaggctcagagttcctgtgtctgcctgaaggaagcctcatttgcat

SEQ ID NO: 6938 - DNA, 871 bp, Homo sapiens
acttggggctgagctgatggggagagtgagggccttaagggagcccgagaggatcttgttctgtaccgactactgccctcagtgtggcaacaggtcactttacgacctggaggtagatcggtgttgctgttgaatgcctgcctatttgggtggatatatcaaactcttttttctgaacacttgaaaactaaaacctaggtctttttgcgcccaggctggagttcagtggcacaatcctgactcattgcaacctctgcctcctgagtgcaagcgcttctcctgcctcagacgcacccgccataacactttttaaatatttcaatcccacattttaaaagttacatctaggctgtgcacggtggctcacacctgtaatcttagcacttcaggaggctgaggygggggggtggctcacgaggtcaagagatcgagaccatcctggccaacatggtgaaaccccgtctctattaaaaatacaaaaattagctgggcgtggtggcgcatgcccgtagtcccagccactcaggaggctgaggcaggagaatcgcttgaacccgggaggcagagggtgcagtgagccgagatcatgccactgcactccagtctgacgacagagcgagaatctgtctcaaaaaagtaaataaaaacaatctgtctcaagaaaaaaaaagttacatctttttggggagctagctcagattgatgagagattttctcataacacctaccctctctctctatcaaggaagagactagtgcagagtgttttggaatctcacatcatcaaagggtggataacgatcaagtgcctgtgggtgatgagtgaccttccctgtgttgaagaaacctacttaaagggcacctaagtgaa

SEQ ID NO: 6939 - DNA, 871 bp, Homo sapiens
acttggggctgagctgatggggagagtgagggccttaagggagcccgagaggatcttgttctgtaccgactactgccctcagtgtggcaacaggtcactttacgacctggaggtagatcggtgttgctgttgaatgcctgcctatttgggtggatatatcaaactcttttttctgaacacttgaaaactaaaacctaggtctttttgcgcccaggctggagttcagtggcacaatcctgactcattgcaacctctgcctcctgagtgcaagcgcttctcctgcctcagacgcacccgccataacactttttaaatatttcaatcccacattttaaaagttacatctaggctgtgcacggtggctcacacctgtaatcttagcacttcaggaggctgaggcgggggggtggctcacgaggtcaagagatcgagaccatcctggccaacatggtgaaaccccgtctctattaaaaatacaaaaattagctgggcgtggtggcgcatgcccgtagtcccagccactcaggaggctgaggcaggagaatcgcttgaacccgggaggcagagggtgcagtgagccgagatcatgccactgcactccagtctgacgacagagcgagaatctgtctcaaaaaagtaaataaaaacaatctgtctcaagaaaaraaaagttacatctttttggggagctagctcagattgatgagagattttctcataacacctaccctctctctctatcaaggaagagactagtgcagagtgttttggaatctcacatcatcaaagggtggataacgatcaagtgcctgtgggtgatgagtgaccttccctgtgttgaagaaacctacttaaagggcacctaagtgaa

SEQ ID NO: 6940 - DNA, 841 bp, Homo sapiens
ctcactaacccaccctgctgattctctggcttcctgttaataacaacagcaactccttgtggggagtctatggttggctcagtactgtgctatccttgcatttgctcagtgttgaagaacttgggatgagtgaggtacccagcgttcaacgtgaattaaaggcagagggagaaggccaagccagagctctggggcatcagatggtcccttccagcccacggccccaaagtgagtttgtcggctactcagctctgatgttcttgggagaaagcccagccccgggatgcctccttccccagccaaccccaaagcctgagatgaagagcaatggtttattgagtcatgtggtaatggcaggttgtctttaaaaaaagaaagaagcatcaaggagagaagccccacagggcaaagagagacatttcactcagaggccaaagtctgggggttagaaagaaggaagcttgacccaaacaaagtttcatttacagtrtatacagtcaggccttgggggcaggagctgctggggagcagagagggaccctctatcgctggcttcagggggtgccttgggtcccttcagtagctggtgggcgtgagctgcaggaagcacatttggcttggcaggagctgtcaggaaggggaagcgggtttcctgcgattctgccttgttctgccctgggtgaagccgcacaccacacctcacctcccaggggcccaggccctgtggaatgtctgttttaagctccctggggctggcctggctgacggcagctgccaaggggatgccgcactgcaggaggacctggggtggtgctataccttcacagcagcaggcaaaaga

SEQ ID NO: 6941 - DNA, 831 bp, Homo sapiens
cttgagcccagaagttcaagaccagtctgggcaatgtggtgaactccatctctactaaaaatacaaaaaattarcaggtgtggtggcatgcgcctatagtcccagctactcaggacactgaggtgggaggatcacttgagcctgggaggttgaaccatgattgcaccactgctctccagcctggatgagacagaaggagaccctgtctcaaaataaataaataaataaataaacaaaaaacaacaacaaacaaacaaaacaaaaaacaaaaaacaggacctgctagctgcactcattggccaccccacattggactcagggacattgctcacaccctgtgtgccctgggacaagttccctgactacttcatgactcagcttcctcatctgtaaaggtgtaatcataatgataataaccccacatgtttagcaaattatttagtagaatgaatggagtgctttgcagagtagttgctgaacaaattagctgctgtgtctattattggtcttgggctgggcaatgacgtaggccagccaatcaaaatccttctttaggattttgtaaactagcagtgggacaaaaggccagtccctcctaggtgatgaagctttaagttgcaaatgggggagccattccctgccatgtacaggaagctggttctgggaggacaaagtcagagaagcagagatggaagatagaggtgagctcctagtggctttcaaatccctgattccagttgtttcacgtggcccagctgcacctcagttgttcctgcagtgtatgatccatcaaacaaattcccctttgggctgtggctagtttgaggggta

SEQ ID NO: 6942 - DNA, 758 bp, Homo sapiens
atgtggtggtgcgtgcctgtagtccctgctactcgggaggctgaggcaggggaattgcatgaaaccaggaggtggagactgcagtgagctgagatcatgccactgcactccagactggcgacagagtgagacgccatctcaaacaaataaacaaacaaacaaaaccaaaaattagctgggcatggtggcacacagctataatcccagctactcgggaggctgaggcatgagaatcgcttgaacccaggaggcagaggttgcagtaagctgagatcgggccactgcactccagcctggatgacagagcaagactcattgtcaataaataaataaatataaataaaataaataaataaatcatgcctgtaatcccagcactttgggacgccaaggcgggcagatcacttgaggccaggagttcgagatcagcctggtcaaygtggcgaaaccccgtctctactcaaaatacaaaaaaattagccgggtgtggtggcatgtgcctgtaatcccagctactggggaggctgaggcaggagaatcgcttgaaaccaggaggtggaggctgcagtgagccaggattgcactattgcaccccagcctgggcaacaagaacaaaactccgtctcaaaaaaaaaaaaattctgatctctgaaacctcggggtcttctcattcccgtagcttgtttccccaattacctttccctgattatggccccgttggcctaagcccggggatgctagcctgggagggtcttctg

SEQ ID NO: 6943 - DNA, 804 bp, Homo sapiens
ctccaattaggccactttccccaaacactccagcatcatttttcccacctttatgtgctatttactactgttaatttttccattaggttatttgatgaacaggtctccccagtgataacaagctcgttaagggtagcagccatgtctgtatcttttcaccattgtaacccaagcacctagcacagtgtctgcacatggtacactttcaataattattacgtatattaatataagggcacacaagtgggcagcttgtatgttgaaacaggaagtgtatccatagagactagtcacttcaagagagacctaaaagccagtttgttaagggcctatgcaggagatattatctttttttttttgagtaagtatctttttgagcccctaaaaatcacttgataccttgtattatttttaaggataatctaaatatattaagttgattctatctttctgtggctgcttagcatgaaaacacctagatgaatttgtrtcatattccaagggtatgtttaggattatgtgatctaaatagagatttcaagggatatgtgacagaaattcatttaaggggctcttgggaacaattcaaccaaacaggcagtaattctcctgagaggctaaaactgaaattcaacaggataccatgtggacagacaagtcacatgttttaaaaggctgtagataaaaacaacaatatggatgtcaaatatgaaccgaaacaaaaagtcacgagggtaggcggtccagattgctggtgttgactttggtaaagttgtagctcacataggcaattctctagagcaa

SEQ ID NO: 6944 - DNA, 625 bp, Homo sapiens
cctaatttttgtatttttagtagagacagggtttctccacgttggccaggatgggctgaaactccagacctcaggtgatccacccacctcagccttgcaaagtgctggaattacaggcatgagccaccgcgcccggcctgcattttaagaggtattcaacacatgtgaaaatgtgagaaaaatacagaaaacgactacagccacttaaaaaaaaagtcagaatataggaaaatagtcctctttaagtaagatcagggtcagatattaaaagactgcaaagtcaaaaatctctataagcttggagtggaatgcaagggaggcggaagcagtctttctcaggatcttcaagaaagttgtcaaacacctgtcctgtccttcctttctttctcaggacagcctgtttcctgttgtggaggggaggtgttaaggcaattggcatgtgattttaaagttaccmgggaaccaagcacccttacagactttcccaaacatcagtgtatcggggaacttgccccgatagtcacataggttcttttctattttcctaagcgtcgactggcttgacagagtacaaaagagagaaattttaaagctgggcgtccgggggagacatcacacgttggta

SEQ ID NO: 6945 - DNA, 696 bp, Homo sapiens
ggatgaggcagcgccggaagtatgacgctcatttctttaagccactagaagctcaccgtgagtccattcacagggccagagttccaagtgtgcggcgtgggcggggcctgcagaaagggacggggcctgcagaaagggacggggctggcaaaggcctggtctacctcaccgatccgggtcgcgggggctcctagggggttccttccacagctggtgcgcgtgcgcaagagtgcgwcgaggttgttccgcggcaatttatgaaactcggagccggcagtgagttgagggttcggcgaggtcagggattcctagttgcagcgtgattaccaacgccagctcccttcactgtccaagacagcgattccgcggctcctctgagaactggcgcttgtgagtgactgaacgggccactggagaggagcggtgctcacgggtatcgttctcgtcagcgggcggtggggacgcggggtcttggaattgggaatcacgcttgagggcgtccatgcggaacgtgcagcttacctcagcttgcttgcagttacccagtttccacgctgccctccaaggtctgtgccggaaaacctggaggagggcgcgagctgacgggagggatggaaacgtgggctgcggaagtaagacaagcgttgagagcagcgacagagggcgagggggtgggcggcgggacggctggggtca

SEQ ID NO: 6946 - DNA, 517 bp, Homo sapiens
aaatgatatggcttccatctcatgccctgcacaggcattttcctaactctggttatctctttgctattttcatgattttttttttgcaatagtctcattatgttagccttataatttaatatttttctttcaaacaacccacttttaatactttttactttaatatatcttgcctcatcctgaattacaaaatataagaaaatcacaggtttgatataccagttgatttttctaatatatgttcaaatcgattattcatacatttatccaggtgctrgtgatgctcttagcttttctcatcgttcttcacagatataattctaatgacagggatgatgatagacagcctggggtattggaaagatctgaaaccagaggaaggaaaagctggcttcttggcctgactgtgtagctacaaagccattcgactttgggagaggaggctcccagccaccactgaaaaatgagatccctggacaagcgtggtctctggagcttctttcaactctgccaccct

SEQ ID NO: 6947 - DNA, 2719 bp, Homo sapiens
gtatgttctattaatgaaatcttgaatctatactcccaaggattaatttatttcagtcaaagagaaatttttcaaactgtgccgttattgggtagtctaatcaaaactattagacactgtattgcctcatattttaaaatgtccagggggatattaagtttttcttctcagaattcaaagccaagtcacccaaaactttgtgatcaactaacactagtctcgtctaactccatggtaacacttgtggcaagaaacatgaaatgaaactcaccatgaactccacatcctccgtaagatctcctaatttccgcttttcctatgcctacctggcaagtagatttctgccatggacaacaactttctctatgcaaaagcaccattacatctttcaaacttgaagagaattaaagcaaaaaaaatgcacagatattggcccaatgttgattgatgaaattcctgaagtcctctgcactcgaaatacaccaaatacaaaaaagatttctaaaaatggccctctactaagtgaaagagtataatatctctatctggatttgcaattcattcccatggcaatgggactaaaagccactaaaagtggctaacattttttagtgcctcctatatgtcaagcactattccaggcaaccaattcattcttaataacacagtgtgttagatactattttcaaacccattacacagatgaggaaattgagacacagagctgttgaatcatttatctataatctaatcccaattaattggtggaactgggattctaactccaaaaatctggatctaatagtcttcacctctcagaaaacatcatgttaactctcagagatccccaaaccagaagactaagtcaaatacctacaaaaataaacataccgtcttcctgaacacaaattactggaaaatccagtttacaaggatacagaagattattctgtctgattttaggtagtcttattctcctacttgattgtaatttgggactattttcttcatctttctactttccactatatacaagaggcactcaaaaagttcactgaacatgcagatcaagaagataaacttcaagaaagttatgaagaaatttaaagataattgcaaataagcttctttattcaagtcacagattaacagtatgaaagtttgaactaaaatagagtattagcaaatgtcccaaaggtctaaatatgaagaggttctaatgggtcacattacataagtaaaaataaggaaggaaatccactataagaaagcagaacatttgcttcacatgctcatttgtaggctgaactaatgactgccgccataagaagacagagagaactgagtatcctcccaaaggtgaatttcaatttttgttattatgagtgtgcttgcttatataaaagaatatgcttaagggaaaaaaggtgctttaaagttaatattctacaaaccatagtttatgagcataagaaattacataatttacagcaatctgatgtattagtaataataatgtattattatctcttaaacagtgttttgttttatggctaacagtagcacctgtgaatgaggcagaacctgttatttggatttcacaaggatgtgaaagtaatggtactgttaaaagtaccaaaaatgtattatatgctttaaaaattctagccagaaaacagtattttccttttcaacacatctattgaaagtgttggataaatgcaggatgttaatatgctataaacataaagtctgtttttaaaaaatagcatttgaaaatcatgaagggctttttgttttcttttgtttgtatatatgtttattggtaacaggtgacactggaagcaatgaacaccacagtgatgcaaggcttcaacagatctgagcggtgccccagagacactcggatagtacagctggtattcccagccctctacacagtggttttcttgaccggcatcctgctgaatactttggctctgtgggtgtttgttcacatccccagctcctccaccttcatcatctacctcaaaaacactttggtggccgacttgataatgacactcatgcttcctttcaaaatcctctctgactcacacctggcaccctggcagctcagagcttttgtgtgtcgtttttcttcggtgatattttatgagaccatgtatgtgggcatcgtgctgttagggctcatagcctttgacagattcctcaagatcatcagacctttgagaaatatttttctaaaaaaacctgtttttgcaaaaacggtctcaatcttcatctggttctttttgttcttcatctccctgccaaataygatcttgagcaacaaggaagcaacaccatcgtctgtgaaaaagtgtgcttccttaaaggggcctctggggctgaaatggcatcaaatggtaaataacatatgccagtttattttctggactgtttttatcctaatgcttgtgttttatgtggttattgcaaaaaaagtatatgattcttatagaaagtccaaaagtaaggacagaaaaaacaacaaaaagctggaaggcaaagtatttgttgtcgtggctgtcttctttgtgtgttttgctccatttcattttgccagagttccatatactcacagtcaaaccaacaataagactgactgtagactgcaaaatcaactgtttattgctaaagaaacaactctctttttggcagcaactaacatttgtat

SEQ ID NO: 6948 - DNA, 773 bp, Homo sapiens
ggcttaggaacactggactaggtccgaggtccccttccttgcattcaggtgaccaaggtggaggaaccctccaagtacggtgtggtggtgtgtgaggctgacacaggccgcattcaccggttcgtggagaagccacaggtgtttgtgtccaataagatcaacgcaggcatgtacatcctgagccctgcagtgctgcrgcgcatccaggtgtgtaggagacagctgttggtgggctggggtggggcaggccatcaccgccatgaccctgctcacaagctgcccactcccacagctgcagcctacgtccattgagaaggaggtcttccccattatggccaaggaggggcagctatatgccatggagttacagggtgaggcagggaggccacagggtgggggtggtctgtggctgggctgaggcccctgatgcatccctccctacaggcttctggatggacattgggcagcccaaggacttcctcactggcatgtgcctcttcctgcagtcactgaggcagaagcagcctgagcggctgtgctcaggccctggcattgtgggcaacgtgctggtggtgaggcccttgcccagcccatcattaaccccctcagtcttgggagacaagtggcccacttgtatttttcccaccgctctcaggacccaagtgcccgcatcggccagaactgcagcattggccccaatgtgagcctgggacctggcgtggtggtcgaagatggtgtgtgtatccggcggtgcacggtgctgcgggatgccc

SEQ ID NO: 6949 - DNA, 626 bp, Homo sapiens
acattacccccaccaatctttccaacctctgaaatttagataggatctggctcagaaaaaaataaaatttgttcaaagtcacatagctaacatgtctagaagctcaaactggacactaagtctcttcatcctttatcagcaagcacgctactaaatacaatgtgggtacatataaacatgtgcacagtcaaccygttctaaacattgctggcactgtcataaatagaacagggtctttgttttcaggatggaagagggtccaatgagagaaacctcagacatgcacatgtttatgtgtataatgtaattcttcagcagtaaatacaagcccacgggtctctaggagaaacaatgtggaggattgggttggcaacagttttccataaacagtgacacttgatctgagcatcaaggtacactgaacacatctgaagtcagaacaccaggataaaattactcagtcacttataagcaatgaaactttaaattccttaatattttccaagtgatagtttttcatttgaaaagtaggggtaataacatccacctcacagaattgctgtgagggttaaattaagtaattttggctaaagccctgatcatcatataattcatcgtccaaacga

SEQ ID NO: 6950 - DNA, 626 bp, Homo sapiens
acattacccccaccaatctttccaacctctgaaatttagataggatctggctcagaaaaaaataaaatttgttcaaagtcacatagctaacatgtctagaagctcaaactggacactaagtctcttcatcctttatcagcaagcacgctactaaatacaatgtgggtacatataaacatgtgcacagtcaacccgttctaaacattgctggcactgtcataaatagaacagggtctttgttttcaggatggaagagggtccaatgagagaaacctcagacatgcacatgtttatgtgtataatgtaattcttcagcagtaaatacaagcccacgggtctctaggagaaacaatgtggaggattgggtyggcaacagttttccataaacagtgacacttgatctgagcatcaaggtacactgaacacatctgaagtcagaacaccaggataaaattactcagtcacttataagcaatgaaactttaaattccttaatattttccaagtgatagtttttcatttgaaaagtaggggtaataacatccacctcacagaattgctgtgagggttaaattaagtaattttggctaaagccctgatcatcatataattcatcgtccaaacga

SEQ ID NO: 6951 - DNA, 503 bp, Homo sapiens
gatgaccacatggaccttgtggggaccttccttcctctgtccgaggaccgtggtcactgtcactgtcctcagagggaatgctgaagatcagggcgtgtgctgggggaggtgttctcaaggacacagaaaagcagcgacaaatgaagcacggggcacctgamtgggactgagatcccacccaggggcagtggcctaagggatgggggcctggcagcacatggggagtaactgatgggaagcaggggcacaggccgtgtgggacagcaaagccccctggtgcctcagcgtttcctccctccccgcacagacgacaagctggagcagcaacactccctgttcacccactacagggacccctgccgcctggggcctggtgaggagaagccgtgggccatcggtgagctggggctgggggaggaggatgggagctgggctccccacagacttccctcaaagatcaccaggacctaccccacaagaccccactgctggggaagggcccc

SEQ ID NO: 6952 - DNA, 503 bp, Homo sapiens
gatgaccacatggaccttgtggggaccttccttcctctgtccgaggaccgtggtcactgtcactgtcctcagagggaatgctgaagatcagggcgtgtgctgggggaggtgttctcaaggacacagaaaagcagcgacaaatgaagcacggggcacctgaatgggacygagatcccacccaggggcagtggcctaagggatgggggcctggcagcacatggggagtaactgatgggaagcaggggcacaggccgtgtgggacagcaaagccccctggtgcctcagcgtttcctccctccccgcacagacgacaagctggagcagcaacactccctgttcacccactacagggacccctgccgcctggggcctggtgaggagaagccgtgggccatcggtgagctggggctgggggaggaggatgggagctgggctccccacagacttccctcaaagatcaccaggacctaccccacaagaccccactgctggggaagggcccc

SEQ ID NO: 6953 - DNA, 764 bp, Homo sapiens
aggctcacaagtaggcattattcaacaatcactgtgagctctttgtgggcaaaagtatgccttagaggacaggaaaagcatggacaacacaggactcactatgtactagaagaatgaaaagtctagtcaagtacaagaaagcaaactcaagcccagtgacttaagagctcttgaaaagtcaacatagaattgtgcaaaaaaactatgcaaatgctaaggcaaaggaaaagaaggagcactgagaagcaggtgaagttccctgcaaggggttttcagcctggattagaaacagtcagggcctggcagggcgcggtggctcatgcctgtaatcccagcactttgcgaggcagaggcgggcrgatcacctgaggtcaggagttagaaaccaccctggccagcatggcaatctctactaaaaatgcaaaaattagctgggcttggtggcttgcacctataatctcagctactcaggaggttgaggcacaagaatcacttgagcccaggagggagaagttgcagtgagccaagatagtgccactgcactacagcctgagtgacatagggagactccatctcaaaaaataaagaaagaaagaaacagtcagtgctgggctgagaatatccagccaagcatggagttaactccttgggtcctaggtcctggcaccaaggtaacctgccctggccattcctctggaacaatgacatctccaagaaatagcctctccaccccactcctcctgtaccaggctgtcctttaagaa

SEQ ID NO: 6954 - DNA, 851 bp, Homo sapiens
gggggaataaacgggggacacttttgatgcatgtttctgaaaacaaaaatcgagaactacccaggacgatatgtgtctatacaatgaaagactatccagaaatgaggggttatcacacaatgagcttgacctagaragaaaagttgtacaatgataaaacaaagtagccaaagaaaaatgtcatatacagctgcagagaatgttaacagaaaaaaaaaatagatgattacccaaactgaaaagatacattttagagcagaagtcacaaacacagggacattttgcttcagtgtatctccattagggtgtgtgtgagcgtgtgtgcacacccacatatttaggcaccctattccctcagagtttccagaaattggaagaagaggaagagaaaacaaagataaatattttgttgatatattggaacatgtcatttaattggaagtcagttgtctgttaactgaagctactctaaacacagttcagaactaagaaataaatgaaaaaggtgtgtgaactcaaagtcagtgtcaaaatattcatgtgctaaaggtcatactctttgtatatgggagatctactctataaagtcttttctcagaaagttttactcaaacatttttgaagtacttgtcttctggtttcctagccgatgcaaagcccataaaccacacaacaaataattgcataacacccatagtttgaatagtttctcatttgattcttactactagttcatgagatgggtaaggcaaaaattatttttactatcattttataggctgataaatggatactcagggagattagctgacttgtttgaagtcacatgggaagggactgagaggttttct

SEQ ID NO: 6955 - DNA, 851 bp, Homo sapiens
gggggaataaacgggggacacttttgatgcatgtttctgaaaacaaaaatcgagaactacccaggacgatatgtgtctatacaatgaaagactatccagaaatgaggggttatcacacaatgagcttgacctagagagaaaagttgtacaatgataaaacaaagtagccaaagaaaaatgtcatatacagctgcagagaatgttamcagaaaaaaaaaatagatgattacccaaactgaaaagatacattttagagcagaagtcacaaacacagggacattttgcttcagtgtatctccattagggtgtgtgtgagcgtgtgtgcacacccacatatttaggcaccctattccctcagagtttccagaaattggaagaagaggaagagaaaacaaagataaatattttgttgatatattggaacatgtcatttaattggaagtcagttgtctgttaactgaagctactctaaacacagttcagaactaagaaataaatgaaaaaggtgtgtgaactcaaagtcagtgtcaaaatattcatgtgctaaaggtcatactctttgtatatgggagatctactctataaagtcttttctcagaaagttttactcaaacatttttgaagtacttgtcttctggtttcctagccgatgcaaagcccataaaccacacaacaaataattgcataacacccatagtttgaatagtttctcatttgattcttactactagttcatgagatgggtaaggcaaaaattatttttactatcattttataggctgataaatggatactcagggagattagctgacttgtttgaagtcacatgggaagggactgagaggttttct

SEQ ID NO: 6956 - DNA, 851 bp, Homo sapiens
gggggaataaacgggggacacttttgatgcatgtttctgaaaacaaaaatcgagaactacccaggacgatatgtgtctatacaatgaaagactatccagaaatgaggggttatcacacaatgagcttgacctagagagaaaagttgtacaatgataaaacaaagtagccaaagaaaaatgtcatatacagctgcagagaatgttaacagaaaaaaaaaatagatgattacccaaactgaaaagatacattttagagcagaagtcacaaacacagggacattttgcttcagtgtatctccattagggtgtgtgtgagcgtgtgtgcacacccacatatttaggcaccctattccctcagagtttccagaaattggaagaagaggaagagaaaacaaagataaatattttgttgatatattggaacatgtcatttaattggaagtcagttgtctgttaactgaagctactctaaacacagttcagaactaagaaataaatgaaaaaggtgtgtgaactcaaagtcagtgtcaaaatattcatgtgctaaaggtcatactctttgtayatgggagatctactctataaagtcttttctcagaaagttttactcaaacatttttgaagtacttgtcttctggtttcctagccgatgcaaagcccataaaccacacaacaaataattgcataacacccatagtttgaatagtttctcatttgattcttactactagttcatgagatgggtaaggcaaaaattatttttactatcattttataggctgataaatggatactcagggagattagctgacttgtttgaagtcacatgggaagggactgagaggttttct

SEQ ID NO: 6957 - DNA, 851 bp, Homo sapiens
gggggaataaacgggggacacttttgatgcatgtttctgaaaacaaaaatcgagaactacccaggacgatatgtgtctatacaatgaaagactatccagaaatgaggggttatcacacaatgagcttgacctagagagaaaagttgtacaatgataaaacaaagtagccaaagaaaaatgtcatatacagctgcagagaatgttaacagaaaaaaaaaatagatgattacccaaactgaaaagatacattttagagcagaagtcacaaacacagggacattttgcttcagtgtatctccattagggtgtgtgtgagcgtgtgtgcacacccacatatttaggcaccctattccctcagagtttccagaaattggaagaagaggaagagaaaacaaagataaatattttgttgatatattggaacatgtcatttaattggaagtcagttgtctgttaactgaagctactctaaacacagttcagaactaagaaataaatgaaaaaggtgtgtgaactcaaagtcagtgtcaaaatattcatgtgctaaaggtcatactctttgtatatgggagatctactctataaagtcttttctcagaaagttttactcaaacatttttgaagtacttgtcttctggtttcctagccratgcaaagcccataaaccacacaacaaataattgcataacacccatagtttgaatagtttctcatttgattcttactactagttcatgagatgggtaaggcaaaaattatttttactatcattttataggctgataaatggatactcagggagattagctgacttgtttgaagtcacatgggaagggactgagaggttttct

SEQ ID NO: 6958 - DNA, 2347 bp, Homo sapiens
aggattattttattttatgtttaagatggagttttactcttgttgcgtaggctggagtgcaatggcactatctcggctcaccgcaacctctgcctccagggttcaagcaattgtcctgcctcagcctcccaagttgctgagattacaagcgcctgccatcatactcggctaatttcgtatttttagtagagacagggtttctccatgttgatcagacaggtcttgaactcctgacctcaggtgatctgcccaccttggcctcccaaagtgctggaattacagggttcagccaccactccaggccagatccaggattttacacttagtaaactgcagagactgtgctcttatgacacattactacatgctaagagtcacacaacaccttgtccaagagcactctctccacttggctgcatgcatgggcctcccagcctaatgtcttgtccacagggcatcactaccatcactaggcacaagtagtgcatgcaacctacagcagccacccagcctacatcacagcacacatacttctgagcagaagagcagaccttcaagcctagagatgcaacactgttttcccaggaaccgacaggccttgcctcttctcccaagagatttataattaagcctgcgaaaaattaagaaattaatataaaagttgccatgttgccaatgcttttatgatactttaatttactagaaacatgttcacaccacccctggggagtgagtgcaatgcaaaattgcttacattgctcttataagctgaagtaagcgcttccttttcatcttccataatcctattaaaaaaaaaaaaagccagcaagtcggcggaccagaagcagcaaatagataattatatcattctcgatattctcccaccctagctttttcaaagaccaccccccaccaataattctgtactttcctcatttatttacggctaaagaaataatggacaaaactcattggatagacaactgcacatcattctaatgcagttactagtgattccaagtagctctgccatcaccaagaggataaagcgggtgacagagtcagaggatgagtactacccaaggaaagggtagaggcttggtgtgctatccctgctaggaagctgtcaatggaacagctaagagttttggtatctggaaaactgtaactcatgtctcagcatggccactccccagtaatgtgatgttagataacttaccaaaatgctcgagcctcagttcgacacctttccttttttttttttttttttttttttagacagagtctcactcttgtcacccaggctggagcacaawggcatgatgttatctcactgcaacctccacctcctgggttcaagttgttctccctgcctcagcctcccaagtatcttggattacaggcatccgccaccatgcccagctaatttttgtatttttagtagagacagggctccgccatgttggccaggctggtcttgaactcctgacctcaggtgatccacctgcctcgacctcccaaagtgttgggattacaggcatgagccactgcacctggccagttccacatctttcaaaatgagataacagtaaatctacctcttacatttactgtgaatactcaatgtgacaatgtgcaagaaagggctttgctcagctcctggtacaaacaactgttcaactcatggtaactatgatttggaactactaacagggagattccatcaaaaggatgatgaacagagggcgaggccgtctgagactactccaggatccacctcgtcaacgactctcatgaacgaatgagaaggagctcgctgcaatgaaaggacttaagtagacatgactgatgctccaggatcagagccctgactctggaatgatattcagtgttctcactaataaaaccaacaaaagtcaaaatgacatgctggccaacaatgggaatgggtttctgtaaagatcaaaatggaataatgtaggtcaatctttgttacctggaaaagggttttcaaattgaaagcagctacatttctccccgggtacctgatagccaaccacaggaccattctcaggtttctcaaattggatgccagagaatacacaatccaataccataaacatggataactcttcgtatcactaatttggtttagtcattggtgcgggggccacattcttgttatataaaccaacatgagtatatcatgaaaaactacgaaaattttacataaatttgtaaggtaaaacacgagggttcaaagaaattgtattacacactatttggaggcttatttgtattttcatgtgccaataaaaagttctattgtaatacaaagacccatgca

SEQ ID NO: 6959 - DNA, 784 bp, Homo sapiens
agactgaagtgcacgtccrtacaaggtacaacccatgcaggtgatttgggtaaagaaaataatcataaagcagatttctgagtatatacatgtattttctattttcgataactgtatgcaagttattttttatctgatgggtattagaagaagtgtaaggactgttcttggttagggtaggggaagaagcaggggaaaacaggagaaataattcaacttacccagctgcttcctctgtttccctttgctcctcctacaaaagacgacttgttccttggggattttcaattaaataggaactgaatacattaaccttttctgtatacaatacatttatcagaacagccttggcatgcccttggattccagcactgggctctgaggaaagctactatgatatccagcaaaaataggttcaggtgatggttggaaagcctgcactcatgtgcataagtgaaacaatctattttaaaaaggatctttcataggtgcagttttgaatttgagaaatgtacccgaactatgtgtttgtttgactttctctaaaataagattatactaagtagtctgccatccacattgtaactacagtacacatgtgtagagctttattgatgacacagtagtttcacatttattatcacatgtgatcctcacaacaacccatgagatacagcagggaaaagaagggggaaaaatagaaagtagtattaattgagcatttactgtatgctacaccttgtcttaggagcaagtatttttaacattcctatttttgtagatg

SEQ ID NO: 6960 - DNA, 777 bp, Homo sapiens
aagcaatgttaccactcctcaatcaatgcgatctccagaaataccttcacccattttcacgtgcctccagttaggataggtatagagagaggcacacacataccacctctgtttcaaaactgagagtacatcgtgcatttcctgattcataatagctttgcctatgcttactggagagccttccttacgtttctgtagtagtatgaacagagtcgccatttttgtcatgctagaagagttcaggccttagtccatagctaaaaatttgtgtatgtgtatgtatgaagagcatggttaggggctgacactgtggtaggtgaatggagtaggaggagaaaggaagttctggataggtcagtctggcatggataaggactttgaatctgattccaaaaagtatgacagsatttggtcatggtgtcagtttgggtccaagataccaagaaagaattagagagccaagaaatagggagagcacactcacttgtagtgaaggctgtgcctccccagtctacaagattaaaattaaaaatataaaaatagagagaaaggttgaaacaatgaaaaaagagagcaagaaattcattgggggaaatgcctgtgaaggtagagctgaaagaacaggagtaggcagggaaagcttcagaccagaggcaggtctcctaagatgggacagggcatggtgaggatgggagaggaagtgcttaaaccacagggcagtcctgagaaagtgtcagccaagcaggcgctgggcccagagcaatgccacctgttaga

SEQ ID NO: 6961 - DNA, 765 bp, Homo sapiens
acggccttgaacagyggtttctcctgagcagcttatctacccgctgctctgggcctggtctcacatgtggctcacattgggcctcattgtgacttcattctgtatctttcttccccatcaaaaggtgaggttttgcccagtgcctcccttccttctgacatctgaaattccagttagagcgcattccacatcctgaaggcttggtcaaccagcaagacacagctgctactcagagaggcatggccacattcctcctcagtgtctggtttctaggaggacacaggactgggaggacctgtgggaagaaggaaagggtgagacagtgaccagggagggagggctgaggaagctaagggtcgcttcatctgctttacagtttggccctggactttcatcctgctttgggccagatgtgggaaagagggtgactagaaacaggggtccacaaggaccctctgctcctcttcccctgcatatgccaagtctaaacctcactttaaatattagatcaaaataagacgtcacttctctgtggagtctaaaatagtcaaacgcatagaagcagggtgtcaaatggtggtcaccggggggtggggcaatggttaaatgatacaaagcttcagttatgcaacatcaacaagttctagggatttactatacagtatagttcctagagctaaccctcctgtattgcatacgtaaatgtgcagagggtagatcttatgttgcatttttttttttttgctttttttttttgagatggag

SEQ ID NO: 6962 - DNA, 765 bp, Homo sapiens
acggccttgaacagcggtttctcctgagcagcttatctacccgctgctctgggcctggtctcacatgtggctcacattgggcctcattgtgacttcattctgtatctttcttccccatcaaaaggtgaggttttgcccagtgcctcccttccttctgacatctgaaattccagttagagcgcattccacatcctgaaggcttggtcaaccagcaagacacagctgctactcagagaggcatggccacattcctcctcagtgtctggtttctaggaggacacaggactgggaggacctgtgggaagaaggaaagrgtgagacagtgaccagggagggagggctgaggaagctaagggtcgcttcatctgctttacagtttggccctggactttcatcctgctttgggccagatgtgggaaagagggtgactagaaacaggggtccacaaggaccctctgctcctcttcccctgcatatgccaagtctaaacctcactttaaatattagatcaaaataagacgtcacttctctgtggagtctaaaatagtcaaacgcatagaagcagggtgtcaaatggtggtcaccggggggtggggcaatggttaaatgatacaaagcttcagttatgcaacatcaacaagttctagggatttactatacagtatagttcctagagctaaccctcctgtattgcatacgtaaatgtgcagagggtagatcttatgttgcatttttttttttttgctttttttttttgagatggag

SEQ ID NO: 6963 - DNA, 782 bp, Homo sapiens
ataataataaacagggcaggaggaatctttgggaggtgatggatgtgtttatagatttgaggtggtaatggtttcaccgttgtatactttatccccaaactcgttgaaatgtagacattaaatatatacagctttttttttttaacatgccaaccatacttcataaagttgttttaaaaaataagatcaacccaatggtaaacgtggtgaacccaacccccgcctctctaacttgttgagctacaaaagaggaagaagccaggagcacagccgctgttggctccgtgcctaatgactgaagccttctatgagttgggtttgttatcatgtttggctcctggactggattgttttctttcctttttaagacgtttgaagtcctttgatgagctggtgtttatagttcatgttctttcatgccaaacgagcacttcttattatctagaattacaaaagcatttggtgttttccaagcttaggtggccagcttcagaatccaagaaggaattactttataccatacaggggrgttggaaaaagtcagatgtaaatcagatttctgacagtttagtaatatttaaaatttattagagaagacactaaaaggaaacttctgatgaattttctttctttgttttcttggtaaaatgaaatcattcacattctgccatgagtataattgcctctattctaggcaatttctgtattgtaaattgggactttgtgttggtgattttagagtaaggcatgcctgttacgtaaatgcattcttgctttggatc

SEQ ID NO: 6964 - DNA, 798 bp, Homo sapiens
gtgccttatctggcagccataacttcagcaaatctcgttgggttcttttctactttaccttctctagaagggcttctgtatgagtgactacactttctgatgactagcagccctcttattggcaacactcacaaattctggcttaaaagttgtcactctttcaggcagttatcaagtcattgctttccttgttaaggatgattcagtttccaggtaggagtttctatcagcctcagtgtcatccctttgtcagactctcaggagcgtgttcagctacagttcaaagactctatatcccaatgataaacaacaattcctatgaataatttcagaaaatcatgtatatttgttgatttatggatagatgaatgaattatacactttttactaaactagtatgccctgtagaccttttttccccaactcaaactatggtctacaggccacatgcaaatgaattctcagaggtactttcttatcaaagtgtgcttgtgttcccagaccaaactgagggtcaggctgctcatttttacagcccaataataaaatacagatgaactataagagaagggagtttatttctgtagctcattacagggagaaaaactggaaattatcaccasaccaactcaaaagtataaagatttccagagcttatatgccttcaaagctatatgtctacatgcaagtgtgcattcaactaaagacataagtaattaacttattttaagctataactaagatctgagtcctgaacacctttctctggagccttggtaaatttacttaaactaaatg

SEQ ID NO: 6965 - DNA, 702 bp, Homo sapiens
gatcctctgctgctatgtagagggcaggctgaagggaggcgagggcacagagaccaggtagtgcagaaacacatgggcctcccaactcctccgagcatctgcagtgcctcccacttcctayacagaaatgccacagagcaataattaaatggaagccatctctcctcacttaaaggggtaagtgcctcacctttactagcactgaggattacaaatctttgccagtggtgtgcagttacttaacccccttgagtatctatgcttaagaaaaaatgaataagccgccgtttcggccccacccagtgaaaaatctgccaataattggcttattgaaactaaatgcaaaccaaagatcacatctaggtttatttaaagacaaacggtgtgctctcatcagagtactgtaagcaatgtgcccattacatttttacataggcattcaaaacatgcatataaaagtagtacatttgcttaaaagtcttataacaaaatactagattttttttaaaaagttgtctgcgtctcggaagaaaatgaaaggaaatgaatacattttgacacgaacttttcttcatggccacaacaattcttgtttcaccaccgactgctttaagtctgtttgtctgggtaagtagaagcaaggaaaacctgccatctggcatgactgccatctctttgtggccacacaataagtcttgggca

SEQ ID NO: 6966 - DNA, 618 bp, Homo sapiens
atgggtcaacacctttattgaggttcaggacagtgtccaaacacacttctggagagaagttttcattggtagatttgaaagaaacaagcatgagttccatgctatgactgagagagggtcactgcagcmtgtctcacagtccctgcaaggtgtagcgctcagcagggccagtcaagcaggtgggatctggctgtcccatagggaggtggtcaccaggaagcagctgtgtaagaagacgcctggatagaccatactgacgaactggggagaggtgtagaactaaaaagtgtgtcaagcgtgattgagtcctgcttctgatatgagaaagctaaacgtatttaaaatggatgttgtcagggcaacataaaatcataagaattcactacgctcataatttttccatctttattttttctgtattgtgcggaaagtttttctcaagttcatccttcacatttattgatactatcttctgtagaaccaattctggtttttacatgaatatatatggattttaattatgaaatttttagcaccctagaagttcttcctatttcattcatctcccttttcttccctttcttttatttatcgcagttgcttgcctctttattattt

SEQ ID NO: 6967 - DNA, 726 bp, Homo sapiens
tgatggcttctagatgctccccccccaatagtgagtatcacacaaagccttctctgaaaagagatctcatactctgctttcaagatcttttgtagtttagctgtgtctcaagtcaagaaatcactgactcaatgaaatttttttgtattcatttacttgcacgatgtacagaaattagagatgttttcaaatatattttatgtcatctgtagggctaagttaacctaaagtttgaagtaataataccaccttttttacaactctcaccctagttactgaaataattattactagaaaaaaagaactaccacagtggagatagtggtttaataataacttatagttctttacagagactcagagagtcctcagaggctctctctctctgcctccccaaagtcattaaatgacactaggaaaagaatttgaatgtaaaagcatttaaattgtcctttggtgaaaagcagaaatataatcgtgagtcgaagttttcatagtgctcctcctccaaacaacaacaacaaaataacaataataaaataaaactaagatatttgaggaagaagaagcctaccctctcccatattcagaagtttttcaaaagacatggacaggaacaaccagtaccagccactgcaaaaacatgccaaattgtaaagaccattgaggctaggaagaaactgcaccaacyaatgagcaaaataaccagctaacatcataatgaca

SEQ ID NO: 6968 - DNA, 2496 bp, Homo sapiens
aaactgggagaggcagcgaaagcacttcacgcctcagatcaccagaagatgctcccaccagcaccgtgacagtttgccagtgccatggcaacacaggaagtccccaccccttgccatggaaacagctggaagttactgcccatttctagctatttctgagtaacccrccccttaattagcatgtcattaaaagtgaattataaaaatgactacaagccacccctaggctgctactctgggagcacaacccacagagggctccctgccctgcaggagcggacgcaggggctgtacaccgccaatggtctccatagagctgctttattccaccacaggggcttgcttttggattccttcctgagcgacgtcaaagaacctgcccttcctcagtgtgactcttgcctaaaatctatccctggttttctcttttcctaagcatgccctgacttgttctttcatctcctctgaacttgcaattgctcctcagtgactctattctgcagatccagaaaactcaaccttaatcttcccagagccctgttgtctccaatattggaatatctagccttgctttctcagacgcctagattacaggcctctctcttgaacacctattggtaaggtatccggggatcctttaaatacacaatgattggcagggtttacataggggaaatcagtgtctgacaattcgccttccaggatatggattgtcattccctctctttgtgggccccagtctcctatacataaaagtagagattgtaatactcatttgacttgcagatacctcaccccgaacccacctactataatgtaaaagccaagaatgcaaaccctttcctcaccccgtgaaggtaaagtcctcagagccaaggagagaaggctcagggatggtacctaggtgtttccaacactaaccatgcattgtagtttttagtgttcaagtttaagcttcttatgttaaagttaccccagctttaattatattgtaacaagatttatttttgtaattccatttttggattcttgatttcttggtaaagaaatacagttatttttgtataccaatcttatatagtgttacattccaaaatttgttcatgagtcctaacactttttagtaaatttcttatgattttctaaatgcaagatcatgtcatctgtacataaagataactgtacttcttcctttccaatctagatgcagtttatttatttacattgccaagttgtcccagctaccactgttatcaagtaaaagggtctcactacccaaagctttagaagccagtaacatgacactaagtttttgagaagagaaaaactttaaagtcaaaccaaaacctatgggatacaggccaggcgcagtggctcatgcctgtaatcccagcactttgggaggccgagttgggtggatcacaaggtcaggagatcgagaccatcctggctaacacggtgaaaccccgtctctactaaaaatacaaaaaacaaaaattagctgggcatggtggcgggcacctgtagtcccagctactcggctgaggcaggagaatggcatgaacccagaaggcagagcttgtagtaagccaagattgcaccactgcactccagcctgggcaacagagagagactccgtctccaaaaataaacaaaaacaaaaaaacaaaaaacaaacctatgggatacagtaaaaacagtactaaggagtaagtttatagcaaaaagcacctacatcaaaaaaagtagaaaaacttcaaataaacaacctaataatgcatcttaaatagttagaaaagcaagagcaaaccaaaaccaaaattagtagaaggaaacataacaaagatcagagcagaaataaatgaaattgaaatttaaaaatataaaatatcaatgaaatgaaaagttaatatttttttaaaagaccaacaaaatcaacaaacatttagccagactaagagaaaagagagaagactcaaatacataaaaccagagattaaaaaggagacactgcaactgatactgcagaaattcaagtaatcattagaaactattatgaccaactatattccaataaattgaaaaacctgcaagtcatggccaggcaccgtggctcatgcctgtaatcccaacactttgggaagccaaggcaggtgatcacctgagatcaggagttcaagaccagcctggccaacatggtgaaaccccatctctactaaaaatacaaaaattagccaggcatggtggcgtgcacctgtactcccagctactccagaggctgaggcaggagaatagcgtgaacctgggaggcagaagttgcagtgagctgagattgtaccaagctccatcctgggtgacagagcaagactccatctcaaaaaaaaaaaaaaaaaaaaaaaaaaaaaaaaaaaaaacccccacccaacccccaaccctaaaaaaacgggttaaaggaaatggaccccttaaaaaaacttttcctaccaaaaaaaaacc

SEQ ID NO: 6969 - DNA, 2496 bp, Homo sapiens
aaactgggagaggcagcgaaagcacttcacgcctcagatcaccagaagatgctcccaccagcaccgtgacagtttgccagtgccatggcaacacaggaagtccccaccccttgccatggaaacagctggaagttactgcccatttctagctatttctgagtaacccgccccttaattagcatgtcattaaaagtgaattataaaaatgactacaagccacccctaggctgctactctgggagcacaacccacagagggctccctgccctgcaggagcggacgcaggggctgtacaccgccaatggtctccatagagctgctttattccaccacaggggcttgcttttggattccttcctgagcgacgtcaaagaacctgcccttcctcagtgtgactcttgcctaaaatctatccctggttttctcttttcctaagcatgccctgacttgttctttcatctcctctgaacttgcaattgctcctcagtgactctattctgcagatccagaaaactcaaccttaatcttcccagagccctgttgtctccaatattggaatatctagccttgctttctcagacgcctagattacaggcctctctcttgaacacctattggtaaggtatccggggatcctttaaatacacaatgattggcagggtttacataggggaaatcagtgyctgacaattcgccttccaggatatggattgtcattccctctctttgtgggccccagtctcctatacataaaagtagagattgtaatactcatttgacttgcagatacctcaccccgaacccacctactataatgtaaaagccaagaatgcaaaccctttcctcaccccgtgaaggtaaagtcctcagagccaaggagagaaggctcagggatggtacctaggtgtttccaacactaaccatgcattgtagtttttagtgttcaagtttaagcttcttatgttaaagttaccccagctttaattatattgtaacaagatttatttttgtaattccatttttggattcttgatttcttggtaaagaaatacagttatttttgtataccaatcttatatagtgttacattccaaaatttgttcatgagtcctaacactttttagtaaatttcttatgattttctaaatgcaagatcatgtcatctgtacataaagataactgtacttcttcctttccaatctagatgcagtttatttatttacattgccaagttgtcccagctaccactgttatcaagtaaaagggtctcactacccaaagctttagaagccagtaacatgacactaagtttttgagaagagaaaaactttaaagtcaaaccaaaacctatgggatacaggccaggcgcagtggctcatgcctgtaatcccagcactttgggaggccgagttgggtggatcacaaggtcaggagatcgagaccatcctggctaacacggtgaaaccccgtctctactaaaaatacaaaaaacaaaaattagctgggcatggtggcgggcacctgtagtcccagctactcggctgaggcaggagaatggcatgaacccagaaggcagagcttgtagtaagccaagattgcaccactgcactccagcctgggcaacagagagagactccgtctccaaaaataaacaaaaacaaaaaaacaaaaaacaaacctatgggatacagtaaaaacagtactaaggagtaagtttatagcaaaaagcacctacatcaaaaaaagtagaaaaacttcaaataaacaacctaataatgcatcttaaatagttagaaaagcaagagcaaaccaaaaccaaaattagtagaaggaaacataacaaagatcagagcagaaataaatgaaattgaaatttaaaaatataaaatatcaatgaaatgaaaagttaatatttttttaaaagaccaacaaaatcaacaaacatttagccagactaagagaaaagagagaagactcaaatacataaaaccagagattaaaaaggagacactgcaactgatactgcagaaattcaagtaatcattagaaactattatgaccaactatattccaataaattgaaaaacctgcaagtcatggccaggcaccgtggctcatgcctgtaatcccaacactttgggaagccaaggcaggtgatcacctgagatcaggagttcaagaccagcctggccaacatggtgaaaccccatctctactaaaaatacaaaaattagccaggcatggtggcgtgcacctgtactcccagctactccagaggctgaggcaggagaatagcgtgaacctgggaggcagaagttgcagtgagctgagattgtaccaagctccatcctgggtgacagagcaagactccatctcaaaaaaaaaaaaaaaaaaaaaaaaaaaaaaaaaaaaaacccccacccaacccccaaccctaaaaaaacgggttaaaggaaatggaccccttaaaaaaacttttcctaccaaaaaaaaacc

SEQ ID NO: 6970 - DNA, 2496 bp, Homo sapiens
aaactgggagaggcagcgaaagcacttcacgcctcagatcaccagaagatgctcccaccagcaccgtgacagtttgccagtgccatggcaacacaggaagtccccaccccttgccatggaaacagctggaagttactgcccatttctagctatttctgagtaacccgccccttaattagcatgtcattaaaagtgaattataaaaatgactacaagccacccctaggctgctactctgggagcacaacccacagagggctccctgccctgcaggagcggacgcaggggctgtacaccgccaatggtctccatagagctgctttattccaccacaggggcttgcttttggattccttcctgagcgacgtcaaagaacctgcccttcctcagtgtgactcttgcctaaaatctatccctggttttctcttttcctaagcatgccctgacttgttctttcatctcctctgaacttgcaattgctcctcagtgactctattctgcagatccagaaaactcaaccttaatcttcccagagccctgttgtctccaatattggaatatctagccttgctttctcagacgcctagattacaggcctctctcttgaacacctattggtaaggtatccggggatcctttaaatacacaatgattggcagggtttacataggggaaatcagtgtctgacaattcgccttccaggatatggattgtcattccctctctttgtgggccccagtctcctatacataaaagtagagattrtaatactcatttgacttgcagatacctcaccccgaacccacctactataatgtaaaagccaagaatgcaaaccctttcctcaccccgtgaaggtaaagtcctcagagccaaggagagaaggctcagggatggtacctaggtgtttccaacactaaccatgcattgtagtttttagtgttcaagtttaagcttcttatgttaaagttaccccagctttaattatattgtaacaagatttatttttgtaattccatttttggattcttgatttcttggtaaagaaatacagttatttttgtataccaatcttatatagtgttacattccaaaatttgttcatgagtcctaacactttttagtaaatttcttatgattttctaaatgcaagatcatgtcatctgtacataaagataactgtacttcttcctttccaatctagatgcagtttatttatttacattgccaagttgtcccagctaccactgttatcaagtaaaagggtctcactacccaaagctttagaagccagtaacatgacactaagtttttgagaagagaaaaactttaaagtcaaaccaaaacctatgggatacaggccaggcgcagtggctcatgcctgtaatcccagcactttgggaggccgagttgggtggatcacaaggtcaggagatcgagaccatcctggctaacacggtgaaaccccgtctctactaaaaatacaaaaaacaaaaattagctgggcatggtggcgggcacctgtagtcccagctactcggctgaggcaggagaatggcatgaacccagaaggcagagcttgtagtaagccaagattgcaccactgcactccagcctgggcaacagagagagactccgtctccaaaaataaacaaaaacaaaaaaacaaaaaacaaacctatgggatacagtaaaaacagtactaaggagtaagtttatagcaaaaagcacctacatcaaaaaaagtagaaaaacttcaaataaacaacctaataatgcatcttaaatagttagaaaagcaagagcaaaccaaaaccaaaattagtagaaggaaacataacaaagatcagagcagaaataaatgaaattgaaatttaaaaatataaaatatcaatgaaatgaaaagttaatatttttttaaaagaccaacaaaatcaacaaacatttagccagactaagagaaaagagagaagactcaaatacataaaaccagagattaaaaaggagacactgcaactgatactgcagaaattcaagtaatcattagaaactattatgaccaactatattccaataaattgaaaaacctgcaagtcatggccaggcaccgtggctcatgcctgtaatcccaacactttgggaagccaaggcaggtgatcacctgagatcaggagttcaagaccagcctggccaacatggtgaaaccccatctctactaaaaatacaaaaattagccaggcatggtggcgtgcacctgtactcccagctactccagaggctgaggcaggagaatagcgtgaacctgggaggcagaagttgcagtgagctgagattgtaccaagctccatcctgggtgacagagcaagactccatctcaaaaaaaaaaaaaaaaaaaaaaaaaaaaaaaaaaaaaacccccacccaacccccaaccctaaaaaaacgggttaaaggaaatggaccccttaaaaaaacttttcctaccaaaaaaaaacc

SEQ ID NO: 6971 - DNA, 2496 bp, Homo sapiens
aaactgggagaggcagcgaaagcacttcacgcctcagatcaccagaagatgctcccaccagcaccgtgacagtttgccagtgccatggcaacacaggaagtccccaccccttgccatggaaacagctggaagttactgcccatttctagctatttctgagtaacccgccccttaattagcatgtcattaaaagtgaattataaaaatgactacaagccacccctaggctgctactctgggagcacaacccacagagggctccctgccctgcaggagcggacgcaggggctgtacaccgccaatggtctccatagagctgctttattccaccacaggggcttgcttttggattccttcctgagcgacgtcaaagaacctgcccttcctcagtgtgactcttgcctaaaatctatccctggttttctcttttcctaagcatgccctgacttgttctttcatctcctctgaacttgcaattgctcctcagtgactctattctgcagatccagaaaactcaaccttaatcttcccagagccctgttgtctccaatattggaatatctagccttgctttctcagacgcctagattacaggcctctctcttgaacacctattggtaaggtatccggggatcctttaaatacacaatgattggcagggtttacataggggaaatcagtgtctgacaattcgccttccaggatatggattgtcattccctctctttgtgggccccagtctcctatacataaaagtagagattgtaatactcatttgacttgcagatacctcaccccgaacccacctactataatgtaaaagccaagaatgcaaaccctttcctcaccccgtgaaggtaaartcctcagagccaaggagagaaggctcagggatggtacctaggtgtttccaacactaaccatgcattgtagtttttagtgttcaagtttaagcttcttatgttaaagttaccccagctttaattatattgtaacaagatttatttttgtaattccatttttggattcttgatttcttggtaaagaaatacagttatttttgtataccaatcttatatagtgttacattccaaaatttgttcatgagtcctaacactttttagtaaatttcttatgattttctaaatgcaagatcatgtcatctgtacataaagataactgtacttcttcctttccaatctagatgcagtttatttatttacattgccaagttgtcccagctaccactgttatcaagtaaaagggtctcactacccaaagctttagaagccagtaacatgacactaagtttttgagaagagaaaaactttaaagtcaaaccaaaacctatgggatacaggccaggcgcagtggctcatgcctgtaatcccagcactttgggaggccgagttgggtggatcacaaggtcaggagatcgagaccatcctggctaacacggtgaaaccccgtctctactaaaaatacaaaaaacaaaaattagctgggcatggtggcgggcacctgtagtcccagctactcggctgaggcaggagaatggcatgaacccagaaggcagagcttgtagtaagccaagattgcaccactgcactccagcctgggcaacagagagagactccgtctccaaaaataaacaaaaacaaaaaaacaaaaaacaaacctatgggatacagtaaaaacagtactaaggagtaagtttatagcaaaaagcacctacatcaaaaaaagtagaaaaacttcaaataaacaacctaataatgcatcttaaatagttagaaaagcaagagcaaaccaaaaccaaaattagtagaaggaaacataacaaagatcagagcagaaataaatgaaattgaaatttaaaaatataaaatatcaatgaaatgaaaagttaatatttttttaaaagaccaacaaaatcaacaaacatttagccagactaagagaaaagagagaagactcaaatacataaaaccagagattaaaaaggagacactgcaactgatactgcagaaattcaagtaatcattagaaactattatgaccaactatattccaataaattgaaaaacctgcaagtcatggccaggcaccgtggctcatgcctgtaatcccaacactttgggaagccaaggcaggtgatcacctgagatcaggagttcaagaccagcctggccaacatggtgaaaccccatctctactaaaaatacaaaaattagccaggcatggtggcgtgcacctgtactcccagctactccagaggctgaggcaggagaatagcgtgaacctgggaggcagaagttgcagtgagctgagattgtaccaagctccatcctgggtgacagagcaagactccatctcaaaaaaaaaaaaaaaaaaaaaaaaaaaaaaaaaaaaaacccccacccaacccccaaccctaaaaaaacgggttaaaggaaatggaccccttaaaaaaacttttcctaccaaaaaaaaacc

SEQ ID NO: 6972 - DNA, 2496 bp, Homo sapiens
aaactgggagaggcagcgaaagcacttcacgcctcagatcaccagaagatgctcccaccagcaccgtgacagtttgccagtgccatggcaacacaggaagtccccaccccttgccatggaaacagctggaagttactgcccatttctagctatttctgagtaacccgccccttaattagcatgtcattaaaagtgaattataaaaatgactacaagccacccctaggctgctactctgggagcacaacccacagagggctccctgccctgcaggagcggacgcaggggctgtacaccgccaatggtctccatagagctgctttattccaccacaggggcttgcttttggattccttcctgagcgacgtcaaagaacctgcccttcctcagtgtgactcttgcctaaaatctatccctggttttctcttttcctaagcatgccctgacttgttctttcatctcctctgaacttgcaattgctcctcagtgactctattctgcagatccagaaaactcaaccttaatcttcccagagccctgttgtctccaatattggaatatctagccttgctttctcagacgcctagattacaggcctctctcttgaacacctattggtaaggtatccggggatcctttaaatacacaatgattggcagggtttacataggggaaatcagtgtctgacaattcgccttccaggatatggattgtcattccctctctttgtgggccccagtctcctatacataaaagtagagattgtaatactcatttgacttgcagatacctcaccccgaacccacctactataatgtaaaagccaagaatgcaaaccctttcctcaccccgtgaaggtaaagtcctcagagccaaggagagaaggctcagggatggtacctrggtgtttccaacactaaccatgcattgtagtttttagtgttcaagtttaagcttcttatgttaaagttaccccagctttaattatattgtaacaagatttatttttgtaattccatttttggattcttgatttcttggtaaagaaatacagttatttttgtataccaatcttatatagtgttacattccaaaatttgttcatgagtcctaacactttttagtaaatttcttatgattttctaaatgcaagatcatgtcatctgtacataaagataactgtacttcttcctttccaatctagatgcagtttatttatttacattgccaagttgtcccagctaccactgttatcaagtaaaagggtctcactacccaaagctttagaagccagtaacatgacactaagtttttgagaagagaaaaactttaaagtcaaaccaaaacctatgggatacaggccaggcgcagtggctcatgcctgtaatcccagcactttgggaggccgagttgggtggatcacaaggtcaggagatcgagaccatcctggctaacacggtgaaaccccgtctctactaaaaatacaaaaaacaaaaattagctgggcatggtggcgggcacctgtagtcccagctactcggctgaggcaggagaatggcatgaacccagaaggcagagcttgtagtaagccaagattgcaccactgcactccagcctgggcaacagagagagactccgtctccaaaaataaacaaaaacaaaaaaacaaaaaacaaacctatgggatacagtaaaaacagtactaaggagtaagtttatagcaaaaagcacctacatcaaaaaaagtagaaaaacttcaaataaacaacctaataatgcatcttaaatagttagaaaagcaagagcaaaccaaaaccaaaattagtagaaggaaacataacaaagatcagagcagaaataaatgaaattgaaatttaaaaatataaaatatcaatgaaatgaaaagttaatatttttttaaaagaccaacaaaatcaacaaacatttagccagactaagagaaaagagagaagactcaaatacataaaaccagagattaaaaaggagacactgcaactgatactgcagaaattcaagtaatcattagaaactattatgaccaactatattccaataaattgaaaaacctgcaagtcatggccaggcaccgtggctcatgcctgtaatcccaacactttgggaagccaaggcaggtgatcacctgagatcaggagttcaagaccagcctggccaacatggtgaaaccccatctctactaaaaatacaaaaattagccaggcatggtggcgtgcacctgtactcccagctactccagaggctgaggcaggagaatagcgtgaacctgggaggcagaagttgcagtgagctgagattgtaccaagctccatcctgggtgacagagcaagactccatctcaaaaaaaaaaaaaaaaaaaaaaaaaaaaaaaaaaaaaacccccacccaacccccaaccctaaaaaaacgggttaaaggaaatggaccccttaaaaaaacttttcctaccaaaaaaaaacc

SEQ ID NO: 6973 - DNA, 2496 bp, Homo sapiens
aaactgggagaggcagcgaaagcacttcacgcctcagatcaccagaagatgctcccaccagcaccgtgacagtttgccagtgccatggcaacacaggaagtccccaccccttgccatggaaacagctggaagttactgcccatttctagctatttctgagtaacccgccccttaattagcatgtcattaaaagtgaattataaaaatgactacaagccacccctaggctgctactctgggagcacaacccacagagggctccctgccctgcaggagcggacgcaggggctgtacaccgccaatggtctccatagagctgctttattccaccacaggggcttgcttttggattccttcctgagcgacgtcaaagaacctgcccttcctcagtgtgactcttgcctaaaatctatccctggttttctcttttcctaagcatgccctgacttgttctttcatctcctctgaacttgcaattgctcctcagtgactctattctgcagatccagaaaactcaaccttaatcttcccagagccctgttgtctccaatattggaatatctagccttgctttctcagacgcctagattacaggcctctctcttgaacacctattggtaaggtatccggggatcctttaaatacacaatgattggcagggtttacataggggaaatcagtgtctgacaattcgccttccaggatatggattgtcattccctctctttgtgggccccagtctcctatacataaaagtagagattgtaatactcatttgacttgcagatacctcaccccgaacccacctactataatgtaaaagccaagaatgcaaaccctttcctcaccccgtgaaggtaaagtcctcagagccaaggagagaaggctcagggatggtacctaggtgtttccaacactaaccatgcattgtagtttttagtgttcaagtttaagcttcttatgttaaagttaccccagctttaattatattgtaacaagatttatttttgtaattccatttttggattcttgatttcttggtaaagaaatacagttatttttgtataccaatcttatatagtgttacattccaaaatttgttcatgagtcctaacactttttagtaaatttcttatgattttctaaatgcaagatcatgtcatctgtacataaagataactgtacttcttcctttccaatctagatgcagtttatttatttacattgccaagttgtcccagctaccactgttatcaagtaaaagggtctcactacccaaagctttagaagccagtaacatgacactaagtttttgagaagagaaaaactttaaagtcaaaccaaaacctatgggatacaggccaggcgcagtggctcatgcctgtaatcccagcactttgggaggccgagttgggtggatcacaaggtcaggagatcgagaccatcctggctaacacggtgaaaccccgtctctactaaaaatacaaaaaacaaaaattagctgggcatggtggcgggcacctgtagtcccagctactcggctgaggcaggagaatggcatgaacccagaaggcagagcttgtagtaagccaagattgcaccactgcactccagcctgggcaacagagagagactccgtctccaaaaataaacaaaaacaaaaaaacaaaaaacaaacctatgggatacagtaaaaacagtactaaggagtaagtttatagcaaaaagcacctacatcaaaaaaagtagaaaaacttcaaataaacaacctaataatgcatcttaaatagttagaaaagcaagagcaaaccaaaaccaaaattagtagaaggaaacataacaaagatcagagcagaaataaatgaaattgaaatttaaaaatataaaatatcaatgaaatgaaaagttaatatttttttaaaagaccaacaaaatcaacaaacatttagccagactaagagaaaagagagaagactcaaatacataaaaccagagattaaaaaggagacactgcaactgatactgcagaaattcaagtaatcattagaaactattatgaccaactatattccaataaattgaaaaacctgcaagtmatggccaggcaccgtggctcatgcctgtaatcccaacactttgggaagccaaggcaggtgatcacctgagatcaggagttcaagaccagcctggccaacatggtgaaaccccatctctactaaaaatacaaaaattagccaggcatggtggcgtgcacctgtactcccagctactccagaggctgaggcaggagaatagcgtgaacctgggaggcagaagttgcagtgagctgagattgtaccaagctccatcctgggtgacagagcaagactccatctcaaaaaaaaaaaaaaaaaaaaaaaaaaaaaaaaaaaaaacccccacccaacccccaaccctaaaaaaacgggttaaaggaaatggaccccttaaaaaaacttttcctaccaaaaaaaaacc

SEQ ID NO: 6974 - DNA, 2496 bp, Homo sapiens
aaactgggagaggcagcgaaagcacttcacgcctcagatcaccagaagatgctcccaccagcaccgtgacagtttgccagtgccatggcaacacaggaagtccccaccccttgccatggaaacagctggaagttactgcccatttctagctatttctgagtaacccgccccttaattagcatgtcattaaaagtgaattataaaaatgactacaagccacccctaggctgctactctgggagcacaacccacagagggctccctgccctgcaggagcggacgcaggggctgtacaccgccaatggtctccatagagctgctttattccaccacaggggcttgcttttggattccttcctgagcgacgtcaaagaacctgcccttcctcagtgtgactcttgcctaaaatctatccctggttttctcttttcctaagcatgccctgacttgttctttcatctcctctgaacttgcaattgctcctcagtgactctattctgcagatccagaaaactcaaccttaatcttcccagagccctgttgtctccaatattggaatatctagccttgctttctcagacgcctagattacaggcctctctcttgaacacctattggtaaggtatccggggatcctttaaatacacaatgattggcagggtttacataggggaaatcagtgtctgacaattcgccttccaggatatggattgtcattccctctctttgtgggccccagtctcctatacataaaagtagagattgtaatactcatttgacttgcagatacctcaccccgaacccacctactataatgtaaaagccaagaatgcaaaccctttcctcaccccgtgaaggtaaagtcctcagagccaaggagagaaggctcagggatggtacctaggtgtttccaacactaaccatgcattgtagtttttagtgttcaagtttaagcttcttatgttaaagttaccccagctttaattatattgtaacaagatttatttttgtaattccatttttggattcttgatttcttggtaaagaaatacagttatttttgtataccaatcttatatagtgttacattccaaaatttgttcatgagtcctaacactttttagtaaatttcttatgattttctaaatgcaagatcatgtcatctgtacataaagataactgtacttcttcctttccaatctagatgcagtttatttatttacattgccaagttgtcccagctaccactgttatcaagtaaaagggtctcactacccaaagctttagaagccagtaacatgacactaagtttttgagaagagaaaaactttaaagtcaaaccaaaacctatgggatacaggccaggcgcagtggctcatgcctgtaatcccagcactttgggaggccgagttgggtggatcacaaggtcaggagatcgagaccatcctggctaacacggtgaaaccccgtctctactaaaaatacaaaaaacaaaaattagctgggcatggtggcgggcacctgtagtcccagctactcggctgaggcaggagaatggcatgaacccagaaggcagagcttgtagtaagccaagattgcaccactgcactccagcctgggcaacagagagagactccgtctccaaaaataaacaaaaacaaaaaaacaaaaaacaaacctatgggatacagtaaaaacagtactaaggagtaagtttatagcaaaaagcacctacatcaaaaaaagtagaaaaacttcaaataaacaacctaataatgcatcttaaatagttagaaaagcaagagcaaaccaaaaccaaaattagtagaaggaaacataacaaagatcagagcagaaataaatgaaattgaaatttaaaaatataaaatatcaatgaaatgaaaagttaatatttttttaaaagaccaacaaaatcaacaaacatttagccagactaagagaaaagagagaagactcaaatacataaaaccagagattaaaaaggagacactgcaactgatactgcagaaattcaagtaatcattagaaactattatgaccaactatattccaataaattgaaaaacctgcaagtcatggccaggcaccgtggctcatgcctgtaatcccaacactttgggaagccaaggcaggtgatcacctgagatcaggagttcaagaccagyctggccaacatggtgaaaccccatctctactaaaaatacaaaaattagccaggcatggtggcgtgcacctgtactcccagctactccagaggctgaggcaggagaatagcgtgaacctgggaggcagaagttgcagtgagctgagattgtaccaagctccatcctgggtgacagagcaagactccatctcaaaaaaaaaaaaaaaaaaaaaaaaaaaaaaaaaaaaaacccccacccaacccccaaccctaaaaaaacgggttaaaggaaatggaccccttaaaaaaacttttcctaccaaaaaaaaacc

SEQ ID NO: 6975 - DNA, 2496 bp, Homo sapiens
aaactgggagaggcagcgaaagcacttcacgcctcagatcaccagaagatgctcccaccagcaccgtgacagtttgccagtgccatggcaacacaggaagtccccaccccttgccatggaaacagctggaagttactgcccatttctagctatttctgagtaacccgccccttaattagcatgtcattaaaagtgaattataaaaatgactacaagccacccctaggctgctactctgggagcacaacccacagagggctccctgccctgcaggagcggacgcaggggctgtacaccgccaatggtctccatagagctgctttattccaccacaggggcttgcttttggattccttcctgagcgacgtcaaagaacctgcccttcctcagtgtgactcttgcctaaaatctatccctggttttctcttttcctaagcatgccctgacttgttctttcatctcctctgaacttgcaattgctcctcagtgactctattctgcagatccagaaaactcaaccttaatcttcccagagccctgttgtctccaatattggaatatctagccttgctttctcagacgcctagattacaggcctctctcttgaacacctattggtaaggtatccggggatcctttaaatacacaatgattggcagggtttacataggggaaatcagtgtctgacaattcgccttccaggatatggattgtcattccctctctttgtgggccccagtctcctatacataaaagtagagattgtaatactcatttgacttgcagatacctcaccccgaacccacctactataatgtaaaagccaagaatgcaaaccctttcctcaccccgtgaaggtaaagtcctcagagccaaggagagaaggctcagggatggtacctaggtgtttccaacactaaccatgcattgtagtttttagtgttcaagtttaagcttcttatgttaaagttaccccagctttaattatattgtaacaagatttatttttgtaattccatttttggattcttgatttcttggtaaagaaatacagttatttttgtataccaatcttatatagtgttacattccaaaatttgttcatgagtcctaacactttttagtaaatttcttatgattttctaaatgcaagatcatgtcatctgtacataaagataactgtacttcttcctttccaatctagatgcagtttatttatttacattgccaagttgtcccagctaccactgttatcaagtaaaagggtctcactacccaaagctttagaagccagtaacatgacactaagtttttgagaagagaaaaactttaaagtcaaaccaaaacctatgggatacaggccaggcgcagtggctcatgcctgtaatcccagcactttgggaggccgagttgggtggatcacaaggtcaggagatcgagaccatcctggctaacacggtgaaaccccgtctctactaaaaatacaaaaaacaaaaattagctgggcatggtggcgggcacctgtagtcccagctactcggctgaggcaggagaatggcatgaacccagaaggcagagcttgtagtaagccaagattgcaccactgcactccagcctgggcaacagagagagactccgtctccaaaaataaacaaaaacaaaaaaacaaaaaacaaacctatgggatacagtaaaaacagtactaaggagtaagtttatagcaaaaagcacctacatcaaaaaaagtagaaaaacttcaaataaacaacctaataatgcatcttaaatagttagaaaagcaagagcaaaccaaaaccaaaattagtagaaggaaacataacaaagatcagagcagaaataaatgaaattgaaatttaaaaatataaaatatcaatgaaatgaaaagttaatatttttttaaaagaccaacaaaatcaacaaacatttagccagactaagagaaaagagagaagactcaaatacataaaaccagagattaaaaaggagacactgcaactgatactgcagaaattcaagtaatcattagaaactattatgaccaactatattccaataaattgaaaaacctgcaagtcatggccaggcaccgtggctcatgcctgtaatcccaacactttgggaagccaaggcaggtgatcacctgagatcaggagttcaagaccagcctggccaacatggtgaaaccccatctctactaaaaatacaaaaattagccaggcatggtggcgtgcacctgtactcccagctactccagaggctgaggcaggagaatmgcgtgaacctgggaggcagaagttgcagtgagctgagattgtaccaagctccatcctgggtgacagagcaagactccatctcaaaaaaaaaaaaaaaaaaaaaaaaaaaaaaaaaaaaaacccccacccaacccccaaccctaaaaaaacgggttaaaggaaatggaccccttaaaaaaacttttcctaccaaaaaaaaacc

SEQ ID NO: 6976 - DNA, 2496 bp, Homo sapiens
aaactgggagaggcagcgaaagcacttcacgcctcagatcaccagaagatgctcccaccagcaccgtgacagtttgccagtgccatggcaacacaggaagtccccaccccttgccatggaaacagctggaagttactgcccatttctagctatttctgagtaacccgccccttaattagcatgtcattaaaagtgaattataaaaatgactacaagccacccctaggctgctactctgggagcacaacccacagagggctccctgccctgcaggagcggacgcaggggctgtacaccgccaatggtctccatagagctgctttattccaccacaggggcttgcttttggattccttcctgagcgacgtcaaagaacctgcccttcctcagtgtgactcttgcctaaaatctatccctggttttctcttttcctaagcatgccctgacttgttctttcatctcctctgaacttgcaattgctcctcagtgactctattctgcagatccagaaaactcaaccttaatcttcccagagccctgttgtctccaatattggaatatctagccttgctttctcagacgcctagattacaggcctctctcttgaacacctattggtaaggtatccggggatcctttaaatacacaatgattggcagggtttacataggggaaatcagtgtctgacaattcgccttccaggatatggattgtcattccctctctttgtgggccccagtctcctatacataaaagtagagattgtaatactcatttgacttgcagatacctcaccccgaacccacctactataatgtaaaagccaagaatgcaaaccctttcctcaccccgtgaaggtaaagtcctcagagccaaggagagaaggctcagggatggtacctaggtgtttccaacactaaccatgcattgtagtttttagtgttcaagtttaagcttcttatgttaaagttaccccagctttaattatattgtaacaagatttatttttgtaattccatttttggattcttgatttcttggtaaagaaatacagttatttttgtataccaatcttatatagtgttacattccaaaatttgttcatgagtcctaacactttttagtaaatttcttatgattttctaaatgcaagatcatgtcatctgtacataaagataactgtacttcttcctttccaatctagatgcagtttatttatttacattgccaagttgtcccagctaccactgttatcaagtaaaagggtctcactacccaaagctttagaagccagtaacatgacactaagtttttgagaagagaaaaactttaaagtcaaaccaaaacctatgggatacaggccaggcgcagtggctcatgcctgtaatcccagcactttgggaggccgagttgggtggatcacaaggtcaggagatcgagaccatcctggctaacacggtgaaaccccgtctctactaaaaatacaaaaaacaaaaattagctgggcatggtggcgggcacctgtagtcccagctactcggctgaggcaggagaatggcatgaacccagaaggcagagcttgtagtaagccaagattgcaccactgcactccagcctgggcaacagagagagactccgtctccaaaaataaacaaaaacaaaaaaacaaaaaacaaacctatgggatacagtaaaaacagtactaaggagtaagtttatagcaaaaagcacctacatcaaaaaaagtagaaaaacttcaaataaacaacctaataatgcatcttaaatagttagaaaagcaagagcaaaccaaaaccaaaattagtagaaggaaacataacaaagatcagagcagaaataaatgaaattgaaatttaaaaatataaaatatcaatgaaatgaaaagttaatatttttttaaaagaccaacaaaatcaacaaacatttagccagactaagagaaaagagagaagactcaaatacataaaaccagagattaaaaaggagacactgcaactgatactgcagaaattcaagtaatcattagaaactattatgaccaactatattccaataaattgaaaaacctgcaagtcatggccaggcaccgtggctcatgcctgtaatcccaacactttgggaagccaaggcaggtgatcacctgagatcaggagttcaagaccagcctggccaacatggtgaaaccccatctctactaaaaatacaaaaattagccaggcatggtggcgtgcacctgtactcccagctactccagaggctgaggcaggagaatagcktgaacctgggaggcagaagttgcagtgagctgagattgtaccaagctccatcctgggtgacagagcaagactccatctcaaaaaaaaaaaaaaaaaaaaaaaaaaaaaaaaaaaaaacccccacccaacccccaaccctaaaaaaacgggttaaaggaaatggaccccttaaaaaaacttttcctaccaaaaaaaaacc

SEQ ID NO: 6977 - DNA, 680 bp, Homo sapiens
atatctgcacccaacttccccttccagatttatcaccctgtcctggccctgatgagtgggcagttgacaatgtgacctgttcacagctgatgggacccaaagggaggccacatcatagactaattgagccaatcagatactctctctaggaatttcaaatgagagacataaagagaagttctacctgatagttggcaattttccaacactgctatttttgactatgggctatttttatttttttttttwaaaaaagaatgctcaaaaagtattttcctatttaaaaaaatcactgtcctctatccccttaagtactagatgagcccctgctttaaccaccaggtttgctgagctgaggaggataagaggaaagaatcctcatgtctcaatgcaacacaaaaacactaaactcaaagtgtgaataaaacctggtaggcagaaaggctcaacaaggacttagtcagtggccggattctgtgctggattctgagatggctgctgagatgtttgaaacttgatcactggcttcataacaataataattctaagaatagcccccacgtttggggcattgactatgtctgaatcgttgcaccagatgccttgaatattgacagcaaccttatggggaagctgtgattatagagtcaggtccaaaagtttaaaaaattgaaatatct

SEQ ID NO: 6978 - DNA, 808 bp, Homo sapiens
agccaaactccacccctgctttctttcagagcctccattccacgcccctggaattcctctactccctccgaacctattccttcctccccagccactcccctactcagtagcctcagttgacttccaagtatctattgtaagaaatccaaatttgtggcagggcgtggtggctcatgcctgtaatcccagcactttgggaggccgaggcgggcagatcatgaggtcaggagatcaggaccatcctggctaatatggtgaaaccctgtctctactaaaaatacaaaaaattagccaggtgtggtggcatgtgcctatattcccatctactcgggaggctgaggaaggagaatcacttgagcccaggaggggaggttgcagtgagcccaggtcgtgccactgcactccagtctgggcaacaagagtgaaactccatcaaaaaaaaaaaagaatgaaagaaagaaagaaaaagaaggaaagaaagaaagaaagaaagaaagaaagaaagaaagaaagaaagaaagaaagaaagaaagaaagaaaraagaaagaaatccaaatttgtaaatcctttcccatttgctatttcttttggttccccattagagttcctataaaagttactgatgaagcactaaaacctccctgactttccattatcttccaataaggcttaaactttttgataacagtcctacaattattaatgagttttcagcctacagaagtacaatttagcagctgtaggtgagataaaggtaatacaagagattttggtcatcaaggtaagaaaaaggaatctatctagagg

SEQ ID NO: 6979 - DNA, 808 bp, Homo sapiens
agccaaactccacccctgctttctttcagagcctccattccacgcccctggaattcctctactccctccgaacctattccttcctccccagccactcccctactcagtagcctcagttgacttccaagtatctattgtaagaaatccaaatttgtggcagggcgtggtggctcatgcctgtaatcccagcactttgggaggccgaggcgggcagatcatgaggtcaggagatcaggaccatcctggctaatatggtgaaaccctgtctctactaaaaatacaaaaaattagccaggtgtggtggcatgtgcctatattcccatctactcgggaggctgaggaaggagaatcacttgagcccaggaggggaggttgcagtgagcccaggtcgtgccactgcactccagtctgggcaacaagagtgaaactccatcaaaaaaaaaaaagaatgaaagaaagaaagaaaaagaaggaaagaaagaaagaaagaaagaaagaaagaaagaaagaaagaaagaaagaaagaaagaaagaaagaaaaaaraaagaaatccaaatttgtaaatcctttcccatttgctatttcttttggttccccattagagttcctataaaagttactgatgaagcactaaaacctccctgactttccattatcttccaataaggcttaaactttttgataacagtcctacaattattaatgagttttcagcctacagaagtacaatttagcagctgtaggtgagataaaggtaatacaagagattttggtcatcaaggtaagaaaaaggaatctatctagagg

SEQ ID NO: 6980 - DNA, 1955 bp, Homo sapiens
  misc_feature (1)...(1955): n = A,T,C or G
ttttatttttttttttttaagatggagtctcgctctgtcacccagactggagtgcagtggcactatctcggctcactcccgagtagctgggattacaggcagctgacaccatgcctggctaatgtttttatgtgtttgtttgtttggttttgagacagagtctcgctctgttgcccaggctggagtgcagtggcctgatctcggctcactgcaacctccgcctcccgggttcaagtgattctcctgcctcagcytcccgagtagctgggtggcacgcaccaccacacctggctaatttgttttgttttgttttgtttttgtatttttagtagagacggggttttgccatatgggccagactggtctcaaactcctgacctcaggtgatctgccctcctcggcctcccaaactgctaggattacaggcatgagccaccacacctggcctgcatactctttctctctgataacttgccttataaattattgttgtcttgacctccccaaagtctgatctgtgtctcctcatttcagcgaggctatcatactctgttagtaatcccttttcttgtactgtagtccagaaagccagggaagctggagggctcactgaatttgttttccttctctcagtaatcaaaattctgcatgcctgttgtccgatgtctgaagatagttgtttcatatattttgtctagttttctaatttgtttttattgctggaaggctaatgaactaccagtcatgctatcatgatcacagcagagtcagactgaagttttattaaatttttttgagcctttatctctattagatacaatgttaaaagctttatttgcattgttttatctaaacttcatataaaccccacaaatttgcagtactttttttcttattatagacacataaactgagagttatgaaggttaagaaacttgccccaagtcacagagctggtaagtcatgagccaggagccagacctatctgattcttccccttcgttaaaaagattaccttcccatttaatattcaacgattatttttgctgattataaaagtaatgcatgattattaaataaatctttgaaaatataaagatttataaaaagaaaatctaaaattcccatagttgcactacccagggatagacctgctaacatatctttctattcaagttatatatacatatatatgtctcatatatacacatatgtgaaggctaatactgagcgtcaacttgattggaatgaagggtgcaaaatattgatcttgggtgtgtccatgagggtactgctaaaggagattaacatttgtgtcagtgggctgggaaaggcagacccacccttaacctggatgggcaccatctaatcagctgtcagtgaggccagaatataaagtaggcagaaaaatgtgaaaaggctaaactggcttagcctctcagcctacatctttctcccgtgctggatgcttcctacccttgaacatcagactccaagttcttcagctttggaaaggctcagactggcttccttgctcctcaacttgcagacagcctgttgtgggaccttgtgatcgtgttagttaatactacttaataaacttccatatatatatatctatagatatcgatatcgatatctatatctatatctataccaagtcacagagctggtaagtcatgagccaggatccagacctatctgattcttccccttcgttaaaaagattaccttcccatttaatattcaacgattatttttgctgattataaaagtaatgcatgattatatctatatataatatatatagatatatatagatatctatagatatatatagctatatatatctatagatatatatatagatatatatagctatatatatctatagatatatatagatatatagatatatagatatcccattagttctgtccntctagagaacccta

SEQ ID NO: 6981 - DNA, 1955 bp, Homo sapiens
  misc_feature (1)...(1955): n = A,T,C or G
ttttatttttttttttttaagatggagtctcgctctgtcacccagactggagtgcagtggcactatctcggctcactcccgagtagctgggattacaggcagctgacaccatgcctggctaatgtttttatgtgtttgtttgtttggttttgagacagagtctcgctctgttgcccaggctggagtgcagtggcctgatctcggctcactgcaacctccgcctcccgggttcaagtgattctcctgcctcagcctcccgagtagctgggtggcacgcaccaccacacctggctaatttgttttgttttgttttgtttttgtatttttagtagagacggggttttgccatatsggccagactggtctcaaactcctgacctcaggtgatctgccctcctcggcctcccaaactgctaggattacaggcatgagccaccacacctggcctgcatactctttctctctgataacttgccttataaattattgttgtcttgacctccccaaagtctgatctgtgtctcctcatttcagcgaggctatcatactctgttagtaatcccttttcttgtactgtagtccagaaagccagggaagctggagggctcactgaatttgttttccttctctcagtaatcaaaattctgcatgcctgttgtccgatgtctgaagatagttgtttcatatattttgtctagttttctaatttgtttttattgctggaaggctaatgaactaccagtcatgctatcatgatcacagcagagtcagactgaagttttattaaatttttttgagcctttatctctattagatacaatgttaaaagctttatttgcattgttttatctaaacttcatataaaccccacaaatttgcagtactttttttcttattatagacacataaactgagagttatgaaggttaagaaacttgccccaagtcacagagctggtaagtcatgagccaggagccagacctatctgattcttccccttcgttaaaaagattaccttcccatttaatattcaacgattatttttgctgattataaaagtaatgcatgattattaaataaatctttgaaaatataaagatttataaaaagaaaatctaaaattcccatagttgcactacccagggatagacctgctaacatatctttctattcaagttatatatacatatatatgtctcatatatacacatatgtgaaggctaatactgagcgtcaacttgattggaatgaagggtgcaaaatattgatcttgggtgtgtccatgagggtactgctaaaggagattaacatttgtgtcagtgggctgggaaaggcagacccacccttaacctggatgggcaccatctaatcagctgtcagtgaggccagaatataaagtaggcagaaaaatgtgaaaaggctaaactggcttagcctctcagcctacatctttctcccgtgctggatgcttcctacccttgaacatcagactccaagttcttcagctttggaaaggctcagactggcttccttgctcctcaacttgcagacagcctgttgtgggaccttgtgatcgtgttagttaatactacttaataaacttccatatatatatatctatagatatcgatatcgatatctatatctatatctataccaagtcacagagctggtaagtcatgagccaggatccagacctatctgattcttccccttcgttaaaaagattaccttcccatttaatattcaacgattatttttgctgattataaaagtaatgcatgattatatctatatataatatatatagatatatatagatatctatagatatatatagctatatatatctatagatatatatatagatatatatagctatatatatctatagatatatatagatatatagatatatagatatcccattagttctgtccntctagagaacccta

SEQ ID NO: 6982 - DNA, 856 bp, Homo sapiens
cggtgattacactactgcattccagcctgggcacagagagagaccctgtctcaaaataaatacacaaatatataaaatcctaagagttaattctttagaaagcattttattttagcttaacacaattaatttgatctatcagaaaaccctacctgcttgatgagccatatttactatcatcactytctgtctaccattacaatcagtgattattgattgggttagtgaagagttttgaatagttttaacaactgttttggcgctcaaattgagacttgattaacaaatgcaaaactagtcaaccatgactaaaatgaaactgcttcaataattacataatgaagatggtagcgagtttttattataagggctatgtaaatgcagcccactgtactattataatattaatcacaagttttttgaggaaaggtatgtgatataactcccatccaaggtccctagcagaatgtctttcacaaagcagatgttcattaaatgacagctgaataataaaacactattatagagaactcaagtatgaatctagtatttcattttaaaaacttgtctgattatacttacatatacaatactgcatgcagcagctactcgataaacgtgtgtaaaagattaagtttggtcaaacaattgctctgaatcaaatttgtgatataattcctgactcagcccccacagaatatttaaaatatagtaatacagtaaaataatttttccaccacttcatgaacagtcagtagggtcttgaatgctacctttcaatatgcaatatggtggccttaggaagagaggagttttttttttctcaacacgtagaatcagggtcttaagaatgact

SEQ ID NO: 6983 - DNA, 856 bp, Homo sapiens
cggtgattacactactgcattccagcctgggcacagagagagaccctgtctcaaaataaatacacaaatatataaaatcctaagagttaattctttagaaagcattttattttagcttaacacaattaatttgatctatcagaaaaccctacctgcttgatgagccatatttactatcatcactctctgtctaccattacaatcagtgattattgattgggttagtgaagagttttgaatagttttaacaactgttttggsgctcaaattgagacttgattaacaaatgcaaaactagtcaaccatgactaaaatgaaactgcttcaataattacataatgaagatggtagcgagtttttattataagggctatgtaaatgcagcccactgtactattataatattaatcacaagttttttgaggaaaggtatgtgatataactcccatccaaggtccctagcagaatgtctttcacaaagcagatgttcattaaatgacagctgaataataaaacactattatagagaactcaagtatgaatctagtatttcattttaaaaacttgtctgattatacttacatatacaatactgcatgcagcagctactcgataaacgtgtgtaaaagattaagtttggtcaaacaattgctctgaatcaaatttgtgatataattcctgactcagcccccacagaatatttaaaatatagtaatacagtaaaataatttttccaccacttcatgaacagtcagtagggtcttgaatgctacctttcaatatgcaatatggtggccttaggaagagaggagttttttttttctcaacacgtagaatcagggtcttaagaatgact

SEQ ID NO: 6984 - DNA, 759 bp, Homo sapiens
tcccacctcagcctcctgagtagcagggattgcaggtgtgtaccaccacacccagcttgacctgtagtgcttttagaaactacsgtatgtattcctaggccccactcctgaggtacttagtaggtctaggatggcttggagcttctgtttttttcaaagctctccaggtgactctgctgcccaggccaggcttgagaaccactgccttgtggatacagattgtcagacaagcagtaattctctccgtgctccagaagggcaactttactttctgacccagattcaggcggctttacttgttctcgtatggactgaagccagagactgggattctctttgtagtcatgtcttacaaggtttagggtaaccacactgtcacagaaagaatcaggtgtcctttacacatcctggtaactggctgtctgggtcaggttacaccaggtaggggtcatgggactacctagagtctgaacagagcattgtcagaactagtgtggtttgtgatgcttgcgctgtgggccacacctctgcaagcaggagggaaggaatgaggaacagccttctcaggtctgaatcctcaaaaggaggcctccaggtttctcctgttctcacgtccctgttttcattcctgttggcctccaaacattgcagctgttctctcctaagccattttcccctgttgcttagtttctttccctttcttccaaaatgggattccctaaataagtatttgggccttttttatttaaaagattaaac

SEQ ID NO: 6985 - DNA, 627 bp, Homo sapiens
agtctttcttataataattccataaacatagctaggtccctgcaagggacatcctacttacaagacactgcactcagggaagccccaagatatggtgtccccatcaggtgtttatagttcatttatatatagtttaagcttagatgcaattttataagtcatttttataatgcttggtaacacaactgacaatctacctttagcacatttccaggggtacaaaactagaaagtggagcgtaagtcagtctcaaacaagggatttattaaaactttacccacaccaataaaattcaaactagctacattattaatgttttgctgaaattacatttctactcaagcataaatggtgctgttggggagttttttwaaaaaaatgtaatggctttactgagaaataagtagtgtacagtaaagtgcacataaagtgtgtactttgatgagttttgagatgtctacatctgtgaagtcatcctacaattaaaataatcaatgtatccataacccctaaagtttcatcttgttcctttgcaattcatgcttccttgagtataaacacagtaaagtgcccaaataatcgtacagcatgataaatttttgcaaggtctatacatccatgcaaaga

SEQ ID NO: 6986 - DNA, 783 bp, Homo sapiens
tcctgccatagcctcctgaatagctgggaccacagagacacactactgcaaccatctaatttttaaattttttggttgggcacagtggctcatacctgtaatcgcagcattttgggaggccaaggcaggtgaatcatctgaggtcaagagtttgagaccagcctggctagcatggtgaaacgctgtctctactaaaaatacaaaaattagccaggcgtggtggcaggcgcctgtaatcccagctacttgggaggctgaggcaggtgaatcgcttgaaccrgggaggcagaggttgcagtgcgctgagatcacaccactggactccagcctgggcaacagagtgagactctgtctaaaaaatacaaataatgataataataataaaaaaataatattttttacattttttttttggtagagatggggtctcaccatcttgcctaggatggtcttgaatttctgggtctaagcaatcctctcacctcagcctcctgagtagctgggaccaaaaaaaaaagcagggggaagtgggggaagaactaaaagattctgcaatatagctgatctttctgcccagaaggctaaataaatttccagatttctgtgtggttctttttattatttaggtctgtgttcaagtgtgtacctctgcagagagacattcactcatcattctacctaaagaagactccatatattttcattatggcacttctttctgaaatttccttatctatctgtttatagtttcttctctgtacttcttccataggaatgcaagct

SEQ ID NO: 6987 - DNA, 830 bp, Homo sapiens
caaaaaaaaaaaatagctgggcatggtggcgcacgcctgtaatcacacctactcgggaggctgaggtacaagcatcgtttgaacctgggaggcagaggttgcagtgagccgagatggcgccactgcactccagcctgagtgacagagtgagactctgtctcaaaaaaaaaaaaaaaaaaaccaggcacagtggctcacgcctgtaatcccagcagtttgggaggccgaggcgggtggatcacgaggtcaggagtttgagaccagcctgactgacacggtgaaaccccgtctctactaaaaatacaaaaattagccaggcgtrgtggtgcacacctgtaatcccagctactcaggaggctgaagcagaagaactgcttgaaattcccaaggcggagattgcagtgagccgagattgtgccacggcactccagcctgggtgacagagcaagactctgtcgcaaaaaaaaaaaaaaaaaaaaaaaaaaagtctttataattaggctacttggcaaacatgattgggatatactgtggatgaatagtcaagacaatgctgctaccatttattatcaaatctgtattgagtacctggctgtctatgatccctgtgaagatctcctgaatattcttctttacgggtctgcatgttactgcaattacttcttcatgtacaatttaattaattaaatctctcatacatttttaagcatcttctttccctaccaaacctacaaacctatatgcccttgaaaccatcttctcttttgctcctgatgcaacgaaggctaagttcctcctcctgggaaaggctaatccttacccacagactt

SEQ ID NO: 6988 - DNA, 589 bp, Homo sapiens
tgtcagttaacatgacatgcttccaaaggcacaatcatcccattggcttgttttggattggacattcaatcttatcacaagagtgtatttttcaacttgatctcaccttttcaacttcaaagttgcaggcagtgcaatgcatgtagttctcttgctatttcaggggamctttgataagctgtaaagtgatatgtggctgcaatttaatcacttaaaaatttaataaaaactaaaggaaaggaatattattttttctttgaatatgtcaacagggaacatatttcatggtgttttaaactttagtagatattttgataggaatgcttaatttatctgacacaggtatcatattcattattttcattctgtaatgcagcctaaatttcaaactcatatgtgctttcaatatactgactcaccctttttaaggaatagctccttgactcaactttaaaagcaaactccttccggaacttctctcttcctgtgccctaaacccctcaacattgatttatttttattatagccagacattaagctacatgtgatcattatgttcttttcatgggaccaaatctttccttgaata

SEQ ID NO: 6989 - DNA, 627 bp, Homo sapiens
tttaagcccagggttccaaccctggacaacatagtgagactgtgtctcaacaacaacaamaacaacaacaaaaaaaaaaaaaaaaaaaaaagctggataattttagggttgtaagcatcgttaatccaatttcttaacatagacatataatattgattttcaaactcccagctgaatatttttcccctaaaacatactgtttccaaggttaatgtgtgttatgaaagataaaaatgtatgggagataattatacgagagacctgatatggtggattaattgcaaaatggccctcaattctctgctcctctttgtatccattccctctgatatctgactttgcaactcctcccatcaagaggtagggtcaatttccccatcccttgaacctggattggctttgtgacttgctttgaaaacaggatacagggggagtgaaagtgtgccagttctgagactaggtctccaaaggtcttgtgagcttctcctctctcagaattctgcctaccaccaagctggccagctggatgatgagacacatgtggttgtgtggcttggccatctcatcactccagctttcagtcagccaaccaccagacatgtgagtgaggacaccctcaaccagccg

SEQ ID NO: 6990 - DNA, 627 bp, Homo sapiens
tttaagcccagggttccaaccctggacaacatagtgagactgtgtctcaacaacaacaaaaacaacaacaaaaaaaaaaaaaaaaaaaaaagctggataattttagggttgtaagcatcgttaatccaatttcttaacatagacayataatattgattttcaaactcccagctgaatatttttcccctaaaacatactgtttccaaggttaatgtgtgttatgaaagataaaaatgtatgggagataattatacgagagacctgatatggtggattaattgcaaaatggccctcaattctctgctcctctttgtatccattccctctgatatctgactttgcaactcctcccatcaagaggtagggtcaatttccccatcccttgaacctggattggctttgtgacttgctttgaaaacaggatacagggggagtgaaagtgtgccagttctgagactaggtctccaaaggtcttgtgagcttctcctctctcagaattctgcctaccaccaagctggccagctggatgatgagacacatgtggttgtgtggcttggccatctcatcactccagctttcagtcagccaaccaccagacatgtgagtgaggacaccctcaaccagccg

SEQ ID NO: 6991 - DNA, 791 bp, Homo sapiens
gatccttccagttgtagctttcaaagcctccactccctaagatccctgtttcttttgagacatcagcctctcctgcctcttctctgatccccacaacccctgagacctgacccctaccaagtgttgagaggaagctgggacacaggcgctggtcaggggcctggcactggagacagggggctccttttgagaaatggcccccagaaaaggcctaggctgtgctcccagttgggctcatggtgggctccagaaacattccagggaagaccaccgctgggacccacaggcagtgcaggagtgagctggggatgcaaacccagcaggcgagggatgaaagggctggtggagaagacagttcacggtagccagggtcagagcatggccaaaggatgaggctcgaatcaggacaccaaagaacgcgagaagtttggttttaccccctgggattgttaataggcctgaatgaaggtttctgaaaagacaactaatgccatgagtaatgccactgaggggcctgtgctgggttgaatarcggcccttccaagttcaagtttactggaatcccagagtgggacctcatttagagatagtctttgcaaatgcatttagttaagatgaggtcatatgacaaggtagggcctaaatccgatgacgtgttcttattagaagcccatgtgaagacaaaaagacatgcagggagaaggctgggtgacaaggcaggtggggactgaagtggcacagtcacaagccaaggaacaccaaggacggcccgcagctcccagaagctgggg

SEQ ID NO: 6992 - DNA, 775 bp, Homo sapiens
aggtgtctggtttgttgctgttgtttgttttttgtttttttgagatggagtcttgctctgtcgcccaggcgggagtgcagtggcacgttctccgctcactgcaagctctgcctcctgggttcacgcctgtctcctgcctcagcctcctgagtagctgggactacaggcgcccgccaccatgcccagctaattttttgtatttttttttagtagagacggggtttcaccgtgttagcccagatggtctcgatctcttgacctcgtgatctgcccgccttggcctcccaaagtggtgggattacaagtgtgagccaccacgcccagctgtgtctgttgttttaagccacccattggtggtcatggcttacagcagccgaaggaaactaactcaagtgtcactgtctactttgtctctccaagccttccaaactttacctgctcagcacccactgccctgcasgacaaatggagttgcttgttggtttccctggctgacaaagactgcctggtaagaagaaccccaggtcttggccctcttacaggacctagaggtcagagccaagcaggtattcagtgtatgttggtagatggatgagaaaataagagaaaaattaaaatcgaactgtcaaagtgaaagtgtcattagagaccacacaaccccactttttcattttatagacgggaaaatggaggcccagaaagggaggatgacttggctgagatgacacagttactgcagggagcctcaggccaccagcccagcccgctgtcccca

SEQ ID NO: 6993 - DNA, 775 bp, Homo sapiens
aggtgtctggtttgttgctgttgtttgttttttgtttttttgagatggagtcttgctctgtcgcccaggcgggagtgcagtggcacgttctccgctcactgcaagctctgcctcctgggttcacgcctgtctcctgcctcagcctcctgagtagctgggactacaggcgcccgccaccatgcccagctaattttttgtatttttttttagtagagacggggtttcaccgtgttagcccagatggtctcgatctcttgacctcgtgatctgcccgccttggcctcccaaagtggtgggattacaagtgtgagccaccacgcccagctgtgtctgttgttttaagccacccattggtggtcatggcttacagcagccgaaggaaactaactcaagtgtcactgtctactttgtctctccaagccttccaaactttacctgctcagcacccactgccctgcacgacaaatggagttgcttgttggtttccctggctgayaaagactgcctggtaagaagaaccccaggtcttggccctcttacaggacctagaggtcagagccaagcaggtattcagtgtatgttggtagatggatgagaaaataagagaaaaattaaaatcgaactgtcaaagtgaaagtgtcattagagaccacacaaccccactttttcattttatagacgggaaaatggaggcccagaaagggaggatgacttggctgagatgacacagttactgcagggagcctcaggccaccagcccagcccgctgtcccca

SEQ ID NO: 6994 - DNA, 840 bp, Homo sapiens
tttgggtttggagaaagggaatgtgaaagctgtcattacagacaacaggtttcagtgatgaggaggacaacactgcctttcaaactttttacygatctcttagattttaagaactcttgaattgtgtggtatctaataaaagggaaggtaagatggataatcactttctcatttgggttctgaattggagactcagtttttatgagacacatcttttatgccacgtatagatcctcccctgctatttttggtttatttttattgttataaatgctttctttctttgactcctcttctgcctgcctttggggataggtttttttgtttgtttatttgcttcctctgttttgttttaagcatcattttcttatgtgaggtggggaagggaaaggtatgagggaaagagagtctgagaattaaaatattttagtataagcaattggctgtgatgctcaaatccattgcatcctcttattgaatttgccaatttgtaatttttgcataataaagaaccaaaggtgtaatgttttgttgagaggtggtttagggattttggccctaaccaatacattgaatgtatgatgactatttgggaggacacatttatgtacccagaggcccccactaataagtggtactatggttacttccttgtgtacatttctcttaaaagtgatattatatctgtttgtatgagaaacccagtaaccaataaaatgaccgcatattcctgactaaacgtagtaaggaaaatgcacactttgtttttacttttccgtttcattctaaaggtagttaagatgaaatttatatgaaagcatttttatcacaaaataaaaa

SEQ ID NO: 6995 - DNA, 840 bp, Homo sapiens
tttgggtttggagaaagggaatgtgaaagctgtcattacagacaacaggtttcagtgatgaggaggacaacactgcctttcaaactttttaccgatctcttagattttaagaactcttgaattgtgtggtatctaataaaagggaaggtaagatggataatcactttctcatttgggttctgaattggagactcagtttttatgagacacatcttttatgccaygtatagatcctcccctgctatttttggtttatttttattgttataaatgctttctttctttgactcctcttctgcctgcctttggggataggtttttttgtttgtttatttgcttcctctgttttgttttaagcatcattttcttatgtgaggtggggaagggaaaggtatgagggaaagagagtctgagaattaaaatattttagtataagcaattggctgtgatgctcaaatccattgcatcctcttattgaatttgccaatttgtaatttttgcataataaagaaccaaaggtgtaatgttttgttgagaggtggtttagggattttggccctaaccaatacattgaatgtatgatgactatttgggaggacacatttatgtacccagaggcccccactaataagtggtactatggttacttccttgtgtacatttctcttaaaagtgatattatatctgtttgtatgagaaacccagtaaccaataaaatgaccgcatattcctgactaaacgtagtaaggaaaatgcacactttgtttttacttttccgtttcattctaaaggtagttaagatgaaatttatatgaaagcatttttatcacaaaataaaaa

SEQ ID NO: 6996 - DNA, 785 bp, Homo sapiens
cttattttcattaacattttagctgaataagtatctttgaataattttatttcagaggagttacatgttggacccatttggttagtcaaaaaatgtcttttgatttagttgccttcatacacaagttgtatcttgactagatatcaaattcttgggtcacgaattaatctcatcaaattcttagacattgttcctttgtgtcttctggttactattctagggaaatgcaatgccagttgagtgtttcttctttttcataagtaacactgggctccctgccttctttttcatttgttgtagagttgtcaggaaaacctattatctttgcaattaggtcttcattctttcttctgcaaagctaaaatctctcttgatttttaatctgttcattttttgttttgtgttctgtgagagctctcttaaggttcttctttataacactgacttatatttcttcattgtcaggtcagtcctttrtagcttcttctgcctgcctctcagcccctttgatcagagactaatgtcctatattattttttatttctttgtagaacgtaaacatgtctaaatgtcttgagtgtacaggagcagttctttctaaaatgtattagctcctgtaagtgaataattttcccagtgtgcttttcatcaatatcttaagcattacattctccatgttttatgttgtagaatcttttaataggtgccatgttgtttttttccattttactcattctgagcagagtaactgcctgcccatagacaggggaggtgggtgttcccct

SEQ ID NO: 6997 - DNA, 816 bp, Homo sapiens
caagcgcagtttcacccccaatgtcacagctaactcggagtcctgccccatacaaagggatgcagaggctctgttgacccatgtagccacattttatggggctgagaagatgtaacatcttgtttcctggagaatcaragctttggctgagctgtactatcttgacctccaggctgagtaggtgccctgcttgagattctaagatgtcccacttctgtggggagtggtcattgctgcactgcttcccacccttcagctcccaagccgtattggcatcttgctatttctgagtacttgctgctgctgcacctggtgtcacagaacccatacatcttagttccatcatctcagggtctacagtcaccactgtgtggtacctcataccccactgtgttttgttggttccaggtcctgcattgctgctgtatcctgctccaggaggccttagcctctggagaacctattttcccccagagacatgtcaatactgtgcctggacccttaggatcaaaactacagccacaccccagttccctgggtccaggttgctgggatgtacctcagagcaacagttcttagcttagtgggagaactgcatctactcataccttggaaagtgaagctgcacctcaagtcccaggtgctataatagttagttttacaagaccctgatcccagaaacctgtcttcacagtttctctgatcacctgtgctttgactccaagtaccacgtgcctgtgggccatgtcagacatgacaccaagagagatcccctcagataagactcctactgtagggaagataagaagagaagga

SEQ ID NO: 6998 - DNA, 816 bp, Homo sapiens
caagcgcagtttcacccccaatgtcacagctaactcggagtcctgccccatacaaagggatgcagaggctctgttgacccatgtagccacattttatggggctgagaagatgtaacatcttgtttcctggagaatcagagctttggctgagctgtactatcttgacctccaggctgagtaggtgccctgcttgagattctaaratgtcccacttctgtggggagtggtcattgctgcactgcttcccacccttcagctcccaagccgtattggcatcttgctatttctgagtacttgctgctgctgcacctggtgtcacagaacccatacatcttagttccatcatctcagggtctacagtcaccactgtgtggtacctcataccccactgtgttttgttggttccaggtcctgcattgctgctgtatcctgctccaggaggccttagcctctggagaacctattttcccccagagacatgtcaatactgtgcctggacccttaggatcaaaactacagccacaccccagttccctgggtccaggttgctgggatgtacctcagagcaacagttcttagcttagtgggagaactgcatctactcataccttggaaagtgaagctgcacctcaagtcccaggtgctataatagttagttttacaagaccctgatcccagaaacctgtcttcacagtttctctgatcacctgtgctttgactccaagtaccacgtgcctgtgggccatgtcagacatgacaccaagagagatcccctcagataagactcctactgtagggaagataagaagagaagga

SEQ ID NO: 6999 - DNA, 688 bp, Homo sapiens
cagggtaattggggtatccatcacctcaaacatttatcatttgtgttgagaacattccaaatccactcctttattgtgaaatatacaataaattattaactgtatttaccctattgtgctaccaaacaacagatcatattccttctatagatttttacacccattacccaacccctttatcctcccaccccccaacccccattacccttcccagcctctgctatcctgttgtattcactacctatagtggtagattctgaatgtaatttgattccatgcatattcattctaagtgtatctattgacagtttctatctgcttgggtgtggggcatgatacaatcccatttaactcagagagatctctgtggcagaatgtgttggctggggcaatatccaaagtttaagcagtttaagaagctactgcaaaatccaggtaggctgtagtaaagcctgaagcacgcgatgtaaaacaaagcaatggttactggctggatgtagggagcaaggatgaagtcaaatgattttttttaaggatttatatgcctttagrtaaaatatgaattaagatgcctaaaacatgtagcctctggctaaccctagactccaagagaagctcccagccaagtctcctggagaccaccggaaatgagtcatcacactataatccactgccaagtaatgattct

SEQ ID NO: 7000 - DNA, 788 bp, Homo sapiens
caactcataagtccagtttgctgtcccctaccctatgggaatcaagtgatatttctctctgaaaaaaaattattcacaggaaaattggtgttgagtgttttaggtcataaaaatgtccatgtcagccaggcgtggtggctcacagctgtaatcccagcactttgggaggccgaggtgggcggatcacaaggtcgggagttkgagaccagcctggccaacatggtgaaaccccatctctactaaaaatacaaaaattagccggtcatggtggtgggtgcctgtaatcccagctacttgggaggctgaggtgggagaattgcttgaacccaggaggcggaggttacagtgagctgagatcgtgccactgcactgcagcctgggcgacagagcaaaactctgtctcaaaagacaaaaaattgtcggtaatggaaaatttaaaaggacctatggggtttccattatatttttctcggacagtgtgtggttcgaggtctggactgatattaaaataaactgttgaatatggaaaggagattgccaacttggtcttttggtgctaggatgtagagaagaagctgaatttgctgctgagttttctgaaattgggaaacacagctgcaatcagatgcacttctcatacttcagaaggatgtgatgtccaaatctgtgactcttgtgtttgtaacctgcctggaagatgctatggtgaagcttgcacgtgtgactgggcaaagagttagggttagttgcccctaactcacctagtcttcagccacgcagagtccagg

SEQ ID NO: 7001 - DNA, 788 bp, Homo sapiens
caactcataagtccagtttgctgtcccctaccctatgggaatcaagtgatatttctctctgaaaaaaaattattcacaggaaaattggtgttgagtgttttaggtcataaaaatgtccatgtcagccaggcgtggtggctcacagctgtaatcccagcactttgggaggccgaggtgggcggatcacaaggtcgggagttggagaccagcctggccaacatggtgaaaccccatctctactaaaaatacaaaaattagccggtcatggtggtgggtgcctgtaatcccagctacttgggaggctgaggtgggagaattgcttgaacccaggaggcggaggttacagtgagctgagatcgtgccactgcactgcagcctgggcgacagagcaaaactctgtctcaaaagacaaaaaattgtcggtaatggaaaatttaaaaggacctatggggtttccattatatttttctcggacagtgtgtggttcsaggtctggactgatattaaaataaactgttgaatatggaaaggagattgccaacttggtcttttggtgctaggatgtagagaagaagctgaatttgctgctgagttttctgaaattgggaaacacagctgcaatcagatgcacttctcatacttcagaaggatgtgatgtccaaatctgtgactcttgtgtttgtaacctgcctggaagatgctatggtgaagcttgcacgtgtgactgggcaaagagttagggttagttgcccctaactcacctagtcttcagccacgcagagtccagg

SEQ ID NO: 7002 - DNA, 788 bp, Homo sapiens
caactcataagtccagtttgctgtcccctaccctatgggaatcaagtgatatttctctctgaaaaaaaattattcacaggaaaattggtgttgagtgttttaggtcataaaaatgtccatgtcagccaggcgtggtggctcacagctgtaatcccagcactttgggaggccgaggtgggcggatcacaaggtcgggagttggagaccagcctggccaacatggtgaaaccccatctctactaaaaatacaaaaattagccggtcatggtggtgggtgcctgtaatcccagctacttgggaggctgaggtgggagaattgcttgaacccaggaggcggaggttacagtgagctgagatcgtgccactgcactgcagcctgggcgacagagcaaaactctgtctcaaaagacaaaaaattgtcggtaatggaaaatttaaaaggacctatggggtttccattatatttttctcggacagtgtgtggttcgaggtctggactgatattaaaataaactgttgaatatrgaaaggagattgccaacttggtcttttggtgctaggatgtagagaagaagctgaatttgctgctgagttttctgaaattgggaaacacagctgcaatcagatgcacttctcatacttcagaaggatgtgatgtccaaatctgtgactcttgtgtttgtaacctgcctggaagatgctatggtgaagcttgcacgtgtgactgggcaaagagttagggttagttgcccctaactcacctagtcttcagccacgcagagtccagg

SEQ ID NO: 7003 - DNA, 788 bp, Homo sapiens
caactcataagtccagtttgctgtcccctaccctatgggaatcaagtgatatttctctctgaaaaaaaattattcacaggaaaattggtgttgagtgttttaggtcataaaaatgtccatgtcagccaggcgtggtggctcacagctgtaatcccagcactttgggaggccgaggtgggcggatcacaaggtcgggagttggagaccagcctggccaacatggtgaaaccccatctctactaaaaatacaaaaattagccggtcatggtggtgggtgcctgtaatcccagctacttgggaggctgaggtgggagaattgcttgaacccaggaggcggaggttacagtgagctgagatcgtgccactgcactgcagcctgggcgacagagcaaaactctgtctcaaaagacaaaaaattgtcggtaatggaaaatttaaaaggacctatggggtttccattatatttttctcggacagtgtgtggttcgaggtctggactgatattaaaataaactgttgaatatggaaaggagattgccaacttggtcttttggtgctaggatgtagagaagaagctgaatttgctgctgagttttctgaaattgggaaacacagctgcaatcagatgcacttctcatacttcagaaggatrtgatgtccaaatctgtgactcttgtgtttgtaacctgcctggaagatgctatggtgaagcttgcacgtgtgactgggcaaagagttagggttagttgcccctaactcacctagtcttcagccacgcagagtccagg

SEQ ID NO: 7004 - DNA, 788 bp, Homo sapiens
caactcataagtccagtttgctgtcccctaccctatgggaatcaagtgatatttctctctgaaaaaaaattattcacaggaaaattggtgttgagtgttttaggtcataaaaatgtccatgtcagccaggcgtggtggctcacagctgtaatcccagcactttgggaggccgaggtgggcggatcacaaggtcgggagttggagaccagcctggccaacatggtgaaaccccatctctactaaaaatacaaaaattagccggtcatggtggtgggtgcctgtaatcccagctacttgggaggctgaggtgggagaattgcttgaacccaggaggcggaggttacagtgagctgagatcgtgccactgcactgcagcctgggcgacagagcaaaactctgtctcaaaagacaaaaaattgtcggtaatggaaaatttaaaaggacctatggggtttccattatatttttctcggacagtgtgtggttcgaggtctggactgatattaaaataaactgttgaatatggaaaggagattgccaacttggtcttttggtgctaggatgtagagaagaagctgaatttgctgctgagttttctgaaattgggaaacacagctgcaatcagatgcacttctcatacttcagaaggatgtgatgtccaaatctgtgactcttgtgtttgtaacctgcctggaagatgctatggtgaagcttgcacgtgtgactgggcaaagagttagggttagttgcccctaactcaccyagtcttcagccacgcagagtccagg

SEQ ID NO: 7005 - DNA, 674 bp, Homo sapiens
tgagaagttctgcattcttggtctgcttcccagygggacgagtaagcacgcagaggtcctccccacgcagccccgggctcggctttggaggagggcagcccgtctgccctgctacaaagcaagccaagcctctcctctccgcatggggttatttttgtctgaggcgcaggctcagtcaggaccctggagagtttccaggggtcgggaatgggaaccacagcattcccatagctctttggctcagcctctgtcgcctgttgccaacgtttctgcttcctgggatgcccgtcttggcctctatcccctccaggccttgatctacatctccccaccccggccccacccgaggatgcccaccttgcactgccactgtcccagccaacttgactggtaaacacctggttggtgctatgggggtgaagaccagggaggactcatgtgaagaactgagccccgtggagttccgacgggtcagcctgaggcacggccaccacccaaccctccagacagagctgcttcttccggccctcgagggcctggcactgtctttagagtcagccttgtcctgctatgtggggactgcgggtttcctcctccatctccccgacctaactgagctccttgaggccagggacagagtcctcttcatcttcgcatccccagtctccatctcg

SEQ ID NO: 7006 - DNA, 715 bp, Homo sapiens
aaaggtggtttgacacccagcccaggtacttcccagctgtgcgagcctgggcagggcccttaccctctctgagccttcttcctcatctgtgaaatgtggccaatcatgcctctgaaggcaaatgggaggttgacagaagaaaatgctggggatggccgggcgcggtggctcatgcctgtaatcccaacactttgggaggctgaggcgggcagatcaccgaggtcgggagtttgagaccagcctgaccaacatggagaaacccmgtcactactaaaaatacacaattagccgggcatggtggcgcatgcctgtaatcccaggctgaggtaggagaatcgcttgaacccgggcggcggaggttgcagtgagccgagatcacaccattgcactccagcctgggcaacaagagcaaaacttcctctcaaaaaaaaaaaaaaaaaagaaagaaagagagagagaaaaaaaaagaaaagaaaagaaagaaaaatgcatgccggggagggcccagccagcatctggccagtgctcagtgaacattagctccgggcatggtcaccagctttagagccagaagggaatctgcagagtgacataaacaatgccctgagaccctggcccggagcagaatggggcacagaataaccttgccgtgacctctgcacggaatttccccaggcccgtgctgggccatacaaggtgtcttcattaggaggta

SEQ ID NO: 7007 - DNA, 787 bp, Homo sapiens
cactgtccaaccttgacctttaggtggtgattccactctccagccttgacctttaggtggtgatcccactcttcagccttgatctatagatggaaatcccactctccagccttgatctccaggtggggatcacactctccagccttgaattccaggtggggaatcccactgtccaaccttgatctatagatggtgatccctctctccagccttgacctataggtggggatcacactcactagccagtcttgacctgtagctacaccaaacacatggtaccatccacaggtccctggctgacctgtctctgcagaaagatgatggggtcttgcccccactgcataccctcaggtgcytcgactctggtctcgctgcaagacactcaccctgtgcatcttcccactctcctgccaacctcatccctggcctctgctggccccaccctgagactttaatcctgtaacttctttctaggaacacactctggaagtgggcacagaacttgcaggctgtaaaccttcttcaccatgtttgacactgaccctgactaaagaacttgaaaggaggcctagcgtgtcctcatggttgactgtgaagggaattcctcgtacacctgtgggcaagtgggggcaggtggggacaggctggaccccacccagctgcaggtgcagtacgaggacaaggtgactgcagacctgtgggaggggccaccggtgcagctttgggagcacatgcctgtcagtccagtgtttcagacacaaaaatgatgcccaggctcctgcaggaa

SEQ ID NO: 7008 - DNA, 767 bp, Homo sapiens
ggccaacccctggccccagccctcgcattccattccctggatgatgagtcttatttcacagtatttctgtttcatgcaaatcttctatcagggttgtaatttgtttaaaagcagaagcaacatggaaatgcacacttgtatttcctgtgtcaaaacaggcaaataaacctttggaagtgggcctgatggggaagagcaaagggcaccctgagagcagttgccagcctctcagcagttggaggtaggacagagaggaaaaggagcaaaaacaaagctataactgctgccagttaaacacattccataggccacattccagctaattaaaattcctcattattgattctgatgttcagtgtggaccctgctgtccacgtgcctataagttttctgggccttgtttgtgtcggggagatgtccacagactcagtgccacatcacgtctcagccactgaccacacagacgcccacagtgacccagctccttaccgaaggcacaggatgargagaaggtggatttgaataaaagtatgttgttctgacggtaaacagttgaccctcgtattagtctgttcagtttgccataacaagtaccgtatattgggtggcctaaacaatgggaatgtattgtcaccatacactggggcttaagaagcagaacttcctctctcatagttatcaaggccagaagtccgggatcaggttttggcaagtcctgagcctctctagggcatggagatggtgacttttccctgtgtcctcacagt

SEQ ID NO: 7009 - DNA, 806 bp, Homo sapiens
cacccatcttggcctcccaaagtgctgggatgacaagtgtgagccaccgtgcccggccctattgactattttaatctactaactcatagcttaaaataagaagaaagcttttaaaaatggaattcatccagtatagggatgctaagaaaaaagttactcccagacattcctggtggggctgtgaattgctcgattttggaccagcaatctaggagcaactgttaaaattaaaatgacatactgtgtggccccaaaacctgactcctgggaatcgattgcaactaattaaaatcaccaatatctaagaaagtttctgaagaatatatatattcccattattcgaagtagcaaaacatgagcaacgaggcggacrtccaagaggaactgaagaacggatcacagttccgtctgaccacacgaggtaaagcagcccaacgcagggtgcacgggggttgacgggacacaccagaggggccaacacaggccgtgtgcagtgagcaagacaagatttggagcggggtggagaaaacagtgccatccctacaacaggaacgaccctaccctgtgtgcacccacatggatacatagatacacgtgccattgtccacatggacagtccacagaggaggggaggccttggaattctcgcttagggaatattcaggaaaaatgtcaatgtaaatgagggcttctttgggaagaatgaggcttctcttggaatgtttatctgaaaattaatgcagcaatgtactaggaagcttgagaaaatcctaaaaccgtggagaagaggaaacagagaacaaatt

SEQ ID NO: 7010 - DNA, 825 bp, Homo sapiens
cttgagtccaggaggcagagcttgcagtgagctgagatctcaccactgcactccagcctgggtgaaagagcaagattgtgtctcacaacaaacaaacaaacaaaaaaacactactcatcttacagatacwtcttacatgttaggttgtagggatctaatgtgtcaatccccgaaagaagaaaaccatgtcttctttctgtttgatcccttggtttctagcaaaatacttatacatgacaaatgaaacaaatgtttgctattgaagaagctctatcactgaataactgttactgtctacaagtgaaaaaaaaaactctccaagtcttagtttcctcatctgtacaatgaggttatcattacctacctgatggactgattgccaaaattaaacaagataatataggtaaagggctaagcaaatgcttggtttatagtaagtactaagtaaatattggtgccatcatcactaatacatcaattattacactgtctcagaatttatggactttatttaaaagattgttggaatagaagtctggtttctaacactaaccagttatatttgtcacttctctgatccctcagtctttaaaacgaataaatttatgtcttcatagtctgttctagctctaaattatagagctaagaaatttcattgtcaactatgcagaaattgctctattcacctttgtgatattccctctctgcctttgcacattctcattccatttattggatttacttatacaatatgaataaagttttcttcccgtgcaatttatttttaaaggtattgtgatgacatagttcaagcgggtttaaatt

SEQ ID NO: 7011 - DNA, 825 bp, Homo sapiens
cttgagtccaggaggcagagcttgcagtgagctgagatctcaccactgcactccagcctgggtgaaagagcaagattgtgtctcacaacaaacaaacaaacaaaaaaacactactcatcttacagatacttcttacatgttaggttgtagggatctaatgtgtcaatccccgaaagaagaaaaccatgtcttctttctgtttgatcccttggtttctagcaaaatacttatacatgacaaatgaaacaaatgtttgctattgaagaagctctatcactgaataactgttactgtcwacaagtgaaaaaaaaaactctccaagtcttagtttcctcatctgtacaatgaggttatcattacctacctgatggactgattgccaaaattaaacaagataatataggtaaagggctaagcaaatgcttggtttatagtaagtactaagtaaatattggtgccatcatcactaatacatcaattattacactgtctcagaatttatggactttatttaaaagattgttggaatagaagtctggtttctaacactaaccagttatatttgtcacttctctgatccctcagtctttaaaacgaataaatttatgtcttcatagtctgttctagctctaaattatagagctaagaaatttcattgtcaactatgcagaaattgctctattcacctttgtgatattccctctctgcctttgcacattctcattccatttattggatttacttatacaatatgaataaagttttcttcccgtgcaatttatttttaaaggtattgtgatgacatagttcaagcgggtttaaatt

SEQ ID NO: 7012 - DNA, 789 bp, Homo sapiens
atcccctgaatccctcagcctttgaccccagaaagtccctctgggataagaagagctktactcccatagactctgtatttcatgtgtacgggtgccccaaatcctgaccgtcatggtcatcaccattgtcttaatactggtgagtccatgcagtctaataggaagactcctggactaggaataagtatttatgggttctaattctagccccttcttaactttatgacttttgctaagtcacaacactctctgtgacttaatttcctctgtgatttaattaacagggggagctgttaataattaaggtggcaagcataaaccattactaagctaggcaaactaggaagtatagtgaccctagctatcactcagatcccatccagcattcatgatgtatgattttacgagttgccattcctacagtacagatgatgtgttacaaaaccattgtcgtacataactagtaaaatatatgttaatactaaaacaatctggcaattaaaatagtctattaatattaaaatcatctgttgttactcctagagtaatattaagttaaactggcttgtatggattagccagaaaacccaggcaatacagaaaaccttgttttcctgaaaacaattgtattccaagtctaaatagctaattttaaattcatctattagacactatcaatttttaaatttgtttgacctaaaacaatctccttcaggtttccagatggactccttggttctactgtctctgtactttacctagaaagtgtatattcacctatctctgcca

SEQ ID NO: 7013 - DNA, 789 bp, Homo sapiens
atcccctgaatccctcagcctttgaccccagaaagtccctctgggataagaagagctttactcccatagactctgtatttcatgtgtacgggtgccccaaatcctgaccgtcatggtcatcaccattgtcttaatactggtgagtccatgcagtctaataggaagactcctggactaggaataagtatttatgggttctaattctagccccttcttaactttatgacttttgctaagtcacaacactctctgtgacttaatttcctctgygatttaattaacagggggagctgttaataattaaggtggcaagcataaaccattactaagctaggcaaactaggaagtatagtgaccctagctatcactcagatcccatccagcattcatgatgtatgattttacgagttgccattcctacagtacagatgatgtgttacaaaaccattgtcgtacataactagtaaaatatatgttaatactaaaacaatctggcaattaaaatagtctattaatattaaaatcatctgttgttactcctagagtaatattaagttaaactggcttgtatggattagccagaaaacccaggcaatacagaaaaccttgttttcctgaaaacaattgtattccaagtctaaatagctaattttaaattcatctattagacactatcaatttttaaatttgtttgacctaaaacaatctccttcaggtttccagatggactccttggttctactgtctctgtactttacctagaaagtgtatattcacctatctctgcca

SEQ ID NO: 7014 - DNA, 789 bp, Homo sapiens
atcccctgaatccctcagcctttgaccccagaaagtccctctgggataagaagagctttactcccatagactctgtatttcatgtgtacgggtgccccaaatcctgaccgtcatggtcatcaccattgtcttaatactggtgagtccatgcagtctaataggaagactcctggactaggaataagtatttatgggttctaattctagccccttcttaactttatgacttttgctaagtcacaacactctctgtgacttaatttcctctgtgatttaattaacagggggagctgttaataattaaggtggcaagcataaaccattactaagctaggcaaactaggaagtatagtgaccctagctatcactcagatcccatccagcattcatgatgtatgattttacgagttgccattcctacagtacagatgatgygttacaaaaccattgtcgtacataactagtaaaatatatgttaatactaaaacaatctggcaattaaaatagtctattaatattaaaatcatctgttgttactcctagagtaatattaagttaaactggcttgtatggattagccagaaaacccaggcaatacagaaaaccttgttttcctgaaaacaattgtattccaagtctaaatagctaattttaaattcatctattagacactatcaatttttaaatttgtttgacctaaaacaatctccttcaggtttccagatggactccttggttctactgtctctgtactttacctagaaagtgtatattcacctatctctgcca

SEQ ID NO: 7015 - DNA, 789 bp, Homo sapiens
atcccctgaatccctcagcctttgaccccagaaagtccctctgggataagaagagctttactcccatagactctgtatttcatgtgtacgggtgccccaaatcctgaccgtcatggtcatcaccattgtcttaatactggtgagtccatgcagtctaataggaagactcctggactaggaataagtatttatgggttctaattctagccccttcttaactttatgacttttgctaagtcacaacactctctgtgacttaatttcctctgtgatttaattaacagggggagctgttaataattaaggtggcaagcataaaccattactaagctaggcaaactaggaagtatagtgaccctagctatcactcagatcccatccagcattcatgatgtatgattttacgagttgccattcctacagtacagatgatgtgttacaaaaccattgtcgyacataactagtaaaatatatgttaatactaaaacaatctggcaattaaaatagtctattaatattaaaatcatctgttgttactcctagagtaatattaagttaaactggcttgtatggattagccagaaaacccaggcaatacagaaaaccttgttttcctgaaaacaattgtattccaagtctaaatagctaattttaaattcatctattagacactatcaatttttaaatttgtttgacctaaaacaatctccttcaggtttccagatggactccttggttctactgtctctgtactttacctagaaagtgtatattcacctatctctgcca

SEQ ID NO: 7016 - DNA, 820 bp, Homo sapiens
tcaaaaccagccatgggtaaattgctggctaagtccaatcctgggaatatgccacgacgaaaagacacacagaagcccttgtcttgaactaaagaaccgttaagagcgggtcatggtggctcacgcctgtaatcccagcacttcgggaggccaaggcgggcggatcacaaggttaagagtttgagagcctggccaacacggtgaaaccccatctctactaaaaatacaaaaattagctgcgtgcggtggcaggcgtctgtaatcccaactactcgggaggctgaggcaggagaactrtttgaaactgggaggcggaggttacggtgagccgagaccgtgccactgcactacagcctgggcaacagggcgagactccacttcaaaaaaaaaaaaaacctgttaaaagtggtaatgagccggccgctccacagagctatggaaaagtgcaggagtcctgggtggggagcctcggtgtgagacgctggggaagcagcacagcagctcagacgtcagaggtggggaggggctgttccagatctagggcacgtggaggtctggagccgcaccgggtgggtggcaaggaggccaaggaggcaccagattctgtccataagcagcaaaggggcaggggatggttttaggcaggagagggacttgtgttctagaaagatcatctgacccctgagcaaggactgggccagtgggagacactggtattgccacccggggggagagccattgaggctggccagcagcggggaggggaggagggaaagtggagggacagcacgcctgcaatgcccgggaggggttctgcggc

SEQ ID NO: 7017 - DNA, 840 bp, Homo sapiens
atgttctgttggtacatgcatttctgactttgagcacgaaagcctgtttttcaaaarcaaatttctagaaatgcacttgcttcctcaaagttataaatattttatatttgcgccaagcacggttgctcacgcctgtaatcccagcactttgggagaccaaagtaagaaaatcacttgagcccaagaattcaaaatcagcctggtcaacatagcaagatctgctctctaccaaacatttaaaaaatagcctgtagtcccagctactcatgaggctaaggtgggaggatggcttgaacctgggaggtcgaggttatagtgagacatgataataccactgcactccagtctgggcaagaatgagaccctgtctcaaaattttttttttttagtatttgataaatactaatgaactgctttcaagttgcttaacaatttaaccccccacaaaaatagtatatgaatatccactccctcacaccctcttcaacgccagattttcttttgctcatgtttggctaaaaatgaaatctcattattttaatttgtacttctcatgaccactatgggaaaaaatatttttatatttacaggatatctgtaatcttctatgctttctctatctatattccttcatgtttttatactcaattgtttgccttcatactgatttactgatgctctttatagattagtggttttcaatttttatgttataagtaatttctcctagtctatttttaacttaatgtatctcatcatatagatgtgttatcacttatgtggttaaatctgttaatcttttcctttattattttggtaatacatttttaaaaagacatt

SEQ ID NO: 7018 - DNA, 840 bp, Homo sapiens
atgttctgttggtacatgcatttctgactttgagcacgaaagcctgtttttcaaaagcaaatttctagaaatgcacttgcttcctcaaagttataaatattttatatttgcgccaagcacggttgctcacgcctgtaatcccagcactttgggagaccaaagtaagaaaatcacttgagcccaagaattcaaaatcagcctggtcaacatagcaagatctgctctctaccaaacatttaaaaaatagcctgtagtcccagctactcatgaggctaaggtgggaggatggcttgaacctgggaggtcgaggttatagtgagacatgataataccactgcactccagtctgggcaagaatgagaccctgtctcaaaattttttttttttagtatttgataaatactaatgaactgctttcaagttgcttaacaatttaacccccmacaaaaatagtatatgaatatccactccctcacaccctcttcaacgccagattttcttttgctcatgtttggctaaaaatgaaatctcattattttaatttgtacttctcatgaccactatgggaaaaaatatttttatatttacaggatatctgtaatcttctatgctttctctatctatattccttcatgtttttatactcaattgtttgccttcatactgatttactgatgctctttatagattagtggttttcaatttttatgttataagtaatttctcctagtctatttttaacttaatgtatctcatcatatagatgtgttatcacttatgtggttaaatctgttaatcttttcctttattattttggtaatacatttttaaaaagacatt

SEQ ID NO: 7019 - DNA, 763 bp, Homo sapiens
caatgttgctcagctttttttggtcatggaaggatgttgagaacagtctgcaataattatgtcagttgctagcatatagttgctttggtagcttagagacaataatcataattaacttaaaaatgttttttctctaaaatatattatcttacaatggctcacactgattattttttgctgtatttctataaattgcatacttttattaaatgtttctcatgatttttatcctccaatgtgggctttcatttccaagaataacttaatttaccaacttggtgcrctacaacaattaataaagatcagagaaggtctgaatactgattcctaatgaatatacattttgcacattttgtccaaaaatgaaactgtttataccgatacctttcttctgtctaaaatccaattcctagttcaaaacaaatagtttccccaattccagtacaagacataaataaatgtcaaaatgtgagtgattacatccaggctgtgacagtttctaccagtgaccatagtgaatgatattaacagggtggtcaaagcaaagcactgctggtgtgggagtgctcacctgcactcagggggcaggtgaattattgcatcagtctttagaggaagatgctatgactgatgtgggaaccacacatgtgaatggggatgagagacattgggggtgaaaatttatgccattaaaaactgagatggggaacacgtcatcaatttggactgggaaactattgggaaaagaatgagaatatgagat

SEQ ID NO: 7020 - DNA, 342 bp, Homo sapiens
gtctcatttgacagagttaccttttgatttaaatgacataatgcttggtcaacattcatcatggtgcatgcatggcccctaaaagacacccattcatattaatttactwcctattatggatagacaagcttcaaaaggcttaaagagtcccaaatacaggtaagttgaaactaattttattcttttttttgttttttaagttgcaacatggaaacagtcacaggtctcacatacatccccatcactagatttgtatgaacattcaatgccttcctaacagtgagaacacctggacacaggaaggggaacaacatacaccggggccactgtggggtgagggga

SEQ ID NO: 7021 - DNA, 342 bp, Homo sapiens
gtctcatttgacagagttaccttttgatttaaatgacataatgcttggtcaacattcatcatggtgcatgcatggcccctaaaagacacccattcatattaatttacttcctattatggatagacaagcttcaaaaggcttaaagagtcccaaatacaggtaagttgaaactaattttattcttttttttgttttttaagttgcaacatggaaacagtcacaggtctcacatacatccccatcactagatttgtatgaacattcaatgccttcctaacagtgagaacacctggacacaggaaggggaacaacatacacyggggccactgtggggtgagggga

SEQ ID NO: 7022 - DNA, 641 bp, Homo sapiens
  misc_feature (1)...(641): n = A,T,C or G
cttaagcccaggaggtcgaacatgaggatgaggttaatcatgttcaggtcactgcaacttcagtctgggtgacagagggaaactttgtttttttttaaaaaaaargcggggggaaagagtattttgaaattttgtgttctgattgaactagtgtaagcaagtgtgatattgtgaaatacgtatttggtcctccatcctgtttactggcatacaactcctaaaaattttagaatctccaagaagtgacttttttttttttttttgagacagagtctcgctctgtcaccaggctgcagtgcaatagcgtgatctcagctcactgcaacctccgcctcccgggttcaagcaattatcctgcctcagcctcccaaatagctgggattacaggtgtctgcgaccatgcacagctaatttttgtatttttagtagagatggagcttcaccatgttggccaggatggtctcgatctcttgaccttgtgatcgcaccagccttggcctcccaaaggaagtggcatcttttttatgctagtgagttgacnnnnnnnnnnnnnnnnnnnnnnnnnnnnnnnnnnnnnnnnnnnnnnnnnnnnnnnnnnnnnnnnnnnnnnnnnnnnnnnnnnnnnnnnnnnnnnnnnnnnt

SEQ ID NO: 7023 - DNA, 641 bp, Homo sapiens
  misc_feature (1)...(641): n = A,T,C or G
cttaagcccaggaggtcgaacatgaggatgaggttaatcatgttcaggtcactgcaacttcagtctgggtgacagagggaaactttgtttttttttaaaaaaaaggsggggggaaagagtattttgaaattttgtgttctgattgaactagtgtaagcaagtgtgatattgtgaaatacgtatttggtcctccatcctgtttactggcatacaactcctaaaaattttagaatctccaagaagtgacttttttttttttttttgagacagagtctcgctctgtcaccaggctgcagtgcaatagcgtgatctcagctcactgcaacctccgcctcccgggttcaagcaattatcctgcctcagcctcccaaatagctgggattacaggtgtctgcgaccatgcacagctaatttttgtatttttagtagagatggagcttcaccatgttggccaggatggtctcgatctcttgaccttgtgatcgcaccagccttggcctcccaaaggaagtggcatcttttttatgctagtgagttgacnnnnnnnnnnnnnnnnnnnnnnnnnnnnnnnnnnnnnnnnnnnnnnnnnnnnnnnnnnnnnnnnnnnnnnnnnnnnnnnnnnnnnnnnnnnnnnnnnnnnt

SEQ ID NO: 7024 - DNA, 641 bp, Homo sapiens
  misc_feature (1)...(641): n = A,T,C or G
cttaagcccaggaggtcgaacatgaggatgaggttaatcatgttcaggtcactgcaacttcagtctgggtgacagagggaaactttgtttttttttaaaaaaaaggcggggggraagagtattttgaaattttgtgttctgattgaactagtgtaagcaagtgtgatattgtgaaatacgtatttggtcctccatcctgtttactggcatacaactcctaaaaattttagaatctccaagaagtgacttttttttttttttttgagacagagtctcgctctgtcaccaggctgcagtgcaatagcgtgatctcagctcactgcaacctccgcctcccgggttcaagcaattatcctgcctcagcctcccaaatagctgggattacaggtgtctgcgaccatgcacagctaatttttgtatttttagtagagatggagcttcaccatgttggccaggatggtctcgatctcttgaccttgtgatcgcaccagccttggcctcccaaaggaagtggcatcttttttatgctagtgagttgacnnnnnnnnnnnnnnnnnnnnnnnnnnnnnnnnnnnnnnnnnnnnnnnnnnnnnnnnnnnnnnnnnnnnnnnnnnnnnnnnnnnnnnnnnnnnnnnnnnnnt

SEQ ID NO: 7025 - DNA, 763 bp, Homo sapiens
gtttatgtgatgaaacacatttattgatttgtgtatgttgaaccaaccttgcatcccagggataaaacctacttgatcatggtggcctagctttctaatgtattgctgctggatatggtttactagtattttgttgagaatttttgaatctatgtttatcaaggatataggtctacagttttctattttagttgtgtatctggcaggttttgctatcaggaagatactggcctcatagaatgagttatatatgagagacatattccaagtatataatttcctttctgactctcagggcctcagccagcaccatcttctgagggtctgatcagttgacatgaagtcgttcataacattgcatcagatttcagactgcttctgaactgggcccctcaaaatggaactttaaaaacgccttcttttagtgagcccaattatgcaaacgtttatttttaggactttgattaatggtattttctattacttcttttaccattctattatttaagtttgtggaataacattcatttctccaaaatatagaacattcaatttaggtatgtgaccaccagatgtcatagtatagcttgatttctgasaagagtcacatttatgagtagaccatgagcagttctaaaggaaaaaaaaaaaagataaaaccctttattaaaacagttaagctgaagtaaataaatattccatacccattaaagaatagagttttggaagtaatcattgagacggtcttctacttattgctaga

SEQ ID NO: 7026 - DNA, 1909 bp, Homo sapiens
tttcaggttattctgtttttgttttcaaaacaataacatatatttgttgttctgattttaaaggggtaattgttttggtaactagaaaattaccttctcaactcccttaaattctgtcaaagggaaaagtaagttaggttgctggagaggctatgctgaggcctcagaacctctgtattcctggaagttctgcgtgctttgcctcctgctcccctctctgtgttcctgttggcaggcccctaggcaggatttaggaggtaggcaagtcaccctagccaagtcataagcccatggctcaattgccttctcagcccttcaagggctgttccacaggcagcaaagggaggggcctccacaggttcaccactgcagccctaattcattttctttttccactgtcttattctgcaggggtattccctcagcggatactacacccatccatttcaaggctatgagcacagacagctcaggtaccagcagcctgggccaggatcttcccccagtagtttcctgcttaagcaaatagaatttctcaaggggcagctcccagaagcaccggtgattggaaagcagacaccgtcactgccaccttccctcccaggactccggccaaggtttccagtactacttgcctccagtaccagaggcaggcaagtggacatcaggggtgtccccaggggcgtgcatctcrgaagtcaggggctccagagagggttccagcatccttcaccacgtggcaggagtctgccacagagaggtgttgattgcctttcctcacatttccaggaactgagtatctaccaagatcaggaacaaaggatcttaaagttcctggaagagcttggggaagggaaggccaccacagcacatgatctgtctgggaaacttgggactccgaagaaagaaatcaatcgagttttatactccctggcaaagaagggcaagctacagaaagaggcaggaacaccccctttgtggaaaatcgcggtctccactcaggcttggaaccagcacagcggagtggtaagaccagacggtcatagccaaggagccccaaactcagacccgagtttggaaccggaagacagaaactccacatctgtctcagaagatcttcttgagccttttattgcagtctcagctcaggcttggaaccagcacagcggagtggtaagaccagacagtcatagccaaggatccccaaactcagacccaggtttggaacctgaagacagcaactccacatctgccttggaagatcctcttgagtttttagacatggccgagatcaaggagaaaatctgcgactatctcttcaatgtgtctgactcctctgccctgaatttggctaaaaatattggccttaccaaggcccgagatataaatgctgtgctaattgacatggaaaggcagggggatgtctatagacaagggacaacccctcccatatggcatttgacagacaagaagcgagagaggatgcaaatcaagagaaatacgaacagtgttcctgaaaccgctccagctgcaatccctgagaccaaaagaaacgcagagttcctcacctgtaatatacccacatcaaatgcctcaaataacatggtaaccacagaaaaagtggagaatgggcaggaacctgtcataaagttagaaaacaggcaagaggccagaccagaaccagcaagactgaaaccacctgttcattacaatggcccctcaaaagcagggtatgttgactttgaaaatggccagtgggccacagatgacatcccagatgacttgaatagtatccgcgcagcaccaggtgagtttcgagccatcatggagatgccctccttctacagtcatggcttgccacggtgttcaccctacaagaaactgacagagtgccagctgaagaacccca

SEQ ID NO: 7027 - DNA, 767 bp, Homo sapiens
cctgggtctcgctccctaattcccaggccattatgcctgggagccctttgccctaagaatatgggccactctcaggctgcattaaaaggaaaataatgccgaggaaatgggaggatgcctaacacttggggcactatgttcgttctggggccttcgcttcatgaggacactgatgaccaggggaggagagtgagcgagagggtggagtctgaccagaagtcctgtgacaatggttgaggggactggagaccactgggttggagcagagaagattcaacctgactttggatactcaagggaccttcagtagaaaaagaaatacctggctgcttcactgggtactcaccgtgtgctaaatgttctacactgtgctaagggctttttgtgaattatcccctttcctggcccaacgtcacctgctagtaagagcataagcaaggctccacgctcacatcttcccagaggtcaatggcttaaccgccagcctatggtacttgaacttctttcgtgcggacccagagaactgagttaggacccaagacagaaactacacgttttaaccaatattaaccaataataggaagagatttctaagtcagagctgtctgcaaatggattggatagtcttttaaagtagtgtcccagagggtrttcaaaagaggctgcatgactctggtcaggttaagtacaagtgcaaggttaatggtagaaccaggggtcaaaccgagtttttccaccctgagttcaggcagtcctgatcacaggat

SEQ ID NO: 7028 - DNA, 682 bp, Homo sapiens
gaagtcttaatgcagacagcattatcagtgtgttcaaaagacacgtagacacgttttgcctatagacaaatgggcaaaaggaaacccagctttctcaaatgaagcacaagtgggccttaattatgtgaaaaggtgttcaagttcatcattaaacagggaaaggaaaagttaaaaycatgctgagatatctttcatagaaatggcaaaaagcaggaagtgccacgtgtgggcagagaggaagcacaggaactctcacaaatggcaggtgtcatcgtagaccaacacaaccactttggagagcagtttgactttccccagttaaactgaacatgtgagcggccgggcgtggtggctcatgcctgtaatcccagcagtttgggaggccgaggcgggcggattgcctgagctcaggagttcaagaccagccagggcaacacggtaaaaccccgtctctactaaaatacaaaaaattagctgggcgtgatggtgtgtgcctgtaatcccagctacttgtgaggccgaggcaggagaattgcttgaaccagggagcaggaggttgcagtgagccgagatcgcaccactgcaccccagcctgggcgacagagtccccctcccccaccaaaaaaacaacaagtgagcatcctgcaacctagcaatgccattgttgaacaagttcaaagat

SEQ ID NO: 7029 - DNA, 682 bp, Homo sapiens
gaagtcttaatgcagacagcattatcagtgtgttcaaaagacacgtagacacgttttgcctatagacaaatgggcaaaaggaaacccagctttctcaaatgaagcacaagtgggccttaattatgtgaaaaggtgttcaagttcatcattaaacagggaaaggaaaagttaaaatcatgctgagatatctttcatagaaatggcaaaaagcaggaagtgccacgtgtgggcagagaggaagcacaggaactctcacaaatggcaggtgtcatcgtagaccaacacaaccactttggagagcagtttgactttccccagttaaactgaacatgtgagcggccgggcgtggtggctcatgcctgtartcccagcagtttgggaggccgaggcgggcggattgcctgagctcaggagttcaagaccagccagggcaacacggtaaaaccccgtctctactaaaatacaaaaaattagctgggcgtgatggtgtgtgcctgtaatcccagctacttgtgaggccgaggcaggagaattgcttgaaccagggagcaggaggttgcagtgagccgagatcgcaccactgcaccccagcctgggcgacagagtccccctcccccaccaaaaaaacaacaagtgagcatcctgcaacctagcaatgccattgttgaacaagttcaaagat

SEQ ID NO: 7030 - DNA, 753 bp, Homo sapiens
ttcctctataggaagggggaagattccattggtgttctaagtgatgaggagtgggcaatgatggttcaatatcatgtctgaagagctaggacaaaactcaactcttcaagctctatattttcagcacttgactgttcatagtccccaagagtgtagggcagagttagatatgtcccttatattttagagatataatttcaaaacactcagaataaaagttcagagaaaaggtaggaaaaactccacagactaagaccaagggggactcatttacacagaagttctcaaaaacaaattccaatatagtaggaaagaggaaaagaatattcacaaaagaccaaggttgtctccagaaaatgtatctgcaagttcagakgtcaaagacatagagagagatgaatataaaaaaagatgaacaggcgccatgccactgaccactttggggggcagagggggcaaactgcaaataaaccaaaaggtgtcagatggcaacacacaggttttgagcaagaaaacaacaacaacgacagtgaaaggacagttctgctgtaggctaatattgaaatggtaacaggtcacagagaaaacagaactctccaatacttgttttgcttctattcttatttaaggagaaggactgttcagctgtaaaggtgagcatcgatattgatgggacagaagttaaactctggagaaagggagaggtgacaaaagagaaactaggggatctatatgcgtgcaagtctcctgggt

SEQ ID NO: 7031 - DNA, 753 bp, Homo sapiens
ttcctctataggaagggggaagattccattggtgttctaagtgatgaggagtgggcaatgatggttcaatatcatgtctgaagagctaggacaaaactcaactcttcaagctctatattttcagcacttgactgttcatagtccccaagagtgtagggcagagttagatatgtcccttatattttagagatataatttcaaaacactcagaataaaagttcagagaaaaggtaggaaaaactccacagactaagaccaagggggactcatttacacagaagttctcaaaaacaaattccaatatagtaggaaagaggaaaagaatattcacaaaagaccaaggttgtctccagaaaatgtatctgcaagttcagaggtcaaagacatrgagagagatgaatataaaaaaagatgaacaggcgccatgccactgaccactttggggggcagagggggcaaactgcaaataaaccaaaaggtgtcagatggcaacacacaggttttgagcaagaaaacaacaacaacgacagtgaaaggacagttctgctgtaggctaatattgaaatggtaacaggtcacagagaaaacagaactctccaatacttgttttgcttctattcttatttaaggagaaggactgttcagctgtaaaggtgagcatcgatattgatgggacagaagttaaactctggagaaagggagaggtgacaaaagagaaactaggggatctatatgcgtgcaagtctcctgggt

SEQ ID NO: 7032 - DNA, 753 bp, Homo sapiens
ttcctctataggaagggggaagattccattggtgttctaagtgatgaggagtgggcaatgatggttcaatatcatgtctgaagagctaggacaaaactcaactcttcaagctctatattttcagcacttgactgttcatagtccccaagagtgtagggcagagttagatatgtcccttatattttagagatataatttcaaaacactcagaataaaagttcagagaaaaggtaggaaaaactccacagactaagaccaagggggactcatttacacagaagttctcaaaaacaaattccaatatagtaggaaagaggaaaagaatattcacaaaagaccaaggttgtctccagaaaatgtatctgcaagttcagaggtcaaagacatagagagagatgaatataaaaaaagatgaacaggcgccatgccactgaccactttggggggcagagggggcaaactgcaaataaaccaaaaggtgtcagatggcaacacacagsttttgagcaagaaaacaacaacaacgacagtgaaaggacagttctgctgtaggctaatattgaaatggtaacaggtcacagagaaaacagaactctccaatacttgttttgcttctattcttatttaaggagaaggactgttcagctgtaaaggtgagcatcgatattgatgggacagaagttaaactctggagaaagggagaggtgacaaaagagaaactaggggatctatatgcgtgcaagtctcctgggt

SEQ ID NO: 7033 - DNA, 753 bp, Homo sapiens
ttcctctataggaagggggaagattccattggtgttctaagtgatgaggagtgggcaatgatggttcaatatcatgtctgaagagctaggacaaaactcaactcttcaagctctatattttcagcacttgactgttcatagtccccaagagtgtagggcagagttagatatgtcccttatattttagagatataatttcaaaacactcagaataaaagttcagagaaaaggtaggaaaaactccacagactaagaccaagggggactcatttacacagaagttctcaaaaacaaattccaatatagtaggaaagaggaaaagaatattcacaaaagaccaaggttgtctccagaaaatgtatctgcaagttcagaggtcaaagacatagagagagatgaatataaaaaaagatgaacaggcgccatgccactgaccactttggggggcagagggggcaaactgcaaataaaccaaaaggtgtcagatggcaacacacaggttttgagcaagaaaacaacaacaacgacagtgaaaggacagttctgctgtaggctaatattgaaatggtaacaggtcacagagaaaacagaactctccaatacttgttttgcttctattcttatttaaggagaaggactgttcagctgtaaaggtgagcatcgatattgatgggacagaagttaaactctggagaaagggrgaggtgacaaaagagaaactaggggatctatatgcgtgcaagtctcctgggt

SEQ ID NO: 7034 - DNA, 651 bp, Homo sapiens
tccaatctgtgggttgattcctggaaattctagtttgaggggaatttccctgaggaattatatgagacactggcagggctatcttcagaggcatgcaaactgtgtagttatgcatagcccatgctcagaaaggctctgtgcttggttgaatgttttgctgttgcctctttttttttttgagacagaatcttgctctgtcgcccaggctggagtgcagtggcacagtctcggctcactgcaacctccacctcccgggttcaagcaattctctgcctyagcctcccaggtagatgggattacaggcacccgccactatgcccggctaatttttgtatttttttttttttttgggatggagtttcgctcttgttgcccaggctggagggcaatggcacgatctaggctcactgcaacctctacctcccaggttcaagcgattctcctgctcagcctccagagtagctgggactacaggcatgcgccactatgtctggctaatttttgtatttttagtagagacagggtttctccatgttggtcaggctggtctcgagctcccgacctcaggtgatccgcctgcctcagcctcccaaagtgcggggattacaggtgtgagccactgcacctggcctaatttttgtatttttagtt

SEQ ID NO: 7035 - DNA, 466 bp, Homo sapiens
ggatcatatcatttgtgatatcactaaaatgctttattatctaaggtaaaaattagtttattttcaagcaatgttgtacactagcattaaagcatagcaattttgcattaaaatagagtaatttggatacatcattataaagcactccatcagtctgtattcttaaaattgtattttgtgttccatttgcttaattgcagctgaatatagtccataattcttaaaaagctacttgccatcaatttcgtaataaagttctgacaaaatccaaaaaaaatttatcttttttctttgtgaatctataaaaatattgatcttttaccacatgtattagaatacaataagaarcacattgcaaaattcctgcctctatagagataccaattaaaaaactctagatgtgcaacagatattaaaagccaaataaaacaatggttatattatgaggcactagcacagtggtatc

SEQ ID NO: 7036 - DNA, 858 bp, Homo sapiens
agaattattcaagtgagggagtagaggcaaggaaagagtagtacatgcagagagaacactatgtgctgatgtccccaacaaagtaaaaatatggaagattctaggatgtaaaagaaagtcagagtgactgtagcatctagagtgtgagaaaatgatggtgagcaatggtagaaaggtctggtgtgtcatgtgcgctctatgtgctgcatatcttctagattccacatgccctgctctctgccagaggctgacacgtgtggattatgtcaatggtgggttctggttgtgttctgtcaatgaggcgcccaggcagtaaaccgggagaggggaggagaataaaatcagggtattttcttcccaattgtccttcctatggagccgtcttgaagtagctttgttccacactgaaggtcccaccttgtctcagagaggctttctctacatgattctctccttttttcctttcaccttagggataacaatagtcccggactactacactatcggcaaattagggaagcagaatttctaygtattgtggaataaagaattattacagaaataagactttacacaactgtgggagaatctgggggaaaataatggtctaatagggagaattggaggatcagagaaatatcacaaataagccttttgaagcactggcagagggggccgagtcagagcttgccagggaatctgtgaagttagtcacattaagctgctggcctggggacaatgaaagagagccggtgaagaagtcttcacctatggtgagactggggtcgctcttggtcagaagagtcaggagttggtcagcagccgaactggacatggggcagggagagcaaacaagcg

SEQ ID NO: 7037 - DNA, 748 bp, Homo sapiens
aattttggaaagacttttgtgcaaaatatacacttcagagaacaccacagtatttatcctggagggaaattgtaccaatgtaaaacagttagcaaaacctttaactgatgcttaaattttgctcaacagagaatttctataggagagaacctctacaaatgtaataaatgtggaaggacctttgtccaaaatatacaacttagaaagcaccagagagtgtatgctggaaagaaacattataggtgcagtaagtgtgagaaagcacttaatgaaaaatcaagtctaaatgaaaatcagaggactcgccctagaaagaactgaggtactaacacttctgacatcactctaaatcacagactttattatagggaataacccagtcaaaacaattagacaatttaatttcacgtttcaaagaaragagattgatggatcagtaggtataattctatttactgtatacttgtttctggtaatgacagtatttaagattgtgtgagcaaatatgattttattttttattttttgagacaggatctcactctgtcatccaggttggagtgcagtggcaatatcatggctcactgcagccacaacctcttgggttcaagtgattctccctcctcagcctcctgagcagctgagactacaggtgtgcaccaccatgtctggttaatttttatatatttttttagagatgagggtctcactatgttgctcaggctagtcttgaactcttggaatcaag

SEQ ID NO: 7038 - DNA, 789 bp, Homo sapiens
cagcctgaggaacagagcgaaaccctgtctcaaaaaaaaattggaatttaaaaattgatctgtctttagagtgatacccagtgccgggcgcagttgctcacgcctgtaatcccagcactttgggaggccgaggcgagtggataatctgaagttgggagtttgagaccagcctgaccaaacatggagaaaccccatctctactaaaaatacaaaattagctgggtatggtgacacatgcctgtaatcccagctacttggggggctgaagcaggagaatagcctgaacacaggaggcagaggttgcggtgaggtgagactgtgccattgcactccagcctgggagacagagtgagactccatctcaaaaaaataaaaaaaaataaaaagaktgatacccagttgcattcccctggacacaatttccttgcatttctatggaaaagaataatttgcattatcaattttccacaacctagagagttgcaaaatgtctcaaggttaataaaatgtgacgataacctggacgagaactcccgacaggatacccagtaatcttttacgccctcacaaagtctttctcacaatttttcctgagaccagaaatgagggtttggccaatacacccaaaggtcttcatgtaaaacttgactctacttgaatccaaatgggagatgaatcattgcagatttccatctttttctccatgtgaggattcaagagagggcagcgtgctcttgagctaggagaccaggttcaggttccatctccccactctgtagttggggatcc

SEQ ID NO: 7039 - DNA, 789 bp, Homo sapiens
cagcctgaggaacagagcgaaaccctgtctcaaaaaaaaattggaatttaaaaattgatctgtctttagagtgatacccagtgccgggcgcagttgctcacgcctgtaatcccagcactttgggaggccgaggcgagtggataatctgaagttgggagtttgagaccagcctgaccaaacatggagaaaccccatctctactaaaaatacaaaattagctgggtatggtgacacatgcctgtaatcccagctacttggggggctgaagcaggagaatagcctgaacacaggaggcagaggttgcggtgaggtgagactgtgccattgcactccagcctgggagacagagtgagactccatctcaaaaaaataaaaaaaaataaaaagagtgatacccagttgcattcccctggacacaatttccttgcatttctatrgaaaagaataatttgcattatcaattttccacaacctagagagttgcaaaatgtctcaaggttaataaaatgtgacgataacctggacgagaactcccgacaggatacccagtaatcttttacgccctcacaaagtctttctcacaatttttcctgagaccagaaatgagggtttggccaatacacccaaaggtcttcatgtaaaacttgactctacttgaatccaaatgggagatgaatcattgcagatttccatctttttctccatgtgaggattcaagagagggcagcgtgctcttgagctaggagaccaggttcaggttccatctccccactctgtagttggggatcc

SEQ ID NO: 7040 - DNA, 654 bp, Homo sapiens
atgtcatataaggcagatcaagaacaagattctttgaaataatatcagatctcagaataaataccaaaagattatttctttttttttttttttgagatggagtctcrctctgtcgcccatcaactgtagtgcagtggtacaatcttggctcactgcaatccccacctgctgggttcaagcaattctcctgcctcagactccctagtagctgggactacaggcatgcgccaccatgcccggctatttttttgtatttttagtagagacggggtttcaccatgctggccaggctggtctcgaactcctgacctcgtgatctgctaaactgctgggattacaggcataagccactgcgcccggccccaaaagattatttctaagtatagtgagcaaatgcagcagcatctgctaaacagtagcacctcaataagatgtattatttgattttccccaactccttatctggagaattaagttgctggtaagggtggcatggctgtaatccatttgtctttcctttcatatagaatatcatctcataacaagggtttcactgaattccctaagcactggaatgtactttacatctaagccatgttaagtcctacagtcctgtgaattagtcatccttttgcatgctaggaaccatgacag

SEQ ID NO: 7041 - DNA, 654 bp, Homo sapiens
atgtcatataaggcagatcaagaacaagattctttgaaataatatcagatctcagaataaataccaaaagattatttctttttttttttttttgagatggagtctcgctctgtcgcccatcaactgtagtgcagtggtacaatcttggctcactgcaatccccacctgctgggttcaagcaattctcctgcctcagactccctagtagctgggactacaggcatgcgccaccatgcccggctawttttttgtatttttagtagagacggggtttcaccatgctggccaggctggtctcgaactcctgacctcgtgatctgctaaactgctgggattacaggcataagccactgcgcccggccccaaaagattatttctaagtatagtgagcaaatgcagcagcatctgctaaacagtagcacctcaataagatgtattatttgattttccccaactccttatctggagaattaagttgctggtaagggtggcatggctgtaatccatttgtctttcctttcatatagaatatcatctcataacaagggtttcactgaattccctaagcactggaatgtactttacatctaagccatgttaagtcctacagtcctgtgaattagtcatccttttgcatgctaggaaccatgacag

SEQ ID NO: 7042 - DNA, 654 bp, Homo sapiens
atgtcatataaggcagatcaagaacaagattctttgaaataatatcagatctcagaataaataccaaaagattatttctttttttttttttttgagatggagtctcgctctgtcgcccatcaactgtagtgcagtggtacaatcttggctcactgcaatccccacctgctgggttcaagcaattctcctgcctcagactccctagtagctgggactacaggcatgcgccaccatgcccggctatttttttgtatttttagtagagacggggtttcaccatgctggccaggctggtctcgaactcctgacctcgtgatcygctaaactgctgggattacaggcataagccactgcgcccggccccaaaagattatttctaagtatagtgagcaaatgcagcagcatctgctaaacagtagcacctcaataagatgtattatttgattttccccaactccttatctggagaattaagttgctggtaagggtggcatggctgtaatccatttgtctttcctttcatatagaatatcatctcataacaagggtttcactgaattccctaagcactggaatgtactttacatctaagccatgttaagtcctacagtcctgtgaattagtcatccttttgcatgctaggaaccatgacag

SEQ ID NO: 7043 - DNA, 585 bp, Homo sapiens
aggccaacaaaagaacatgcctaagtattaatgcacatagatccagtgagatttccaataacttaattcaytggcacttgttgagatcaaactagtgagcaaaacttcagctgtgtttagccttcagaagtgctggagctcctatgaccactttaatcccttttatactgatctcaggtctcccctcttgatattacaaagcccccacccccaacttgacccagaccttctcctaaaatggacctagctaggtcacttgttgctctgttaattattacttacttcatttacatatacctttattttgctgtaatttacttagaaggttattgccatggctttttttttttagaaatagaaaatttcatcctaaaatttgtatggaatcacaaggaaccccaaataatcaaaacaattttgaaaaaagaacatggttagaggccttatacttcctgatttcaaacatattacaaagctacagtaatcaaaacagcatggtactggcacaaagacagatacatagaccagtgtaatagaaaacccagaaatagaaaactggctagccatatgtagaaagctgaaact

SEQ ID NO: 7044 - DNA, 783 bp, Homo sapiens
gagtggtccttggtcagcaggcacatggaggcctgctgggtgccaggcattgggcaggtgttggggctacaggattatctgctaggacctcaaagtctggccttgtgggcagcgtgaaaacaatgatggtgacacagtgagagtctgggcacaggtcctggaaggtgtggagagggagcagccaatgcaggctcctgttagagtgctggaggcagaatcaggaaaggtgactcaggggagtcacctttttttcactggaaaaaaatatgtctgggaggcactaaaacaagagcccattatgtgttttaaaatgatattagtaataatgtaggggtttatttggacaaatgagttcacaaaattgtgytgcctgtaatgttgattcttgactgagggataaaactcacttcccaggcccctttctgtaagccagttcccaccatccccttgaacctcagctgctccaccagagtcaaagcaactcagaaggaggctgagacccccatgcctcattgctaatcgatgggcatggtggatgggcatgagggtggggttcaggaccttacctagcatctgtcttcccagaatgttgctctgccctttctggggataagaggtcttagtttctttatctctataatgggaattataatccattccctgaagattatggaagattataggaggtaaaggctataaagtcaccttgtaaacctaaaatcctatctgagatcgaggatttagatggcaagtaccattttgtcttcatttcttggtgaagaa

SEQ ID NO: 7045 - DNA, 819 bp, Homo sapiens
cttgagccccaggaggcaaaggttgcagtgagctgagatcatgccactgcactccagcctgggcaacagagagagagagagagactccatttcaaaataataataataataacaataataataatttctgtattatctgtgtaggttttttgtgggttttgttgttgtttttattttatttttgagacagggtctggcttgttgctcaggcagcaatgcagtaacatgatcacagcttactgcagcctcaagctcctgggctcaagtaattttccyacttaagccttccaagtagctgggaccacaggtgcatgccaccatgcctgggtaatttttgtttaattttttaagagatggggatctccctatgttgcccaggctggtctcgaactcctgggctcagcaatcctcatgctttggactcctgaagtactggaattacaggtgtgagccaccaggcccagccatatagttctatcttgatcaagtgttttaagccttttgacatcttttacaaatttctccaagatcaaaatcctaaattaagtcttttaaacaattcaacttgttttgataaataatactaaatcctcttttagttacatctaatgggtatgttattaatataaatgttcttaaaattatataaattcataaaaatctaatgttatcagtcataattttaattatgttaaatattttctaaagttacatagatatatcattaatataactattctaaaggtcatataacatttataaaggtctaatagtcctgatgtgatattgtcagtcataattctaatttttatgttaaaa

SEQ ID NO: 7046 - DNA, 1394 bp, Homo sapiens
aaaacattactggttctttttttttttttttttttttgggacagtgtctggaatgcagtggtgtaatcacggctcactgcagcctcgaccttcttggctcaagtgatccttccatctcagcctcccaagtagctggaaccacaggtgaaaaccaccacgcccagcaaatttctgtatttttttgtggagacagggttttaccatgttgtccaggctaacatatacttttataaacaaaattaaagcattggccaggcatggtggcttatgcctataatcccagcactttgagaggccaaggtaagtggatcgcttgagaccaggagtttaagactagcctgggcaacgtagtaaacccatgtctctacaaaaaatayaaaaattagctgtgcgtgctggagtgtgcctgtagtcccagctacttggtgaggccaaggtggtgaggatcactgagcccagggaggtcaaggctgcaatgagctgtgattgtgccactgacctccagcctgagctacagagtgagaccctgtctcaaaaaacaaacaaacaaacaaaacaaagaagattaaaacatttacctttctttcaacctaagttctgcaaaattcataaacaatcagtggctaaggaaggccaaaatcatagtcccccagagactagagataatttattattcaaaaaataacatatagcctcctgtcatgatggacccctgggcccctttttactaacaacctggcctgcctgaaataacgaggtggtgcttttcgtctgtgtgttttgctacagggtcttgctctgttgcccaggctggagtacagtagtgcgatctcagttcactgcagcctcgactgcccaggctcaaaggatcctatcacctcagcctcctgagtagctgggactacaggtgcacaccaccacatccagccaatgtttttctatttttgtagagacagggtctcactatattgcccaggctagtcttgaactcctgggctcaagcagtcctcccacctcggcctcctaacatgctgggattacagtcatgagccataacatccggcctgcaataacaaggttctttctccaaatcaaaagacatgacttcctggaaatgagcattcccaatgctgaaatattaaaaaaaaaaaaaaatctactgccaggcactgtggttcacgcctgtaattccagcagtttgagaggccgaggtgggaggatcatttgagggcaggactactagcctggccaacatggtgaaacctgctctctactaaaactacaaaaaattagctgggtgtggtggtacatgcctgtagccagctatttgggaggctgaagtatgagactctcttgaacccaggaggcggaggttgcagtgagctgagatcgtg

SEQ ID NO: 7047 - DNA, 518 bp, Homo sapiens
acatgagatggtatctcattgttttcatttgcattttttctaatgatcagtgatgttgagctatttttcatatttttttggccacataaatgtcttcttttgagaagtgcctgttcatgtccttcgcccactgtaggaagaggaaaaattggccacactaatgccatttaaaaaaatttgcctgtatctataagaggcagaggcatcaaaattgaaaaggtaagcaccttgtgtaagatttggctaaaagcccagaaattaacacacgtcctrgaacacatacctggacactgttcccagaatgactgttcaagtccagaagcgcattttggagcactgctcccagaacactgctcccggagccactgtttcaatgttgcttgctcggcaagtgccctcctgagcaaacaacagagggcgcccaaagtaacaattgatcttaataaacggagcttacttgaaggaggagctgaaggctgctgttgtcctgtgctggggatgccccaactccaatggca

SEQ ID NO: 7048 - DNA, 802 bp, Homo sapiens
ttgatggcatctttcagtcactgctattttctgaactgctagccctgcatttctttgtttctttttttttttttagacagattcttgctctgttgccaggctggagtacagtggcacgatctcggctcactgcaacctccacctcttgggttcaagagattcccctgcctcagyctccctagtagctgggactacaggtgcatgccaccatgcctggctaattttttgtattttagtagagacagggtttcaccatgttggccaggatggtctcaatcacctgacctcgtgatccacccaccttggcctcccaaagtgctgggattacaagtgtgagccaccaggcccagcctaaccctgcatttctaataatatctattcattcatttagcaaatatgttactgagtacctacaatgagctagatactaagtaatttgtatacagtcatcccttggtatttctaaggaattcattcccaaacccctgcagatcccaaatcacaggtgatcttttcttttataaaatgaaatagtattagcacataatctatgcacatcctccatatactttaaatcatttccagattacttaccatacctaatacaatgcctacatatcactccatttattgaatccaacatagtaaatgcccagattgtcaaactttacttccagtagtataaaatatatattttaaaaaattattaattcataatttcttattatgaaaatagtagaggctgaattttttttcaatggcactcaatagacctcactataattgctctttattttattat

SEQ ID NO: 7049 - DNA, 811 bp, Homo sapiens
gtgatagccactggctccaaagctgctgcaaacagctttagcctctccacacaggcagccaacccgcttcctcctggttctccctccaagcccacctctgggtgaggtgctctaacacagctccctctctgwgtgtgctggcacacaacagggaatttccctgggatgtccctggagctgaccatagagctcttccttttcatgtctttattgttagttgtcactcaagagactataatgcatatcctaacttatcccagtctatctggaattaatagtatactattttctgtataatgtataaatctaagatagagcgtttccattcaccatgactgttaccattcctgctgttgtttatatacatatatatatatattgcttcatacgttataaacccacagtgcattgctattattcttgttttaaacacatgccaaattctatccctacattttccagatctggagggagcaccttcacttgcaggactcgggaaacgtagggaaagagtttggcgatgagtgtagagctatctaacggtaatgctgtatttactgtgcacctcatctgggaggatctttatgcatgttacttccactgactcctccccgcaatccatgatgcaggtgttacctacctgtgagaccccagggagtcctctaaaccagcgcttctcacattgtgacgtggagacaaatcccctgcgatcttgttataatgcaaaccctgactccgtaggcctggggtggggattctgcatttctaacggctcccagaggatgccatgctcaaagtctagggacttggg

SEQ ID NO: 7050 - DNA, 658 bp, Homo sapiens
aattaagtaaaagctaaggaccctcttttcgaaacacaagaaattcccccaaggactggtgatccagggaaccgtggcccaacctccctgcctggtactgctcataagtggagccaaagcggctgcagccaccctcaccaaggctcggtggcagaacggcagaaagtggctgcagccaccctcaccaaggctcggtggcagaacggcagaaagcggctgcaggcaccctcaccaaggctcagtggcaggatggcagtgcccccccgggaaggtggtttcccactgcagccacctgagtgagcaggagcaccttcggactgagaagcagacaggcctcctgggtgaggccgcagtccctggaggccctctggcactcctctctgctgcccccacttgctcagttcccgggtcagtgacatgcacctagaggggccttcagagcacttgggtgactgagctgtcacactgccgggctcccgtggggaataggaagacattcaatactttactccaaagcctcatcctagcaagggcagcttgactgagcagtgtgagaagctaaatggcaagaccagacgcacgcggggcrggggcggctgctgctccgtaaagggaccaagaagagctgattccctggtgaatgagacgggggacagct

SEQ ID NO: 7051 - DNA, 788 bp, Homo sapiens
cacagtccctcaaggagtggaaggacaggctcgagtcccagaaaccccagaactgtatgcaaaatggtgccggcatgagcatgatgtcttttttcctctggagagcgagaggccccacaacttccaacagcttttcaaaggggcctgtgattcccccaaatggctaagaaccactgaaccaagctagacagaggcagaaagcagatccaagttctccgagtgagggattggtcctgtggctgtcatcttccagcagggcaagagggccatcgygacaagtgagagacgattacatggtttcgtgagagcccatcatggcgagatgcccaggcccacctccggcgcagcactggctcacctaggggtggggccgggaaaccccaggctgccatggcaaacacacagcgggaacccagtgagtaagcccgggcagtagaggagggggaggaggaaccagaaaataaaggacattctaactcagcctagaaagccacccccaccaccacctcccgtgtcatccaggcagctgcgagcccagctccctccccactgcctcccctgcagccataactgcaacagcgtagagaccatttcttgaattctttccattgaagttaaactacaggtgccagaagacccctgcttaacagtcatgagagagggaagtcctcgctctgccgatgacggaaatgggacagtgcgtgtgaaagctctttgggaaagtaaagctactcatttgtaagttagttcttattttgctgaaaggggacagaaggtgcccctctccc

SEQ ID NO: 7052 - DNA, 797 bp, Homo sapiens
cgtgtctgacatgcagtcactgtctgtacctctgttattttagcttcagcaatacaggatacagctttgtcaactgaaaactatatttaggatttttccataatttagccaaggtgggtcagaatttacttctaaagtatttacatagaaagaagttgcttatgttacacacaacttgcttataggagtcacatctctggaacttgagatatgcttcaggaagcattgtctactgttctctgggttgctgctggacttgtaagggagtaaaagcaaatgatatgtggccttgaccctcgataacctcctgttgcattggcaagagatgggcttgcatgctttgaactccaagttcctctctcccgaggcatccgcacagcagcgtcagtccgccttcccatcgcctctcctctggttctggaacactgaacgccctcccaagcctgacgatccaggtcccccaggaaccacctgcagctcccctgccgactctgtctgtccctgacagatcccaaacaaactgaactagtcatcgttcccaacaaacactgctgtgtgctcctactctagggccagatctagaatacaaacatacgactgctagaagagcaggccaagtccgcagcctctgagcaggcttcctggtggcagggatattggagcccagaggggaaggtggggaagagagcaacagcaggggaaggtggggagccgtctgtgcaaaagctctgcagagggaaaaagagcgaaagtcacccgaggaggaycttaaaggccagtggtggccgtatttcaga

SEQ ID NO: 7053 - DNA, 549 bp, Homo sapiens
tgccctgtggactggcgatgcttctgaaaagcagggaggctgagcgcgggggctcatgcctgtaatcccagcactttgggcggccgaggcgggcggatcacgaggtcaggagatcgagaccatcctggccaacatggtgaaaccctgtctctattaaaaatacaaggccaggcgcagtggctcacgcctgtaatcccagcactttgggcggccgaggcgggcggatcacgaggtcaggagatcgagaccatcctggctaacacagtgaaaccccgtctctastaaaaaggcagaaaattagccgggcgcggtggcgggcgcctgtagtcccagctactcgggaggctgaggcaggagaatggcgtgaacccgggaggcggagcttgcagtgagccgagatcgtgccactgcactccagcctgggcgacagagtaagactccgtctcaaaaaaaaaaaaaaaatgcagggaaagtgtaccataatgcagtgtccctcatgacacccctcctgccttaggaaagtgtctgaatctggttaagtatcagcac

SEQ ID NO: 7054 - DNA, 718 bp, Homo sapiens
tctctgagctcccatacatcttctgactcctcccctttgaagtaaaggattagggccaacacagtggctcacacttgtaatcccagcactttgggaggccgaggagggcagatcacgaggtcaggagatcgagaccatccaggccaacacggtgaagccccgtctctactaaaaaaatgcaaaaaaattatccgtgcatgrtggcgggcacctgtagtcccagctactcaggaggctgaggcaggagaatgacgtgaacccgggaggcggagcttgcagtgagccaagattgtgccactgcactccagcctgggtgacagagcaaaaaaaatccgtctcaaaaaaaaagaagtaaaggattagggaatagccctggtccctacccctagcctagactggtgcccaagtcagggtcctggccagagctaccatgtctgactccccatccttgcctggtgaaaggtgccacccaggctgggtgtggtggctcacacctgtaatcccagcactttgggaggccaaggcaggtggatcacctgaggtcaggagttcgagacctgcctgaccaacatggaaccccgtctctactaaaaatacaaaattaggccaggcgcagtggcttatgcctgtaatcccagcactttgggaggctgaggtgggcggatcacgaggtcaggagtttgagaaccagactggtcaacatggtgaaaccctgtct

SEQ ID NO: 7055 - DNA, 755 bp, Homo sapiens
tgatttttcattgagccaggcagtctcagcccgagttgaaaggcctccttagccttggaactaacgtctcttcaccctgacttctgggcaaggggagatcccaggaaaaggtttacctgcaggttttccaaggccaaagccccagcaaggaccccctctccaacctttgttatagggctacatggggcctgggctcagcatcctcatttgkggtaaactgaggcccgggacaagcccggcagagcctaaggctgctcggggagtggggccaatcagagatgattggagctgccagaaactctaatcagatgacctccaattcatccttaaaagttgaatggtggggaggggctggagtctcttcctccctcctcccaagttggggctcctggatgtgttgactccaggctgtgcctggttgtggagggtctggggcagggtgtgaggggtgctgtggaactggagcaggagacagggctgggtgttcctggtgcagcccttctgggcatgggagagaagccccaaggccctgggttgctccccaagagcagctctgaggcctcctgctcagccctggcctgtgtggggagcgagtgtgccccccacccagcccctgccaccgccgttacttattctcactgatgtggggttatcatataattggcaccatgctgtctgtaggacattatgacgtgcttgggttctggtttgagttggcagcccgttgggtctctctgcctggtggagccttgggg

SEQ ID NO: 7056 - DNA, 743 bp, Homo sapiens
agtttaattgggttatggttctgcaggaggtactggaagcataacactggcatttgcctctggggaggcctctggaggcttacatttgtggtggaaggcacaggagcaggcatctcacatgttgagagcagcagcaaggaagagagagagaggtgccacacacttttaaacaatcagatctagcaagaactcagtattatgagaacaacaccaagaggatggtgcaaaaccattcatgagaaacccactccgatgatccaattacctcccaccaggtcccacctccaacactggggawtttttttttttttttcattagaaagctattgaagaaaaaatgaggaagtaaaagatattatctgacctgtgttttaggagaagttacccaggaatcaatgtgaagggcagattaaaagagatccggtttggaggcaaggagaccctagggaggagtcttctaaagtgggttggtcagttactgtggaggcagaacagaaagaaaacagacacatttccaaatgaaaatcaatattatttgatgcttgggaaccaatacagacaaaaaagtaacaataataagaaaatgtcaaaatgtatttccttaaatcacagtgctactgtatatgccctacccacaggagatatctgtggagttagagacctagatggcatctagagatagtgaaatatttcagaatattcacactcagtataaaatataaagcaaacttggaggggaaaca

SEQ ID NO: 7057 - DNA, 743 bp, Homo sapiens
agtttaattgggttatggttctgcaggaggtactggaagcataacactggcatttgcctctggggaggcctctggaggcttacatttgtggtggaaggcacaggagcaggcatctcacatgttgagagcagcagcaaggaagagagagagaggtgccacacacttttaaacaatcagatctagcaagaactcagtattatgagaacaacaccaagaggatggtgcaaaaccattcatgagaaacccactccgatgatccaattacctcccaccaggtcccacctccaacactggggaatttttttttttttttcattagaragctattgaagaaaaaatgaggaagtaaaagatattatctgacctgtgttttaggagaagttacccaggaatcaatgtgaagggcagattaaaagagatccggtttggaggcaaggagaccctagggaggagtcttctaaagtgggttggtcagttactgtggaggcagaacagaaagaaaacagacacatttccaaatgaaaatcaatattatttgatgcttgggaaccaatacagacaaaaaagtaacaataataagaaaatgtcaaaatgtatttccttaaatcacagtgctactgtatatgccctacccacaggagatatctgtggagttagagacctagatggcatctagagatagtgaaatatttcagaatattcacactcagtataaaatataaagcaaacttggaggggaaaca

SEQ ID NO: 7058 - DNA, 771 bp, Homo sapiens
cacatacgatatcctaaagcaaaatgccctcacgcctcctccctgagagaagacgcagcagccacaggaagtgagcttcttggacaaggaacatcaggcgtccagtgccccaccggcttcctggtgcctagtcccctaaagaggtkagaggtgctgataaaatgagctgctgtgctgatgcctggggtgactggggtggagggatgtgggggcggcagccctgttgtcctggagctgctccttctccccactgcatcactcctgggcctctcctggaggcatgagccatcctccccagggcagccccaggctgtgctgcctgagcaaacccagagcccagccctccctccccctgcagcctgagggcagggaccatggcaagcccttctcctacagccccagtgcctcagcagcctcattttcggggacgtgccagctcattttctggtctgttttgtggtgtggcaacagcctcgaatcacagcagcctgaacagcccagtaaatatttacacaaacctggggctggcaggccctctcctttgtggggctgccctgctgaaagggaggggagccaggccggctcagtcccagctcggcgcagatggtgcctgcagcacgcagttcttgcggggacgcagccgggatgcagacgtgggcttttgaagcccccggcaaaagctggtggccgctcctggctggggttctgtggtcttgtgtctggaaatgtggcctgggaacatccctgaggtctccccagaacagcaaggat

SEQ ID NO: 7059 - DNA, 836 bp, Homo sapiens
tggttcatttttctccatttccaggcatttttattgttattcttattaacaaatgacatcatcactgccagtcatagtaagtgtataaaagtgcatttatggggcatatccattgaggcgttcccaggacagagacgggccagggaggccagagttctccgccttcagcaaaggcagccatgagtcagtcataagttagggtgacaggcgcctggcgtcacaggagacctcaggccacrgtcacagggagaactgggcatcatcaccgggcgcctggcctgtgtgcccccatccaaccagcccgagctatgagctcctcataaccagcagcccgaaaccagagaggactaacatctacacctcctctacacccaacagggacagctcacagcgcccagggctcaatggagaccagatgtttgggagaggtgggagaggacatggggtgaggcctgctgcttctccagtgaataaggtggctggaattaggattaaatttgtaagggaatgtttgggccagaggacccaccatttctgcggtctgtatctcccccaacaccccaaatgtccaacaaggacacagagcccaggaaaaagccgggctcagggaggagactcggagggcaggtcacatacctgctggtggaaagccaggcaggaaccctgtgtggccatgacatcagcacggaaaggcccctggacctcagcctgtccccactgcatggcaggcaagaagcagcagcccagaggtggccccacgttagggccagagtcccagtgtggctcccatctcctggggcagctcatggcactagccagaaaagcccagtcggggg

SEQ ID NO: 7060 - DNA, 836 bp, Homo sapiens
tggttcatttttctccatttccaggcatttttattgttattcttattaacaaatgacatcatcactgccagtcatagtaagtgtataaaagtgcatttatggggcatatccattgaggcgttcccaggacagagacgggccagggaggccagagttctccgccttcagcaaaggcagccatgagtcagtcataagttagggtgacaggcgcctggcgtcacaggagacctcaggccacggtcacagggagaactgggcatcatcaccgggcgcctggcctgtgtgcccccatccaaccagcccgagctatgagctcctcataaccagcagcccgaaaccagagaggactaacatctacacctcctctacacccaacagggacagctcacagcgcccagggctcaatggagaccagatgtttgggagaggtgggagaggacatggggtgaggcctgctgcttctccagtgaataaggtggctggaattaggattaaatttgtaagggaatgtttgggccagaggacccaccatttctgcggtctstatctcccccaacaccccaaatgtccaacaaggacacagagcccaggaaaaagccgggctcagggaggagactcggagggcaggtcacatacctgctggtggaaagccaggcaggaaccctgtgtggccatgacatcagcacggaaaggcccctggacctcagcctgtccccactgcatggcaggcaagaagcagcagcccagaggtggccccacgttagggccagagtcccagtgtggctcccatctcctggggcagctcatggcactagccagaaaagcccagtcggggg

SEQ ID NO: 7061 - DNA, 836 bp, Homo sapiens
tggttcatttttctccatttccaggcatttttattgttattcttattaacaaatgacatcatcactgccagtcatagtaagtgtataaaagtgcatttatggggcatatccattgaggcgttcccaggacagagacgggccagggaggccagagttctccgccttcagcaaaggcagccatgagtcagtcataagttagggtgacaggcgcctggcgtcacaggagacctcaggccacggtcacagggagaactgggcatcatcaccgggcgcctggcctgtgtgcccccatccaaccagcccgagctatgagctcctcataaccagcagcccgaaaccagagaggactaacatctacacctcctctacacccaacagggacagctcacagcgcccagggctcaatggagaccagatgtttgggagaggtgggagaggacatggggtgaggcctgctgcttctccagtgaataaggtggctggaattaggattaaatttgtaagggaatgtttgggccagaggacccaccatttctgcggtctgtatctcccccaacaccccaaatgtccaacaaggayacagagcccaggaaaaagccgggctcagggaggagactcggagggcaggtcacatacctgctggtggaaagccaggcaggaaccctgtgtggccatgacatcagcacggaaaggcccctggacctcagcctgtccccactgcatggcaggcaagaagcagcagcccagaggtggccccacgttagggccagagtcccagtgtggctcccatctcctggggcagctcatggcactagccagaaaagcccagtcggggg

SEQ ID NO: 7062 - DNA, 760 bp, Homo sapiens
agaaagacctataaatggggagagatgctctacagatgcaaattttccccacaagaggtggctttgcaggaccatttcaaaatacgtcaaagaaatatgttttggggtaaaaaattttgatttccttcacagcctgctatctgtcatgtgatgctataccagaatcatactgaaattttgtatcttattgtcacaaaaagtctttatcagtcttgtgatctctmttttaatattagttatgatccattgtgcctaaactccaaaaggcaggagagcatatcaaggtatgtctgtcctatcttcttgtcatggatgggaattcaatttttcaggtttcccatggcccagaagaagtctgttcagtcagttgggggcttaggattttattttaggtttacacattgaattattcaattattttttccaaacctcagcctggaatgctatttccttcccttcgattatccaaattctacatgtattttaaatcctgcctcaacttccatctcctgtgaaaaggctttcccaaaatttctctataatgggaaacaggaaactcaggagctggcctcaaatggtctttcataggaccaccttgttttgatcttgtccgatgtggggaaattcatgtcggggtcttggaaaacttcctcggtccagtggtccaagcatttccatcacatcttattgattttgaattcaaccgtgaagcaaaaagacaaatgctaagcctccaaggttgagggtgcagatgactgga

SEQ ID NO: 7063 - DNA, 1189 bp, Homo sapiens
aaatgaaaatagtgcggagtttgtgaagaattataagaagggccgggtgcgctggcttgcgcctataatcccagcactttaagaggctgaggtgggcggatcatctgaggtcaggtgttcgagaccagcctggccaacaaggtgaaaccccatctctactaaaaatacaaaaattagccgggtgtcttggcaggtgcctgtaatcccagctactccggaggctgagtcaagagaatcacttgaacctgggaggcggaggttgcagtgagctgagattgcaccactgcactccagcctggaggacagagagagactctgtctccaaaaaacaaacagaaaacaacaacaacaacaacaacaacaaaacaaaaaagaattataagaaggatgagatggatttagaggatttttttttcttaccacccatgagttattaaagtgtaatgtcttacacctctgattcaggaatttacagaaatattctgtgagcattatgtgtaaaatcatgtaaataggaaataatttcataaaatatatattcagattaattccaataagcatatattcttactgacayaaattccttaacttggaaagagaggcaacagttgaaaacattccgaagttggcgtatacacaggagactgagataacagtacagagctgtgggaatcttctaccatagcaggattctcagaatacaaaggaagctggtggagatcgccacggggtgggtagagaggtgggcagagtcacacgtggtgccaataacccaagcctctagttatcattacctcatgttggtgatagggtttagctgtgtccccacccaaatctcatcttgaattgtagctcccacaattcccacatgttgtggaagggaccctgtgaaaggtaattgaatcatgggggcgagtctttcctgtgctgttttcatgacagtgaataagtcacatgagatctgatggttttataagagggagtttccctgcagaagctctttgcctgctgccatccgtgtaagatgtgacttgccctccttgccttctgccatgattgtgaggcctccccaaccatgtggaactgtgagtccattaaacctctttcctgtataaattacccagtctcaggtatgtctttattagcagtgtaaaaatggactaatacattattcatgaaggatccactc

SEQ ID NO: 7064 - DNA, 789 bp, Homo sapiens
atcagtacagtattcaataaattacatgagacattcaacactttattataaaataggctttgtgttagatgagtttgcccaactgtaagctaatgtaagtgatctgagtaggtttaaggtagcctaggtgtattaaatgcatttttcacttaacggtattttcaacttttgttgggtttattgggatgtagccccattataagctgaaaagcatctgtagtataataaatgtggggagtgctgtgagagaaataagtgtactgggtttagttcccactgcccaaaaaaggaactggctaatggtaacctgggggaggaagtcgggtaagttgcatggagaaggcaacccttgaacacttgcaaggagctaacaatacctgcttctggagtatttaaacgccagtgggtatgctaaatacttttacctcactyagaccacctactaaccttacaaagtagtccactttgctcacccagttttacagattgatgaaactgaagcagacagatattgttaacctatcaaaggtcaccctgcaagtgtgtgattatagtccaagcagcttgtacttgttgcctatttgttttgcctttcctgtgcatttgccaggcagatgagagtggggtaagacattgcagagaaaaagtaagaaaaggccgtcatgaaacaatttcattttcagaccttataagcacgttacaagtactgatatttatgcttaagttcacgggagtcctggccagaaataaagctggaaggacaagtggggggcagattgtgaaggatcc

SEQ ID NO: 7065 - DNA, 658 bp, Homo sapiens
gcaactccacactcttcctgtgggttgacctagaaaataaaacaacagcaagaacaaggctctttgttgacaccatcctgctacccttccctccagcccagcctccctgtcgcagagctgacattgagccctgtgttatttatggaatatggaggttcaatccctggactgaggcttgacttgacaaatgttacttccttgggtcaagaggaatctctggtcctctgaaggcttttagcctttattttgagagtgcaaaatgatagctgcartagaaagtaaagctcagctcagtaacccccaaaatgtgctaaatcattatgaaatgtgtaacaattcacagccatctgtatattcctgcttttgcaccccccgtatgcaaggggattatttcagatttctgttatatactgtgatttagctgcatgctttagaacaacataaacatagtctttattataacagacaactaaaaatggaatactagtatttcctagattgtaattaaagaaaatgtaggtaacagaaagcccaaaggctggatctagagctccagtgtgtttctccagcccaaagaaagtgaggttgtttgtgtgaacaggaccccaaaagccatcacatggttcttttgctccatggaagctggaaagggctggct

SEQ ID NO: 7066 - DNA, 816 bp, Homo sapiens
ccaagtgtcaaagaagagggaggccatgtaacctcctgcctcaccacagccttgggagctgccctgtcagtgtcagcacgttcacagtgccagtgccagccccactgtcagaaatctcagtccctggccagggacctgcagcacagctggccaaacagccggacaatgtggcttcccaccacgctgcagctgttctgaggcccgcctggtgtgctggtgccctggcaggtgcgaaggcccctgctggcctcactcctacccagcagcctgcactggaggcctcaggggctggaggtgatcactcagggccaggcctactgttcagccacatagcactggkcttggaggcccagggagggcctgcttctctttgctgacaccctccacaaggggtgtgtggaacttgcagacctccgtctgtgaccctgcccacagcattcctgtcctgctgtggccctacctcactcctttccaactgagagcctagtctctcctggggcatcttggaaacagagccctctcccctgagcctgcattccctgtccccctccctggacctgcctgctgaggggcaaggtgggctggcaggggtggtgcaggagctgcaggcccggggactcaggcttttcccaggtccccttggacaggctgttgaggaggagagccagctcctgccatgacagcccagccctggagggtccgtctgttctccagagctggtctttgggccagtccaggtggtcacctccacacaccacttcccagggtctttcttagtctccattcaaagcagggttctttatagtcctacagaga

SEQ ID NO: 7067 - DNA, 763 bp, Homo sapiens
aaatcctggttgatctgcaaacctttgaacacagaataaatgtttgttgtttttaagccactgagttttaaggtagttattacgtagcattattgtggaaaaagctgactaatacagaatgcaatatggattcttgtgagatactataacatcatgtttaagagtgtggctggtttttttttttttttcttttttgagatggagtttcgctcttttgcccaggctggagtgaagtggcaagatgtcagctcactgcaacctccacccaccaggttcaagcaattctcctgcctcagcctcccaagttgctggaattatagatgcctgctgccatgcccagctgctttttgtatttttagtagagacggggtttcgccatgttggccaggctggtcttgaactcctgacctgaggtgatccacccgcctcagcctcccaaagtgctaggattacaggcgtgagccacygcgcctgaccaagtgtgtggtttttcaacttgttagcttgaaagtagggtaaacattttaaaaagagagaagaaaaagagtgtggttttcaaagtgtagcctatctcttatttttttgttttgaatcaggcagcccctgaaccagaatagattcagagaggctcctccatatcttgttttgaatctcacttctgttacaatggagattattacggtaccaatctcatagcactgttgtgtgaaccaaatgagaccatgcatatcatagagctaagacagttcttggtacacagcga

SEQ ID NO: 7068 - DNA, 790 bp, Homo sapiens
catacatatatatatatatgagtttattaagtattaacttacactatcacaatatcccacaataggctgtctgcaagctgaggagcaaagagagccagtctgagtcccaaaactgaagaacttggagtttgacgtttgagggcaggtagcgtccagcaggggagaaagatgtaggctgggaggctaggcccattgtctctttttcacattttttctgcctgctttatattcgctggaagctaaggcaaattaagggtggatctgccttccccagaccattgactcaaatgttaatatttttggcaacaccctcacagacacacccaggattaatactttgtatcctttaatccaatcaagttgacactcagtagtaaccatcacacaaggattggtgatgatgctctttgttcaggcagtaccaggaggcaaacaagagacagacacctgagcacaactcaacagacctgacaatagaaccatctcagaaagtcagcttctaagaaaccaattctagttatatattttcccatctaaacctaattgacaagagaccagggaagacagaatttgcaggaccaagtcttggaagaaaaagaaaacctagatatgtgagcctggtatttggactctctttccccttagaggaacccgacaaagtggctggtggctgaggagctccacgaggtgtcctgtgagctgtagggacaaaaaaaagtggaggaaaaaaaagacaaagctagaaaaggctagaaaasgttccctggtagacacttcaggcattcagcgg

SEQ ID NO: 7069 - DNA, 815 bp, Homo sapiens
tgccatgggcagtcaagacatttagagtattctgaatttgtctgttttttttttttttcttttarcagtgagtttaattactttagatgttttcttgtacattagcatccatttctttcagattgaagaactccctttagcatttcctgtaagacaggtctgctgttaaggaattctctcagcttttgtttgtctggaaattctttatctcttcttcatgtttgaaggctaacttcgctgggtacagaatttttgtttggcaattccttttttcctttgtcactttgaatatagcatcctgttctctcccggtctgtagagtttctgctgagaattctgctgaaaattgtattggggcttcactgaatatgatatatttcttttcttttgctgctttgagtattcttgctttgtctttaatttttggtaatttaattatgatatgtcttggggatttcctctttgggttgaatttgattagtgacttctgagcatcttgtacttggacggcatcatctttctccagattttggaaactttcagccattatttccttaaatatgctttctaggcccttctcttttttgtctcctgggaattcttgttatatggaggttagttcacttgatgatgtcccataattattataggccactgatgggctgtaactaattcatggtcttctacctctgctaggtccagactgacaatgaatattgacagagactttccccttgacctaactataactagtcaggctcttctgaacccaactagagcccattcttgggaatgtccgcaagagtccagtttta

SEQ ID NO: 7070 - DNA, 815 bp, Homo sapiens
tgccatgggcagtcaagacatttagagtattctgaatttgtctgttttttttttttttcttttagcagtgagtttaattactttagatgttttcttgtacattagcatccatttctttcagattgaagaactccctttagcatttcctgtaagacaggtctgctgttaaggaattctctcagcttttgtttgtctggaaattctttatctcttcttcatgtttgaaggctaacttcgctgggtacagaatttttgtttggcaattccttttttcctttgtcactttgaatatagcatcctgttctctcccggtctgtagagtttctgctgagaattctgctgaaaattgtattggggcttcactgaatatgatatatttcttttcttttgctgctttgagtattcttgctttgtctttaatttttggtaatttaattatgatatgtcttggggatttcctctttgggttgaatttgattagtgacttctgagcatcttgtacttggayggcatcatctttctccagattttggaaactttcagccattatttccttaaatatgctttctaggcccttctcttttttgtctcctgggaattcttgttatatggaggttagttcacttgatgatgtcccataattattataggccactgatgggctgtaactaattcatggtcttctacctctgctaggtccagactgacaatgaatattgacagagactttccccttgacctaactataactagtcaggctcttctgaacccaactagagcccattcttgggaatgtccgcaagagtccagtttta

SEQ ID NO: 7071 - DNA, 601 bp, Homo sapiens
agaagagaaaccttataattctccagagatgatgtcatagaagtagacctaaaaaaactctaggrctcaaatgtgtatatgtcacatgcacaccgtatccatactttgaagatttttagataaggattggtaaacactgtctcaggatcattgagacttactgatgagatgcatacctggaatacaacattaaaagagcatgcataccttgttcaaaaggaaaacgtttcctcgaaaggataggataggaaaattgtatgtcaagaatatatatattccaatggaaatttaaaatctgagagtagaagtatttaaaaggggataaacccggaaagagatggaagtagtatctttgaaggactgtaatacagatacccagcacatgaaggaaattgggtaaaacaatcctagatagctctcatgagcagggcaaagtcagagataaccaggtccatgcatgtttgtgtctccacaatgtcagatttttactgatgctattttaaccacaaaagccacaagctacatggagttctcaagaaggcaactctctccttagtacttctcgttcactccgtagtcagagcacacagctcaagccact

SEQ ID NO: 7072 - DNA, 819 bp, Homo sapiens
ccgatgaaatattgacacacgcgtcggcctggtaaaaacctcatgcccatctcctagaagtctcacacacaaatatcccttctgcggaaatgcctgctcttgcagtttaggtggctgccttaagtttttatttagtcccttgcccccctttctaaattttggactaactacacctgtcagtcaaatctccagctcttataaatgggaatatacagagatgggtaattgaaaccacggggtaattctcaaatttccatttgcccagtgtcaaatttctctcracctagcaaacagaaaagcacgatctacctgaattccctggtcacttttctgaccctactctgtccttgctcatcacataatgggggcactttacgtgattcaacgagtggccaaactcttgcagatccagcgataaccttggttgctcacaccacataactcaaccgtggaagaaatggtgccaccgctggcaggtgagacgccttcctctggtttgtaggatacgattgggcatgaattgttttaatagactgagactgccccgcgggtaattctacttgctaggagtgttgagcagccttcctgcaagccatctactccagttgggagtctgctggcacctgctcccctgcacacccccaggatgcccaggccgcaggaagatgtctaaaacttcctacaggggcaaagcccgccctggcctcaccagtcgccccagcgcgcgtcagccacgaccccggcgaggcccaggtgggagggtagggacgtgcgcagcctggggtggggctgggggctggcgaggacctgctccgggga

SEQ ID NO: 7073 - DNA, 793 bp, Homo sapiens
acattagggaatgtcgcttcaaaggttgatcttgtgagtccagcagcaggcactacagggacaatcaaaatcagaagttgaaatggaacttagggctggctgtgtgtgtgtgtgtgtgtgtgtgtgtgtgtgtgtgwgagagagagagagagagttcaaaatcatatatcatattgagtacctactatattcctagcattagattagatgatttacataaaagcactctatcctcacaagtgtctacgcctttccttcaaaaggaaactgaggctggaagaagtaaaacaacttgcttgatgttccacagccagtaaataagtgacagcactgagatgtgaattcaggtggtctgtccctaaagctctgtcctctttatcatgctgcctccgtttcagccagggtttctgaacccagggttcacggataaccttcaggggtctctgagccaactgaaattgcatgtaagccactacgtggtttatgtttctcttgggtaaagacccacagctttcaccacacaaaggcatcaccaaataactttttaatcattgcattagcaataccattttataaaacacatgacttgtcagtgtgtaaaaatggaacaagttctatagaggacaacttagcactatcaagattataccctttgacccgattccacttctaggaatttattctataaacacactcccacacttgggaaacgacaaacgaacaagattattcattgcagcattatttacaaaagcaaaaggattggaaacaacataaatgtctagcaactggg

SEQ ID NO: 7074 - DNA, 796 bp, Homo sapiens
caaatgctactatttgagtgaaaaagagtgtgtgtgtgtgtgtgtacatattgtaatatgtacatatatacacgcaaatacatatatatacttgcattcatgtatacacacaagttcatatgtgagtatgcatatcatctctaaaattagcacaagaaatgaataacatttagattagtggccaatggggaataaaactaagtggctggggtaaagactgaccatggttacaccttattgatacatttaaagttttgaatcatatgagcaaaacatgtgtttacattaataaataataacaaaacaaaagcattgctgtaaacagggatttactcaattcatcttccagcactgcttcccccaagtgtcaaagggtattgtcatgatcctgactaaaggttattatttttttttacttcttactttggaataattatagatacacaggaagttacwaaaatagtacaaagactcctacataccgtttacccagcttccccaacggagacatcttacatcggtgttgtacagtatatttcaaagccaggaaattggcactgggatgctactgttaactagactacacatcttatcctaaaggttatttttaaaagcataaatttctcacagctcactcatccatttaaaaatgctcattgggcacctttagtgtgccagacatcatgtgggacaatgggatgtggcaggaacacttcagacccatccctcccttgtgtcaggtagaccagtgaaggcgatccctttactccactgggaatagcgtcatggaggcctg

SEQ ID NO: 7075 - DNA, 834 bp, Homo sapiens
agcacaatataggtgggcctctctccctaatgtgggtgggcccctctccaattaattgaaggcctgatgagaacaaaaaagctgacctgcctatgataagggggaaccacccctatcagactgtcttctagctggcacgtcagttcttttcctgcctttggactcaagctggattatcaatccttcctgggtctcaaacctatcagtcttcagactcaaactacatcattgatgctcctagttctccagcttgcccattgcagatgtggagacttgccagcctccataatcacatgagccaattccttcttttacatactctatatgtatataatatataggatgtcattgtatatattatataatgtatgttagacatggtaatatatacatttacacatatgcaggcataccttgttttactgcattttgctttattgtgcttcatagaaactgcatttattacaaattaaagatttgtggcaatccttcactgaacaaatgtatccttccaaaagtatgtgctcacygtgtccctgtgtcacattttgataattcttacaatacttcaacttttccattattgctatatctgttatgctggtcagttatctttgatgttattattgtaattgtttcagtacactacaattaatgcacacataacacagtgaactcagttgataaaagttgtgtttattttgactgctctaccaatcagccattccctcatctctcacaatttccttgagcctccctcttccctgagacataaaaatattataattaggccagttagtaatcctacaatggtttctaagtgttcaagtaaaa

SEQ ID NO: 7076 - DNA, 834 bp, Homo sapiens
agcacaatataggtgggcctctctccctaatgtgggtgggcccctctccaattaattgaaggcctgatgagaacaaaaaagctgacctgcctatgataagggggaaccacccctatcagactgtcttctagctggcacgtcagttcttttcctgcctttggactcaagctggattatcaatccttcctgggtctcaaacctatcagtcttcagactcaaactacatcattgatgctcctagttctccagcttgcccattgcagatgtggagacttgccagcctccataatcacatgagccaattccttcttttacatactctatatgtatataatatataggatgtcattgtatatattatataatgtatgttagacatggtaatatatacatttacacatatgcaggcataccttgttttactgcattttgctttattgtgcttcatagaaactgcatttattacaaattaaagatttgtggcaatccttcactgaacaaatgtatccttccaaaagtatgtgctcactgtgtccctgtgtcacattttgataattcttacaatacttcaacttttccattattgctatatctgttatgctrgtcagttatctttgatgttattattgtaattgtttcagtacactacaattaatgcacacataacacagtgaactcagttgataaaagttgtgtttattttgactgctctaccaatcagccattccctcatctctcacaatttccttgagcctccctcttccctgagacataaaaatattataattaggccagttagtaatcctacaatggtttctaagtgttcaagtaaaa

SEQ ID NO: 7077 - DNA, 828 bp, Homo sapiens
cctcctccggccccgcccccacccacccccggccggggtgccgaggcggttaaccctacccgcgccgcagcgcacttgggctagagcgccgcgcacccaatccagattccagagcctgccggctgggaaagatccggtctcggggtcggctatgatcccgcagcggccaaggcagggctcaggccccgggattctccccacacgctgctgcactggcgcagccggtcgccaaactttttctccccaaagccagtgcccccgcagttacttgscgggcagccggcagcccactctcggcgggatgatctgggagaagcgggcgtgggacgagggggctgctgttttgcagccctgcgaggcgtgcagtcggagaagtggtcggggttccacaccgtccctgagcctgcccccggccaaggtggcccgacgtgctgcagtggctggcgcaggtgatccgggcagcgcgtccggcactagtcaagggggcagcggcacgggagggaggggcgcctttctcttttctcctccccctgcagcccagctgcactgcgtgggggctctccatctccacgcaatcagcaggcggaatccctgccctggagcgccctggctctggactgcacccccctagggtttgtcctgcagattcccctccccatctttctctgccacacacgcttccctaagccgcgcgcgccgcaaactcagtctcggtccccgcaggtgatgtcatgcccattgttttggtgcgcccaaccaatcggactcgccgcctggattctaccggagccggcatgggcccttcctcgcaccagcagcaggagtccc

SEQ ID NO: 7078 - DNA, 1606 bp, Homo sapiens
gccagtaggtgaccctcttttccaaccccacaagtgcctaccttgggtctgctgaggttcgcttactctgttctttctcctcactggcccgtaacttgctatttggcctagctcactgctgctttccaaattttttccttgagagttccctaatacctcccacagttaaaagccaaaacagtcaataactgaaattactatcaacctcaaagtcgatgaagataagttggtttctgcagagaaaaggttccaatggagtccctgggtgctcacttttggtgatattggggtgacagttgtatggaatctgaggctaatttatacattaagggacatcttggattatgtagccaattgaacctccaaggagttcagatgggtagaagccactctccaaaaggaggatgagaacattgtattaaacaaaaacgcttaatggaacatcatgcagttttagatctcctctttgcccatcttggaggcttgtgtatggtgctgaacaaaaccaaatattgttcttatctttcccgtgaatttactagtacatataacttaatttaaaatgtggctgacaatgctgtttctctagacactgccaccaaatacactaaggaaaattctcaggggaaaaagaagatatgtatttacgggtgcaggtaacagttgatttgcaagcatcctgaatggtgatggcaagtgatatggtttggttctgtgtcctcacccaaatctcatcttgaattgtaatcctcagatgtggagggaagaacctgctaggaggtaattggatcctgggggcagtttcccccatgctgttcttgtgatagtgagtgagttctcacaagatctgatggttttataagaggctcttcccccttggctctctctctctctctctctcctgccaccttgtgaagaaggtacttgcttctccttcaccttccaccatgaatgtaagtttcctccttctccctcaacttctaccatgattgtaagtttcctggggcctccccagccatgtggaactgtgagtcagttacatcccttttccttataaattacccagtgtcaagtatttctttataactgtgagaatggactaatacagcaagcctatcacaaggttttctactcttaatgtttcttctagtgggtctccaaggtactatgacatgtgttaccaggtgaactacaaaaacaaatgcctctgtaaatcaagttattttatagcaagctctrgtccttaatcaccattgtgctctgaacaaagtatatgaccaattggactctaatactattgaactatctttattgcctgagctttgaattattcgattttgatcagtttggttcatggagactcccggtaaggtacagacttcattttctttgtattaccctcctgagagccatcataacagtctccctgatgtgttgtattttcttgagagtcttggccgggtgcaatggctcacacctgtgcaatggctagcactttgggaggccgaggcaggtggattgcttgagcccaggagtttgagaccagtctgggcaacatggtaaaaccctgtctctacaaaaaatacaaaaagtagctgggcgtggt

SEQ ID NO: 7079 - DNA, 658 bp, Homo sapiens
ccagtctctatggtctaatccccctctttcatggattctaaaaatattgcctactggctcctgtttccatctgtgactgagctcctttaaaatccctagacttgagactcaaagccagattcctctgctcccattctgtggctcttccagtgggtcatgacatagtcttgaagacatcaaacataaatgttttcagtcatttgacaaatatttactgagcaccctttatgtgtagcttgaaggaagaagtgaagaataagccasatgtgtgcataaattaacaaaataggtacttgagtgcatgtgcatgcctgtgtacatgtgtgcatgaacacataggaacagtcttatcgggtggagtgagcagcaactgagaaaacatgcatgagctagcgataagctgcagaatgccatgtgtgacaggcatgtgtccatctacatatttctgaaagttgattgcattttctgttcactcctctttgaaaggatagctcatgtctgttattgggaaaataactgcttcaattcaagtcttagctgcctggattcttgctctccagcagcaacgaggcattgaagcaaaccactcaggctccaggaatgattaactctgaggacaacagccaggcagtaggctggctaggaggtgggaccaact

SEQ ID NO: 7080 - DNA, 579 bp, Homo sapiens
ttgagcccaggaactagagtccacagtgagctatgatcatgccactgtactccagcctgggtgacagtgagacttgtctccagaaaaaaaaaaaaaaaaaagaccttctcaaggagtcccttctccctcccccatttcaaaggcgtgacccaggcttctcaggctatctgaggccttctatcactgaggacttcctgttcagcttggcttcctccctagtccagagtccacacgtgcagcraaagaggagatgtgaccaaccttggtggcgttgtgtttccaggaagttctatgtgggtctccgtgtgtgtggtggggggacctgctgggctttatttttcccagggtttcctctcccttgaatgctggattagtccttgcctatcagaaactgataaggccatggaaaaagtgaggctatggctggagaccagaagagaggcctggagggagctgggaattttcccatcatcccaggaaaaacctgtcttgtatctccgagccccgcctttgcccccagatttcagggactcatgcaagttttccacaaaccgattttgttgcatagaaattgatgaa

SEQ ID NO: 7081 - DNA, 481 bp, Homo sapiens
ctacctagagatcagatttaagattataaaaataattgtgttgctgtaaataggtttcttccctacagacttttctattcctattttctttttatttaaaagataatttactcttgcgtttttgtcagtttcctttttcttgttttatttctgctttacttgttatttcaaaataaagaattgaaggattgtattttttttttaaggcaactgaatttagatgacagatacttgttctaatggagtcactctamccagcctataaattctaatccagtcatttaaaagaaaattctttccatgggaaaaattgcttttaaatggaactccagtgcccctgcgtgcctaatgagttatttggagcaacatcgctgcagttgtcaggcccaggttgttcatcagtagcccgagatgctagtagctgagcagtgtcgcaccctaggggagttatcagggaaagcgtaggtgttcggggtgtctg

SEQ ID NO: 7082 - DNA, 481 bp, Homo sapiens
ctacctagagatcagatttaagattataaaaataattgtgttgctgtaaataggtttcttccctacagacttttctattcctattttctttttatttaaaagataatttactcttgcgtttttgtcagtttcctttttcttgttttatttctgctttacttgttatttcaaaataaagaattgaaggattgtattttttttttaaggcaactgaatttagatgacagatacttgttctaatggagtcactctaaccagcctataaattctaatccagtcatttaaaagaaaattctttccatgggaaaaaytgcttttaaatggaactccagtgcccctgcgtgcctaatgagttatttggagcaacatcgctgcagttgtcaggcccaggttgttcatcagtagcccgagatgctagtagctgagcagtgtcgcaccctaggggagttatcagggaaagcgtaggtgttcggggtgtctg

SEQ ID NO: 7083 - DNA, 622 bp, Homo sapiens
gttaggtataatgcacaccatttgggtgatgggtacactgaaaccccagacttcaccacgatacaatctatccatgtaacaaaaacccacttgaaccccaaaagctattgaagtaaaaggaaaaagaatcagcttttctcgcttcatgtgtttgtcgatgacccactttaacaaaatacaactaaaaatctgaatcttattagagagttaagttatgaagtgtttgtgtgctttttataagtaacacaggattttcttatagctatcaagctccayagagtttgataaaactatttaacctgcaaaatgttggtttactgattctcttatcagagacacatgtcataaatagaggcactcatagcaaaacacccctcatttttattacctgttgacaattctagccagaggattgcccatttttttacttaatcatcactcgtggccaggctgggtacagtggctaatgcctataaccttgggtctttcaaagaccgaggcaggaaaattccttgaggccaggagttcaagactatgtctctacaaaatgttttttttttaaattagtcagatgtggtggcacatatctatagtcccaactacttgagaggctgagacagga

SEQ ID NO: 7084 - DNA, 622 bp, Homo sapiens
gttaggtataatgcacaccatttgggtgatgggtacactgaaaccccagacttcaccacgatacaatctatccatgtaacaaaaacccacttgaaccccaaaagctattgaagtaaaaggaaaaagaatcagcttttctcgcttcatgtgtttgtcgatgacccactttaacaaaatacaactaaaaatctgaatcttattagagagttaagttatgaagtgtttgtgtgctttttataagtaacacaggattttcttatagctatcaagctccatagagtttgataaaactatttaacctgcaaaatgttggtttactgattctcttatcagagacacatgtcataaatagaggcactcatagcaaaacacccctcatttttattacctgttgacaattctagccagaggattgcccatttttttacttaatcatcactcgtggccaggctgggtacagtggctaatgcctataaccttgggtctttcaaagaccraggcaggaaaattccttgaggccaggagttcaagactatgtctctacaaaatgttttttttttaaattagtcagatgtggtggcacatatctatagtcccaactacttgagaggctgagacagga

SEQ ID NO: 7085 - DNA, 793 bp, Homo sapiens
atagtagtttgtggccaatgcttattcattattcatatgttttcatggaaaatgccctgtgaattttcacatcattaagtaatgtgatttagaataagtgagctattcctttgattaatctagaacactagaatcaccatggtattcttttttgacaactctattgagatgtaattaatattttaagtgtaaatttagtgatatttagtgtatttgtagagttggacgacaatcaccatctaattttagaacattttcatcacccacctaaaagacataaccattagcagccacttcctactacctgtctccctgtgaaacacacacaacacacacacacacatgccagccttaggaaacatgaatgaactttgtctccatatatttacctatttcgtacattttatataaattgaactgaacaatatgtgttttgtttctttcatttaaaataatgttttaaaggttcattcatagtgtagcttgaatgattacttcaatttctttttattgccaagttatgcattaatgcattaatatgcattcttcgtatgcatattatttatgcattttatttatccattcagttgatgaacatttggtttgtgwctacatttcgattattttgaataatgctgctaagtacatttgtgtagacttgttcatgacatatgattccatttttctaaaagttgaactacttagtaatatggtaacagtttaaatttttgaggagctgacagactgttcttgaaagtggctgcatcattttacattgtcaccagcaatatat

SEQ ID NO: 7086 - DNA, 695 bp, Homo sapiens
gctgttgtgtcatttctgctcattagttttatgcaaacagtttacagacaaggatcagcagccctctggaagtgagggagaggatgatgatgcggaggctgccttgaagaaagaagttggtgacattaaggcatctacagagatgaggttaagaagattccagtcagtggaaagtggagcaaataacgttgtcttcatcaggacacttgggataggtgtgacaaatacttgctaagattatcgatctcataacatctgggtatcttcctgtctcagggaatactgcttacaaaatgrcttcttgggcatgactcagttaatcatttgatggcagcttctgtacactgtattagcagttggcctgtggagaggtagaatggggtggtggacgtagcattggcttatgagtggaaacctggctttgctgcttccttcgtatataacttaaggcagaactagagtgccagttctgtgtaaataaggggcagctgctactcagctccagccagttgttgctctttgggaatgcagggccaggtatttgaatttctcaaaagaagtttgaaatctggagtttttttgtttttcagtgtggtcaactaatttacaaattttcggagcagccccaaatatacttgtatgtaggcaagttgcagcctgaggacctccctttcatgatgttgtgcccagcatgg

SEQ ID NO: 7087 - DNA, 695 bp, Homo sapiens
gctgttgtgtcatttctgctcattagttttatgcaaacagtttacagacaaggatcagcagccctctggaagtgagggagaggatgatgatgcggaggctgccttgaagaaagaagttggtgacattaaggcatctacagagatgaggttaagaagattccagtcagtggaaagtggagcaaataacgttgtcttcatcaggacacttgggataggtgtgacaaatacttgctaagattatcgatctcataacatctgggtatcttcctgtctcagggaatactgcttacaaaatggcttcttgggcatgactcagttaatcatttgatggcagcttctgtacaytgtattagcagttggcctgtggagaggtagaatggggtggtggacgtagcattggcttatgagtggaaacctggctttgctgcttccttcgtatataacttaaggcagaactagagtgccagttctgtgtaaataaggggcagctgctactcagctccagccagttgttgctctttgggaatgcagggccaggtatttgaatttctcaaaagaagtttgaaatctggagtttttttgtttttcagtgtggtcaactaatttacaaattttcggagcagccccaaatatacttgtatgtaggcaagttgcagcctgaggacctccctttcatgatgttgtgcccagcatgg

SEQ ID NO: 7088 - DNA, 695 bp, Homo sapiens
gctgttgtgtcatttctgctcattagttttatgcaaacagtttacagacaaggatcagcagccctctggaagtgagggagaggatgatgatgcggaggctgccttgaagaaagaagttggtgacattaaggcatctacagagatgaggttaagaagattccagtcagtggaaagtggagcaaataacgttgtcttcatcaggacacttgggataggtgtgacaaatacttgctaagattatcgatctcataacatctgggtatcttcctgtctcagggaatactgcttacaaaatggcttcttgggcatgactcagttaatcatttgatggcagcttctgtacactgtattagcagttggcctgtggagaggtagaatggggtggtggaygtagcattggcttatgagtggaaacctggctttgctgcttccttcgtatataacttaaggcagaactagagtgccagttctgtgtaaataaggggcagctgctactcagctccagccagttgttgctctttgggaatgcagggccaggtatttgaatttctcaaaagaagtttgaaatctggagtttttttgtttttcagtgtggtcaactaatttacaaattttcggagcagccccaaatatacttgtatgtaggcaagttgcagcctgaggacctccctttcatgatgttgtgcccagcatgg

SEQ ID NO: 7089 - DNA, 879 bp, Homo sapiens
ttttaaagcagaaaaccacatactcagagcaagctttgacctagttcctttcattcaaggatctcaaagcccctttaaacccatgatccagattttgtttgtaaaggaagagatggagttgaaaaacaagatctaaggcagttcctatgaatcccttcaatgtaatttttcagagcatttcccttctcccttcaaactcatgtcgttctgattgggctgaattgaagagctgcccagcctctcccctggccctgagacccctgacctagagggactaactagagggacggcatggcaatggcaagtgtacccaagacagcatgcccggaggtttatccaggaatattcatccagagggaaagagcaatgggtgaggctgaagttcgtctgttctcttatatacaaaatgtgaacaaatcctgaatatcacagtctggccacaagggggatgttttggggtgggcagggtgacggaggcagggggtcctgacttggctccccaagaagtgggttctgttctgttygcttaagctctctgcattcttttttccacgctagacgatgagcatgttggaccagatgggcacgtgtccaagtgcaccctatggaatgtatcagcatcggcctcgcctggaagcctgatagaaatgcagattcccaggccctgcccaggcctgctgtatccggatctcttggtggtggagcccagggatctgcatgtcacgagcttgctcagagtatctgtgaactgagttcaatccacagccctctactccaatgctagccagaccctggggccattgcctctccccccacatgcccctccatactgtcagcacctctgcattgtggcctttctgccacccccaaccgacttgg

SEQ ID NO: 7090 - DNA, 879 bp, Homo sapiens
ttttaaagcagaaaaccacatactcagagcaagctttgacctagttcctttcattcaaggatctcaaagcccctttaaacccatgatccagattttgtttgtaaaggaagagatggagttgaaaaacaagatctaaggcagttcctatgaatcccttcaatgtaatttttcagagcatttcccttctcccttcaaactcatgtcgttctgattgggctgaattgaagagctgcccagcctctcccctggccctgagacccctgacctagagggactaactagagggacggcatggcaatggcaagtgtacccaagacagcatgcccggaggtttatccaggaatattcatccagagggaaagagcaatgggtgaggctgaagttcgtctgttctcttatatacaaaatgtgaacaaatcctgaatatcacagtctggccacaagggggatgttttggggtgggcagggtgacggaggcagggggtcctgacttggctccccaagaagtgggttctgttctgttcgcttaagctctctgcattcttttttccacgctagacgatgagcatgttggaccagatgggcacgtgtccaagtgcaccctatggaatgtatcagcatcggcctcgcctggaagcctgatagaaatgcagattccyaggccctgcccaggcctgctgtatccggatctcttggtggtggagcccagggatctgcatgtcacgagcttgctcagagtatctgtgaactgagttcaatccacagccctctactccaatgctagccagaccctggggccattgcctctccccccacatgcccctccatactgtcagcacctctgcattgtggcctttctgccacccccaaccgacttgg

SEQ ID NO: 7091 - DNA, 879 bp, Homo sapiens
ttttaaagcagaaaaccacatactcagagcaagctttgacctagttcctttcattcaaggatctcaaagcccctttaaacccatgatccagattttgtttgtaaaggaagagatggagttgaaaaacaagatctaaggcagttcctatgaatcccttcaatgtaatttttcagagcatttcccttctcccttcaaactcatgtcgttctgattgggctgaattgaagagctgcccagcctctcccctggccctgagacccctgacctagagggactaactagagggacggcatggcaatggcaagtgtacccaagacagcatgcccggaggtttatccaggaatattcatccagagggaaagagcaatgggtgaggctgaagttcgtctgttctcttatatacaaaatgtgaacaaatcctgaatatcacagtctggccacaagggggatgttttggggtgggcagggtgacggaggcagggggtcctgacttggctccccaagaagtgggttctgttctgttcgcttaagctctctgcattcttttttccacgctagacgatgagcatgttggaccagatgggcacgtgtccaagtgcaccctatggaatgtatcagcatcggcctcgcctggaagcctgatagaaatgcagattcccaggccctgcccaggcctgctgtatccggatctyttggtggtggagcccagggatctgcatgtcacgagcttgctcagagtatctgtgaactgagttcaatccacagccctctactccaatgctagccagaccctggggccattgcctctccccccacatgcccctccatactgtcagcacctctgcattgtggcctttctgccacccccaaccgacttgg

SEQ ID NO: 7092 - DNA, 879 bp, Homo sapiens
ttttaaagcagaaaaccacatactcagagcaagctttgacctagttcctttcattcaaggatctcaaagcccctttaaacccatgatccagattttgtttgtaaaggaagagatggagttgaaaaacaagatctaaggcagttcctatgaatcccttcaatgtaatttttcagagcatttcccttctcccttcaaactcatgtcgttctgattgggctgaattgaagagctgcccagcctctcccctggccctgagacccctgacctagagggactaactagagggacggcatggcaatggcaagtgtacccaagacagcatgcccggaggtttatccaggaatattcatccagagggaaagagcaatgggtgaggctgaagttcgtctgttctcttatatacaaaatgtgaacaaatcctgaatatcacagtctggccacaagggggatgttttggggtgggcagggtgacggaggcagggggtcctgacttggctccccaagaagtgggttctgttctgttcgcttaagctctctgcattcttttttccacgctagacgatgagcatgttggaccagatgggcacgtgtccaagtgcaccctatggaatgtatcagcatcggcctcgcctggaagcctgatagaaatgcagattcccaggccctgcccaggcctgctgtatccggatctcttggtggtggagcccagggatctgcatgtcacgagcttgctcagagtatctgtgaactgagttcaatccacagccctctactccaatgctagccagaccctggggccattgcctctycccccacatgcccctccatactgtcagcacctctgcattgtggcctttctgccacccccaaccgacttgg

SEQ ID NO: 7093 - DNA, 711 bp, Homo sapiens
cctttccccaaagcccagccccctgacccccgcagggccggggaagggcctgattgtgcttctaggttaccacccttgcccctacctaggccacatacagcaggtggtgtcagtaaacatccagctgccgagggatcaggcaggcctttatgggcccagagtagccccagccaccccatgtcacctctccctccacaacttcccccatgccaaggtcttggattttccagctcaaatcattcatcacccactgagctcaaatatcctccttacagatgagaaggagcacacctggcccaaggtcaccaccagactcrccggagggtcctcagcagtggtgtggccccagcatcactttctcatcagcacacagcccacccccatgaacttgaagaggcttctctcccaactagaaatgcacagatagaatgggctgaaaaagccagcctcacgcaaggagagaatttcaaggaatctggaaacatagctagtgagagctggaagctgaaggggtcaggcctactgggggcgagtctgtccaggaggctaggctgggggacccctgagcttcctgcatagccctgagaagttgctcagcctctgcagcctcagcctcctgcaggatggggtgcaggtggcacctgcaggacaggatgcaggtggagctccagggcaaggcactcacaggctggcctgtgatgggtgctgggg

SEQ ID NO: 7094 - DNA, 479 bp, Homo sapiens
atcaagagagctttattgtgggggtttggctcacaccatcrtggagcctgagaaatctcacggtccaccatctgtaagcccaggacccaggggagctgagagtgtaaggcccagcccaggtctgaaggcctgagagccctgagtgctaacttccaaacatatacccagaaatcatgttttcttcatggtgttgaaggtgtgtccacgaggagcacaaatgccctaggcactgggcactcattgcccatcccaggtgccacgcaagtctgtggcctgcgcttccccctttcagtttcacactgacactgtggggtgggtactgttcccaacacgttttatacaaggggagaccagagctcagagaggtcaagccacctgcctgaggtcgcacagctggcctgtggagaagccggggctctgctacccaggtccgcctgatcttgccatcatccgatgctcttgccgacggcaccacatgg

SEQ ID NO: 7095 - DNA, 813 bp, Homo sapiens
cggaccagctgtgtgacctcaggcaggtgtcttgacctctctgagctctggtctccccatgcataaagcatgttggtaacagtacccaccccacagtgctggtgtgaggctgaaagggggaagtgcaggccacaggctttcatggtgcctgggatgggcaatgagagcccagcaagtgcaagctcttgatatgaccgtccccattttctagatgaggagactgaggctcaggaaattagaggccttactcaggacctttaccacatgatcaaggctggaatgaaaatcccaactccgtcccaggccctggcctctgtgtgccgagaacattaggcagagagaagttgtgcctggcagagggaaagatggccacagcaggaccagtcagggagggcttcctgggagtggggacacctaggcagtggcccrcagggtggttaggacttggctgggctgagaggcagtgagaggtcactcctgttcagggcagggaacgggccacacccttcatagctgagccagggaacaggcatactgttcacgagcagccagtggagaccgaggctcagagaggacaggcagcccagcagagctgctcagcgtgaggcgcaggggctgggactcatccccacaccctcactccctcacctctgcccccgcatcctctccttctgccctggcaagtgtgagcatggctcccaggcaggctcactttcctgtcatgacttggcagcaagagctaaggggcttgctcttagctggcctggagttggacacactcaagtgctggccagtgaggtgggtatttggagg

SEQ ID NO: 7096 - DNA, 813 bp, Homo sapiens
cggaccagctgtgtgacctcaggcaggtgtcttgacctctctgagctctggtctccccatgcataaagcatgttggtaacagtacccaccccacagtgctggtgtgaggctgaaagggggaagtgcaggccacaggctttcatggtgcctgggatgggcaatgagagcccagcaagtgcaagctcttgatatgaccgtccccattttctagatgaggagactgaggctcaggaaattagaggccttactcaggacctttaccacatgatcaaggctggaatgaaaatcccaactccgtcccaggccctggcctctgtgtgccgagaacattaggcagagagaagttgtgcctggcagagggaaagatggccacagcaggaccagtcagggagggcttcctgggagtggggacacctaggcagtggcccgcagggtggttaggacttggctgggctgagaggcagtgagaggtcactcctgttcagggcagggawcgggccacacccttcatagctgagccagggaacaggcatactgttcacgagcagccagtggagaccgaggctcagagaggacaggcagcccagcagagctgctcagcgtgaggcgcaggggctgggactcatccccacaccctcactccctcacctctgcccccgcatcctctccttctgccctggcaagtgtgagcatggctcccaggcaggctcactttcctgtcatgacttggcagcaagagctaaggggcttgctcttagctggcctggagttggacacactcaagtgctggccagtgaggtgggtatttggagg

SEQ ID NO: 7097 - DNA, 813 bp, Homo sapiens
cggaccagctgtgtgacctcaggcaggtgtcttgacctctctgagctctggtctccccatgcataaagcatgttggtaacagtacccaccccacagtgctggtgtgaggctgaaagggggaagtgcaggccacaggctttcatggtgcctgggatgggcaatgagagcccagcaagtgcaagctcttgatatgaccgtccccattttctagatgaggagactgaggctcaggaaattagaggccttactcaggacctttaccacatgatcaaggctggaatgaaaatcccaactccgtcccaggccctggcctctgtgtgccgagaacattaggcagagagaagttgtgcctggcagagggaaagatggccacagcaggaccagtcagggagggcttcctgggagtggggacacctaggcagtggcccgcagggtggttaggacttggctgggctgagaggcagtgagaggtcactcctgttcagggcagggaaygggccacacccttcatagctgagccagggaacaggcatactgttcacgagcagccagtggagaccgaggctcagagaggacaggcagcccagcagagctgctcagcgtgaggcgcaggggctgggactcatccccacaccctcactccctcacctctgcccccgcatcctctccttctgccctggcaagtgtgagcatggctcccaggcaggctcactttcctgtcatgacttggcagcaagagctaaggggcttgctcttagctggcctggagttggacacactcaagtgctggccagtgaggtgggtatttggagg

SEQ ID NO: 7098 - DNA, 813 bp, Homo sapiens
cggaccagctgtgtgacctcaggcaggtgtcttgacctctctgagctctggtctccccatgcataaagcatgttggtaacagtacccaccccacagtgctggtgtgaggctgaaagggggaagtgcaggccacaggctttcatggtgcctgggatgggcaatgagagcccagcaagtgcaagctcttgatatgaccgtccccattttctagatgaggagactgaggctcaggaaattagaggccttactcaggacctttaccacatgatcaaggctggaatgaaaatcccaactccgtcccaggccctggcctctgtgtgccgagaacattaggcagagagaagttgtgcctggcagagggaaagatggccacagcaggaccagtcagggagggcttcctgggagtggggacacctaggcagtggcccgcagggtggttaggacttggctgggctgagaggcagtgagaggtcactcctgttcagggcagggaacgggccacacccttcatagctgagccagggaacaggcatactgttcaygagcagccagtggagaccgaggctcagagaggacaggcagcccagcagagctgctcagcgtgaggcgcaggggctgggactcatccccacaccctcactccctcacctctgcccccgcatcctctccttctgccctggcaagtgtgagcatggctcccaggcaggctcactttcctgtcatgacttggcagcaagagctaaggggcttgctcttagctggcctggagttggacacactcaagtgctggccagtgaggtgggtatttggagg

SEQ ID NO: 7099 - DNA, 813 bp, Homo sapiens
cggaccagctgtgtgacctcaggcaggtgtcttgacctctctgagctctggtctccccatgcataaagcatgttggtaacagtacccaccccacagtgctggtgtgaggctgaaagggggaagtgcaggccacaggctttcatggtgcctgggatgggcaatgagagcccagcaagtgcaagctcttgatatgaccgtccccattttctagatgaggagactgaggctcaggaaattagaggccttactcaggacctttaccacatgatcaaggctggaatgaaaatcccaactccgtcccaggccctggcctctgtgtgccgagaacattaggcagagagaagttgtgcctggcagagggaaagatggccacagcaggaccagtcagggagggcttcctgggagtggggacacctaggcagtggcccgcagggtggttaggacttggctgggctgagaggcagtgagaggtcactcctgttcagggcagggaacgggccacacccttcatagctgagccagggaacaggcatactgttcacgagcagccrgtggagaccgaggctcagagaggacaggcagcccagcagagctgctcagcgtgaggcgcaggggctgggactcatccccacaccctcactccctcacctctgcccccgcatcctctccttctgccctggcaagtgtgagcatggctcccaggcaggctcactttcctgtcatgacttggcagcaagagctaaggggcttgctcttagctggcctggagttggacacactcaagtgctggccagtgaggtgggtatttggagg

SEQ ID NO: 7100 - DNA, 813 bp, Homo sapiens
cggaccagctgtgtgacctcaggcaggtgtcttgacctctctgagctctggtctccccatgcataaagcatgttggtaacagtacccaccccacagtgctggtgtgaggctgaaagggggaagtgcaggccacaggctttcatggtgcctgggatgggcaatgagagcccagcaagtgcaagctcttgatatgaccgtccccattttctagatgaggagactgaggctcaggaaattagaggccttactcaggacctttaccacatgatcaaggctggaatgaaaatcccaactccgtcccaggccctggcctctgtgtgccgagaacattaggcagagagaagttgtgcctggcagagggaaagatggccacagcaggaccagtcagggagggcttcctgggagtggggacacctaggcagtggcccgcagggtggttaggacttggctgggctgagaggcagtgagaggtcactcctgttcagggcagggaacgggccacacccttcatagctgagccagggaacaggcatactgttcacgagcagccagtggagaccgaggctcagagaggacaggcagcccagcagagctgctcagcgtgaggcgcaggggctgggactcatcccyacaccctcactccctcacctctgcccccgcatcctctccttctgccctggcaagtgtgagcatggctcccaggcaggctcactttcctgtcatgacttggcagcaagagctaaggggcttgctcttagctggcctggagttggacacactcaagtgctggccagtgaggtgggtatttggagg

SEQ ID NO: 7101 - DNA, 752 bp, Homo sapiens
atcttcaaatctgtcgaagacaagttgaatccttctcctactgtatctctctagcgttgcttctgtaatcacatccccttctctcactggtgactctcttccctttcccttctctgctggtaaaaatccttaaaattacatggacccaccccactcatccagaatatcctccaaatccctacttaatcacatctgcaaagtccctcrttccatgtagggcaacatatttataggttctgtggattaagatgtggacatattttgggaacattattctgcttcccacagttagtatgcttttctcttgttttttgcttttcttttttcatttttcaggatctgatctaaattgtataagaaaagtttgcattagtcactgcaaaacttgcaagagacagaaaagggcttacatatggacaattattagaataaaaactattttctaggataatataaccctaaaagggcagcaaacgactataggatcttaaaaagaacgaaatagtggaagaattaagtcaatcacagcacctaggacacattctcataatgtgtaaattggagcaaattaactaaccactctgagcctcagtttctttaacctttcagggattttacaagaattaaggggataaactgtatgcagtaggggctaacatggggctggtgcatattcagcatttacttggttgttactgttgttgctgtttttgtgattgtcaacttttttctttcacttgctttctacttcc

SEQ ID NO: 7102 - DNA, 752 bp, Homo sapiens
atcttcaaatctgtcgaagacaagttgaatccttctcctactgtatctctctagcgttgcttctgtaatcacatccccttctctcactggtgactctcttccctttcccttctctgctggtaaaaatccttaaaattacatggacccaccccactcatccagaatatcctccaaatccctacttaatcacatctgcaaagtccctcattccatgtagggcaacatatttataggttctgtggattaagatgtggacatattttgggaacattattctgcttcccacagttagtatgcttttctcttgttttttgcttttcttttttcatttttcaggatctgatctaaattgtataagaaaagtttgcattagtcactgcaaaacttgcaagagacagaaaagggcttacrtatggacaattattagaataaaaactattttctaggataatataaccctaaaagggcagcaaacgactataggatcttaaaaagaacgaaatagtggaagaattaagtcaatcacagcacctaggacacattctcataatgtgtaaattggagcaaattaactaaccactctgagcctcagtttctttaacctttcagggattttacaagaattaaggggataaactgtatgcagtaggggctaacatggggctggtgcatattcagcatttacttggttgttactgttgttgctgtttttgtgattgtcaacttttttctttcacttgctttctacttcc

SEQ ID NO: 7103 - DNA, 664 bp, Homo sapiens
cctgataagcagagttttttttttatattgtagtattctaagtttattacccaaataaatatttccttgagatttcaaattgaaatagttgtatttttttattagtgacccatgttcttttaagatgtctttcaaggcagaattttcaacatgattatgcatcttttacattgttaccttaatcatgaattattgaaaaattttatctacagcattctatacatgtgtggggggggatctgataaaatgtcatatttataccaagaaattttcagtctcagactctcccgtaagcacatgaagtatatgttaatactaggcagataagtgtgcatgaaaagatgctcaaaattattagtcattagagaaatacaacgtaaaaccgcaatgaccactataaacttactaaaatggctacaattttaaatgacagactatascaagtgttggcaaggatgtagaggatctaaaactctcattctctgctagtggaaatgtaaactgaggcaaacatttcaaaaaaaaattaaacatgtaattaccatatgatccaaacattccactcttaggtatttacctaagaggaatgaaagcatgtgttcataagaaagacttgtacgtgaattctcatagcagctttatttgtagtagccaaaagctggaa

SEQ ID NO: 7104 - DNA, 664 bp, Homo sapiens
cctgataagcagagttttttttttatattgtagtattctaagtttattacccaaataaatatttccttgagatttcaaattgaaatagttgtatttttttattagtgacccatgttcttttaagatgtctttcaaggcagaattttcaacatgattatgcatcttttacattgttaccttaatcatgaattattgaaaaattttatctacagcattctatacatgtgtggggggggatctgataaaatgtcatatttataccaagaaattttcagtctcagactctcccgtaagcacatgaagtatatgttaatactaggcagataagtgtgcatgaaaagatgctcaaaattattagtcattagagaaatacaacgtaaaaccgcaatgaccactataaacttactaaaatggctacaattttaaatgacagactataccaagtgttggcaaggatgtagaggatctaraactctcattctctgctagtggaaatgtaaactgaggcaaacatttcaaaaaaaaattaaacatgtaattaccatatgatccaaacattccactcttaggtatttacctaagaggaatgaaagcatgtgttcataagaaagacttgtacgtgaattctcatagcagctttatttgtagtagccaaaagctggaa

SEQ ID NO: 7105 - DNA, 813 bp, Homo sapiens
tgtatccatagacccctgcgcttctgcctccttaaaaaaaaggaggggaccggaagtgcccacaacggggaattctgagacttgtcttccggcacaagtttggtcatgggctggctgtgtgctgttgggccattcacccaactgctctgaccttagcattctcatctgtaaaatggtttggcctggatagcttcaggtgtccaagactggaccagcagctacggaatcacatattggaggaaaatgactcaccyctctctctgggcctcacacactctcattggtacagatgacacctcagggccccaagatttgaaaatgctctttctggagactcaagattgatgtcttggccaagtgcggtggctcacacctgtaatcccagcacctcgggaggctgaggtgggtggatcacctgaggtcaggagtttgaggccatccatggccaacatggcggaaccccatctctactaaaaatacacaaaattagctgggcgtggtgacaggcgcctgtaatcccagctactcgggaggccgaggcaggagaattgtttgaacccaggaggcggaggttgcagtgagccaagatcatgccattgcactccaacctgggcaacagtgcgagactctgtctcaaaaaaaaaaaaaaaattggtgtctcgagtctcaaatagaaagcagtgtcttcattgtgacccagttaatgaggtttaaaaaaatgattccagaatcatacatccaaagagcattgttcctcaaagtagccttggaaactgaatttctcccagaagacaagctgctaatgactgggaa

SEQ ID NO: 7106 - DNA, 813 bp, Homo sapiens
tgtatccatagacccctgcgcttctgcctccttaaaaaaaaggaggggaccggaagtgcccacaacggggaattctgagacttgtcttccggcacaagtttggtcatgggctggctgtgtgctgttgggccattcacccaactgctctgaccttagcattctcatctgtaaaatggtttggcctggatagcttcaggtgtccaagactggaccagcagctacggaatcacatattggaggaaaatgactcacccctctctctgggcctcacacactctcattggtacagatgacacctcagggccccaagatttgaaaatgctctttctggagactcaagattgatgtcttggccaagtgcggtggctcacacctgtaatcccagcacctcgggaggctgaggtgggtggatcacctgaggtcaggagtttgaggccatccatggccaacatggcggaaccccatctctactaaaaatacamaaaattagctgggcgtggtgacaggcgcctgtaatcccagctactcgggaggccgaggcaggagaattgtttgaacccaggaggcggaggttgcagtgagccaagatcatgccattgcactccaacctgggcaacagtgcgagactctgtctcaaaaaaaaaaaaaaaattggtgtctcgagtctcaaatagaaagcagtgtcttcattgtgacccagttaatgaggtttaaaaaaatgattccagaatcatacatccaaagagcattgttcctcaaagtagccttggaaactgaatttctcccagaagacaagctgctaatgactgggaa

SEQ ID NO: 7107 - DNA, 744 bp, Homo sapiens
caccctagtcatatcctgacagccatggactctggactccaaatcatttcagacctctataaggagctcataagatggccaaaatggggaggacacagccagaaccaggataactctcccctctctcatccttagagtgtgacagaaggtatgcagagcagagtgcttgacatgcgttatggctatttgatggaattttccatcagtgtcattatagaaatcacttttgagaggtaaaaatcacttttgaaacaaaagaaacaggctaggcgcggtggttcaccactgtaatcctagcactttgggaggctgaggcaggcagatcacctgaggtcgggagttccagaccagcctggcccaaatggtgaaacccagtctctactaaaaatacaaaaattagctgggcgtggtggttcacgcgcctgtaatcccagctacttgagaggctgaggcaggagaatcgcttgagcccgggaggtggaggttgcggtgagccaaaatcacgccattgcactccaacccgggcaagattccatctcaaaagaaaagaaaagaaaaaaagmaataggccaggcgcagtggctcacgcctgtaatcccagcactttgggaggccaaggcaggcggatcacgacgttggaagttcaagaccagcctggccaacatggtgaaaccccgtctctactaaaaatacaaaaattagctgggtgtggcattgcgggcctgtaatcccagctactcgagc

SEQ ID NO: 7108 - DNA, 708 bp, Homo sapiens
  misc_feature (1)...(708): n = A,T,C or G
tttgtctcttagtcaagggaacttgcccaaagccacagagctggtgtgaggaagagcaacattcactgaccgcccaccctcactaggagggccatgggaccgacccagggtactgcccttgcagttaatgcgcctaccatgcgggggcgcacgtgttctccctttcagcttccattacagcctgagttttccagcggtcaatccctcagcagccccgaaattctgccaacaaaaatcacttgctgctaatcgaacatgactgcatgtcaaacgctgctagcagctttctatagccgcaggaaacacttccatatccccccactcacgttttgcacataaaaaagatatggcctacggatttttagtcacttgttgaaggtcacagagctagtaagtggaaatcagggttcaaacaacatctatttcactccagaatctgggcttttacacyccactcttgtgtctcctaaacagtggaaatctacaaaatgggaagccctgcgcagtctgggtttagacggcagtccaagaggaagagtctttcagtgtctttctaggagttgaggagaatccttggttccaaattctcccaacttataagtaatgannnnnnnnnnnnnnnnnnnnnnnnnnnnnnnnnnnnnnnnnnnnnnnnnnnnnnnnnnnnnnnnnnnnnnnnnnnnnnnnnnnnnnnnnnnnnnnnnnnnc

SEQ ID NO: 7109 - DNA, 810 bp, Homo sapiens
tcctgatctttatgcttcagattgggatttatccttcaggaagctttctctgaacacctctaattagacggggaggggtactttgtgtcacacctatccccccaactcgtgttgtttcatagcacttatcacactgtgcattgtctgtgggttcctggatgcagggacgcctctaatccattttagcagtccattggtgtctgtctatctcttccagatagaagaaggcatcaaacacagttcactgatgacaatttattataatctgttagtagcacacagacaaatattagttaaaccagaaccatgtctacacagaagtgggcaatgacatgtgccattctatggcacacggtgtgcacttaatcatcatgttttagcattttgatcttctgcttatggcgctcaatttctttctgcagacgctcaatctccttcttatgatgaacgatttcttcttcatggtgttttttcaaagctgccagttgttctctactctgtgctctacaaggacacggtggctcagggtttaatttcaatccttcaccccaaagagatctcaaagcataaccygtaatgtctaagcaaggaataggagtcccaattccatgggagtctagctggtcatcctcttctactcctcaactagtgaaagaataccccatcttaaattgaggtgtagccatcttaagaagaccaaagagcttattgctttcagattcctctttaaaatagaaaactccagagagatgtgacacaagtccctaataccttatgaggggaacaacccagggaacttgactccccttt

SEQ ID NO: 7110 - DNA, 810 bp, Homo sapiens
tcctgatctttatgcttcagattgggatttatccttcaggaagctttctctgaacacctctaattagacggggaggggtactttgtgtcacacctatccccccaactcgtgttgtttcatagcacttatcacactgtgcattgtctgtgggttcctggatgcagggacgcctctaatccattttagcagtccattggtgtctgtctatctcttccagatagaagaaggcatcaaacacagttcactgatgacaatttattataatctgttagtagcacacagacaaatattagttaaaccagaaccatgtctacacagaagtgggcaatgacatgtgccattctatggcacacggtgtgcacttaatcatcatgttttagcattttgatcttctgcttatggcgctcaatttctttctgcagacgctcaatctccttcttatgatgaacgatttcttcttcatggtgttttttcaaagctgccagttgttctctactctgtgctctacaaggacacggtggctcagggtttaatttcaatccttcaccccaaagagatctcaaagcataacccgtaatgtctaagcaaggaataggagtyccaattccatgggagtctagctggtcatcctcttctactcctcaactagtgaaagaataccccatcttaaattgaggtgtagccatcttaagaagaccaaagagcttattgctttcagattcctctttaaaatagaaaactccagagagatgtgacacaagtccctaataccttatgaggggaacaacccagggaacttgactccccttt

SEQ ID NO: 7111 - DNA, 774 bp, Homo sapiens
ttcataccagagtaaaaccatggagctttaaaacagcaagcaagttagatcttcaagagacttgaaattagggtatacctgctgggcgtggtggctcacgcctgtaatctcagcactttgggaggctgaggcgggtggatcacctgaggtcaggagttcgagaccagcctgaccaacatggtaagacccccgtctctactaaaaatmcaaaaaaaaaaaaaaaagaaaagaaagaaggaaattagggtatacctagaaatatttttaagggatacacatgatgactcttgggatggacccaatgcatagtgttcaaaaggagatgattcttattgtgccatctacatggggtcccacagtcctacgaaattcccacaagattatttttgtcgagataaagctgggtcactgttttataatacataggattgcccacaatattacagtgaaaacagatttggcatgccccctaaatcctacaggtggtattgacacatacaagaaaaggcagcatagtttaggttggcagcatagactttagtgtcaggtttaggtttgagttttgactccgctgtttactaggtaagcaatcttgggaaagttctttaatgtctgtaagtctcaggttacatcagcagaaaaaaatggtaattataataatagctacctcatacaatattggagaggattatatgatcatgtatgtaaagcagtagctactccctgttacagatgaagcactcgataattaatagctgttattattatatatga

SEQ ID NO: 7112 - DNA, 774 bp, Homo sapiens
ttcataccagagtaaaaccatggagctttaaaacagcaagcaagttagatcttcaagagacttgaaattagggtatacctgctgggcgtggtggctcacgcctgtaatctcagcactttgggaggctgaggcgggtggatcacctgaggtcaggagttcgagaccagcctgaccaacatggtaagacccccgtctctactaaaaatccaaaaaaaaaaaaaaaagaaaagaaagaaggaaattagggtatacctagaaatatttytaagggatacacatgatgactcttgggatggacccaatgcatagtgttcaaaaggagatgattcttattgtgccatctacatggggtcccacagtcctacgaaattcccacaagattatttttgtcgagataaagctgggtcactgttttataatacataggattgcccacaatattacagtgaaaacagatttggcatgccccctaaatcctacaggtggtattgacacatacaagaaaaggcagcatagtttaggttggcagcatagactttagtgtcaggtttaggtttgagttttgactccgctgtttactaggtaagcaatcttgggaaagttctttaatgtctgtaagtctcaggttacatcagcagaaaaaaatggtaattataataatagctacctcatacaatattggagaggattatatgatcatgtatgtaaagcagtagctactccctgttacagatgaagcactcgataattaatagctgttattattatatatga

SEQ ID NO: 7113 - DNA, 795 bp, Homo sapiens
gtcaggagttcaagaccagcctcaccaacatggcaaaatcccatctctactaaaaatacaaaaattagccaggtgtggtggtgcacacctgtagtcccagctacttgggaggctggagcaggaaaattgcttgaacctgggaggcggaggtggcagtgagccaagatcatgccactgcactccagtctgggcaacagaggaagacttcatctcaaaaaaataaaaataaaaaatatctggggtttgggattttagctagggatttttgtggtgacttaatcctctttcagaagactgtgtttgaagacaaatgtgtggggattttgctagagtgcagggagtttggccagagaatgttttccccagcccttcttttcccatctctcccaccagcacaagtacacgtcgattgcagaggtccaggcacagatggaggaggaatacctccgctcccctctctcaggggtaagttggaggtcctcagtccgggcgcggtggctcacgcctgtaatcccagcactttgggaggccgaggagggcagatcatgaggtcaggagattgagaccatcctggctaacatggtgaaaccccgtctctactaaaaaaaaaaaaattagccagccgtggtggcgggcgcctgtagtcccagctattcaggaggctgaggcaraagaatgacgtgaacccgggaggcggagcttgtagtgagccgagatagcgccactgcactccagcctgggcgacagagcgagaccatctcaaaaaaaaaagttagaggtcctcttcagcccccg

SEQ ID NO: 7114 - DNA, 587 bp, Homo sapiens
tggagaaggaagagagtttgggttggggtgggaraagagagacaaagtccacaggaatctagagactctaaactctggggtagggagaatggcgctataggcactgggtctgcagtgtctgccaagcacagcttgaagcaccaagtcactagagggagatacggaagaagccccacgccctgggaagcacccctactctaaaggggggacccaggacccacaccagcaggagacattaagaaaacacaaaaacaagagcacctccaggaagacgaacagaaagcacatttgtttgctgggagtcatgaggtggagagttgagtggatggggcagagacgagtgacatgggctgggcggtgcagtctgtgaggccttttgtagccatattttgactcttacagggaatgctggccagggcaccccttgaactcatttcaccaggaaatccattggttccagagtgcagattccagatttgttattttacagggctaataagtatgtaattatcacatttggagcctttcaaaggaaatgcaaacacacaccactgaacaccctgaaaaatgtgagtgaaacccactcc

SEQ ID NO: 7115 - DNA, 695 bp, Homo sapiens
acacgatgacctaatccactcatsccagcactagtcctccttgaaagaggagacacgtgtactggctaacctttccttcccagctatcccccatccactcaagcctgctttcctgaaaagaaaggcattgaagtgatgttcctaatgttcatctcctgctacatagcctcaaagatactattcccaaatatgttaagtaggaagatgtaggagaacatattggccttttcccaggacatggaaacaacccaaattgcaattcacctaagtcgtgtttgtgtttctgagtgtcttaaacatacagctgctgagatacaccctctcctttgttcttggtggcacaattattagagtttcctcactgtgtgtgttttaaaacatggcctcaaaattctttgacaatgctgtcttcaagaagtgaagtctatattccctccctttgaatctatgctctgagactatgtaaacaagataattaatatcatgtttgtttctggacacagaccataagaacacagtagcttccattatctctgtcttggtatgcttgctcttggaatccacctaccattctgtgaggaagcccaagcagcctatggagaggcccatgggagagaaactgaggccctcagcccacagccctggctgagctcctgacctacaaccatccccaacctgccagccatgtgagtgag

SEQ ID NO: 7116 - DNA, 840 bp, Homo sapiens
ctcttgtttcctgctgatggaagcccagagccacaagacgagacagcctctcatcttatctttaaaacttttgtttcaagaaataaaagcctgtaaatatggtgaagaaacaaatgactatacaaacttttccaaacagatctgaaatagaacttctagaaatagaacaaaaagatagaaattaaaaagtcaaacaagttaaaaagaagattggatacagctggagaaaaaactcatgaactggaagtcagatcctaaaaaactgtcctaaatgcagtccaaagagtatgaagagatgcaaaatatgaaagagagattacaagacttggattatatattagaatgtctaatacacrtgtaatcacaattctccaaagagatagagaaaatgagggagaggaaatagtaaaagagacaacagctgggaatttccaagcattgttgaaagtaattaccatacttacatggtcacagcaggcatttgagtttttaaccctttgcacaagtttttcttaagctaccgtccagaaaaatgtctttcattgagtactactttatagtttacaaagggctttcacatactaaaatctatgtaacatgtttttagactcattgaaagtcttggatttgttttcctattacaacaggaaactgaagtaatctctggccgtaagattagtattaaagccattctcttttaagtggaaaaagagaagaggatgttgatatggtttggctgtgtccccacccaaatctcatcttgaattcccatgtgtcatgggaggaacccagtgataattaaatcatgggggcgggtcttttccatgctattcttgtgat

SEQ ID NO: 7117 - DNA, 840 bp, Homo sapiens
ctcttgtttcctgctgatggaagcccagagccacaagacgagacagcctctcatcttatctttaaaacttttgtttcaagaaataaaagcctgtaaatatggtgaagaaacaaatgactatacaaacttttccaaacagatctgaaatagaacttctagaaatagaacaaaaagatagaaattaaaaagtcaaacaagttaaaaagaagattggatacagctggagaaaaaactcatgaactggaagtcagatcctaaaaaactgtcctaaatgcagtccaaagagtatgaagagatgcaaaatatgaaagagagattacaagacttggattatatattagaatgtctaatacacgtgtaatcacaattctccaaagagatagagaaaatgagggagaggaaatagtaaaagagacaacagctgggaatttccaagcattgttgaaagtaattaccatacttacatggtcacagcaggcatttgagtttttaaccctttgyacaagtttttcttaagctaccgtccagaaaaatgtctttcattgagtactactttatagtttacaaagggctttcacatactaaaatctatgtaacatgtttttagactcattgaaagtcttggatttgttttcctattacaacaggaaactgaagtaatctctggccgtaagattagtattaaagccattctcttttaagtggaaaaagagaagaggatgttgatatggtttggctgtgtccccacccaaatctcatcttgaattcccatgtgtcatgggaggaacccagtgataattaaatcatgggggcgggtcttttccatgctattcttgtgat

SEQ ID NO: 7118 - DNA, 840 bp, Homo sapiens
ctcttgtttcctgctgatggaagcccagagccacaagacgagacagcctctcatcttatctttaaaacttttgtttcaagaaataaaagcctgtaaatatggtgaagaaacaaatgactatacaaacttttccaaacagatctgaaatagaacttctagaaatagaacaaaaagatagaaattaaaaagtcaaacaagttaaaaagaagattggatacagctggagaaaaaactcatgaactggaagtcagatcctaaaaaactgtcctaaatgcagtccaaagagtatgaagagatgcaaaatatgaaagagagattacaagacttggattatatattagaatgtctaatacacgtgtaatcacaattctccaaagagatagagaaaatgagggagaggaaatagtaaaagagacaacagctgggaatttccaagcattgttgaaagtaattaccatacttacatggtcacagcaggcatttgagtttttaaccctttgcacaagtttttcttaagctaccgtccagaaaaatgtctttcattgagtactactttatagtttacaaarggctttcacatactaaaatctatgtaacatgtttttagactcattgaaagtcttggatttgttttcctattacaacaggaaactgaagtaatctctggccgtaagattagtattaaagccattctcttttaagtggaaaaagagaagaggatgttgatatggtttggctgtgtccccacccaaatctcatcttgaattcccatgtgtcatgggaggaacccagtgataattaaatcatgggggcgggtcttttccatgctattcttgtgat

SEQ ID NO: 7119 - DNA, 792 bp, Homo sapiens
tggcctgtgctctgaagccagagtatgactatggttctgaaggttctgtrtacatgaacagagaccttgtgtaaatagtcattgagtctgtgacagtagctataatggaaggcccagctcgatactacactgtacactgattatgtttttattaaatactattgcaagactatcattattattatttttactactgctgcttgttctagactatctttcatcagcacagaatcactaccatttcttctcaggagagcaagcaagaactacgttttccaaaatgcctttcatatatggtttcaggttagcatctgctaatgagagacacttacgtgggacttcaaaggtggaaagaagtcactgtgctccagagatagatgcaagcagatgtgagcttctttaagcagcttctagaaaaccctttaagaactgcccttttcttttctttttttttttttttattatactttaagttctagggtacatgtgcacaacgtgcaggttggttacacaggtatatatgttggtgtgctgcacccattaactcgtcatttacattaggtatatctcctaatgctatctctccccactcctgccaccccacagcagactctggtgtatgatgttccccaccctgtgcccaagtgttctcattgttcaattcccacctatcagtgagaacatgccatgtttggttttctgtccttgtgatagtttgctcagaatgatggtttccagcttcatccatatccctataaaagacatgaactcatcattttttatggctgcata

SEQ ID NO: 7120 - DNA, 792 bp, Homo sapiens
tggcctgtgctctgaagccagagtatgactatggttctgaaggttctgtatacatgaacagagaccttgtgtaaatagtcattgagtctgtgacagtagctataatggaaggcccagctygatactacactgtacactgattatgtttttattaaatactattgcaagactatcattattattatttttactactgctgcttgttctagactatctttcatcagcacagaatcactaccatttcttctcaggagagcaagcaagaactacgttttccaaaatgcctttcatatatggtttcaggttagcatctgctaatgagagacacttacgtgggacttcaaaggtggaaagaagtcactgtgctccagagatagatgcaagcagatgtgagcttctttaagcagcttctagaaaaccctttaagaactgcccttttcttttctttttttttttttttattatactttaagttctagggtacatgtgcacaacgtgcaggttggttacacaggtatatatgttggtgtgctgcacccattaactcgtcatttacattaggtatatctcctaatgctatctctccccactcctgccaccccacagcagactctggtgtatgatgttccccaccctgtgcccaagtgttctcattgttcaattcccacctatcagtgagaacatgccatgtttggttttctgtccttgtgatagtttgctcagaatgatggtttccagcttcatccatatccctataaaagacatgaactcatcattttttatggctgcata

SEQ ID NO: 7121 - DNA, 792 bp, Homo sapiens
tggcctgtgctctgaagccagagtatgactatggttctgaaggttctgtatacatgaacagagaccttgtgtaaatagtcattgagtctgtgacagtagctataatggaaggcccagctcgatactacactgtacmctgattatgtttttattaaatactattgcaagactatcattattattatttttactactgctgcttgttctagactatctttcatcagcacagaatcactaccatttcttctcaggagagcaagcaagaactacgttttccaaaatgcctttcatatatggtttcaggttagcatctgctaatgagagacacttacgtgggacttcaaaggtggaaagaagtcactgtgctccagagatagatgcaagcagatgtgagcttctttaagcagcttctagaaaaccctttaagaactgcccttttcttttctttttttttttttttattatactttaagttctagggtacatgtgcacaacgtgcaggttggttacacaggtatatatgttggtgtgctgcacccattaactcgtcatttacattaggtatatctcctaatgctatctctccccactcctgccaccccacagcagactctggtgtatgatgttccccaccctgtgcccaagtgttctcattgttcaattcccacctatcagtgagaacatgccatgtttggttttctgtccttgtgatagtttgctcagaatgatggtttccagcttcatccatatccctataaaagacatgaactcatcattttttatggctgcata

SEQ ID NO: 7122 - DNA, 792 bp, Homo sapiens
tggcctgtgctctgaagccagagtatgactatggttctgaaggttctgtatacatgaacagagaccttgtgtaaatagtcattgagtctgtgacagtagctataatggaaggcccagctcgatactacactgtacactgattatgtttttattaaatactattgcaagactatcattattattatttttactactgctgcttgttctagactatctttcatcagcacagaatcactaccatttcttctcaggagagcaagcaagaactacgttttccaaaatgcctttcatatatggtttcaggttagcatctgctaatgagagacacttacrtgggacttcaaaggtggaaagaagtcactgtgctccagagatagatgcaagcagatgtgagcttctttaagcagcttctagaaaaccctttaagaactgcccttttcttttctttttttttttttttattatactttaagttctagggtacatgtgcacaacgtgcaggttggttacacaggtatatatgttggtgtgctgcacccattaactcgtcatttacattaggtatatctcctaatgctatctctccccactcctgccaccccacagcagactctggtgtatgatgttccccaccctgtgcccaagtgttctcattgttcaattcccacctatcagtgagaacatgccatgtttggttttctgtccttgtgatagtttgctcagaatgatggtttccagcttcatccatatccctataaaagacatgaactcatcattttttatggctgcata

SEQ ID NO: 7123 - DNA, 792 bp, Homo sapiens
tggcctgtgctctgaagccagagtatgactatggttctgaaggttctgtatacatgaacagagaccttgtgtaaatagtcattgagtctgtgacagtagctataatggaaggcccagctcgatactacactgtacactgattatgtttttattaaatactattgcaagactatcattattattatttttactactgctgcttgttctagactatctttcatcagcacagaatcactaccatttcttctcaggagagcaagcaagaactacgttttccaaaatgcctttcatatatggtttcaggttagcatctgctaatgagagacacttacgtgggacttcaaaggtggaaagaagtcactgtgctccagagatagatgcaagcagatgtgagcttctttaagcagcttctagaaaaccctttaagaactgcmcttttcttttctttttttttttttttattatactttaagttctagggtacatgtgcacaacgtgcaggttggttacacaggtatatatgttggtgtgctgcacccattaactcgtcatttacattaggtatatctcctaatgctatctctccccactcctgccaccccacagcagactctggtgtatgatgttccccaccctgtgcccaagtgttctcattgttcaattcccacctatcagtgagaacatgccatgtttggttttctgtccttgtgatagtttgctcagaatgatggtttccagcttcatccatatccctataaaagacatgaactcatcattttttatggctgcata

SEQ ID NO: 7124 - DNA, 792 bp, Homo sapiens
tggcctgtgctctgaagccagagtatgactatggttctgaaggttctgtatacatgaacagagaccttgtgtaaatagtcattgagtctgtgacagtagctataatggaaggcccagctcgatactacactgtacactgattatgtttttattaaatactattgcaagactatcattattattatttttactactgctgcttgttctagactatctttcatcagcacagaatcactaccatttcttctcaggagagcaagcaagaactacgttttccaaaatgcctttcatatatggtttcaggttagcatctgctaatgagagacacttacgtgggacttcaaaggtggaaagaagtcactgtgctccagagatagatgcaagcagatgtgagcttctttaagcagcttctagaaaaccctttaagaactgcccttttcttttctttttttttttttttattatactttaagttctagggtacatgtgcacaacgtgcaggttggttacacaggtatatatkttggtgtgctgcacccattaactcgtcatttacattaggtatatctcctaatgctatctctccccactcctgccaccccacagcagactctggtgtatgatgttccccaccctgtgcccaagtgttctcattgttcaattcccacctatcagtgagaacatgccatgtttggttttctgtccttgtgatagtttgctcagaatgatggtttccagcttcatccatatccctataaaagacatgaactcatcattttttatggctgcata

SEQ ID NO: 7125 - DNA, 583 bp, Homo sapiens
ttagcagtggccgacccgggattggaacccggggctccggaccccgcggcggccgtttctcgaagatacccactacctccctcttacaccgctcaggaataaagcaggaaggccgaaggccccgttttcgcccaaaaacaatgctccacgtaaatttgcgggaacaaaagccaccagaaatccagcccgggttttccgcctctctgctctccgcggaccaatcgcgtcctgacggccgccgagagactagaggcggtggctccaatatgatccatagccccccagggcggcgtggccgcggcatgggcgaatgggattggggacccggcacaatcacgggcggagaacgggccgcctgagccaatcagctagggaggggggagggtgggcccggccggcccgggctgyccggagaggcggccaccccgcccacttctgctggtcccggccgcccgtcagccgcgagcgcgacgatccctctgctcctcggccggtgcctgctctgccgtcgtcgccgtcgccgccgccgcccgtccgccgcccgtccgccgcgcgggagcagcaaggccggcaagtcccggca

SEQ ID NO: 7126 - DNA, 577 bp, Homo sapiens
tctgtccactgtcccacctagggtgatgacagtgaggaagaagagggttactgtgaagattaaagaagggctgtgtgtggtggctcacgcctgtaatcccagcactttgggaggcagaggcaggcagatcacttgaggtcaggagttcgagaccaacctggccaacatggagaaaccctgtctctactaaaaatacaaagattagctgggtgtgggtggcgggcacctgtaatcccagctactcgggaggctgggacaggagaattgcttgaactcaggaggcggaggttgcagtgagccgaggtcacgccrctgcacttcagcctgggtgacagagtgagactccgtctcaaaaaaaaaaaaaaaaaaattaaataagaccccaggcttaacgcaggatggcacacagcacatgctcagtaggcgtcagtcaagacaaatgccacctccatgattgtcatagtcaccaccacaatagaaaattcccaagggattgtcatcgctagcccagtggtcctcaacatgcagttccagaccagcaggttcacctgggaacttgttggaatgcagattctct

SEQ ID NO: 7127 - DNA, 577 bp, Homo sapiens
tctgtccactgtcccacctagggtgatgacagtgaggaagaagagggttactgtgaagattaaagaagggctgtgtgtggtggctcacgcctgtaatcccagcactttgggaggcagaggcaggcagatcacttgaggtcaggagttcgagaccaacctggccaacatggagaaaccctgtctctactaaaaatacaaagattagctgggtgtgggtggcgggcacctgtaatcccagctactcgggaggctgggacaggagaattgcttgaactcaggaggcggaggttgcagtgagccgaggtcacgccactgcacttcagcctgggtgacagagtgagactccgtctcaaaaaaaaaaaaaaaaaaattaaataagaccccaggcttaacgcaggatggcacacagcmcatgctcagtaggcgtcagtcaagacaaatgccacctccatgattgtcatagtcaccaccacaatagaaaattcccaagggattgtcatcgctagcccagtggtcctcaacatgcagttccagaccagcaggttcacctgggaacttgttggaatgcagattctct

SEQ ID NO: 7128 - DNA, 708 bp, Homo sapiens
ggttgagaatggtgattttccagtttcacaactcctttacatgtataagttggtataagraagggcacctcccacacttattgattgattgattatcagtatgacctaaagaattcctgttttataaccagggttataatccattatattcttagcttggtgctcacattttctcacacttggccagggggaacccgttcaaattgggtcctgtgtgcatttaacaatctcccatcatgttttgaacactttctcactttggcttaacaagatgttcgaggtttattttgaactttccttaccccagctctgggaccagacattcctctaaggagtaaaaaccaagataaggctttaggtgtgctcattgcaactgatttgacattgcttctaagccctttcagagttaggaaatataagagttataaaagttcacgctggtaagtctcaattcaacctccaattttttctttttttttttttttgagatggagtcccactctgtcactcaggctggagtgcaatggtgcaatctaggctcactgcggcctccgtctcctgggctcaagcaattctcccacctcagcctcccaaatagctgacaccacaggtgtgtgccaccatgcctggctaatttttattttatttttttgtagagacagggtttccccatgttgctgagggtggtctcaaactactgggctcaag

SEQ ID NO: 7129 - DNA, 708 bp, Homo sapiens
ggttgagaatggtgattttccagtttcacaactcctttacatgtataagttggtataaggaagggcacctcccacacttattgattgattgattatcagtatgacctaaagaattcctgttttataaccagggttataatccattatattcttagcttggtgctcacattttctcacacttggccagggggaacccgttcaaattgggtcctgtgtgcatttaacaatctcccatcatgttttgaacactttctcactttggcttaacaagatgttcgaggtttattttgaactttccttaccccagcyctgggaccagacattcctctaaggagtaaaaaccaagataaggctttaggtgtgctcattgcaactgatttgacattgcttctaagccctttcagagttaggaaatataagagttataaaagttcacgctggtaagtctcaattcaacctccaattttttctttttttttttttttgagatggagtcccactctgtcactcaggctggagtgcaatggtgcaatctaggctcactgcggcctccgtctcctgggctcaagcaattctcccacctcagcctcccaaatagctgacaccacaggtgtgtgccaccatgcctggctaatttttattttatttttttgtagagacagggtttccccatgttgctgagggtggtctcaaactactgggctcaag

SEQ ID NO: 7130 - DNA, 645 bp, Homo sapiens
atgctgaattcattgatctaattactaaacaaagctggattgggaagctggccaaattaatacccaaaatattttgcctctctggcataaagactatttcaagctggttattttaaggtagcattagaagagaaatttaaaggaatttccatttttaggatgtctccctttctggtccagaaagagatggaggactaaatcactaaataatggagaaagaattgattcaatctacaccacaaacctgacctttttaaggtgtttrtcttggttattttgtcttaactgggcttttaccaacacattttttatttttttgttttcacagatgactgtacctaagcctgaattctaagcattgtgcctttgtaatattaaattttctagcctgtctgtgctagggcatgagggtaaacaggttaaaaatctatatgcaaatttcaagaagatgacacgtttgaaagaaaaaaaaaggtatttgtaaattgggcaagtgaaaaatagtaaaagtattttccacaaatattagtaaaaagctttagtcaactgggcaagacatcttaacttgttccaactaccagaaacacaattcaaatctaggtattcttctataaactagtgagttcagcattattatacctgaca

SEQ ID NO: 7131 - DNA, 809 bp, Homo sapiens
cttccattcaacatgggtttactagtcaaataagtttaggttatctttatctgatgttcagcctaacacaaaatgtgaaaattcatgtttacttcatataaatcaagcacatcagtaaaataaaaaactcatgtacttgacttttaggtttttgctttcatgactgacatgcatgtgctgtaaattaacaaaaagtaatgtgagatgttggctagctgtgtctactgtctcatggaattttcatgactaatgcacacatagttgttaggaacaagtgaattaggactagcaagtggagcaagatggcacaataaaaggctccactgaccatcccctcacaaggacctcaatttaacaactatctacacaagaaaagccccttcataagaaccaaaaatcaggtgagcaccacagtacctggttttaaccttgtatcrctgaaagaggcaataaagaagttaaaaaaaaaagttttgaatctccaaaattacccctccccaacccgtccgcactgtcagcctgctgcagaaagtgtttctgtgtgctgggggagggagagcacagcaatttttgaactcagtgctgtcctattagagctgaaaactgaaccaaactcagctgatgcttccttatagagaaaacatttaaaccagccctagccagagggaaattgctgatcccagaggttagaatttgagtgcctgcaatcctaaccaccacaagctgaagtgctctggggcactaaataaatttgacaggaattctaggccacaagcactgaagatcctaggcaagtcctagtgctggct

SEQ ID NO: 7132 - DNA, 809 bp, Homo sapiens
cttccattcaacatgggtttactagtcaaataagtttaggttatctttatctgatgttcagcctaacacaaaatgtgaaaattcatgtttacttcatataaatcaagcacatcagtaaaataaaaaactcatgtacttgacttttaggtttttgctttcatgactgacatgcatgtgctgtaaattaacaaaaagtaatgtgagatgttggctagctgtgtctactgtctcatggaattttcatgactaatgcacacatagttgttaggaacaagtgaattaggactagcaagtggagcaagatggcacaataaaaggctccactgaccatcccctcacaaggacctcaatttaacaactatctacacaagaaaagccccttcataagaaccaaaaatcaggtgagcaccacagtacctggttttaaccttgtatcgctgaaagaggcaataaagaagttaaaaaaaaaagttttgaatctccaaaattacccctccccaacccgtccgcactgtcagcctgctgcagaaagtgtttctgtgtgctgggggagggagagcacagcaatttttgaactcagtgctgtcctattagagctgaaaactgaaccaaactcagctgatgcttccttatagagaaaacatttaaaccagccctagccagagggaaattgctgatcycagaggttagaatttgagtgcctgcaatcctaaccaccacaagctgaagtgctctggggcactaaataaatttgacaggaattctaggccacaagcactgaagatcctaggcaagtcctagtgctggct

SEQ ID NO: 7133 - DNA, 809 bp, Homo sapiens
cttccattcaacatgggtttactagtcaaataagtttaggttatctttatctgatgttcagcctaacacaaaatgtgaaaattcatgtttacttcatataaatcaagcacatcagtaaaataaaaaactcatgtacttgacttttaggtttttgctttcatgactgacatgcatgtgctgtaaattaacaaaaagtaatgtgagatgttggctagctgtgtctactgtctcatggaattttcatgactaatgcacacatagttgttaggaacaagtgaattaggactagcaagtggagcaagatggcacaataaaaggctccactgaccatcccctcacaaggacctcaatttaacaactatctacacaagaaaagccccttcataagaaccaaaaatcaggtgagcaccacagtacctggttttaaccttgtatcgctgaaagaggcaataaagaagttaaaaaaaaaagttttgaatctccaaaattacccctccccaacccgtccgcactgtcagcctgctgcagaaagtgtttctgtgtgctgggggagggagagcacagcaatttttgaactcagtgctgtcctattagagctgaaaactgaaccaaactcagctgatgcttccttatagagaaaacatttaaaccagccctagccagagggaaattgctgatcccagaggttagaatttgagtgcctgcaatcctaaccaccacaagctgaagtgctctggggcactamataaatttgacaggaattctaggccacaagcactgaagatcctaggcaagtcctagtgctggct

SEQ ID NO: 7134 - DNA, 1640 bp, Homo sapiens
ccagctcctactggaactatatagttgaagtgggggatcagtgttcaaaaagaagggaggtactgttctaagaaaggctaggtactaggatttccactacaattttctaaagatcattcccccactgagacctcccattagcaatcaattagctttggtttgggctgtgctcctctaggaccattctttcatataccctgagttccttataatagaaggaagggaacagaagggtgccaagtgcaggagagggacaagcaactaagtaaactcacagtgtgctttcctctgcagacctgcaataaataaccagagaagtgagccctgtgtctagaaaaatttattcccttcctaggattgatagcaaatgacttcacctgctcaaagtcaggtcctaaattcctctgtgctttggccaggttgcggcttgagagcaatgtttgtgaactacatgtctgaccactttcacttcttgtactgtagcatccccttcttgtctccttttaagcagtccaactcacatatcttataaatggacaagccagagtcccagagagggaaaatttattatctaacatcatacactaaaagggagttcatggttaagacaagatcagattgtaggtcatctgacttgtgttttttctattataccatcctttgtttttctgcatgtttataacctaagagatgtagttcacctcttaatctcaccttcttctggttcttttgtctttctgggtcactttttaagaggatttatcaaggtcagcttcactatactcctatttagtcacctctggatcccagtcagctagcagttttcttatcctctgctatcaggaatgaaattccaataccagagatcccatcctactgatgcagtakgatgctctttagcaggagttcactatttaagctagtcttaacttgtagcaaaattgcaggcatcatcctagctaactcctacttaccttccagatatccatttagatcactttatttcagaaggtaatatataaaatgtataccaagaatactttctataagcaactcatagtaccccatacgtattagttcattctcacactgctaaagataactacctgagactgggtaatttataaagaaaagaggtttaatcagctcatgcttctgcaggctgtatgggcttttgtttctggggaggcctcaggaaacttacaatgacggcaaaggggaaacaggcccatcttcacatggccagcaggagaggtggtggggaggtgctaaaacaaccagatcttgtgagaactctatcatgagacagcactagggggatggtgctaaaccattagaaaccactcccatgatttagttacctcccaccaggccccacctccaacattggggattacaatttgacatgagatatgggtgggacacagagccaaaccatatcatttcagatggtaaaatataaaatatgtatgaggaatactttctatatgcaactcatagtactccacacctcccccagtaaaatatttagcactctagacaatcattgcctgcttactgtgtctcttttcttcattctactataatttctataagaacagaggtcattcctattccctttaccgttatttcctccagga

SEQ ID NO: 7135 - DNA, 1640 bp, Homo sapiens
ccagctcctactggaactatatagttgaagtgggggatcagtgttcaaaaagaagggaggtactgttctaagaaaggctaggtactaggatttccactacaattttctaaagatcattcccccactgagacctcccattagcaatcaattagctttggtttgggctgtgctcctctaggaccattctttcatataccctgagttccttataatagaaggaagggaacagaagggtgccaagtgcaggagagggacaagcaactaagtaaactcacagtgtgctttcctctgcagacctgcaataaataaccagagaagtgagccctgtgtctagaaaaatttattcccttcctaggattgatagcaaatgacttcacctgctcaaagtcaggtcctaaattcctctgtgctttggccaggttgcggcttgagagcaatgtttgtgaactacatgtctgaccactttcacttcttgtactgtagcatccccttcttgtctccttttaagcagtccaactcacatatcttataaatggacaagccagagtcccagagagggaaaatttattatctaacatcatacactaaaagggagttcatggttaagacaagatcagattgtaggtcatctgacttgtgttttttctattataccatcctttgtttttctgcatgtttataacctaagagatgtagttcacctcttaatctcaccttcttctggttcttttgtctttctgggtcactttttaagaggatttatcaaggtcagcttcactatactcctatttagtcacctctggatcccagtcagctagcagttttcttatcctctgctatcaggaatgaaattccaataccagagatcccatcctactgatgcagtagsatgctctttagcaggagttcactatttaagctagtcttaacttgtagcaaaattgcaggcatcatcctagctaactcctacttaccttccagatatccatttagatcactttatttcagaaggtaatatataaaatgtataccaagaatactttctataagcaactcatagtaccccatacgtattagttcattctcacactgctaaagataactacctgagactgggtaatttataaagaaaagaggtttaatcagctcatgcttctgcaggctgtatgggcttttgtttctggggaggcctcaggaaacttacaatgacggcaaaggggaaacaggcccatcttcacatggccagcaggagaggtggtggggaggtgctaaaacaaccagatcttgtgagaactctatcatgagacagcactagggggatggtgctaaaccattagaaaccactcccatgatttagttacctcccaccaggccccacctccaacattggggattacaatttgacatgagatatgggtgggacacagagccaaaccatatcatttcagatggtaaaatataaaatatgtatgaggaatactttctatatgcaactcatagtactccacacctcccccagtaaaatatttagcactctagacaatcattgcctgcttactgtgtctcttttcttcattctactataatttctataagaacagaggtcattcctattccctttaccgttatttcctccagga

SEQ ID NO: 7136 - DNA, 1640 bp, Homo sapiens
ccagctcctactggaactatatagttgaagtgggggatcagtgttcaaaaagaagggaggtactgttctaagaaaggctaggtactaggatttccactacaattttctaaagatcattcccccactgagacctcccattagcaatcaattagctttggtttgggctgtgctcctctaggaccattctttcatataccctgagttccttataatagaaggaagggaacagaagggtgccaagtgcaggagagggacaagcaactaagtaaactcacagtgtgctttcctctgcagacctgcaataaataaccagagaagtgagccctgtgtctagaaaaatttattcccttcctaggattgatagcaaatgacttcacctgctcaaagtcaggtcctaaattcctctgtgctttggccaggttgcggcttgagagcaatgtttgtgaactacatgtctgaccactttcacttcttgtactgtagcatccccttcttgtctccttttaagcagtccaactcacatatcttataaatggacaagccagagtcccagagagggaaaatttattatctaacatcatacactaaaagggagttcatggttaagacaagatcagattgtaggtcatctgacttgtgttttttctattataccatcctttgtttttctgcatgtttataacctaagagatgtagttcacctcttaatctcaccttcttctggttcttttgtctttctgggtcactttttaagaggatttatcaaggtcagcttcactatactcctatttagtcacctctggatcccagtcagctagcagttttcttatcctctgctatcaggaatgaaattccaataccagagatcccatcctactgatgcagtaggatgctctttagcaggagttcactatttaagctagtcttaacttgtagcaaaattgcaggcatcatcctrgctaactcctacttaccttccagatatccatttagatcactttatttcagaaggtaatatataaaatgtataccaagaatactttctataagcaactcatagtaccccatacgtattagttcattctcacactgctaaagataactacctgagactgggtaatttataaagaaaagaggtttaatcagctcatgcttctgcaggctgtatgggcttttgtttctggggaggcctcaggaaacttacaatgacggcaaaggggaaacaggcccatcttcacatggccagcaggagaggtggtggggaggtgctaaaacaaccagatcttgtgagaactctatcatgagacagcactagggggatggtgctaaaccattagaaaccactcccatgatttagttacctcccaccaggccccacctccaacattggggattacaatttgacatgagatatgggtgggacacagagccaaaccatatcatttcagatggtaaaatataaaatatgtatgaggaatactttctatatgcaactcatagtactccacacctcccccagtaaaatatttagcactctagacaatcattgcctgcttactgtgtctcttttcttcattctactataatttctataagaacagaggtcattcctattccctttaccgttatttcctccagga

SEQ ID NO: 7137 - DNA, 800 bp, Homo sapiens
tgctgtcataaagcttacacttctgcagaaaatagatcattaaagatctccaaataattaattaaatcattattagtgttgcaaagtgttttagaagagaaaaagaaactcaatctcctgaaatcgtaaaagacagaactgatagtatctttgtggcatttccaaagtgaataatgctaggaagtcgaacatagttgagcagaaaaataaaattacatgtttttggcaaagtaaagcggattaaaaacaaggaaaaatgctttaaaaatagagaccataaatcccctttcctccagtagccaaattgaactaatacacaaaatagagtgcacamaatattgaaaggcagatatttcctccagcacatttggcttgtgacgttttgccaaattaactggtataaccgtagtgaaactgttctactcttattataaatcaacatcaaatggtgtttcacagatccatcagagatcatattacaaatgtaacacaaatgatcaaataccatacaaagggtctactcccaactacagatatcttaattttattccatagttctatgttctgtggcagaaagatcaaacatggtctttctatccattcccaaagatttagattttttttttgcaatagcacactgaggagataattatgatacaatttcttctccagcaaacactcaaaatataatttctcctacttgcttcaagttctagaaaacttaatttttattccttttaaacagtaaatacaagtctctcaacatacagtgaaaattttaactcgtttttattttttaa

SEQ ID NO: 7138 - DNA, 752 bp, Homo sapiens
tttttcatccaaccaaccagcacctgttcctccaaaactattgaaataaaaaaaaaaaaaacaggctgagcatggtggctcacacctgtaatcccagcactgtgggaggccaaggtgggtggatcacgaggtcaggagttcgagacaagcctgatcaccatgatgaaaccctgtctctacaaaamcaaaaaacaaacagaaacaagtagtatctgttgatattgtaaagagcaaatcaaactactgttatagcacatgtggttttctaatgagaaaatgcttataaagtatgtctagaggggaaaatcctgctcacttaaataggataaattatatcttccagaggtcctaataagagtgagtgaagaacaatgagtcagggaccccaagaagatactgagttataattaccatgtccatattaacaacataaaagaaaacttataatttagatgactaataaggcctttcattctttcctaccactttcaggtttctcttactgtttccggggtgttagtgttgaaaataatgattcttaggcacttttacagaatagcaatatttagtaaccacgatttggtataaaaggatatcaggttaatttatatacaattttgcaagaaaagtgtggtaacttactgatctttttttgaaacatacacgagccacaagaaatgctaacaattctgtatagtatagcagttcgcctctcagttgtgtcttatgcactgccatgtttatacatggga

SEQ ID NO: 7139 - DNA, 752 bp, Homo sapiens
tttttcatccaaccaaccagcacctgttcctccaaaactattgaaataaaaaaaaaaaaaacaggctgagcatggtggctcacacctgtaatcccagcactgtgggaggccaaggtgggtggatcacgaggtcaggagttcgagacaagcctgatcaccatgatgaaaccctgtctctacaaaaacaaaaaacaamcagaaacaagtagtatctgttgatattgtaaagagcaaatcaaactactgttatagcacatgtggttttctaatgagaaaatgcttataaagtatgtctagaggggaaaatcctgctcacttaaataggataaattatatcttccagaggtcctaataagagtgagtgaagaacaatgagtcagggaccccaagaagatactgagttataattaccatgtccatattaacaacataaaagaaaacttataatttagatgactaataaggcctttcattctttcctaccactttcaggtttctcttactgtttccggggtgttagtgttgaaaataatgattcttaggcacttttacagaatagcaatatttagtaaccacgatttggtataaaaggatatcaggttaatttatatacaattttgcaagaaaagtgtggtaacttactgatctttttttgaaacatacacgagccacaagaaatgctaacaattctgtatagtatagcagttcgcctctcagttgtgtcttatgcactgccatgtttatacatggga

SEQ ID NO: 7140 - DNA, 752 bp, Homo sapiens
tttttcatccaaccaaccagcacctgttcctccaaaactattgaaataaaaaaaaaaaaaacaggctgagcatggtggctcacacctgtaatcccagcactgtgggaggccaaggtgggtggatcacgaggtcaggagttcgagacaagcctgatcaccatgatgaaaccctgtctctacaaaaacaaaaaacaaacagaamcaagtagtatctgttgatattgtaaagagcaaatcaaactactgttatagcacatgtggttttctaatgagaaaatgcttataaagtatgtctagaggggaaaatcctgctcacttaaataggataaattatatcttccagaggtcctaataagagtgagtgaagaacaatgagtcagggaccccaagaagatactgagttataattaccatgtccatattaacaacataaaagaaaacttataatttagatgactaataaggcctttcattctttcctaccactttcaggtttctcttactgtttccggggtgttagtgttgaaaataatgattcttaggcacttttacagaatagcaatatttagtaaccacgatttggtataaaaggatatcaggttaatttatatacaattttgcaagaaaagtgtggtaacttactgatctttttttgaaacatacacgagccacaagaaatgctaacaattctgtatagtatagcagttcgcctctcagttgtgtcttatgcactgccatgtttatacatggga

SEQ ID NO: 7141 - DNA, 752 bp, Homo sapiens
tttttcatccaaccaaccagcacctgttcctccaaaactattgaaataaaaaaaaaaaaaacaggctgagcatggtggctcacacctgtaatcccagcactgtgggaggccaaggtgggtggatcacgaggtcaggagttcgagacaagcctgatcaccatgatgaaaccctgtctctacaaaaacaaaaaacaaacagaaacaagtagtatctgttgatattgtaaagagcaaatcaaactactgttatagcacatgtggttttctaatgagaaaatgcttataaagtatgtctagaggggaaaatcctgctcacttaaataggataaattatatcttccagaggtcctartaagagtgagtgaagaacaatgagtcagggaccccaagaagatactgagttataattaccatgtccatattaacaacataaaagaaaacttataatttagatgactaataaggcctttcattctttcctaccactttcaggtttctcttactgtttccggggtgttagtgttgaaaataatgattcttaggcacttttacagaatagcaatatttagtaaccacgatttggtataaaaggatatcaggttaatttatatacaattttgcaagaaaagtgtggtaacttactgatctttttttgaaacatacacgagccacaagaaatgctaacaattctgtatagtatagcagttcgcctctcagttgtgtcttatgcactgccatgtttatacatggga

SEQ ID NO: 7142 - DNA, 464 bp, Homo sapiens
attcgtcctcctacctatcctcctgacttccagaccagtaactagagtcaagtatcagcatggctctcctaggaaagtgactgcmatgccaagggagaaaggaatgacccacagaagatctgtgacctgactgacatatactggaaaacactgaagaacatgcctgaaaatagatcttgagggtgctggactggggcatggagacataatgtaaggctgaacagggatcaatttattaatgcaggccactgtccaataatttaggatggaatgctctggcaagggcatctagagacattcatatactgctaggatggttcctaaacttggaagaaaagacagcccatgttaggtgaagtggagctgccataattcccttggctaagaattgagagagggcaaaaaaaggcttatagaaatagaaatgtttgactgaatcttttctataagacctgagaatctat

SEQ ID NO: 7143 - DNA, 816 bp, Homo sapiens
aaggtctggctctgttgcccaggctgcagtaccatggcataatcgtggcttgctgcagcctcaacctcccaggatcaaacgatcctcccacctcagcctcctgagtaactgaaactacaggcacacaccaccatgcctggctaaatttttaaattttttgtagagacaaggtatccctgtgttgccctagctggtcttgaactcctgggctcaagcaatcctcctgcctcagcctcccaaggtgttaggattacaggcgtgagccaccaggcccggctactattaacattttgatgcatgcactttcactattttttactttatgtgtgtgtatattttaaaacaaaaatcatcaaaatttacattgttttgtagctttttttttcatttagtgattacggaactatttcaatgtcaataaatgatctacattacaattttttcccctataatacttcttattatacaagtattaactgtgcattgctttgagcttagaaaatggagaaaaattgtacagaaagaaataactcatccagagattaattgctttcaatatagtcgtctatttcttggaagattttcccccatcccttcttactattagtccacagatcctccagctcagccaatgatagcagctgtagtcagctgggtaatggccattcaaagatatccttggaacttgcaaatgttgccttrtttgggaaaaaggtcttcgcacatgtgattatgtttaaggatctttcaaaggcaccaacccagaagttggtttcatttcctggaaaaaaacttgatagctagggttaatatatt

SEQ ID NO: 7144 - DNA, 734 bp, Homo sapiens
ccctgtggcaagatgcaggtgcaaattactgccctgtgtctctttcctcgttgggcaagtgaagatggtagtaccatgtctgttgcacagtatcattctttactttgagaatggaataggatggaggtcaccctgtacatatattagacactcagcaaagacttgattttagtttaaagataaaatggaagcatggtggctgtattacattttcatttgattccatcttgatttgccttgggaggagatgggtaaattaagtsatcagaagtaaaataagcaacgtgccctattaacgaatgttttgtgtggcctctgtattggcagctcagtgtttagccagaatgtaaagaaactgatatataaaaacgtcttagagtttttaaaatttcagttctctagtgttaaaaggtaattttacagaaaaaatggcaagtgaacacatgttgaaacttttactcagagggaaccaggcaaatgttatacagtaatggttaacccgcaaaatcaaaacagtacaaatttattaatatatggagtaaaggaatggagagatgaattccaaatggagacagaaacttttttttcccttgagtggaagggaagacattttgaacctctactgtagagacaaaatttacatgtctatcagttattcataatgaaaaaagagttgtggctgggcgcagtggctcacacctgtaatcccagcactttaggtggctgaggtggga

SEQ ID NO: 7145 - DNA, 734 bp, Homo sapiens
ccctgtggcaagatgcaggtgcaaattactgccctgtgtctctttcctcgttgggcaagtgaagatggtagtaccatgtctgttgcacagtatcattctttactttgagaatggaataggatggaggtcaccctgtacatatattagacactcagcaaagacttgattttagtttaaagataaaatggaagcatggtggctgtattacattttcatttgattccatcttgatttgccttgggaggagatgggtaaattaagtgatcagaagtaaaataagcaacgtgccctattaacgaatgttttgtgtggcctctgtattggcagctcagtgtttagccagaatgtaaagaaactgatatataaaaaygtcttagagtttttaaaatttcagttctctagtgttaaaaggtaattttacagaaaaaatggcaagtgaacacatgttgaaacttttactcagagggaaccaggcaaatgttatacagtaatggttaacccgcaaaatcaaaacagtacaaatttattaatatatggagtaaaggaatggagagatgaattccaaatggagacagaaacttttttttcccttgagtggaagggaagacattttgaacctctactgtagagacaaaatttacatgtctatcagttattcataatgaaaaaagagttgtggctgggcgcagtggctcacacctgtaatcccagcactttaggtggctgaggtggga

SEQ ID NO: 7146 - DNA, 734 bp, Homo sapiens
ccctgtggcaagatgcaggtgcaaattactgccctgtgtctctttcctcgttgggcaagtgaagatggtagtaccatgtctgttgcacagtatcattctttactttgagaatggaataggatggaggtcaccctgtacatatattagacactcagcaaagacttgattttagtttaaagataaaatggaagcatggtggctgtattacattttcatttgattccatcttgatttgccttgggaggagatgggtaaattaagtgatcagaagtaaaataagcaacgtgccctattaacgaatgttttgtgtggcctctgtattggcagctcagtgtttagccagaatgtaaagaaactgatatataaaaacgtcttagagtttttaaaatttcagttctctagtgttaaaaggtaattttacagaaaaaatggcaagtgaacacatgttgaaacttttactcagagggaaccaggcaaatgttatacagtaatggttaacccgcaaaatcaaaacagtacaaatttattaatatatggagtaaaggaatggagagatgaattccaaatgsagacagaaacttttttttcccttgagtggaagggaagacattttgaacctctactgtagagacaaaatttacatgtctatcagttattcataatgaaaaaagagttgtggctgggcgcagtggctcacacctgtaatcccagcactttaggtggctgaggtggga

SEQ ID NO: 7147 - DNA, 628 bp, Homo sapiens
ttttcatttaatatagtcaaatttatcaaattcctttgtagatcatgatattttcatgttaacaaagctgccttggctccaacgtcatgaagatattctcctatattccccctttagagttttaacatttccccttccacatttcgatgtatatcaaattctgtttctatagacagctaattttattttattaggcaamcttctaccattactttgaggggtcactaactgattatggtttggtcagcgtagctgtcagacacacagagactcactaccagggggcttggggctcagtgatgtttgggaaatgccggaaaagtcattagaggggagctgggtcataaaaacattgaaaacccttgatctgcaagcaaggtttattgcctttgagattatttggaggacagaaggttacaattccatgaaattctcttaggtctctttggccctatttatagactaaccagtcaatgatcctcccatcttgacagaggcccaggttaaaaggttcacaaagtggtatcccctttactacccccattggccgccaatagctgagaactgcagcctctgctaggaaaccagcctgttcagtgctttggttagcatttcacctcccatctca

SEQ ID NO: 7148 - DNA, 843 bp, Homo sapiens
agtgctatgatgcattagtgatgtcgcccattaacaacagcattctccaccttcattttagaccacagttaagtttaccatatatactcctttaccttttgaagacagtaggagaataaattatttaaaccctctcaagtgcagtgtgttcaaaagtaactcatcatcatcttctccccttctatgccagttctctccatgtcacatgatggtggtggtctccaggaacacacccatgattcctacctggtcttcgtttcccataacccatcagtcaccaagtcttgccaatttaccttccaaatgtgtctcaaatcactccccttcccatcccagatgccacccccgttctgcaaatgctattaactgtcacctcaacctcaacatagtctctctgcctctggtcctatttatttatttatttatttatttatttgagacagcatctckctctgtcgcccaggcaggagtgcagtggtgcaatctcagctcactgcaatctctgcctcccaggttcaagcgagtctcctgcttcagcctcccaagtagttgagattacaggtgcatgccaccacaccaggctaatttttgtacttttagtagagacaggatttcatcatgtcggccaggctggtcttgaactcctgacttcaagtgatccacctgcctcagcttctcaaagtgctgggattacaggtgtgagccactgtgcggcctgcctctggtccttttttaaaatgtattttatttatccatttttgagatggatcttgccctgacacccaagctgaagtgcagtggtgcagtcatggcttactgcagcctcaaactcctggactcaag

SEQ ID NO: 7149 - DNA, 850 bp, Homo sapiens
ctggtggctatgtggaaggtagatagtgatagggtagggtaggtgaagcagggcagagtggggtggagcaagactggaagacaggaaggtattgtgcaagacagaatgatgaggttctattcttttctctgctaatgaccctttcccccttactattgctacataacaagttactccagtgcttagcagcttaaaacaattgtgggtcagaaatctgggaagggctctgctgggtggttcacacttgaggtctccctcatagttgtagttggatgttggttggggctttatttatcttgtctgtgctaaggtaaataaagatgcatggttggcagttgatgccagctgtcatctgctgtacacagcctctccagcagggtagtctgggkgtagtcagacttcttacatgacatatggcttcatttcaagagaaccaggcagaagtctcatggccttttctgatctagcttcagaagtcatacaacatctcctctactgtactcaattagttgaagcagtctcaagtggtccagattcaaggtggggtgggaggaattagactccacttcttgatgagggcaatggccagttgacagtatagaagaacatgtgggatgggaacacgtgttgtggccatctttggaaaaaacaatcaacatagctcccaaattgacttattttatatacacaattacccccaagatatctccacttggaagttttgttgtcaactcaagtctaaaagagaatttatcacaacaaacctccatcccattattattattattattattattattattgtaatatgataactttttaaaaaaacagactaaaacatttttctttt

SEQ ID NO: 7150 - DNA, 850 bp, Homo sapiens
ctggtggctatgtggaaggtagatagtgatagggtagggtaggtgaagcagggcagagtggggtggagcaagactggaagacaggaaggtattgtgcaagacagaatgatgaggttctattcttttctctgctaatgaccctttcccccttactattgctacataacaagttactccagtgcttagcagcttaaaacaattgtgggtcagaaatctgggaagggctctgctgggtggttcacacttgaggtctccctcatagttgtagttggatgttggttggggctttatttatcttgtctgtgctaaggtaaataaagatgcatggttggcagttgatgccagctgtcatctgctgtacacagcctctccagcagggtagtctgggtgtagtcagacttcttacatgacatatggcttcatttcaagagaaccaggcagaagtctcatgrccttttctgatctagcttcagaagtcatacaacatctcctctactgtactcaattagttgaagcagtctcaagtggtccagattcaaggtggggtgggaggaattagactccacttcttgatgagggcaatggccagttgacagtatagaagaacatgtgggatgggaacacgtgttgtggccatctttggaaaaaacaatcaacatagctcccaaattgacttattttatatacacaattacccccaagatatctccacttggaagttttgttgtcaactcaagtctaaaagagaatttatcacaacaaacctccatcccattattattattattattattattattattgtaatatgataactttttaaaaaaacagactaaaacatttttctttt

SEQ ID NO: 7151 - DNA, 1334 bp, Homo sapiens
gggtgctcttcatggaggagctaggcttggaggtcagggctgcagtgttgatacatgtgctcctcaggtcattcacggtgagagtttgagctgggatgacaagagaagggggtgaggctacaggctgggggccaggggctggggtcacctctctccatgttccagttggaacttcaagggactgagcctgaaaatgccacacttgaaattgtccctccataccattataaaagaatacctgtgaaggtgggagaatgatatgtattatttttaacaatttttaggttgatttttaacctttaaatatttagacatatggaatgtgagcttccatctgcacccttgttcctggccccacgattactacaaatcacacaaaatgctaaagtagtgggtctcagactttactatttataaaaatcacctgagatgcttgtgaaaaatctaattccaggccatagtcttccagatattcagatgcagtcagcttggtttgagactcaagaaagttcatttttacagctttcccaggtggttttgatagacgtagtccgacgaccactcttggagagtcacaaagttccctggtggaattaatgatttcactgacaaaacacacacaagggaaacaatgaaagggtaatttagaagtatgatccaacaaagtaaaaaaatggatttttatacaaaaccagaattaaaatatctaaaggattgttgtcccctacaaagcagtccccttggaggttagacacttatcctaagccggcagctattgctcaaaacatttcgacactgatttttttaaattgcctttagaggtagattatgagccacatcagaaagccaatcttgttatttcacatcacagtatgcatctgacaaaaaacagcattacccagaaggatgatgcattgttacttagcagatttagttcttatgctttccgagtcaaatgtgtcataaaagaagatctattatataagcacacctgtttatgtcagcctccttctgaaactatactaaagtgacaatgaagaaagaaaaaaggcataaatctgcaaagacaaagtgagaaagaaggttcaggaagaaattggaatcagtatttaagaaactggaaaatagatggagaagtggccatggacttagcagacccaagaaatctgaaacttgagcctgtcataaggaaagttaggagatagactaattttacctcagaaccctgccttgggaattggagacaagtaactcaaggaggcagtcatgtagcawggggatggaaaaaaaagaagattcactgaaaacttgtataaagagaaattagcccacct

SEQ ID NO: 7152 - DNA, 806 bp, Homo sapiens
attaattaactgtagttcccatacctcttttgccaatgcattgccaaacagatggggattktcctaaaaccttggggacaggacagtccaggtaagctgagatgcagcatgagtgtctggattagtccattcaaatgcaaaaatgtattgggtgtccaggtgtaaaggtgtgtgaaagaaaacatcttttaaatttaatactatgaaccaataagcatcttcagggacttgagttattattgtataaagattaggaactattgggtgactggaactaatgcctcattaactgccctaagatcctgaacaaatctatattccccgtttggcttattaacaggaaaaatgggggtgttacgttgggactgataggattgtaataatccatacttcattatcaggggatggatgccccttggagccaaaggtctaaaaggatactggatttttctttttttttttttttttgagtcagagtcttgctctgttatccaggctggagtgcggcggcgcaaggctcactgctacctctgccttccgggttcaagcaattctcctgccacagccttctgagtagttgggattgcagatgtacaccaccatacctagctaatttttgtgtttttagtagagatggggttttgccttgttggccaggctggtctcaaactcctagcttccagtgatatgcccaccttggcctccgaaagtgcagagattaaaagcatgggccaccacacttaaaaggatattttttttcccatagataattaacactgggtttcaaaataacctggactgggaga

SEQ ID NO: 7153 - DNA, 806 bp, Homo sapiens
attaattaactgtagttcccatacctcttttgccaatgcattgccaaacagatggggattgtcctaaaaccttggggacaggacagtccaggtaagctgagatgcagcatgagtgtctggattagtccattcaaatgcaaaaatgtattgggtgtccaggtgtaaaggtgtgtgaaagaaaacatcttttaaatttaatactatgaaccaataagcatcttcagggacttgagttattattgtataaagattaggaactattgggtgactggaactaatgcctcattaactgccctaagatcctgaacaaatctatattccccgtttggcttattaacaggaaaaatgggggtgttacgttgggactgataggattgyaataatccatacttcattatcaggggatggatgccccttggagccaaaggtctaaaaggatactggatttttctttttttttttttttttgagtcagagtcttgctctgttatccaggctggagtgcggcggcgcaaggctcactgctacctctgccttccgggttcaagcaattctcctgccacagccttctgagtagttgggattgcagatgtacaccaccatacctagctaatttttgtgtttttagtagagatggggttttgccttgttggccaggctggtctcaaactcctagcttccagtgatatgcccaccttggcctccgaaagtgcagagattaaaagcatgggccaccacacttaaaaggatattttttttcccatagataattaacactgggtttcaaaataacctggactgggaga

SEQ ID NO: 7154 - DNA, 806 bp, Homo sapiens
attaattaactgtagttcccatacctcttttgccaatgcattgccaaacagatggggattgtcctaaaaccttggggacaggacagtccaggtaagctgagatgcagcatgagtgtctggattagtccattcaaatgcaaaaatgtattgggtgtccaggtgtaaaggtgtgtgaaagaaaacatcttttaaatttaatactatgaaccaataagcatcttcagggacttgagttattattgtataaagattaggaactattgggtgactggaactaatgcctcattaactgccctaagatcctgaacaaatctatattccccgtttggcttattaacaggaaaaatgggggtgttacgttgggactgataggattgtaataatccatacttcattatcaggggatggatgccccttggagccaaaggtctaaaaggwtactggatttttctttttttttttttttttgagtcagagtcttgctctgttatccaggctggagtgcggcggcgcaaggctcactgctacctctgccttccgggttcaagcaattctcctgccacagccttctgagtagttgggattgcagatgtacaccaccatacctagctaatttttgtgtttttagtagagatggggttttgccttgttggccaggctggtctcaaactcctagcttccagtgatatgcccaccttggcctccgaaagtgcagagattaaaagcatgggccaccacacttaaaaggatattttttttcccatagataattaacactgggtttcaaaataacctggactgggaga

SEQ ID NO: 7155 - DNA, 562 bp, Homo sapiens
ggggattggtatgggtagagcttgcgagggcgagtctgtgtgtgtcggggagggtggaggtgatggtgcgggtggaagttgcctggcgtgttcaggtgagaatgtctgtatttgagggctctgaatgagttctgggccggctgtccagagagagctcccagcatgtcacttgcaaagctggggatgaactgcattgcgtgcgtgcgtgcgtgcgtgcgtgtgtgtgtgtgtgtgtgtgtgtgwgagagagagagagagagagaatgacgaggaggaggaggagggaagtgagatggcggaaaggaaaactgcttaaatgatttttaaaggtggtgatttttgcttcctgctatttggttagcaactcctgtcattttgcagccttgctaagatctgacaagagtgcttaggtgactttattcttctggatgtgtgcagtgggaaactgccttatgcagtgacacagtgcggatttctaggcagtgtagccctggcttgtagagtgcgttggaggcctatgtatgagtggtggcagaaactagccgattatgcctgtagtgca

SEQ ID NO: 7156 - DNA, 616 bp, Homo sapiens
aataaaaagtaaaacacatagaattttgcaaggaatcaatgaagcagttgggatgcatagtaaatcttaggggaatgcacaaaggtactacttactgaaaaaagaggaaatgatcacagacaagtagaagaggtaaaagatttgcaaatggatgcttgtaataaatgcaggtgccggccaggtgcagtggctcacccctgtaatcccagcactttgggaggccgaggtaggcagatcatgaggtcaggagttcgagaccggcctggccaatatggtgaaaccccgtctctactaaaaatacaaaaattaaccgggtgtggtggtgcacacctgcagtgccagctactcgggaggctgagrtggaagaatcgcttgaacctgggaggtggaggttgcagtgagctgagatcacaccactgcaccccagcatgggcaacagagcgagactccatctcaaaaaaaaataaaggcaggtgccaatagcgctcaaaactttccaatcccctaaatctctgaggctttagagttttactttggagatcttgttagtacaagcgtaagaaaatttagtagttgtctaaattgtaaacttttttctagatcttatgctcttaag

SEQ ID NO: 7157 - DNA, 716 bp, Homo sapiens
catagtgattatctcacaatgaagaaatgacagattaatttgtctctattaattttgtagacttccaatctttccttattgggcaggtgttactagtattataagaaaagtagtgtgttaatttttatttttttaaacaaaaaagaatatgactcactatactttttyttcacttggattttggaagtcctgtacctgctccaacaaccagtagccccgctgaaagatagctgggtattgacaccaatgaggcagtgttgcagttaaaatattctcttgtacttgagaattcaccgagaaagtattgaccaatccctacttacattgcatgtatatggaggtttccttttggaccaagacttgactcataaagtagacctcttttaaatgaatactgatttttttttccaacaatgaaaatggcagatcacttggttattcctctcctcccttgacgtgaatttctatattctagggagatttataggacgcttcaataaaccctacttaggtctataacttcctgcatgaggtgtgacacacttttccaactactggttcatacaaaagacaaggagtttcaactttttcacccttacttacgaattggcaagcacagaatattaggaagttgtgcattggaagcacggggaccatgccaggctttcagcaaagtattcccatggagttaccaagggggtgacaaataattgtag

SEQ ID NO: 7158 - DNA, 716 bp, Homo sapiens
catagtgattatctcacaatgaagaaatgacagattaatttgtctctattaattttgtagacttccaatctttccttattgggcaggtgttactagtattataagaaaagtagtgtgttaatttttatttttttaaacaaaaaagaatatgactcactatacttttttttcacttggattttggaagtcctgtacctgctccaacaaccagtagccccgctgaaagatagctgggtattgacaccaatgaggcagtgttgcagttaaaatattctcttgtacttgagaattcaccgagaaagtattgaccaatccctacttacattgcatgtatatggaggtttccttttggaccaagrcttgactcataaagtagacctcttttaaatgaatactgatttttttttccaacaatgaaaatggcagatcacttggttattcctctcctcccttgacgtgaatttctatattctagggagatttataggacgcttcaataaaccctacttaggtctataacttcctgcatgaggtgtgacacacttttccaactactggttcatacaaaagacaaggagtttcaactttttcacccttacttacgaattggcaagcacagaatattaggaagttgtgcattggaagcacggggaccatgccaggctttcagcaaagtattcccatggagttaccaagggggtgacaaataattgtag

SEQ ID NO: 7159 - DNA, 716 bp, Homo sapiens
catagtgattatctcacaatgaagaaatgacagattaatttgtctctattaattttgtagacttccaatctttccttattgggcaggtgttactagtattataagaaaagtagtgtgttaatttttatttttttaaacaaaaaagaatatgactcactatacttttttttcacttggattttggaagtcctgtacctgctccaacaaccagtagccccgctgaaagatagctgggtattgacaccaatgaggcagtgttgcagttaaaatattctcttgtacttgagaattcaccgagaaagtattgaccaatccctacttacattgcatgtatatggaggtttccttttggaccaagacttgactcataaagtagacctcttttaaatgaatactgatttttttttccaacaatgaaaatggcagatcacttggttattcctctcctcccttgamgtgaatttctatattctagggagatttataggacgcttcaataaaccctacttaggtctataacttcctgcatgaggtgtgacacacttttccaactactggttcatacaaaagacaaggagtttcaactttttcacccttacttacgaattggcaagcacagaatattaggaagttgtgcattggaagcacggggaccatgccaggctttcagcaaagtattcccatggagttaccaagggggtgacaaataattgtag

SEQ ID NO: 7160 - DNA, 2576 bp, Homo sapiens
tccaagtctgctgatgacacctcatgggctctcactaacacaggtcaccataaagaactcaaaaggtgaggaagacatggtaaagtaaaactggcagggaaattaaaccgggaacacttaaaatcaacatgtaaataatgcacttcattcacagacctaaagcagatagcccaaaagaaaaatgggcaaaggatataaaaattccctccccctgccaaaacacaacacacatacacacccagtttaaggaaacttcacagtgattttaaaaaaacaacaacaaagatttaaaaaatataacgatgctcaagttcacaastgatttaggaaacttatagtcttatgtattactggaataaggcgaggagtatacatttggaagaacagcctgacaaaatttactgtagctctcgggctcaagtatatataggtcaaagatgtatggcacagtgaaatgctacaacctaacaagccacaacagaggatcgagtcattaattatgcgacagctatcaacaagtcaaccaagccaagaggaagcatcacaacagatattaatgtatcaacatagaaagatgctgtaggcagaaaaacagtagatgatgaatgtggtcttgaaaaggttttaaaatgcattaacaaattgaaccctcattcaagccttctttaacttgtacttagacatattctatctgatccatacacagaagttggaaatactttctcactttgcaaaatgcaattgttcttctgaaaactaagacagtttcatttaaatcaatatgattttggttttttgtgtttttttttttaacaaaggctctaatatgtaaagatttctctggtttttgtttgtttgtttgtttgttttttgagacaggttttgtgctctgtctcccaggctggagtgcagtggcgcgatctcggctcactgaagccttggcctcctaggttcaagcaattctgcctcagtctcccaagtagctgagactacaggcacgcaccactacgctaggctaattttttatttttgataaagacggggtttcaccatgttggccaggctggtctcaaactcctggcctcaagtgatccacccacctcagcctcccaaggtgctgggattacaggcgtgagctgccaggcctggccctaatatgtgaagatttcttaaagaggttttacaaccaagctttatataactttcgctttcactacctataaaatgagggagatggcctaaatcatgatcaatagccctaaatcactactgtttctcctcctagtatcgatgtttccatttatagctgccagacacttaacccagaaacatactgctacaaaagaaatattttaagtataagcacttcctgaaaaaaacaaaatttggagacatcagcaaatgctcacctcactcaagactcaaaagggaaacacaagccacagttctgaaatccaaagaacattttacatgtacagcaactggcaaagctattcagaagcctgagaggcccctcttgaaatgacaaaactaagctttcacccagtaaattcaagtggaaaacaaccaaatttctattcgtagaaaaacagttataaattatggcacatccaaactactgaattctgtaaaatgtaaggcacttatccatataaggcacttacctctgtgtctagtacaaattagattctcaaaataattactgtcattaacattataatttccagattctcagaatctggcacctttcttggttctactatagtattcatatgccagcatttccaaacctactttactatggatcctttctccacatacctatctacatggcatttgtttcatggagtacattttggggaatgcctctctatctcagacacaagcttcatgcattgtccattgaccaccatttgtccagggctgatctcccccaaaaaattgtgtgctccttgaaagcatggaccggtgttggcacatattaggtactaagtaaatgtctgtagaataaataacaacaaatgaaagaaggggtttggtgcaaatgactctgaggatcccctgaagctttaaagcccaggttctatcatttatactggaaccaaagggtctaaactcccaaatttcacactgctaaccttgaggactaacagaaatcaatgaaaaccacctgagggactcctaagtgttccaagtatgcagaccacagcccatgggctctctaggctggctcgagtttaaccttacttcattttcaacacagaccaatatacatcaaatgtggctcacagtggccaggcccagtggctcacaccataatcctagcactttgggaggcccaggcgggtggatggcctgagcccaggagttcaagagcagcctgggcaacatggtggaaccctaactctacaaaaaaatacaaaaaattgaccaggattggtggcatgtgtctgtggtccctgctactagggaggttgaggtgggaggaccacctgaacccaggaagttgaggctgtagagagccatgattgtgccactccaccccagcctgggtgacacagtgagatcctatctca

SEQ ID NO: 7161 - DNA, 2576 bp, Homo sapiens
tccaagtctgctgatgacacctcatgggctctcactaacacaggtcaccataaagaactcaaaaggtgaggaagacatggtaaagtaaaactggcagggaaattaaaccgggaacacttaaaatcaacatgtaaataatgcacttcattcacagacctaaagcagatagcccaaaagaaaaatgggcaaaggatataaaaattccctccccctgccaaaacacaacacacatacacacccagtttaaggaaacttcacagtgattttaaaaaaacaacaacaaagatttaaaaaatataacgatgctcaagttcacaagtgatttaggaaacttatagtcttatgtattactggaataaggcgaggagtatacatttggaagaacagcctgacaaaatttactgtagctctcgggctcaagtatatataggtcaaagatgtatggcacagtgaaatgctacaacctaacaagccacaacagaggatcgagtcattaattatgcgacagctatcaacaagtcaaccaagccaagaggaagcatcacaacagatattaatgtatcaacatagaaagatgctgtaggcagaaaaacartagatgatgaatgtggtcttgaaaaggttttaaaatgcattaacaaattgaaccctcattcaagccttctttaacttgtacttagacatattctatctgatccatacacagaagttggaaatactttctcactttgcaaaatgcaattgttcttctgaaaactaagacagtttcatttaaatcaatatgattttggttttttgtgtttttttttttaacaaaggctctaatatgtaaagatttctctggtttttgtttgtttgtttgtttgttttttgagacaggttttgtgctctgtctcccaggctggagtgcagtggcgcgatctcggctcactgaagccttggcctcctaggttcaagcaattctgcctcagtctcccaagtagctgagactacaggcacgcaccactacgctaggctaattttttatttttgataaagacggggtttcaccatgttggccaggctggtctcaaactcctggcctcaagtgatccacccacctcagcctcccaaggtgctgggattacaggcgtgagctgccaggcctggccctaatatgtgaagatttcttaaagaggttttacaaccaagctttatataactttcgctttcactacctataaaatgagggagatggcctaaatcatgatcaatagccctaaatcactactgtttctcctcctagtatcgatgtttccatttatagctgccagacacttaacccagaaacatactgctacaaaagaaatattttaagtataagcacttcctgaaaaaaacaaaatttggagacatcagcaaatgctcacctcactcaagactcaaaagggaaacacaagccacagttctgaaatccaaagaacattttacatgtacagcaactggcaaagctattcagaagcctgagaggcccctcttgaaatgacaaaactaagctttcacccagtaaattcaagtggaaaacaaccaaatttctattcgtagaaaaacagttataaattatggcacatccaaactactgaattctgtaaaatgtaaggcacttatccatataaggcacttacctctgtgtctagtacaaattagattctcaaaataattactgtcattaacattataatttccagattctcagaatctggcacctttcttggttctactatagtattcatatgccagcatttccaaacctactttactatggatcctttctccacatacctatctacatggcatttgtttcatggagtacattttggggaatgcctctctatctcagacacaagcttcatgcattgtccattgaccaccatttgtccagggctgatctcccccaaaaaattgtgtgctccttgaaagcatggaccggtgttggcacatattaggtactaagtaaatgtctgtagaataaataacaacaaatgaaagaaggggtttggtgcaaatgactctgaggatcccctgaagctttaaagcccaggttctatcatttatactggaaccaaagggtctaaactcccaaatttcacactgctaaccttgaggactaacagaaatcaatgaaaaccacctgagggactcctaagtgttccaagtatgcagaccacagcccatgggctctctaggctggctcgagtttaaccttacttcattttcaacacagaccaatatacatcaaatgtggctcacagtggccaggcccagtggctcacaccataatcctagcactttgggaggcccaggcgggtggatggcctgagcccaggagttcaagagcagcctgggcaacatggtggaaccctaactctacaaaaaaatacaaaaaattgaccaggattggtggcatgtgtctgtggtccctgctactagggaggttgaggtgggaggaccacctgaacccaggaagttgaggctgtagagagccatgattgtgccactccaccccagcctgggtgacacagtgagatcctatctca

SEQ ID NO: 7162 - DNA, 573 bp, Homo sapiens
atccggtcaattatgacgaacatgtgaaaaaaatagaaacctatctaagatgatatattataactaaattgtaccatagtgatgacatcsatttgatttttaaaaaggcagttaaatacaaattgatatcttggagaaaagtacatagaaaaagtccacttgggctgagccttgacattggggagcattgcagtagtcagaaataaaaatgttgttttccatcaaagagaacaacacaagcaaagtagagcataagcagggtctggagagttcagatcataaggagtgggagcagccgtccctgcaatttgaccacaccagcagcatgggagttgggagggctgagaaatttattcaggcagagacacactcactggccctaactgtgattgtcacttctggtcttcagtgccttctagctggttcagcagaagccaatgcactggagcagccacagaaccacagaagcccaagcagaaatggatatcgccatggcctcttctccctccatatcactccctgctgcatgaatttgtccttgcttagcttgcttaccttaaaaaacaaatattt

SEQ ID NO: 7163 - DNA, 612 bp, Homo sapiens
ctcagacctcagttcagttcctgccccatctcccaaactgccaagaggatttgcacatggacaggcaaaaaagtcaactctctttccctccttaaatctgccagcagtttggaccttttttataaacatatggtatgtttttcccaaaggcaaatctaaagtcatcactatttttcttactttcttgcttgaattcgggtatctagagcaattatgaagttgkgtgtgtgtgtgtgtgtgtgtgtgtggtgtgtgtgtgtgtctgtgtctgtgtgcatgtatagcataacacactttataggttaacttccaagagagaaaagtaaccatcaaattatcaaatatatacacacatgtgtatatgtatacatacataatcatattatatatatacatatagtaaacattttcttttcatcagtggaataatcctttgaaagacgacactttgctgccccagcagaaggaatgcatagtgctggaaacatggtataacctcaacgaataatctctaatatttattttttgtggaagctataaatctgttggtagaaactgcccctgtatggccaaggagttttttcttatttaaaatgcttaaacttgtgttct

SEQ ID NO: 7164 - DNA, 612 bp, Homo sapiens
ctcagacctcagttcagttcctgccccatctcccaaactgccaagaggatttgcacatggacaggcaaaaaagtcaactctctttccctccttaaatctgccagcagtttggaccttttttataaacatatggtatgtttttcccaaaggcaaatctaaagtcatcactatttttcttactttcttgcttgaattcgggtatctagagcaattatgaagttgtgtgtgtgtgtgtgtgtgtgtgtgtggtgtgtrtgtgtgtctgtgtctgtgtgcatgtatagcataacacactttataggttaacttccaagagagaaaagtaaccatcaaattatcaaatatatacacacatgtgtatatgtatacatacataatcatattatatatatacatatagtaaacattttcttttcatcagtggaataatcctttgaaagacgacactttgctgccccagcagaaggaatgcatagtgctggaaacatggtataacctcaacgaataatctctaatatttattttttgtggaagctataaatctgttggtagaaactgcccctgtatggccaaggagttttttcttatttaaaatgcttaaacttgtgttct

SEQ ID NO: 7165 - DNA, 795 bp, Homo sapiens
attttagaccaatatccttgatgaacatcgatgcaaaaatcctcaataaaatactggcaaaccgaatccagtagcacatcaaaaagcttatccaccgtgatcaagtgggcttcatccctgggatgcaaggctggttcaatatatgcaaatcaataaatgtaatccagcatataaacagaaccaaagacaaaaaccacatgattatctcaatagatgcagaaaaggcctttgacaaaattcaacaacgcttcatgctaaaaactctcaataaattaggtattgatgggacgtatctcaaaataataagagctatttatgacaaccccacagccaatgtcatactgaatgggtaaaaaactggaagcattccctttgaaaactggcacaagacrgtgatgccctctctcaccactcctattcaacatagtgttggaagttctggccagggcaattaggcaggagaaagaaataaagggtatttaattaggaaaagaggaagtcaaattgtccctgtttgcagatgacatgattgtatatctagaaaaccccattgtctgagcccaaaatctccttaagctgataagcaacttcagcaaagtctcaggatacaaaatctgtgtacaaaaatcacaagcattcttatacaccaataacaaacagagagctaaatcatgagtgaactcccattcacaattgcttcaaagagaataaagtacttaggaatccaacttacaagggacgtgaaggacctcttcagtctcccaagttctatcccttgttcctagtacctgtgga

SEQ ID NO: 7166 - DNA, 795 bp, Homo sapiens
attttagaccaatatccttgatgaacatcgatgcaaaaatcctcaataaaatactggcaaaccgaatccagtagcacatcaaaaagcttatccaccgtgatcaagtgggcttcatccctgggatgcaaggctggttcaatatatgcaaatcaataaatgtaatccagcatataaacagaaccaaagacaaaaaccacatgattatctcaatagatgcagaaaaggcctttgacaaaattcaacaacgcttcatgctaaaaactctcaataaattaggtattgatgggacgtatctcaaaataataagagctatttatgacaaccccacagccaatgtcatactgaatgggtaaaaaactggaagcattccctttgaaaactggcacaagacggtgatgccctctctcaccactcctattcaacatagtgttggaagttctggccagggcaattaggcaggagaaagaaataaagggtattyaattaggaaaagaggaagtcaaattgtccctgtttgcagatgacatgattgtatatctagaaaaccccattgtctgagcccaaaatctccttaagctgataagcaacttcagcaaagtctcaggatacaaaatctgtgtacaaaaatcacaagcattcttatacaccaataacaaacagagagctaaatcatgagtgaactcccattcacaattgcttcaaagagaataaagtacttaggaatccaacttacaagggacgtgaaggacctcttcagtctcccaagttctatcccttgttcctagtacctgtgga

SEQ ID NO: 7167 - DNA, 795 bp, Homo sapiens
attttagaccaatatccttgatgaacatcgatgcaaaaatcctcaataaaatactggcaaaccgaatccagtagcacatcaaaaagcttatccaccgtgatcaagtgggcttcatccctgggatgcaaggctggttcaatatatgcaaatcaataaatgtaatccagcatataaacagaaccaaagacaaaaaccacatgattatctcaatagatgcagaaaaggcctttgacaaaattcaacaacgcttcatgctaaaaactctcaataaattaggtattgatgggacgtatctcaaaataataagagctatttatgacaaccccacagccaatgtcatactgaatgggtaaaaaactggaagcattccctttgaaaactggcacaagacggtgatgccctctctcaccactcctattcaacatagtgttggaagttctggccagggcaattaggcaggagaaagaaataaagggtatttaattaggaaaagargaagtcaaattgtccctgtttgcagatgacatgattgtatatctagaaaaccccattgtctgagcccaaaatctccttaagctgataagcaacttcagcaaagtctcaggatacaaaatctgtgtacaaaaatcacaagcattcttatacaccaataacaaacagagagctaaatcatgagtgaactcccattcacaattgcttcaaagagaataaagtacttaggaatccaacttacaagggacgtgaaggacctcttcagtctcccaagttctatcccttgttcctagtacctgtgga

SEQ ID NO: 7168 - DNA, 795 bp, Homo sapiens
attttagaccaatatccttgatgaacatcgatgcaaaaatcctcaataaaatactggcaaaccgaatccagtagcacatcaaaaagcttatccaccgtgatcaagtgggcttcatccctgggatgcaaggctggttcaatatatgcaaatcaataaatgtaatccagcatataaacagaaccaaagacaaaaaccacatgattatctcaatagatgcagaaaaggcctttgacaaaattcaacaacgcttcatgctaaaaactctcaataaattaggtattgatgggacgtatctcaaaataataagagctatttatgacaaccccacagccaatgtcatactgaatgggtaaaaaactggaagcattccctttgaaaactggcacaagacggtgatgccctctctcaccactcctattcaacatagtgttggaagttctggccagggcaattaggcaggagaaagaaataaagggtatttaattaggaaaagaggaagtcaaattgtccctgtttgcagatgacatgattgtatatctagaaaaccccattgtctgagcccaaaatctccttaagctgataagcaacttcagcaaagtctcaggatacaaaatctgtgtacaaaaatcacaagcattcttatacaccaataacaaacagagagctaaatcatgagtgaactcccattcacaattgcttcaaagagaataaagtacttaggaatccaacttacaagggacgtgaaggacctcttcagtctcccaagttctatcscttgttcctagtacctgtgga

SEQ ID NO: 7169 - DNA, 669 bp, Homo sapiens
ctaaaaaaattaagttaataaagtaaaaaagttacagtaagctagaattagtttattattgaagaaggaaaataattttttataactttagggtagcctaagtatacagtatttataagttctacagtaatgtacagtgatgtcctaggccttcacattcactcaccattcattcactgattcactcagaacaacttccagtcctgcaagctctattcataagtaccctatacaagtgtatcatttgttatcctttgtaccktatttttactgaaccttttctatgtttagaataatctaccaaatacttaccattgtgttacaattgcctacagtattaagtacagtaatatgctatacaggttttagcctaggagcaataggttaggccatagagcccaggtatgtagtaagctatactctctagtttgtgtaagtacattccatgatattcacacaatgatgaaattgcctaacaatgcatttctcagaacgtatgtaagcagcacctgttattaagtgacacatgactatacgtaattaaaagcatgtatatattataaaatgatacataatgtatatcattattatcagaagctcccaaacaccaacttacttcctgctttcaggagaactactaaatttaaaatttcaaaattggctatagaa

SEQ ID NO: 7170 - DNA, 669 bp, Homo sapiens
ctaaaaaaattaagttaataaagtaaaaaagttacagtaagctagaattagtttattattgaagaaggaaaataattttttataactttagggtagcctaagtatacagtatttataagttctacagtaatgtacagtgatgtcctaggccttcacattcactcaccattcattcactgattcactcagaacaacttccagtcctgcaagctctattcataagtaccctatacaagtgtatcatttgttatcctttgtaccttatttttactgaaccttttctatgtttagaataatctaccaaatacttaccattgtgttacaattgcctacagtattaagtacagtaatatgctatacaggttttagcctaggagcaataggttaggccatagagcccaggtatgtagtaagctatactctctagtttgtgtaagtacattccatgatattcacacaatgatgaaattgcctaacaatgcatttctcagaacgtatgtaagcagcacctgttattaagtgacacatgactatacgtaattaaaagcatgtatatattataaaatgatacataatgtatatcattattatcagaagctcccaaacaccaacttacttcctgctttcaggagaaytactaaatttaaaatttcaaaattggctatagaa

SEQ ID NO: 7171 - DNA, 625 bp, Homo sapiens
gaccatgtatatggctataacaacaagcaattctctctttcctatggaatcactagatgggatgatctaagcttggagctgctaatggttatgattccccttccactttccttttcctgcctcatgaatgaatcccatggcaaagaraaagatgctactacacagtcagaagcaaaatgttgagaaacataaggagtatgagcgatccagtgatgtcattggagcccctgagtccagctgtgcctgaggctattccctggtgactcacccagctctacaagcaactaaatttcctcttaggttaaagcggctggactcttttggttggaagtcgaaggcccagctgatttggtagctcagtaaatattgcttttactccagtggtggccacttcatgtccgaccatggctcttgtcaccctaatctcaggtgtccaggggagcatctgtccctccctcttggctgagagctcctcaggggaggtacagggtctgacgtgcccagcatttacttccatctcagtgcctggggcatagaaggtgcccaggaaatgtctgatgattgagggagggagggagggagggagtgattgagtgttgacccaggtctgcccccttcctgtcct

SEQ ID NO: 7172 - DNA, 625 bp, Homo sapiens
gaccatgtatatggctataacaacaagcaattctctctttcctatggaatcactagatgggatgatctaagcttggagctgctaatggttatgattccccttccactttccttttcctgcctcatgaatgaatcccatggcaaagagaaagatgctactacacagtcagaagcaaaatgttgagaaacataaggagtatgagcgatccagtgatgtcattggagcccctgagtccagctgtgcctgaggctattccctgrtgactcacccagctctacaagcaactaaatttcctcttaggttaaagcggctggactcttttggttggaagtcgaaggcccagctgatttggtagctcagtaaatattgcttttactccagtggtggccacttcatgtccgaccatggctcttgtcaccctaatctcaggtgtccaggggagcatctgtccctccctcttggctgagagctcctcaggggaggtacagggtctgacgtgcccagcatttacttccatctcagtgcctggggcatagaaggtgcccaggaaatgtctgatgattgagggagggagggagggagggagtgattgagtgttgacccaggtctgcccccttcctgtcct

SEQ ID NO: 7173 - DNA, 625 bp, Homo sapiens
gaccatgtatatggctataacaacaagcaattctctctttcctatggaatcactagatgggatgatctaagcttggagctgctaatggttatgattccccttccactttccttttcctgcctcatgaatgaatcccatggcaaagagaaagatgctactacacagtcagaagcaaaatgttgagaaacataaggagtatgagcgatccagtgatgtcattggagcccctgagtccagctgtgcctgaggctattccctggtgactcacccagctctacaagcaactaaatttcctcttaggttaaagyggctggactcttttggttggaagtcgaaggcccagctgatttggtagctcagtaaatattgcttttactccagtggtggccacttcatgtccgaccatggctcttgtcaccctaatctcaggtgtccaggggagcatctgtccctccctcttggctgagagctcctcaggggaggtacagggtctgacgtgcccagcatttacttccatctcagtgcctggggcatagaaggtgcccaggaaatgtctgatgattgagggagggagggagggagggagtgattgagtgttgacccaggtctgcccccttcctgtcct

SEQ ID NO: 7174 - DNA, 652 bp, Homo sapiens
aaaaggaaaagaaagttgcctttgcaacctggctgtttgtccactggcatggtggtgcagttttattcttaaatctgtagttggaaggatagtttatatgtactactctttgtccagtatttggttgctttcagcttggtctgtcttccatacctccacttgcctgactaccctagcttgtgttctggtagtctaaatgaaagtggtgcattcaaatctagaaggcatttactacctgagtaggttttcttcagtccaattccaaatacctttaattagcgtaattccttcaaaattctggtattatattgactgtgactctgcctgtccaatgttgtccagtatattcttttttaaatatgtatattcctgtgtatttagtattgggaaaggcagaaagaggccatttttaactatccttttcttgttaatagcaacatcttgttggtctacctatacctgccatttagtgtaatacgtaagtgccaagaatatgaaaagtcatttaatcatgttacattggtcaagctccaaccattgatacctttttaaactttctgctacsaaatatgcatttatacttatctacttttcactccctttgtttaagccagaagtggtattctctagctaattcctccatctgttccct

SEQ ID NO: 7175 - DNA, 788 bp, Homo sapiens
aagcaaagtatccattatatctccctgaaaaaaaaaagtcacacaattacaatgcaataaaatgcaaattaaaaggtaaagtagtctttaaaatgccatttaaaatttataagttagtgatacacatatccaataagattgtaaaagggaaacaagcaaaggtaagtttaaacagtaatggttatttcctagtataaacctactctttccatgaaaggctcttttttttttgagacagagtcttgctctgtcgccaggctggagtgcagttgtgcaatctcggctcactgtaacctccgcctcctgggttcaagcaattctcctgcctcagcctcctgagtggctgggactacaggcacgtgccaccacgcccagctaattttttgtatttttagtagagatacggtttcactgtgttagcyaggatggtctcgatctcctgacctcatgattcgcccaccttggcctcccaaagtgctgggattacatgcgtgagccaccgcgcctggccaaaagactcttttaatgaattccgataaacgattttataaagattcagtaagaagaaaattttggcagctcctatttaaccttaatgcttaagcctaaactttcttatttataaaatacctgttaaacttactgatatcttaaattctttcctgatctattaatgtttgacttagagagtagaacttctcaatttccatgtgggttttgttatttttcatttaatggtactgatatttgcactaaaatgggtaaaatgatcatatataagaggatga

SEQ ID NO: 7176 - DNA, 808 bp, Homo sapiens
  misc_feature (1)...(808): n = A,T,C or G
atgaagggcactgtgcaacaatgagagtagctgaagactggcaatgttaactaatgcaagtctcagaaagaggaagatgatatttgcaaactccaggtggggttcgatggcaagcataattccagaaaataactttttttttttgagacagggtcttgctctgttgcccaggctggagttcagtgttgcaatcttggtgatggcgtgggtggcccttctggagtggctgctatcatgacactggctgcagtgggggaggcgtggccagggctgcgagctctacagggctgggaggagccgggaactgtggaagccctgcccacttccaagttggcagggcgggagcttgtgctcmntgggtgcagctgcagctcgccaggcacagctccagacctggacatccctgtgctcttgggggccagaatcaggcaggagccctgccctctcaggcacagctgcagccatccagccatggctgtggacccgggcatctcttgggggccagggaagcctccctgcccctgcaggctcagaagtacctgctcctgttgcctggtctctccccactcccggtgccgactctgattttggagcaaagttgaggccaagcccaggccctcttgcaacccagccaggtgtatgcatgctcagagcagcactgacatgccagacccctgccgccttggctcccctccaggctttgggcactgacgagcacaggagggaggctgagggagcactgagggtggctcagcatgggcctgcaggagcccctcaacacaaatagcttgggcagtggcaggaggca

SEQ ID NO: 7177 - DNA, 808 bp, Homo sapiens
  misc_feature (1)...(808): n = A,T,C or G
atgaagggcactgtgcaacaatgagagtagctgaagactggcaatgttaactaatgcaagtctcagaaagaggaagatgatatttgcaaactccaggtggggttcgatggcaagcataattccagaaaataactttttttttttgagacagggtcttgctctgttgcccaggctggagttcagtgttgcaatcttggtgatggcgtgggtggcccttctggagtggctgctatcatgacactggctgcagtgggggaggcgtggccagggctgcgagctctacagggctgggaggagccgggaactgtggaagccctgcccacttccaagttggcagggcgggagcttgtgctcantgggtgcagctgcagctsgccaggcacagctccagacctggacatccctgtgctcttgggggccagaatcaggcaggagccctgccctctcaggcacagctgcagccatccagccatggctgtggacccgggcatctcttgggggccagggaagcctccctgcccctgcaggctcagaagtacctgctcctgttgcctggtctctccccactcccggtgccgactctgattttggagcaaagttgaggccaagcccaggccctcttgcaacccagccaggtgtatgcatgctcagagcagcactgacatgccagacccctgccgccttggctcccctccaggctttgggcactgacgagcacaggagggaggctgagggagcactgagggtggctcagcatgggcctgcaggagcccctcaacacaaatagcttgggcagtggcaggaggca

SEQ ID NO: 7178 - DNA, 808 bp, Homo sapiens
  misc_feature (1)...(808): n = A,T,C or G
atgaagggcactgtgcaacaatgagagtagctgaagactggcaatgttaactaatgcaagtctcagaaagaggaagatgatatttgcaaactccaggtggggttcgatggcaagcataattccagaaaataactttttttttttgagacagggtcttgctctgttgcccaggctggagttcagtgttgcaatcttggtgatggcgtgggtggcccttctggagtggctgctatcatgacactggctgcagtgggggaggcgtggccagggctgcgagctctacagggctgggaggagccgggaactgtggaagccctgcccacttccaagttggcagggcgggagcttgtgctcantgggtgcagctgcagctcsccaggcacagctccagacctggacatccctgtgctcttgggggccagaatcaggcaggagccctgccctctcaggcacagctgcagccatccagccatggctgtggacccgggcatctcttgggggccagggaagcctccctgcccctgcaggctcagaagtacctgctcctgttgcctggtctctccccactcccggtgccgactctgattttggagcaaagttgaggccaagcccaggccctcttgcaacccagccaggtgtatgcatgctcagagcagcactgacatgccagacccctgccgccttggctcccctccaggctttgggcactgacgagcacaggagggaggctgagggagcactgagggtggctcagcatgggcctgcaggagcccctcaacacaaatagcttgggcagtggcaggaggca

SEQ ID NO: 7179 - DNA, 805 bp, Homo sapiens
gtttttattgttaacctgcactttaaatggcctttgctagaaatgcaggaattgcccccagagtgttatcaatataaaagcatcatagtgtttaccactgcaggaaatctttttgttcatgtctgtttccagctctcattttgcagctgcttggccaatttgaaatgttttgttcagagatgattagggtaagactgtgtatgcctttttttctcaggagaaatcatcaaacaccactaaagacaaattctcctgaataagaaatccttattaagtcatttttactatatttcagtcctgtttgtgcagcttagtaatcacacaagagaggaagagcagagacagttgagagtaaaacaagagaacaatatattcacgctacataaagaagtgaggtgggaatatggagaaagaggagcagatgagaatcaaagaaaagaaaaatcaggtgattgaagtagacacattgaatgaggacagacaaatgaatacgaagccctcttctttaacctttttawggattgatgatttttgagaaaggggcatgttttagcattcatattctgataaatacattcgcatgatgtgatgaaaacacacttctgaaattcttttaaaagttctttacgttcagatttttacaagaacagcttagttttataaaagttattttaaagaaaagaataagaaaccaatattacattttgaattaatgaccttggtcttaatttgaagtttggccaagcacaggggatgcctgatctcataaaattcattctgttcatagtttattgagagttcaaaa

SEQ ID NO: 7180 - DNA, 1503 bp, Homo sapiens
ccgtgttagccaggatggtctccatctgctgacgtcgtgatccacccgtctcggcctcccaaagtgctgggattacgaggcgtgagccaccgccgtccagccctgcctttcacttctaatgctacttacagagacaggaggcagccagggtccccagtgaaaccctgccttcaaccctaaatagaaccgctgaaggctgaaaaaccagactgttggtcctggatgaagcctgccttttcctgactgattctttctgaataatgcctacctgtgtactgggaggatggagkgcggcctcaggaacttcatgccatttgcagaggggaagatcctggcctctcctcttcctgtgtggtgacctgggattcaatctgtgagtcgggaagcctggtagcaggactctttcatcttgctgaaaggtgtttttttgtttgtttgtttgttttttgtttgtttgttttgttttcccttttctcttttccccgaataactttcattttcctcacccttctatgtgtctacgagcctaatccttcctggttgtgtgacaagagctcagttttagcggaactaaggagaaagttctgtaacactaccttccactgtgctcccactgcctatgttgattcaaatctaagtggatcccaatattgaccacctgcaccatgaatccagcaatcagaagctgtgatcaaatttatagttgtcccttcaaaccgatattgctgggaaagtttatcttgtttccacaaaatattttttatgatccttaaggtcatatcactgtactagaatatttgctcgtgaaaaattcatgatgcccaaggaaatctgcctgtaagaagcagagctacattaagaacataaaagtatgaaaaaagtctgctctggtccggaaaaaaaatgagtttttcttcccacaagaaagaagtttgaattctgaatactgaaaaactctagcaaggtaggaactgtgaaaagtcttaaaaccttacactaattttagacttcttgcatatgtttattttgcttgctgagtgtttattaggtaaattaaattacttgggtgttaggtaaatctgaatttacctaattcagattaggtaagtgctggtgttaattaggtaaatctgaatggcagaaaaacttgatgtgtctattgtccctcaaaatgttatcattcctttgcaaaggaaagtccaatcacccgtgagagtgacccagaacagaagatctaatgtttacctaaatgcctaaatggaactgcctaagagaataggtgataggggcaacaacaggatttcctttaaacttctgggagtttaagtttaaacaagcccgtaggagagaaaaatatccagaaagaaagacaagcttcgagagaactttactcaatccattaaaatcctcccgttgggatagctgctaagatgtgctagaattttatcaactcagatccatatctcttttgcatagaatcactgctgctagctcacctcagcc

SEQ ID NO: 7181 - DNA, 1503 bp, Homo sapiens
ccgtgttagccaggatggtctccatctgctgacgtcgtgatccacccgtctcggcctcccaaagtgctgggattacgaggcgtgagccaccgccgtccagccctgcctttcacttctaatgctacttacagagacaggaggcagccagggtccccagtgaaaccctgccttcaaccctaaatagaaccgctgaaggctgaaaaaccagactgttggtcctggatgaagcctgccttttcctgactgattctttctgaataatgcctacctgtgtactgggaggatggagggcggcctcaggaacttcatgccatttgcagaggggaagatcctggcctctcctcttcctgtgtggtgacctgggattcaatctgtgagtcgggaarcctggtagcaggactctttcatcttgctgaaaggtgtttttttgtttgtttgtttgttttttgtttgtttgttttgttttcccttttctcttttccccgaataactttcattttcctcacccttctatgtgtctacgagcctaatccttcctggttgtgtgacaagagctcagttttagcggaactaaggagaaagttctgtaacactaccttccactgtgctcccactgcctatgttgattcaaatctaagtggatcccaatattgaccacctgcaccatgaatccagcaatcagaagctgtgatcaaatttatagttgtcccttcaaaccgatattgctgggaaagtttatcttgtttccacaaaatattttttatgatccttaaggtcatatcactgtactagaatatttgctcgtgaaaaattcatgatgcccaaggaaatctgcctgtaagaagcagagctacattaagaacataaaagtatgaaaaaagtctgctctggtccggaaaaaaaatgagtttttcttcccacaagaaagaagtttgaattctgaatactgaaaaactctagcaaggtaggaactgtgaaaagtcttaaaaccttacactaattttagacttcttgcatatgtttattttgcttgctgagtgtttattaggtaaattaaattacttgggtgttaggtaaatctgaatttacctaattcagattaggtaagtgctggtgttaattaggtaaatctgaatggcagaaaaacttgatgtgtctattgtccctcaaaatgttatcattcctttgcaaaggaaagtccaatcacccgtgagagtgacccagaacagaagatctaatgtttacctaaatgcctaaatggaactgcctaagagaataggtgataggggcaacaacaggatttcctttaaacttctgggagtttaagtttaaacaagcccgtaggagagaaaaatatccagaaagaaagacaagcttcgagagaactttactcaatccattaaaatcctcccgttgggatagctgctaagatgtgctagaattttatcaactcagatccatatctcttttgcatagaatcactgctgctagctcacctcagcc

SEQ ID NO: 7182 - DNA, 638 bp, Homo sapiens
taaaaaaatcctrtaaaaaatgtttctggaccaaacaagtagtgaatttacccaatttacttctcctctctgagcctcagtttatcatctgtgaaaattaagtattgaaatatttgacctcctcctaagctcctaccaggtctgacattctttgactctgtgacttcataaattaaatttgtttttccaccaatttatatgatttctttctatctgttttcattgtttgtatatgtatgtatgctaaatgtatcttcaatggcctggggcattcagtgtatattccacatcctcaaacagagtcaacctcaaatatagttataacaagtaatttgcaatctgatataatcatttaataatttaaacaggtatcctcacagtccccacagcaccttcccccagtaaataaatacgtaaaatcttcacggccctgaggcctgaaattatgctattccttggccaaagagtaggagaaagaaagaaaaaaaattttgattatctactatgtgctagatacttttacacagattaactcatttattcttcccaaaaatcctgtgaattaggtattattattcccattaagatatcggcttgtgatggatttgtacactgtcaaccaagctaagctggaacta

SEQ ID NO: 7183 - DNA, 678 bp, Homo sapiens
ggagagaaatccacaggtctgggattcccaccatcaaagaaaatgatcttctaatcacrtcttccctcagagggctaggatgcagtctagaagcatctacggagcccctccctgaagcagtttgtttctactctaggcgtcctgagggcagggactgggcttcgttgtctttgtccccaaaggcaagcctccactgttgttaaatgtttgtggaaggagcctgaatttgggtaaggagcagaattacaaagggacctaaagactttgtcccggaggtgtgcttaatagatatggatgataattgggaaaaggaaaacagattactaacagctagccctaagaaaaccgaaatacttcatttaaaatggaaggaaagagatggggagagggagatgtctcagagaaaataagaaacgttttttttttgtttttgtttttaacttaagctatgatttcaggagaaagaggtcctggaacgccaggaaccagggaggacttccacctggaagcaatgtggtagaaggagacccactgagggcctgcatatgcccagcaaatggccaggtgcctttgtttgtttgtttgtttgttttttgagacagggtctccctctgttacccaggctagaatgcagtggcatgatcttggcttactgcagcctcaacctgcaggctcaag

SEQ ID NO: 7184 - DNA, 678 bp, Homo sapiens
ggagagaaatccacaggtctgggattcccaccatcaaagaaaatgatcttctaatcacatcttccctcagagggctrggatgcagtctagaagcatctacggagcccctccctgaagcagtttgtttctactctaggcgtcctgagggcagggactgggcttcgttgtctttgtccccaaaggcaagcctccactgttgttaaatgtttgtggaaggagcctgaatttgggtaaggagcagaattacaaagggacctaaagactttgtcccggaggtgtgcttaatagatatggatgataattgggaaaaggaaaacagattactaacagctagccctaagaaaaccgaaatacttcatttaaaatggaaggaaagagatggggagagggagatgtctcagagaaaataagaaacgttttttttttgtttttgtttttaacttaagctatgatttcaggagaaagaggtcctggaacgccaggaaccagggaggacttccacctggaagcaatgtggtagaaggagacccactgagggcctgcatatgcccagcaaatggccaggtgcctttgtttgtttgtttgtttgttttttgagacagggtctccctctgttacccaggctagaatgcagtggcatgatcttggcttactgcagcctcaacctgcaggctcaag

SEQ ID NO: 7185 - DNA, 678 bp, Homo sapiens
ggagagaaatccacaggtctgggattcccaccatcaaagaaaatgatcttctaatcacatcttccctcagagggctaggatgcagtctagaagcatctacggagcccctccctgaagcagtttgtttctactctaggcgtcctgagggcagggactgggcttcgttgtctttgtccycaaaggcaagcctccactgttgttaaatgtttgtggaaggagcctgaatttgggtaaggagcagaattacaaagggacctaaagactttgtcccggaggtgtgcttaatagatatggatgataattgggaaaaggaaaacagattactaacagctagccctaagaaaaccgaaatacttcatttaaaatggaaggaaagagatggggagagggagatgtctcagagaaaataagaaacgttttttttttgtttttgtttttaacttaagctatgatttcaggagaaagaggtcctggaacgccaggaaccagggaggacttccacctggaagcaatgtggtagaaggagacccactgagggcctgcatatgcccagcaaatggccaggtgcctttgtttgtttgtttgtttgttttttgagacagggtctccctctgttacccaggctagaatgcagtggcatgatcttggcttactgcagcctcaacctgcaggctcaag

SEQ ID NO: 7186 - DNA, 725 bp, Homo sapiens
atcctgcaggcccaggtgcctcctgtgttcctccaacagcagcagcagtaccagtacctgcagcaatctcaggagcacccccctcccccacatccagctgctctcggccatggccccctgagctccctcagtccacctgctgtggaggggccagtgagtgcccaggcctcctcagccacctcgggcagtgcccacctggcccagatggaggccgtgctgagggagaatgccaggctgcagagagacaatgagcggctgcagagggagctggagagctctgcggagaaggctggccgcattgagaaggtaggccctgctggggcttcagaagggcagaccagaaagagaccccgaggggctacctggggagtgggtagtccaaggagaggcagaggagcctgaaaactgtttggctggatttctccctatccctctgtyttccacctccctcactcctcatgcaccctcctgagctgactccagacagctggggaacagccgagaggccggcagagcaggcctggagcatgaacagttgctggccagtggtgattagaaagagcccattcaccagctccttgcacactcgcacccttgccctgcacacaccccctcccatggacacctcccacagagagcccttgtgtgtcccccacacaacagcaagtctgttccaggccagccctggccaaaaagaaaacttctcctcttggaaaaaaaatggg

SEQ ID NO: 7187 - DNA, 620 bp, Homo sapiens
atctttttaaatttggcaacaaacaatacaattttggagaagagaatctttatgctttgatttctgtaaatctggagacagatcttgcatttgtataaagatattaccattaatgttaaatgactgaagttgttttacttcagagatagaatcataatattttagaatttgaaagtttagagataatccaaactgcttttcttatacataaaagtgttagggcctaaatgggttcrgtgacttttccacagtgtttctccatctggccctgaccacatgtccagcctcatgtcatcatccctcccctgccccctgcccccttcccctggcccccaatattctcctttccacacaacaagccccagcctcattaacatttcccagaatgcactttcacaactctgttgaccctgcctgtggtagcctttctccctgtgccttcctcccatctcagctcattaaacagcttcacgaacatcctttgagctccagttccactgttacatgtctcctcggtgaagccttcctctactccaccagcccaaactagctgcatccccctctgtgctcctagagctctgtgttcatacatctgtttcacacttatcagagcaagggct

SEQ ID NO: 7188 - DNA, 785 bp, Homo sapiens
agatataagggataggttggtttcattggaatcaggttcacactaagaagatcaccagccgttaattactttccccacattattccctgattagagagagctctgtgcttctgagtatatgcctccaggatgttgctgtttataatgctgtggtgtgccaaaatttgcatgagttagaatgcttttggctgcaaataacagacagatataggcatttaaaaaaaatcttactcatcaagaagtttggtggtgggttcaattcttaccaacccacaaggctcaagtttttgcagatggttaacctatattttccagggacactcatagagagacacagaaaaaatactctaacactaaagttctgttctatgccacagataaaattgtgtgttaagaaatagttgataattcatggatgaaccccattggcacctcactcaaacatttctttccaccaygggtctgagaagaaaagccacgttaagaaatgacattccatccaatctaaggagggaggattcatgagcttgtgtgatgcagcaggcatcatctgagatttctggctggaatggcagtgggatggcaactgtataagtaaggatgtagtaacatgctgtgttgggtggttcaaggccctgatatctggagcagtagctggtacatggtgtcagacccctcctggagaggagtcctgggggcagtgtcagaaggtgctctggcagacagattagcacctgtatttacataattaattacaccatgtataaagtaaattctgtacatgg

SEQ ID NO: 7189 - DNA, 793 bp, Homo sapiens
tactggaaattataggcagggcagaatgtccttctgagacagaatttctttgcagacattataaactgcaccaatatgcatcctcaaacataatttatatgtaattatgtaataaatgagttgagttgtagttgactagttgacatattattcttttttatatatgtaattaaatatatttaattgtagctgttagttcctctagtcagaggacaggtgcatagcttagagtagaaggaactagctctgtatttttgtagtgcagaggcctagacttggcaacttcacacttcatctcagaagcagcaagtggcggagtcccctttcctaccggggtggatgtatgctccactggggagtgaggattctggtcttcgttcccagcagacagcttyggtttaccacctaaagtggtaatggcttaggctagtaagagggattatgctcttagtttttctaccctgagatttaaaaagctaaagtcaaagaaaaaagaaggcagctgcccaaagtcatccaagtgaaaatgatgatgaagaggaggagcaaaaatgccatttttaccaactttgctaatgtgaggaaactgatgtgcaaatactattcctaatcctcataaccaacctatgaagtacatgttatcactcttctatggttgagaaaactgagtctcagaaaaattgattgatttgatcctagtcacacagacaaagtttctagtggttgagatcagacttgaactcatatctatttaattccaaagtcttcaggcctcccattttggaatattttt

SEQ ID NO: 7190 - DNA, 793 bp, Homo sapiens
tactggaaattataggcagggcagaatgtccttctgagacagaatttctttgcagacattataaactgcaccaatatgcatcctcaaacataatttatatgtaattatgtaataaatgagttgagttgtagttgactagttgacatattattcttttttatatatgtaattaaatatatttaattgtagctgttagttcctctagtcagaggacaggtgcatagcttagagtagaaggaactagctctgtatttttgtagtgcagaggcctagacttggcaacttcacacttcatctcagaagcagcaagtggcggagtcccctttcctaccggggtggatgtatgctccactggggagtgaggattctggtcttcgttcccagcagacagcttcggtttaccacctaaagtggtaatggcttaggctagtaagagggattatgctcttagtttttctaccctgagatttaaaaagctaaagtcaaagaaaaaagaargcagctgcccaaagtcatccaagtgaaaatgatgatgaagaggaggagcaaaaatgccatttttaccaactttgctaatgtgaggaaactgatgtgcaaatactattcctaatcctcataaccaacctatgaagtacatgttatcactcttctatggttgagaaaactgagtctcagaaaaattgattgatttgatcctagtcacacagacaaagtttctagtggttgagatcagacttgaactcatatctatttaattccaaagtcttcaggcctcccattttggaatattttt

SEQ ID NO: 7191 - DNA, 793 bp, Homo sapiens
tactggaaattataggcagggcagaatgtccttctgagacagaatttctttgcagacattataaactgcaccaatatgcatcctcaaacataatttatatgtaattatgtaataaatgagttgagttgtagttgactagttgacatattattcttttttatatatgtaattaaatatatttaattgtagctgttagttcctctagtcagaggacaggtgcatagcttagagtagaaggaactagctctgtatttttgtagtgcagaggcctagacttggcaacttcacacttcatctcagaagcagcaagtggcggagtcccctttcctaccggggtggatgtatgctccactggggagtgaggattctggtcttcgttcccagcagacagcttcggtttaccacctaaagtggtaatggcttaggctagtaagagggattatgctcttagtttttctaccctgagatttaaaaagctaaagtcaaagaaaaaagaaggcagctgcccaaagtcatccaagtgaaaatgatgatgaagaggaggagcaaaaatrccatttttaccaactttgctaatgtgaggaaactgatgtgcaaatactattcctaatcctcataaccaacctatgaagtacatgttatcactcttctatggttgagaaaactgagtctcagaaaaattgattgatttgatcctagtcacacagacaaagtttctagtggttgagatcagacttgaactcatatctatttaattccaaagtcttcaggcctcccattttggaatattttt

SEQ ID NO: 7192 - DNA, 616 bp, Homo sapiens
ctccaaccccatgtgccatggcctccaaattgaagattgggctgctccaactcctacttaacgtctttccagcatggaccgctccatttctgagccagggaaggctatgtttgtaaacacacttttgccctctaactgcctctatctttccctgtctgatcaggccaagctatggccacagttgtgtataattagctaacttcactcactgtctcctatgtttatgcttccctgcccaattccaagtgacaaatagctatccaaagccatgggcttgaccccagatgacctcatgcttgaktgccttcatcccagtgcatgggtcagcactcagagactgccatagcccttgctcagctggtaattgatttccatgtgaattcatgggccagttggtggaactgaggcattgggtgcattgattaataacataggcatgggggaagcctatggtagccaccattttggagcatgtccatcagaatattcatttcaaataaagtcttgtatttaagcaaccttgtctacccagtgccaggaaggtgtaatgacctctgtaaaggattcctaccccaaggctcccagacttccgacaacaggaattcaatgagtaatt

SEQ ID NO: 7193 - DNA, 662 bp, Homo sapiens
ctcaagtctcacaggataatgtatttacaaattatgcatgaatgtcaccaggagtcatagatatctgtattcctaagggatggtgggtgggtaatggttaagccacactattgaaccattagtgatatttgaaagcactctggcctctggttgaaggagccatgtttctttaagagaacaaaagaaccccgagtgattcccaattgcgcaggacagaggacagagtttgcaagcaggcagcctccaagctgaatccggtccacagctgtattttgtttggctgcagacagctgaaaatctttttaatagttgccaaagtttaacaataagattttaatttcacatacaattttggatttctgctttctcttgaaaaactgaagatctggactcacygagcttgtgttccctcacagtaaaagaagctgaaactgaagaggggtcgctacccttacctgagacaaggcctgtgtctgttgtctcccccaaatgatactgtgtgtctgttgcaatttatcactgtcattgagctcttgttttatttattcctgttctgcttcatgcatgttttgctgagctattccaattctttgaatcaggaaaatgagttttcattagtcaaatggggataccaaaaccaacctaaaaggattgttgtgatg

SEQ ID NO: 7194 - DNA, 662 bp, Homo sapiens
ctcaagtctcacaggataatgtatttacaaattatgcatgaatgtcaccaggagtcatagatatctgtattcctaagggatggtgggtgggtaatggttaagccacactattgaaccattagtgatatttgaaagcactctggcctctggttgaaggagccatgtttctttaagagaacaaaagaaccccgagtgattcccaattgcgcaggacagaggacagagtttgcaagcaggcagcctccaagctgaatccggtccacagctgtattttgtttggctgcagacagctgaaaatctttttaatagttgccaaagtttaacaataagattttaatttcacatacaattttggatttctgctttctcttgaaaaactgaagatctggactcactgagcttgtgttccctcacagtaaaagaagctgaaactgaagaggggtcgctacccttacctgagacaaggcctgtgtctgttgtctcccccaaatgatactgtgtgtctgttgcaatttatcactgtcattgagctcttgttttatttattcctrttctgcttcatgcatgttttgctgagctattccaattctttgaatcaggaaaatgagttttcattagtcaaatggggataccaaaaccaacctaaaaggattgttgtgatg

SEQ ID NO: 7195 - DNA, 798 bp, Homo sapiens
gttggaggaaataagattattcagtcaaatttatataacaaaagggctaatttattactcttctttaaaatttgaacgttacttaaaatttttttaagtaagtaaaattcaagtagtaattcctttaatttcattttactatctgttcttcatttttgctctatttctttcctttactatcatacttattttagtatttctatgtgtcttcactcattcacatcagatttccctctcatgatacacctttatagaaacattcctttttcttgtttttgtttttgttttattttgtttttggagacaaggtcttgctctgttgcccaggctggagtgcagtggtgccagtggtgtgatcatggctcattgcagcctcgacctcctgagctcaaatgattctcccatctcagcctccaaagtagctgggactacagacacacgccaccacacccagctatttatttatttatgtatacatacaaacatacacacatacatgcatacatgcatrcatacatacatacatacatacatacatacatacatacatacatacatttcatagggagggagtttctttatgttgcctaggctggtctcagtattcctggactcaagtgatcctcctgccttggcctcccaaaatgctgggattacaggtgtgagacactccagccagccagaaacattttttcatatctatgtcttctcaaattttctgtcactacacttttctttatgtaatatcttaaaataatgtttttttcaaaagattcctgaaaaagtctttctcatttt

SEQ ID NO: 7196 - DNA, 542 bp, Homo sapiens
agaaaactcctcctccttccttaagatccagaaaactactcctcctcctccttccttaagatccaggttgcatgcatctttctgccttcagggaaagtccatcaatccctccaacatactcttatggccctttcagcattggttatcgtctctccttgagcaagtcctttaccttacccatccttagctgtaaaatggtattaataacagtacctacttcatagagccttgtgaggagtattaagttaataacatagaaagggcttaaaaccgagtgtggcattgtcataagcacctaacaaatatcagctacgattgctcttacataatctcaaatatagtatttgtgccataatcactattcacatatttgccccacccctcagacgataagattctygatggcagggagtatgcctgtttgctttgcatcctctctgctggacgtactacttgtccttctagtaggtacccaataaaagtttgctgtagtgatgaatgcatgcatgcaaaatgtttctagtgctgcctgggttaatgag

SEQ ID NO: 7197 - DNA, 788 bp, Homo sapiens
ggtgaagatagagcagagcacaggtgtgggtgttgtttccaaacaaagataaatcacttcccagtggacactcaatagaagatgaaactttttggtaaacctaagagcctgacaagtctgtttttattttcttttaccttgaagagaagtagctatacttatgaaaagaacaggggctttggaggaaaaccaacctggaaacaagctttgttttgccatttaacaagatcagttaaactggtcaaagtgcttaacctttctaaccctcagttttcttatctgtaaaatgggaatctttcttacggaacttttatggggattaagtgagacattaggtataaaacaccaaacacaatgagtacacaatagttgctcaataactattagctccctctccatatttctttttcttttttctttttttttccgttcctatctgaaaaaacaaaccccagacaaaccatcctaaccctttccctgaggttttccttttctgtcactagcatactgacctgcagggataggactcttctttagggctcyggccctaaaataatccttttctttcagctccctctgagagtcttttatcaaaaagactaagggactctttcaggatgggaaggacataaagaggatcagaaacatataaatagttggctcacaaagcaagttatttaacttgggacttgaaccccagctgtttcgtcctcaaacctgtgcttactactctacatctacccacagagacaggagattatttggggccagcaacatggcactgggaa

SEQ ID NO: 7198 - DNA, 535 bp, Homo sapiens
aacacccagttccaaattaaactaaatgaaacttcagatcagccaatcctaaatggccaactgagmgttagttacacaatcagatacttgccactgggataacctaaataagacaactgctcaaactttaaccaaccaacttctctcctgtgcctcctcacacaccctctaaaagcctcccttcacaccctctttcgggagcccgaaccacttcagttttggtgcggcttgattcacgaatggctgtttgctcaaataaactttaatgtgttttatcctttaacattagtaataaagatattcagaaaacttgctacagatccttaaagcttgtttccaaataggcatttagtccatgtttcagcacagttaacgtcaatgggaaagaatgcatggcatagcgacatttgcatttacaagctcaggtactttccttcaaacacaaaactgcccacccagaatttgataccattttaagcagaactatgactagtattccatggtgttcaagaaatcaacaaaaccccagagggta

SEQ ID NO: 7199 - DNA, 771 bp, Homo sapiens
actaggtgaagccagctgggctcctgagtctggtggggacatggagagtctttatatctagctcagggattrcaaatacaccaatcagcaccctgtgtttagctcaaggtttgtgaatgcaccagtcgacactctgtatctagctgctctggtggggccttggagaacctgtgtgtcgaaactctgtatctaactaatatgatgggaacatggagaacctttgtatctagctcagggattgtaaacgcaccaatcagcgccctgacaaaacaggccactcggctctaccaatcagcaggatgtgggtggggccagataagagaataaaagcaggctgcctgagccagcattggcaacccgctcaggtccccttccacgctgtggaagctttgttcttttgctctttgcaataaatcttgctactgctcactctttgggtccacgctgcttttatgagctgtaacactcaccgcgaaggtctgcagcttcactcccgagccagcgagaccacgaacccaccagaaggaagaaactccgaacacatctgaacatcagaagggacagactccagacgcgccaccttattagctgtaacactcaccgcgagggtccgcggcttcattcttgaagtcagtgagaccaagaacccaccaattccggacacaaagccacagactctggcaaattatccaggggcaccaaggctccaaatggcacattgctgaccagtgtaaacatttatcttttaagctatcgattctaccccaagcc

SEQ ID NO: 7200 - DNA, 771 bp, Homo sapiens
actaggtgaagccagctgggctcctgagtctggtggggacatggagagtctttatatctagctcagggattayaaatacaccaatcagcaccctgtgtttagctcaaggtttgtgaatgcaccagtcgacactctgtatctagctgctctggtggggccttggagaacctgtgtgtcgaaactctgtatctaactaatatgatgggaacatggagaacctttgtatctagctcagggattgtaaacgcaccaatcagcgccctgacaaaacaggccactcggctctaccaatcagcaggatgtgggtggggccagataagagaataaaagcaggctgcctgagccagcattggcaacccgctcaggtccccttccacgctgtggaagctttgttcttttgctctttgcaataaatcttgctactgctcactctttgggtccacgctgcttttatgagctgtaacactcaccgcgaaggtctgcagcttcactcccgagccagcgagaccacgaacccaccagaaggaagaaactccgaacacatctgaacatcagaagggacagactccagacgcgccaccttattagctgtaacactcaccgcgagggtccgcggcttcattcttgaagtcagtgagaccaagaacccaccaattccggacacaaagccacagactctggcaaattatccaggggcaccaaggctccaaatggcacattgctgaccagtgtaaacatttatcttttaagctatcgattctaccccaagcc

SEQ ID NO: 7201 - DNA, 737 bp, Homo sapiens
gaggacagccccaggaagcgggtgctagaatgatcctcactgtgcaggggcaaacctggggagaccctgagaggcaaagkgggttatccagggtcacataagtggtaaggagaagctgggtctaaacccaggtctgtccctcaaagctgggaccctggctatacccaggccttccacagcagctgtagagaggtgatcttcttgtaattacgcacagatatggcgatgtcccagggtaggagatgagaagtcagccaagaggagcacttggggtcttatcacaggaggggccaggtaaggtaaactcaggaaatgacctcacttccttggcaataggtcccaatagaacttggaatccttgtaatcaggcacccataatttagaaacagctccctccccagctcacttggccaagatgctcaagaaaacatcctgctgtagcctgacttatccaggctgtagcctcaggaaaccctggcatgagagccttttctgatgctacagatgtgggttcagccctcaccacaagccattttccaggagacccccaaaggaaacacaggcagccagggcaggccagtccaggataggccatcactgtgagcatgcctgggcagcccacacccctctgcctgagggcaggggaaaggggttgtaaggggaggtctgctcttggcaggaacaggtgggtgggaggtgtcatcctcgaggtcatgtcatgctaacacccaggatcc

SEQ ID NO: 7202 - DNA, 550 bp, Homo sapiens
gttctctggcctttctcaagatctgagccttctcattaggaatacaaaaatggttcagaactactgcaacattgtggcaagtcaaggaaaaggttacacccaacttaaataaattcaattctaaacatatctggattttccaacaaccagctacactactccttgcattgacttatcattgaaagggggtacccccaagccatctctccaattccatccattagttctcagagggcaaagcagccctgggctggtggggaagtaaaggagagtgccagcttggaacccaaatgcgaccccattggagatagcaccaggggttgtttgagagtgaaaagggaacacttccctgacccagcttgatatggaagaggctcagggctggaggaatgagagcccaccatggcaaaggaagtgctgttcctgcccgcccctggagaggcatcacgaagataggatctagagggtcaatgtcyaaggcagacattgactcctctttcaattgttgtttaagagatgccacacaggctctgtaaatgtctcagagctg

SEQ ID NO: 7203 - DNA, 436 bp, Homo sapiens
ggcctccttcaggtctctggttgtcatgccccaccccccaccccccaccccaccgaagscttcctagatgcacttgcttttgccttgctacttggatgtgaagatgaaggctggggctctcacactagtccacccttgccttagagcccagattccatggctcttcgtgattcctctgtcaacatgagccatgaggagatcccatctcttactgaggataccaagtgttcaccctggagctggggaaataaccagtaagtggactcaggattgagcgtacagaggggctaaaagatctcaccaagtcaccacacccccacttgactccatttcaactaggggaccatggggatgtgtgagcccagagccagtgcccaagagtccacattgcaggtacttccccttcctctgtgcgcagtaaagctatgaacagcat

SEQ ID NO: 7204 - DNA, 436 bp, Homo sapiens
ggcctccttcaggtctctggttgtcatgccccaccccccaccccccaccccaccgaagccttcctagatgcacttgcttttgccttgctacttggatgtgaagatgaaggctggggctctcacactagtccacccttgccttagagcccagattccatggctsttcgtgattcctctgtcaacatgagccatgaggagatcccatctcttactgaggataccaagtgttcaccctggagctggggaaataaccagtaagtggactcaggattgagcgtacagaggggctaaaagatctcaccaagtcaccacacccccacttgactccatttcaactaggggaccatggggatgtgtgagcccagagccagtgcccaagagtccacattgcaggtacttccccttcctctgtgcgcagtaaagctatgaacagcat

SEQ ID NO: 7205 - DNA, 753 bp, Homo sapiens
tacagcactttttatttcttttcaacctgtattacaatttttcttcatgctcctcaatccttcactttatttttgtaatgagtttgtttcttacctttcatcgcaacgttaccacttttgtttcatctcatcctattgagaggtgacagcgtgctggcagccctcgcagcccttgctcactctcggtgcctccttggccttggcgtccactctggccacgcttgaggagcccttcagcctgctgctgccctgtgggagcccctctctgggctggccgagactggagccggctccctctgcttgcagggaggtgtggagggagaggcgcrggtgggaacccaggctgcgcatggcgctcacgggccagcatgaattccaggtgggtgtgggctcagcgggccacacactcagagtggccagccagctggtgccgccggccccaggcagtgaggggcttagcacctgggccagcagcggcagagggtgccccggtcccccagcagtgccagcccgctggcgctgcacttgaattctcgctgggccacagctgccccaccatggggcagggctcgggacctgcagcccaccatgccccagcctccgccccgccgtgggctcctgaacagccggaggctccccaacgagtgccgccccctgcttcatggtgcccaggcctgtcgaccacccaagggctgaggagtgcaggctcacggcgcgggactggtgggcagctccacctgcagccccggagcg

SEQ ID NO: 7206 - DNA, 753 bp, Homo sapiens
tacagcactttttatttcttttcaacctgtattacaatttttcttcatgctcctcaatccttcactttatttttgtaatgagtttgtttcttacctttcatcgcaacgttaccacttttgtttcatctcatcctattgagaggtgacagcgtgctggcagccctcgcagcccttgctcactctcggtgcctccttggccttggcgtccactctggccacgcttgaggagcccttcagcctgctgctgccctgtgggagcccctctctgggctggccgagactggagccggctccctctgcttgcagggaggtgtggagggagaggcgcaggtgggaacccaggctgcgcatggcgctcacrggccagcatgaattccaggtgggtgtgggctcagcgggccacacactcagagtggccagccagctggtgccgccggccccaggcagtgaggggcttagcacctgggccagcagcggcagagggtgccccggtcccccagcagtgccagcccgctggcgctgcacttgaattctcgctgggccacagctgccccaccatggggcagggctcgggacctgcagcccaccatgccccagcctccgccccgccgtgggctcctgaacagccggaggctccccaacgagtgccgccccctgcttcatggtgcccaggcctgtcgaccacccaagggctgaggagtgcaggctcacggcgcgggactggtgggcagctccacctgcagccccggagcg

SEQ ID NO: 7207 - DNA, 753 bp, Homo sapiens
tacagcactttttatttcttttcaacctgtattacaatttttcttcatgctcctcaatccttcactttatttttgtaatgagtttgtttcttacctttcatcgcaacgttaccacttttgtttcatctcatcctattgagaggtgacagcgtgctggcagccctcgcagcccttgctcactctcggtgcctccttggccttggcgtccactctggccacgcttgaggagcccttcagcctgctgctgccctgtgggagcccctctctgggctggccgagactggagccggctccctctgcttgcagggaggtgtggagggagaggcgcaggtgggaacccaggctgcgcatggcgctcacgggccagcatgaattccaggtgggtgtgggctcagcgggccacacactcagagtggccagccagctggtgccgccggccccaggcagtgaggggcttagcacctgggccagcagcggcagagggtgccccggtcccccagcagtgccagcccgctggcgctgcrcttgaattctcgctgggccacagctgccccaccatggggcagggctcgggacctgcagcccaccatgccccagcctccgccccgccgtgggctcctgaacagccggaggctccccaacgagtgccgccccctgcttcatggtgcccaggcctgtcgaccacccaagggctgaggagtgcaggctcacggcgcgggactggtgggcagctccacctgcagccccggagcg

SEQ ID NO: 7208 - DNA, 753 bp, Homo sapiens
tacagcactttttatttcttttcaacctgtattacaatttttcttcatgctcctcaatccttcactttatttttgtaatgagtttgtttcttacctttcatcgcaacgttaccacttttgtttcatctcatcctattgagaggtgacagcgtgctggcagccctcgcagcccttgctcactctcggtgcctccttggccttggcgtccactctggccacgcttgaggagcccttcagcctgctgctgccctgtgggagcccctctctgggctggccgagactggagccggctccctctgcttgcagggaggtgtggagggagaggcgcaggtgggaacccaggctgcgcatggcgctcacgggccagcatgaattccaggtgggtgtgggctcagcgggccacacactcagagtggccagccagctggtgccgccggccccaggcagtgaggggcttagcacctgggccagcagcggcagagggtgccccggtcccccagcagtgccagcccgctggcgctgcacttgaattctcgctgggccacagctgccccaccatggggcagggctcgggacctgcagcccaccatgccccagcctccrccccgccgtgggctcctgaacagccggaggctccccaacgagtgccgccccctgcttcatggtgcccaggcctgtcgaccacccaagggctgaggagtgcaggctcacggcgcgggactggtgggcagctccacctgcagccccggagcg

SEQ ID NO: 7209 - DNA, 824 bp, Homo sapiens
cttgagcccaggagtttgagaccagcctgagtaacatggtgagactctgtctatacaaaaattaaaataaaaaaaattagccaggtgtggtgatgcatgcctgtagtctcagctacttggtaggctgaggtaggaggatcacttgagcctgggaggttgaggctgcagtgagccacgatcatgccatggcactccagctgggcaacagggccagaccctatctaaaaaaaaaagtatttttatgtttaaaaatttaacacatttgttgtcacattgcatgaaggcacttacagctttcttttgggtttgatctatgtcartatataagaatataattcatcttttaaaactatagtttaatattgcattatatgaatgaatcccactttattttatcaatatctttacttttggacaagcatgtcagtttcactttttcctattataaatagcactgcaatgaatattcttgtgcctgagtccttgtgcatatggactcaagttactccagggtaggtacttaaaagggaaatttctgagttgcagtcatgtgctggagttaactcatgctgtctcatgggagcctattaaattgtcaaaattctgtaaggtggttattaaaaataaaaattattaaaaattaaattctataaacataattatgcaaattatattaagaacaaaagtaataaatacctaaaattcatcacttgctaattattttactccgatttactatgttcctattgtacatactacagttatctgtgctcttggggttacgtacatctattgtaaatctgtatggaggaaatactatgtaa

SEQ ID NO: 7210 - DNA, 818 bp, Homo sapiens
ttaaagaactcatgrcaggcagggctctcttgctcacaggcaacctgatatgctgatgcaggaaagtatgtggtgtgttgtcctggggtgaagcccaggggcttggaaagacttccagcttttaccgtttgtccttttaaaggcaattagaagacagaaaggctgcttaggaaactataagctcatgagctgattttaaaacatccaaggacaagctaccatgtctgaaagtaattcaacacctttggttagcgaattcttcttgtagtggtaatgctagggacaatgacacttagtggtttttttgtttattttagcatgtaaaaatttaaggtgccatcttggattataccttgagtatgtgtgaaactgagaaagtgcagttgcgtctcttgcaccagatctagtctcactatgacagcgacaaagacctccagcagtaagatattgtctgcagtctcttagtaatgacacttgctttgggaaagttctagggagccataattacaatgcacctgcggaagaaaacatgatttactgttttgttcactaacttgaaaatcttgagaaagtgcgaatttcccatgagttggctcagtctggcctctgcttttgtggattcctgacattggtatgttgtaacacacctgtttgatcaaaattggtgttgcagttatgttttggagggtaaaagaaggtaggagaagcattttgctttagcaaattgtgaaatacaaattcctgtatggaaggtgagtacatgattattgtgcaagtcgggatgcttttggaagtgaaagagggcactttgcctcatt

SEQ ID NO: 7211 - DNA, 818 bp, Homo sapiens
ttaaagaactcatggyaggcagggctctcttgctcacaggcaacctgatatgctgatgcaggaaagtatgtggtgtgttgtcctggggtgaagcccaggggcttggaaagacttccagcttttaccgtttgtccttttaaaggcaattagaagacagaaaggctgcttaggaaactataagctcatgagctgattttaaaacatccaaggacaagctaccatgtctgaaagtaattcaacacctttggttagcgaattcttcttgtagtggtaatgctagggacaatgacacttagtggtttttttgtttattttagcatgtaaaaatttaaggtgccatcttggattataccttgagtatgtgtgaaactgagaaagtgcagttgcgtctcttgcaccagatctagtctcactatgacagcgacaaagacctccagcagtaagatattgtctgcagtctcttagtaatgacacttgctttgggaaagttctagggagccataattacaatgcacctgcggaagaaaacatgatttactgttttgttcactaacttgaaaatcttgagaaagtgcgaatttcccatgagttggctcagtctggcctctgcttttgtggattcctgacattggtatgttgtaacacacctgtttgatcaaaattggtgttgcagttatgttttggagggtaaaagaaggtaggagaagcattttgctttagcaaattgtgaaatacaaattcctgtatggaaggtgagtacatgattattgtgcaagtcgggatgcttttggaagtgaaagagggcactttgcctcatt

SEQ ID NO: 7212 - DNA, 824 bp, Homo sapiens
ttacttccttgcctaagaaataccaatcactctgcccctcttgcctaagaagcaagatgtgatggatagcaggctgcactggctccgctaagtcagaaatcatgggtttgaaccttggtgctgcttctttccctccgtgcaaacttagagaatttactttcttttctttgaaacgcagttctccattctgtggaatggggttgatgattaatacctatccagtctatctttgtggttcattgtaagggtcagggagcagaagcgtgtgataaacagtagagcactatccaaatgttggctcttaatgaagcactgctttcactgttaactagcagaggaacactgggcaagttatgtcacctttctaagccttccttttccttatccatrggaagaggagcatatatctgcttctccaaggggctgattaaatatatagagcacctgctctacacaaatgtgaattagcttctttttaaattgggcttttcctggaattttgtaactgtttcgttatttggaattttgtttgcttttctcaacatggttgtcagggattgatctcttgctgtcttaaatgtcctcacttcagacaaaagaacaccggtaagcgccacttgagtggcacccaggcaggagtgaagatgctgactggtgccgaagctgggaggattcaggggacaggctcaggagtgacagactgcaagcctgccaagaaacagcacagggagctccttccctcacgctgctaaaaatactgctgggaaagtaatttctctggtcctattttagaaatcagagacagatccaccatattcatgttt

SEQ ID NO: 7213 - DNA, 782 bp, Homo sapiens
tccatagtctttaaatactttaatgtacagtacagtgatcaataagtgtggtaattcaatctcttcactttcagtgtacttttgtttattaaggtgatcacaaatttcaatttaattattatgtttttcatttcagctaagatgcctaagtaccacccactaagaatagaagaatttaaaacaatttcaggtttaacatggacagacaatcaataatgaattgcttccatttccctgaaaaattacctgcaacctcttctgtggacaattacttaaacaattggcattggaaagaaacagaaatgacttggtgatttgaacacaaatgttgtttrgtaatacaggagttattcagaaataattttttgtcagatagagagggtaaaaggagttcttgtttaggcttttttcttttaataaaaacaacccccaaaaccatctcttttctaacagaaaaggcggcttgaagggctgggctggcaagctttgatatgcaaatacaggccaatagaagctaggttcactcaatgtggcgattcccaccatcttctccttgtcaccacttgtgccaagtgtaatggccacctccagataacaccatgtgttcaaaacatcatggtgatctgcacttgcttattaaagggctaaggtgggagggccaggttttttgtgggctacttaaataacacacctggtcaaaacaatcccctgggccctatgcaaaccggacatgtcctcctccggcatcccaacagaagcaaccacttttctgccacgcacag

SEQ ID NO: 7214 - DNA, 782 bp, Homo sapiens
tccatagtctttaaatactttaatgtacagtacagtgatcaataagtgtggtaattcaatctcttcactttcagtgtacttttgtttattaaggtgatcacaaatttcaatttaattattatgtttttcatttcagctaagatgcctaagtaccacccactaagaatagaagaatttaaaacaatttcaggtttaacatggacagacaatcaataatgaattgcttccatttccctgaaaaattacctgcaacctcttctgtggacaattacttaaacaattggcattggaaagaaacagaaatgacttggtgatttgaacacaaatgttgtttggtaatacaggagttattcagaaataattttttgtcagatagagagggtaaaaggagttcttgtttaggcttttttcttttaataaaaacaacccccaaaaccatctcttttctaacagaaaaggcggcttgaagggctgggctggcaagctttgatatgcaaatacaggccaatagaagctaggttcactcaatgtggcgattcccaccatcttctccttgtcaccacttgtgccaagtgtaatggccacctccagataacaccatgtgttcaaaacatcatggtgatctgcacttgcttattaaagggctaaggtgggagggccaggttttttgtgggctacttaaataacacacctggtcaaaacaatcccctgggccctatgcaaacmggacatgtcctcctccggcatcccaacagaagcaaccacttttctgccacgcacag

SEQ ID NO: 7215 - DNA, 554 bp, Homo sapiens
atagtaatatattcttttattcccgataacagtgatttacgtattttttatttttctttaattatttctgctaggatttacaaattttgtcatctatttctgtttaatatcagggtaatctacagtcttagaatgtagttattattcaaaagacatttcttctggggttttaatagaaatcctgggtatttacsaagcctttataacttggcataattcaacctccaaacttttgtttccatggtgacaaacagtagctgtgatgtctgttcacctttttgcagccattgttttctacctggagcggtgaagtcgtccctgagaatgttgatttctacctgatttctttcaatgctacaacacacctactggttgttcttgagagccaaaaacctgtacagatttcacccaatgatgtttccttagtttgaggatcaaattttttccagtttttgcctacttttggagcatttagtgcttctgatttacttttttggtgatattgtttctaacatattgatatttttaaaactacaggcaaatgtgctattacc

SEQ ID NO: 7216 - DNA, 862 bp, Homo sapiens
tcttaaacacaaatttttaggcacaaattgctttatgtctcatctctcaactctactttaaaagtaaaacttcagaaactccaaaccctccttaaaaatttwtttttttgcctttaaaataaagaccaaagcatattctactccctgcctctgtctccagtttcgctttattatttgccctccccccatcccttgtactctttacattacgttttgtttcattgtttgattgttcgggtttctttttcctgttgttgtgctcttttcagccacaggacctttgtacatgctattcctttttatgtttaaactttttctatgttctcttgttttagctaactgaagaccttacttacttcctcgcttcttgtagatgaaaagtgatttaatatacatcataatgttatgtatattatgaacaatgatgatcattacagcactatattacatagtaaaaaatggaaaacataaatatgtactcatattggaataattaaagaagttatagtataacctatgttggagtatcatgcatcactttaaacatgcttttaacatttcaataaacttgtttttctaaataaattttattgtgtatgtttgagatttacatcatgatgtcatgggatacatatagacagtaaaatggttactacgatgaagcaaattaacatatctaccatcttacatatttacttttctagggacaagagcatttaaaatctgcttacttaacaaaaatccataatacaatgtaattttattaactgtagtaatcatcttgcacattagatctctagactttatcctatatacctgcctcttagtattctctgacctacatcccaccctgccccagccc

SEQ ID NO: 7217 - DNA, 819 bp, Homo sapiens
gggatccccttaatttccatggccatatgattcagaagtgtcaacaatggaataatctactatgtatatagtttgtagaaaatagttagaatgcacatattttttcatcttttttttcccaacctgcctaggtgaaaatctaacttggacatacttctttatagcaacatctctatagatacaaatgacaatttagatccaatttatcacttactcatgttaactaatgttcactccagtcagctatattgaaaatattaaaataattaaacaaatttctgggagtttgtgataatgggatttgactggttcttcctttggtattttctgtgatgtttctccttcattttattgccaaagtcagagggattgttatagtataggcctgaagcctgctttcaggatctgtgcagaaccaaccaaccaagagagccttttattttgtcccccagttgacctccttccagatatgctgagtccatttccctgaaatgactgagcggggagaggtaactgcagctgtgtttggataccttctttctctcccttggctccagcccagggaaacgcrcacactctttcacaatcacacaaaccacttcattatcatatttttgaggatgttggccaggggaaagggcagaccagtcagtaggctggaaagttagaaatgtgtgtgtttatttttccctcccctctccactgtgctattggaactggtatagaaagggaatagtcattcacagttgccccttttcaggagggtgaagttcagaggaagaaatgtttgcatagacatttgataatcataataaaaag

SEQ ID NO: 7218 - DNA, 624 bp, Homo sapiens
ctggtcctgccaacgttttaaacagctctccatgccaactcaaatgtcattgtgggttgtggggtcttttgcatctaggatttccagaggcccatggcaagtgtggctcactccatgcctgttgtaactctttccccaggagctacttggggccaggaacaagtcctggtgctcagcaaccctgtgcagggttcccagattcctctcacttcagcccagggtctgtgtcctccctctgtttgctctcagcgccttcctyttgaagatctgctcggaatgtgctggtcttcttaatggtctggtctgtcagtgacagaagctcttcctggctgagtctagtttgccatcttggctttttcagtttttaaaaagcaagaaatctaacatctaggtgtttggctactattttgcatctcttcacattccaggggtctttcctttgctcaaggcaggtgatcaggtctggcttagagatagcaacactattttctggcttctgggggtcctggcatcgtagttatgtgtctcccaatacctgcaggtcatagagtcacagaggctgtgggagagtcacctgggactccaagagcagtggacatagagcagtaaaggcaggacctggag

SEQ ID NO: 7219 - DNA, 733 bp, Homo sapiens
tcctgcctcagcctcccagggagctgggattacaggcrcatgccaccacgcctggctaatttttgtttgtttgtttgtttgtttgtagagacagagttttgccatgttgcccaggctggcctggaactcctgggttcaagcagtcttcccaccttggcctcccaaagtgttgcgattacaggcatgagccactctgccaggccaagaagtctttcttaacggacccattccaagcacttcaaccctagagtttgcatggcagtgctctgcgtttcccttcaggccagtaataggattctggatggcgcatgggctctggtattaattcctgccagcccacacctgatgccaggcacacagcaagcattgttgaaaggatgaaggcgccaacctccacctacttcaccaccttcatcttgtccaatactgtccaaactcactttggagaagaataaacattctttgctctactttccactgctcagcttcgggtaatttttcttcaaccctacccaccctacccatattatgcactttccttttgctaaccagcagaacgggttgagactttcctcaacattttctctggcaactgaattaggttaactgtgtctttctgctctgatttcctcttactgcccaataatcctgtcccaaacatcaaaggccttctttgaagagaaggccaaattcactattaggaaaagagaaattatttcctaactttatttca

SEQ ID NO: 7220 - DNA, 583 bp, Homo sapiens
acatgcttctggccatatggaatctgttacgcagaccctgtgatttcttctccatgaagattacttcactacttgcacagaacaaaataatataaactaaaaaaataatttataccatgtttacagctgagttttcctataattctgctacaattcaaactatcaacatatcgtcaggttaaattccattataataaaacagacagatatttaaattttttcacaaaggaatttaaagtcccaaataacgttcaattaactgatagtttaaaaatagtaactaattcttgagcaataaggtcttttaactgctatttttgttgttgttgttgtttgcaacatacatttcaacactactgaataaacaaacttagtccaaacaaaaccatttaggtgagtcacgatgcatcatgatagtggccaactctctggagagccctgcaatagtcacctgagaagcagcatgatgtagcaggaaacctggatctgcctctactatggaaactggacaagtcatacaaaactggacaagacactcagctcctttgggccttggctctgatctgtaggaagaggckggact

SEQ ID NO: 7221 - DNA, 860 bp, Homo sapiens
  misc_feature (1)...(860): n = A,T,C or G
tcccatattctccctatcatttctctcacgtctcttccattccccatctctttcccagctccctttctcctcttcctttaccatcttccttctttccatctgtctcctgtcactcttcctcctaaagtctcttacaggcttccttctttcaacatttcattcaatcacactaagcagtgacagctatgattatccaatacaaacccagtgggtacaagctgttgtccttgaaagttctccctagagaaatacagtatcaccagcctaactagctttatctccttttttaaaaagctatcttttattattattattttttgtaaaaatggggtctcattatttgcccaggctggtctcgaactcttgggctcaagcaattctcctgcttcaggctcccaaagtgctaggagtatgggatgagccaacaagctaagttccatttcatctctttagaagtggactgatgcccagttcagtggctcatgcctgtaatcccagcactttggaaggacgaggcgagaggatcacttgagcttaggaatttgagaccagcctgggcaacatggcagaaacccctgtctctacaaaaaataccaaaattagccaggcatagcggcatgtgcctgtagtcccagctacttgggaggctgaggtaggaggatcacttaagcccaggaggttgaggctacagtgagccaagatcgtaccactggactcaagtctgggtgacagagtgagaccctgtctcannacacnnacaacacaatagaactatatattatatnagagagagagagagagagaragttgcctgagaatcagcgcagggaaagaaagcgttgctttaccagcctgtgaaa

SEQ ID NO: 7222 - DNA, 732 bp, Homo sapiens
agacggggtttcaccatgttggccaggctggtctcgaactcctgacctcgtgatccacccgcctcggcctcccaaagtgctgggattacaggtgtgagccaccactcccagcctaaataaaaacttttaaaaatctttggtggaataagagagagagagagagtatgtgtataaaatttcagagaggtattttaaaagtgatggatttctagcttggtcttgaatgaagggcaagtctggttggcagtgaagaggcacagttttcatggtgggaggctggcagcaaacagacaggctgggcccaaacacagtggctctgaagctggaggtgtacagcggacagctgctggagggctgtgaattgtttctgggaattaggtttggtttagtggacaatagccagttcatgtgtaggggatgactggatacaaacaggaatggtgaaattggaatggagttagctaagcctgtacttgaatcctggccttggcactttgtccctgagtgaccaggcaggtgttctaacctctcggaacctttgtcactgcctctgtataattgggataatctgatcaacttccctggagccttgtgaggagtaactgagataaattttggaagattccctgtatgcagtgcctggcacatagttgattycacatcatctgtttcctttctagaatatgggaccctgcagtgtgatggacagctggtcccacagtgtcttttggg

SEQ ID NO: 7223 - DNA, 732 bp, Homo sapiens
agacggggtttcaccatgttggccaggctggtctcgaactcctgacctcgtgatccacccgcctcggcctcccaaagtgctgggattacaggtgtgagccaccactcccagcctaaataaaaacttttaaaaatctttggtggaataagagagagagagagagtatgtgtataaaatttcagagaggtattttaaaagtgatggatttctagcttggtcttgaatgaagggcaagtctggttggcagtgaagaggcacagttttcatggtgggaggctggcagcaaacagacaggctgggcccaaacacagtggctctgaagctggaggtgtacagcggacagctgctggagggctgtgaattgtttctgggaattaggtttggtttagtggacaatagccagttcatgtgtaggggatgactggatacaaacaggaatggtgaaattggaatggagttagctaagcctgtacttgaatcctggccttggcactttgtccctgagtgaccaggcaggtgttctaacctctcggaacctttgtcactgcctctgtataattgggataatctgatcaacttccctggagccttgtgaggagtaactgagataaattttggaagattccctgtatgcagtgcctggcacatagttgattcmacatcatctgtttcctttctagaatatgggaccctgcagtgtgatggacagctggtcccacagtgtcttttggg

SEQ ID NO: 7224 - DNA, 762 bp, Homo sapiens
tagaggagagtcccctggagagggaggaccctgaagacagccacgtatcaggcatgctgggggagatctgccccttggcccaggactccgagtccctcaggaagcgcttgctgacacagcgctgatggagccgccggcagaagacgggaactctcatagtgtaggaacagctttgaagttctacgttttaaattcaagaagccaatttgctaacattacccatcatttagttccatctcaatttaacagatggtaaaaccaacaagcagatattaattttttcagtaatgacaattttatgactaaaccttacattgcatgtttacctagatatgattagagatcaacttctgaagtgaacatatcacaacccctaaaaccaaatacttaagaccaaccctaaacagtgaataatgatgccatgtggtaaagccatagacactggcccacrgtgttgttgaaaagaaaatgctcatttattcttgtgaacgccatttgttgtaggctatcaagcgtttaccaggtgacttgtgctggcaccagtggcccagtgaatcagtcaataatgtccaaatcatgtgttgatttttagagattgtttatattcgacacagcttcaaaagttaaataacattaccgttggtgcctccatctgccacagggagcacagaaaccccttacaccatccccatcacactgagacagggcaagcgacctgcagtttcaacaaacatttatcttgatgctgctgttccaggggat

SEQ ID NO: 7225 - DNA, 666 bp, Homo sapiens
aaccagaattcattcactgcatttggttgttttttttctctttagtctctcttattaaagacagttcctcattcttcatttttttycccccctttttcatatgactttgactttttgaagaatccagactggttgtcttgtaaatttttttttttttttgagacagggtgctctgtcacccaggctggagtgcagtggtacaaacatgagtcactgcagcctcaacctcctgggctcaattgatcctcctatctcagcctcccaagtagctgggactgcaggcatgcaccaccacacctggctattttttgtgtttttgtagaaatggggtttcaccatgtagcccaggctggtctcgaagtcctggactcaagcattctgcccgcttcagcctctcaaagtgttgagatcacaggtgtgagccaccgtgcctggccattgtcttgtaaattgtataacattttggatttgcctcattggttccttaactgtatgatgtctgccagctgggagtgaagtctgagtcctgattagatcgggataagaattcttggggaggatacttcacatccctcgccccgtgcttcccactgggtctcatcaggggccccctgtgagtgatactgagtttggtcacttggctaagatagtgactcactatttcaa

SEQ ID NO: 7226 - DNA, 764 bp, Homo sapiens
atgtgtactacctagaagaagtaaaagataaggattcccattcaggttagatcactccaggtttgatgacgttagcaagtattttcaggggttttgtgagttctccagtaaggctactgggggttgaggctgcagtgttgctaagttggacctccttttgctctagactctcttcttaactaccgatctagtttggcgatgctgatatgtgcgtgttcaacgtgtgtgtgtgtgcgctcacacgcgtgtgtgtgtgagtgcatytaccacttattgctcattttgtaaggtattgagggagaaaattgctaatacaatttcatttcatcatcttatcagaagtctgatatttctattttattttgatttatatatttacaagcgcttatgtgagatatataaaaattcaagttaattgttattttactggtatgaaatatcaccatttgtcccttttagtgcctttcatcttgagtcggttacataatattataacatacataacaattctttgatgtgctgggaaaatattgatatttaagcccacctgtttttatccagtatgtaactctttcaccattcagataactagacggagtcatcctttgccttaaagaagattgtcacagtggaaccagaatacaaaaagatacattcttggcttgtgaatgtcaaagctggggctcaggtataagatattcggagccagtttcttccccctcagagtgagtcatgttgcttgctctattagttctatttcctta

SEQ ID NO: 7227 - DNA, 764 bp, Homo sapiens
atgtgtactacctagaagaagtaaaagataaggattcccattcaggttagatcactccaggtttgatgacgttagcaagtattttcaggggttttgtgagttctccagtaaggctactgggggttgaggctgcagtgttgctaagttggacctccttttgctctagactctcttcttaactaccgatctagtttggcgatgctgatatgtgcgtgttcaacgtgtgtgtgtgtgcgctcacacgcgtgtgtgtgtgagtgcatctaccacttattgctcatttkgtaaggtattgagggagaaaattgctaatacaatttcatttcatcatcttatcagaagtctgatatttctattttattttgatttatatatttacaagcgcttatgtgagatatataaaaattcaagttaattgttattttactggtatgaaatatcaccatttgtcccttttagtgcctttcatcttgagtcggttacataatattataacatacataacaattctttgatgtgctgggaaaatattgatatttaagcccacctgtttttatccagtatgtaactctttcaccattcagataactagacggagtcatcctttgccttaaagaagattgtcacagtggaaccagaatacaaaaagatacattcttggcttgtgaatgtcaaagctggggctcaggtataagatattcggagccagtttcttccccctcagagtgagtcatgttgcttgctctattagttctatttcctta

SEQ ID NO: 7228 - DNA, 850 bp, Homo sapiens
agcaccttgttgccagtaatttcaggaaagaatttggacttgcaatgggatagggtttgttagcatccagtcttctgggacaggcatgtgtgtgtgttgggggaaaccacatagttaccatgggcactgcaacgccctgcctctctggctcagatgctcacactcgcacttactgctcttaagcttctgctgccagttgctttgcaaacgctggagaaggttactcttaggtgcccaggggctcactcgtgtttcctcatatctgctgctcctgaggttggagatccatcaagttgatcttaccttttgttgcgattttctcctctggatgttttagrttatgattttctccttcaatctgacaccatttgctctccatttttctgggatttccttctaattcctgcagactaatgattaccaacatatcaggcctcaacactattctaatcaattttctctccttcacacacttcctgagagagtcatctacattagcaggctccattttctagcctcatattcacttctcaacccaccccaatctagctcccactcctcattagtcagcagagatagtgctcactcaggtcccctgacctctgtggtggttttaaaacatgtccacaaattccttagaagtccctccttcaaaaggcaggtctaatttccctccctttaagtgtaggttgtacttggttgacttgcgtatgataaatagaatgtgtcagaagtgatggtgggtgatttccaagtctgggttgaaaaaggcaatgtgacttcaacgtttctctcctgcatagattgcctactctgggagagccaggtgtgagtgggccttggtggatga

SEQ ID NO: 7229 - DNA, 850 bp, Homo sapiens
agcaccttgttgccagtaatttcaggaaagaatttggacttgcaatgggatagggtttgttagcatccagtcttctgggacaggcatgtgtgtgtgttgggggaaaccacatagttaccatgggcactgcaacgccctgcctctctggctcagatgctcacactcgcacttactgctcttaagcttctgctgccagttgctttgcaaacgctggagaaggttactcttaggtgcccaggggctcactcgtgtttcctcatatctgctgctcctgaggttggagatccatcaagttgatcttaccttttgttgcgattttctcctctggatgttttagattatgattttctccttcaatctgacaccatttgctctccatttttctgggatttccttctaattcctgcagactaatgattaccaacatatcaggcctcaacactattctaatcaattttctctccttcacacacttcctgagagagtcatctacattagcaggctccattttctagcctcatattcrcttctcaacccaccccaatctagctcccactcctcattagtcagcagagatagtgctcactcaggtcccctgacctctgtggtggttttaaaacatgtccacaaattccttagaagtccctccttcaaaaggcaggtctaatttccctccctttaagtgtaggttgtacttggttgacttgcgtatgataaatagaatgtgtcagaagtgatggtgggtgatttccaagtctgggttgaaaaaggcaatgtgacttcaacgtttctctcctgcatagattgcctactctgggagagccaggtgtgagtgggccttggtggatga

SEQ ID NO: 7230 - DNA, 850 bp, Homo sapiens
agcaccttgttgccagtaatttcaggaaagaatttggacttgcaatgggatagggtttgttagcatccagtcttctgggacaggcatgtgtgtgtgttgggggaaaccacatagttaccatgggcactgcaacgccctgcctctctggctcagatgctcacactcgcacttactgctcttaagcttctgctgccagttgctttgcaaacgctggagaaggttactcttaggtgcccaggggctcactcgtgtttcctcatatctgctgctcctgaggttggagatccatcaagttgatcttaccttttgttgcgattttctcctctggatgttttagattatgattttctccttcaatctgacaccatttgctctccatttttctgggatttccttctaattcctgcagactaatgattaccaacatatcaggcctcaacactattctaatcaattttctctccttcacacacttcctgagagagtcatctacattagcaggctccattttctagcctcatattcacttctcaacccaccccaatctagctcccactcctcattagtcagcagagatagtgctcactcaggtcccctgacctctgtggtggttttaaaacrtgtccacaaattccttagaagtccctccttcaaaaggcaggtctaatttccctccctttaagtgtaggttgtacttggttgacttgcgtatgataaatagaatgtgtcagaagtgatggtgggtgatttccaagtctgggttgaaaaaggcaatgtgacttcaacgtttctctcctgcatagattgcctactctgggagagccaggtgtgagtgggccttggtggatga

SEQ ID NO: 7231 - DNA, 850 bp, Homo sapiens
agcaccttgttgccagtaatttcaggaaagaatttggacttgcaatgggatagggtttgttagcatccagtcttctgggacaggcatgtgtgtgtgttgggggaaaccacatagttaccatgggcactgcaacgccctgcctctctggctcagatgctcacactcgcacttactgctcttaagcttctgctgccagttgctttgcaaacgctggagaaggttactcttaggtgcccaggggctcactcgtgtttcctcatatctgctgctcctgaggttggagatccatcaagttgatcttaccttttgttgcgattttctcctctggatgttttagattatgattttctccttcaatctgacaccatttgctctccatttttctgggatttccttctaattcctgcagactaatgattaccaacatatcaggcctcaacactattctaatcaattttctctccttcacacacttcctgagagagtcatctacattagcaggctccattttctagcctcatattcacttctcaacccaccccaatctagctcccactcctcattagtcagcagagatagtgctcactcaggtcccctgacctctgtggtggttttaaaacatgtccacaaattccttagaagtccctccttcaaaaggcaggtctaatttccctccctttaaktgtaggttgtacttggttgacttgcgtatgataaatagaatgtgtcagaagtgatggtgggtgatttccaagtctgggttgaaaaaggcaatgtgacttcaacgtttctctcctgcatagattgcctactctgggagagccaggtgtgagtgggccttggtggatga

SEQ ID NO: 7232 - DNA, 850 bp, Homo sapiens
agcaccttgttgccagtaatttcaggaaagaatttggacttgcaatgggatagggtttgttagcatccagtcttctgggacaggcatgtgtgtgtgttgggggaaaccacatagttaccatgggcactgcaacgccctgcctctctggctcagatgctcacactcgcacttactgctcttaagcttctgctgccagttgctttgcaaacgctggagaaggttactcttaggtgcccaggggctcactcgtgtttcctcatatctgctgctcctgaggttggagatccatcaagttgatcttaccttttgttgcgattttctcctctggatgttttagattatgattttctccttcaatctgacaccatttgctctccatttttctgggatttccttctaattcctgcagactaatgattaccaacatatcaggcctcaacactattctaatcaattttctctccttcacacacttcctgagagagtcatctacattagcaggctccattttctagcctcatattcacttctcaacccaccccaatctagctcccactcctcattagtcagcagagatagtgctcactcaggtcccctgacctctgtggtggttttaaaacatgtccacaaattccttagaagtccctccttcaaaaggcaggtctaatttccctccctttaagtgtrggttgtacttggttgacttgcgtatgataaatagaatgtgtcagaagtgatggtgggtgatttccaagtctgggttgaaaaaggcaatgtgacttcaacgtttctctcctgcatagattgcctactctgggagagccaggtgtgagtgggccttggtggatga

SEQ ID NO: 7233 - DNA, 854 bp, Homo sapiens
actgaacttctaagacttgcggtgrttatctccttaaatacaatagagtatggcactgattattgtctgcttttgaacaggagctgaggaatgacctcaacactgtagtccaaaagcctgaggactctgtgtgtttgacattaatggtcacactaaagcccactgcgcaatgtacctactcaaaccctgggttagctgaccattgagaccatccaataacgatagtctgtgggatctgaataggttttcattctcccacatgcacacagaagtgctgggatcagttggcctaggaagaaactatacaagggctttgtgacaaattcagtgtagtagctcatgccattaaccttccactcatccccgagttcacatgtgcctcttccacttaaaagaccaagagcttgggaaattcaactctgcagcatgtccatctgaggactgtggatattaaacttatcttcaggtacagctgtggtggaggatgaatggattgatttatggaaactgtgcagtggtgatggaatttttcttggacattgatccttgtgttgtgctttgaacatgggagtatgttttctggggaaatgcacacacactcgcaaagacatccacaatcattccatatagactctctcctctgtccctcccaactctgatgtaccaccccaccttagatgacactgctgcttccagggatgacagtagcatggttagagtactggactcccagtttgttgggttttttttttttttttttttgagacagagtttcactcgttgcccaggctgaagtgcaatggcacaaccttggctcactgcaacctctaccacctgggttccagtgattctcc

SEQ ID NO: 7234 - DNA, 854 bp, Homo sapiens
actgaacttctaagacttgcggtggttatctccttaaatacaatagagtatggcactgattattgtctgcttttgaacaggagctgaggaatgacctcaacactgtagwccaaaagcctgaggactctgtgtgtttgacattaatggtcacactaaagcccactgcgcaatgtacctactcaaaccctgggttagctgaccattgagaccatccaataacgatagtctgtgggatctgaataggttttcattctcccacatgcacacagaagtgctgggatcagttggcctaggaagaaactatacaagggctttgtgacaaattcagtgtagtagctcatgccattaaccttccactcatccccgagttcacatgtgcctcttccacttaaaagaccaagagcttgggaaattcaactctgcagcatgtccatctgaggactgtggatattaaacttatcttcaggtacagctgtggtggaggatgaatggattgatttatggaaactgtgcagtggtgatggaatttttcttggacattgatccttgtgttgtgctttgaacatgggagtatgttttctggggaaatgcacacacactcgcaaagacatccacaatcattccatatagactctctcctctgtccctcccaactctgatgtaccaccccaccttagatgacactgctgcttccagggatgacagtagcatggttagagtactggactcccagtttgttgggttttttttttttttttttttgagacagagtttcactcgttgcccaggctgaagtgcaatggcacaaccttggctcactgcaacctctaccacctgggttccagtgattctcc

SEQ ID NO: 7235 - DNA, 854 bp, Homo sapiens
actgaacttctaagacttgcggtggttatctccttaaatacaatagagtatggcactgattattgtctgcttttgaacaggagctgaggaatgacctcaacactgtagtccaaaagcctgaggactctgtgtgtttkacattaatggtcacactaaagcccactgcgcaatgtacctactcaaaccctgggttagctgaccattgagaccatccaataacgatagtctgtgggatctgaataggttttcattctcccacatgcacacagaagtgctgggatcagttggcctaggaagaaactatacaagggctttgtgacaaattcagtgtagtagctcatgccattaaccttccactcatccccgagttcacatgtgcctcttccacttaaaagaccaagagcttgggaaattcaactctgcagcatgtccatctgaggactgtggatattaaacttatcttcaggtacagctgtggtggaggatgaatggattgatttatggaaactgtgcagtggtgatggaatttttcttggacattgatccttgtgttgtgctttgaacatgggagtatgttttctggggaaatgcacacacactcgcaaagacatccacaatcattccatatagactctctcctctgtccctcccaactctgatgtaccaccccaccttagatgacactgctgcttccagggatgacagtagcatggttagagtactggactcccagtttgttgggttttttttttttttttttttgagacagagtttcactcgttgcccaggctgaagtgcaatggcacaaccttggctcactgcaacctctaccacctgggttccagtgattctcc

SEQ ID NO: 7236 - DNA, 854 bp, Homo sapiens
actgaacttctaagacttgcggtggttatctccttaaatacaatagagtatggcactgattattgtctgcttttgaacaggagctgaggaatgacctcaacactgtagtccaaaagcctgaggactctgtgtgtttgacattaatggtcacactaaagcccactgygcaatgtacctactcaaaccctgggttagctgaccattgagaccatccaataacgatagtctgtgggatctgaataggttttcattctcccacatgcacacagaagtgctgggatcagttggcctaggaagaaactatacaagggctttgtgacaaattcagtgtagtagctcatgccattaaccttccactcatccccgagttcacatgtgcctcttccacttaaaagaccaagagcttgggaaattcaactctgcagcatgtccatctgaggactgtggatattaaacttatcttcaggtacagctgtggtggaggatgaatggattgatttatggaaactgtgcagtggtgatggaatttttcttggacattgatccttgtgttgtgctttgaacatgggagtatgttttctggggaaatgcacacacactcgcaaagacatccacaatcattccatatagactctctcctctgtccctcccaactctgatgtaccaccccaccttagatgacactgctgcttccagggatgacagtagcatggttagagtactggactcccagtttgttgggttttttttttttttttttttgagacagagtttcactcgttgcccaggctgaagtgcaatggcacaaccttggctcactgcaacctctaccacctgggttccagtgattctcc

SEQ ID NO: 7237 - DNA, 854 bp, Homo sapiens
actgaacttctaagacttgcggtggttatctccttaaatacaatagagtatggcactgattattgtctgcttttgaacaggagctgaggaatgacctcaacactgtagtccaaaagcctgaggactctgtgtgtttgacattaatggtcacactaaagcccactgcgcaatgtacctactcaaaccctgggttagctgaccattgagaccayccaataacgatagtctgtgggatctgaataggttttcattctcccacatgcacacagaagtgctgggatcagttggcctaggaagaaactatacaagggctttgtgacaaattcagtgtagtagctcatgccattaaccttccactcatccccgagttcacatgtgcctcttccacttaaaagaccaagagcttgggaaattcaactctgcagcatgtccatctgaggactgtggatattaaacttatcttcaggtacagctgtggtggaggatgaatggattgatttatggaaactgtgcagtggtgatggaatttttcttggacattgatccttgtgttgtgctttgaacatgggagtatgttttctggggaaatgcacacacactcgcaaagacatccacaatcattccatatagactctctcctctgtccctcccaactctgatgtaccaccccaccttagatgacactgctgcttccagggatgacagtagcatggttagagtactggactcccagtttgttgggttttttttttttttttttttgagacagagtttcactcgttgcccaggctgaagtgcaatggcacaaccttggctcactgcaacctctaccacctgggttccagtgattctcc

SEQ ID NO: 7238 - DNA, 901 bp, Homo sapiens
taaaatttattgtttgaatccaaaggaccaagaatagccaatatgattttgtaaaacaacaaagttcaacgacttacacgatttcaaaatttcaaaatttaccataamgctacagtaatcaagactgtggtattgacataaagataggtatatagctgggcatggtggctcatgcttttaattcaccctgggcaacacactaagaccccatctggaagaaaaggaaaaaaatatgatattgtaaaccaaaaataaaattctaagtggatctctcctcaggggtcagggcattttattttatttatttttttgagacagggtctcactctgatgcccaggctggagtgcaatggcacaacttcagctcactgaaaccactgcttcctggactcaagtgattctccagcctcagcctcctgaatagttaggattacacacacaggccaccacacctggctaattttttttttttttcctgagacggagtctcactctgtcatccaggctggagtgcagtggcactatcttggctcactacaacctccacctcttgggctcgagcaactctcctgccttagtctcccaggtagctgggataacaggagtgtgccaccatacgcagctaattttcgtatttttagtagagatggggttttgccatgttggccaggctggtctcgaactcctgacctggggtgaattgcctacctcagcctcccaaagggttgggattacagacatgagacaccgcactcagccatgcagagattttcaaagtaccaaaaaaaatggttttgcacctcagcccaacaccttcctcaatgttttcttttttctttttctgttttttttttgcccccagatggagttttgcctcttgttgcccaggctggagtgcaaa

SEQ ID NO: 7239 - DNA, 777 bp, Homo sapiens
cttgagcccaggagttcaagatcagcctgggaaacatggcaaaaactgcaaaacctggtctctacaaaaaagacaaaaattagccgggtgtggtggcatgcgcctgtagtcccagctacttgggaggctgaggagggaggatctcttgagcctaggagttcaaggctgcagtgagccaaagtcaygtcactgcactccagcctgggtgacagactgagactatgtctcaaaaaaggaaaaaaaaaaaaaagaattaaaaggaaaaaaagatccttttgtagttggtgcagtaaatctctctttctctccatacgtgtgtgtgtgtgtgtgtgtgtgtgtgtgtgtgtgtttacatatatacataaaatctcctgctagctctgttctctggtagaatcctaaccaaaacatctgttcactatgtgatgggcactaaatattcaatgataaacacaataaagatagaatttacagcttaatattgagagagcaataaatagacaagtactttgcaagttgtggtatgggctaagaaggaaaataaacaggtgttattgagaggatattataggaagggacttaatttagattgggtggccaaggtcctctctaggtagatgacatgtaggctaagatgtgggaaggcaccaacttctaaaaaaatataaagataagggggtcccatgtagagggaataatatatgcaaatgagtgcttgacatgttcttggaacttccagaatactaaaatatgtcctgatctctcccttgaacaccc

SEQ ID NO: 7240 - DNA, 766 bp, Homo sapiens
tgtggatagtggctggagaaagccacttccgggtaygacctagggctacatcccaccactcacacgctgcctggcctcttgtcgggggactgcatctcatgttcctgcacaatgagaatttttgaagggaaaatatccgggctacttcgtagggccctaaaaatgagaaacgaatgttggcacttaaaacaagactatcaaaatttagccaaaggagtcataatcacagggagagaactcttcagattcaagtggtggtgaagccaagatcagcagcaaatgagcacttgcttgtgaaagtgtcttaaaatgcaaagaaaatttgagagggtgataccttcccatcccattttcttcaggcatggtcctgtgacttgtgatccccttcctattcggggaattacattttcctgcccagctgacataaagtttggctaaagtatgatcagtgaaagtgaccagagccccttctgagcagaagctttagggacatcacaggattctgccatctcccttccatttgccatgagcccagcaatgctccagatgggagtgctgccttcgccagggatctggaggaaagaggatggtgtgagaactgcagcccactatccacaacagaaacctaatgtagcaacaggaagcagctctgctgtcagtcacagggatctcagggtcatttgttacagcagcatcacctcaccactcctgcttcatatgccaacttcatggcactgatggtcccttgtaagaactagaagaaaat

SEQ ID NO: 7241 - DNA, 768 bp, Homo sapiens
cctctgatttgccccttatggcaaccagttgggctggtcttgggctacatcttcatttgcacaggagtaactttgtaacttcacttcagcttctaattggttgctttctgcaatcagtcagactgatagcggaccactacttcttgtacatagagtgtacactaagcaaccaatgagaaacctctagaggatatttaaaccatagaaaattctataaccaggcccttgagccactcgctggggccagctcccaccctgtgcagtatacttttgttttcaataaacctccgcttttgttgcttcctccctcccttactttgtacattttgtcaaattctttgttcaaggtactaagaacctggacaccctgcaccggtaacagtggtactgtgggtctcaatccagtcagcttttcaagggaaagaggtcaagggcaaactttccctttggcctgggtatgtcttcagcacctctttactgcttgaaatctttaaacataaacaaacgtccaggtcaattctggaagtgacagaagggatgtatatgtaattttatggctaccttccatatctgcaagtgtgactgattctttttctcagtagtgtcaargagtttgcttttcctataaatatattaaagaaatatgattacttaagagaaaatgttaaggaaaataacagcgcaggcgatagcagaaatggcaggaatccttttgcatttgttatgcagacagggactgtcttgctcgtggctttatatatccaatat

SEQ ID NO: 7242 - DNA, 1365 bp, Homo sapiens
tgggtggtttttctgctctgtgtggtgtcaaccacagtgttgggatagctgggagataaaaaacaatatcactcagatggctggcatttgatacaggctgctagctgggagcttagaagttggtcgggggcttcagttctctatgtggtcctatatatatagcggtctgggcttcctcacagcatggcagtcaggctcaggagaaagcattccaagtgtgtaatatgagaagctgcagatctcttaaggcccagcctctgcagttacagtgtcacctccaccacattctatttgtcaaaacaagttacagaagcagcccagattcaagaggagaggtggaaaaccatgtttctcaatgggaagagtgtcaaagaatttgtggccacccaccagaccaaagccaatgagttaatagtattggatatccttaggctataaagagcctgagctacagaaaattactgagccagtttcaaacttacaactgctttctccagactttctgttacataacagaattaagagtactcattgctaaagatactgttgggtgggtgttttgttacttgcagccaaatggatcctaaataataaagtacttcactttcatcaccaaatttcagcaggaaggctgtgctaggatgacttagctaacagatcagagtgagagaatttgagtgaatttctcctgaacaaatatgagacagttttctagggactctcagaagcatggccaagttcttgtacagatagttgagactcaaagtcatcacaatctggatctaatataaatatgattttaattggactcacaggctggtgagttgsagagggcagacattgacagtcagatctcctacaatgactagctgattatacctaatcaagttgtcttagtgccactcaaagtgccaatctgcaatgaaataagaagattgcaccagaatgtaaaccaacacactgcttccttcattgagaagtcttgccaaaaaaaaaaaaaaaaaaaaaaaagtaagctgaactaaacagcatgcttagtgatacagttgaattacactcaggcacaagttccttatctcctctctcttggctaactggtaacaaacagttgcggacctatagttgttctacaaaccacacaggctaattaatgggttataaaggtcaggcaacaggctagactacatacgataatttacaaggaaagaaatcccatgattctactctgaaacccactccagtgattcacagcaaaggacttcttttcatttaaatgtgctggctaccaaattatgaaattttgttgaataatattgaatcagtgtatttgtagatatcattccccacatttttttaaagtctatg

SEQ ID NO: 7243 - DNA, 1365 bp, Homo sapiens
tgggtggtttttctgctctgtgtggtgtcaaccacagtgttgggatagctgggagataaaaaacaatatcactcagatggctggcatttgatacaggctgctagctgggagcttagaagttggtcgggggcttcagttctctatgtggtcctatatatatagcggtctgggcttcctcacagcatggcagtcaggctcaggagaaagcattccaagtgtgtaatatgagaagctgcagatctcttaaggcccagcctctgcagttacagtgtcacctccaccacattctatttgtcaaaacaagttacagaagcagcccagattcaagaggagaggtggaaaaccatgtttctcaatgggaagagtgtcaaagaatttgtggccacccaccagaccaaagccaatgagttaatagtattggatatccttaggctataaagagcctgagctacagaaaattactgagccagtttcaaacttacaactgctttctccagactttctgttacataacagaattaagagtactcattgctaaagatactgttgggtgggtgttttgttacttgcagccaaatggatcctaaataataaagtacttcactttcatcaccaaatttcagcaggaaggctgtgctaggatgacttagctaacagatcagagtgagagaatttgagtgaatttctcctgaacaaatatgagacagttttctagggactctcagaagcatggccaagttcttgtacagatagttgagactcaaagtcatcacaatctggatctaatataaatatgattttaattggactcacaggctggtgagttgcagagggcagacattgacagtcagatctcctacaatgactagctgattatacctaatcaagttgtcttagtgccactcaaagtgccaatctgcaatgaaataagaagattgcaccagaatgtaaaccaacacactgcttccttcattgagaagtcttgccaaaaaaaaaaaaaaaaaaaaaaaagtaagctgaactaaacagcatrcttagtgatacagttgaattacactcaggcacaagttccttatctcctctctcttggctaactggtaacaaacagttgcggacctatagttgttctacaaaccacacaggctaattaatgggttataaaggtcaggcaacaggctagactacatacgataatttacaaggaaagaaatcccatgattctactctgaaacccactccagtgattcacagcaaaggacttcttttcatttaaatgtgctggctaccaaattatgaaattttgttgaataatattgaatcagtgtatttgtagatatcattccccacatttttttaaagtctatg

SEQ ID NO: 7244 - DNA, 838 bp, Homo sapiens
tagcatggcaggctataacaagccagcaatagtaggaaatagtgccatcaacactcatcaaagacttcagcgataaatatagtgacacctgtacatcaattcctaaattattttttaagactcaacaatgtttcaggaaacctgcaacaaaaagtctaaattaataaatgatgtgttttattttatcttaaaccttacgtaagtataaaatgcaaaaattatctgcttctgggaaaaatctttttctaggattagttttatattgtaacatttcaaattcaaatgaaaactaagattttagagggtgaatttctcaagttcatgtttaataaagatcacatctgtaaatgatcctcctgtattacgagcatgatataatggtgatattgcctcagggtgactcttcagatcttgctctaagaggtcctggtagccatatactagaacccctaggagtaaggagctygagggactgcggtagcttgcaggtactattagagtcactaagatgcagtgaagctgaatatccaagtgattcaggagaccatatgttatgagtgtctagccaggtatgttggatgtgaccaattagcacttggccttaatttctgcttcctagtgtgatgtcttgggttccagaggctcaaaagtttttttaaaaaaaccatttctcagactcatttgcagctagcactctcaatacttgttaagggcttctaaaaagatgcatttgtgtgagttttggaaatgaaatgtgaggtggaatttactttctattgtgtttggctattttctgctggcaagaatagttatggagtttttctgcagccgtgttcca

SEQ ID NO: 7245 - DNA, 610 bp, Homo sapiens
tcccaatggggaactttctattatagctcttaatttcaccattgtccaaatgaccaacaaaaaaatagcccaagaggaatttagcttgagttcaggcttcctgtcccatcttctgacctaagagcctaggctcttgacattaaactgcctgtacatgaatctttgcatcatttggcttactttctgtagagcttctctgtgtctgtttgcttatctgtaaagcggggataataatattaatctacctttagggttcccatgttaaatgagaacatatatgtaaatgcatagcacacacagtgcctggaacataawgttagagttcagtgaatattatatacttctgtagccattattattacctttatttatttatcctttttttttttttttttggagacactctcactcactctgtcacccaggctggaatacagtgacgtgatcttggctccctgaaacctctaccttctgggctcaaatgatcctcctacttcagcctcttgagtagctggactacaggcatgcaccggtagtgcagctagttttgtttattttttgtagaggcagggtctcattatgttgcccaggctggtctcaaactcctggg

SEQ ID NO: 7246 - DNA, 810 bp, Homo sapiens
cgggcccacgggctgggatggaggtgtggacctgactgggggcctctgtttctacaagtggcaatacctacagagtgcctcacagggagtgctacaggacccatggcagccacggacagggaccgtgtggcctaccacactgggtgacgtggcttcattgattctactttttttttttttttcctgagacagagtctcgctctgtaacccgggctggagtgcaatggtacgatctcggctcactgcaacctctgcctcctgggctcaagcgattctcctgcctcagcctcccaagtagctgggattacaggcatacaccaccacacccggctaatttttgcttttttttttttttttttttttttagtagagatgggggtttcaacattttggccaggctggtctcgaactcctgacctcaagtgatcctcccacctcagcctcctaaagtgctgggattataggcatgagccaccgtgcccagcttcattctacttcaaggcaaagttctggtcagacccccgggcagccctccatgctcccaccamccctgcctcctcagcctcccatttcaaattcgagttctcagccaccctcctctaatccctggggttactaccacgggccttccaggccgtgcacgacattttaggtgtaacccctcacccacccacacgctcacctggctggcgagagactgaagaacagatggaggggggctggtgttggcaagcagccgagtgtcataatgcccataaactccttgcatcttggctctaaaatcctgccggggagagaccagggtgggtg

SEQ ID NO: 7247 - DNA, 686 bp, Homo sapiens
tatagagacagagagtagaatagtggttgccagaatttaggggatgagagaatgcagagttagtgtttaatggtagagagtttcagttttgcaagatgaaaaagttttggagagcataatgtgaatgtatttaacaccactgaactgtacacttaaaaatggttaaaatggggtcaggcacggtggttcacacctgtaatcccagcactttgggaggccaaggcaggtggatcactaggtcaggagatcgagaccatcctggctaacacggtgaaaccccgtctctactaaaaatacaaaaaattagctgggcgtggtggtgggtgcctgtagtcccagctactcgggaggctgaggcaggagaatggcrtgaacccgggaggcggagcttgcagtgagccgagatcacaccactgcactccatcccgggcgacagagagagactccgtctaaaaaaaacaaaacaaaacaaaacaaaaggtcaaaatggtaaattgtatgctctgtgtagttttccacaattttttttaaaagttaagggtcatgaaagcaaaaaataaattttgatgattttgaaattttgcatagcgcaggccctgagggaagttggtttggttttgttatgagacgggggtgggaagggatgtgttgtagttattgtttttaattgtggggttcctatgtct

SEQ ID NO: 7248 - DNA, 686 bp, Homo sapiens
tatagagacagagagtagaatagtggttgccagaatttaggggatgagagaatgcagagttagtgtttaatggtagagagtttcagttttgcaagatgaaaaagttttggagagcataatgtgaatgtatttaacaccactgaactgtacacttaaaaatggttaaaatggggtcaggcacggtggttcacacctgtaatcccagcactttgggaggccaaggcaggtggatcactaggtcaggagatcgagaccatcctggctaacacggtgaaaccccgtctctactaaaaatacaaaaaattagctgggcgtggtggtgggtgcctgtagtcccagctactcgggaggctgaggcaggagaatggcatgaacccrggaggcggagcttgcagtgagccgagatcacaccactgcactccatcccgggcgacagagagagactccgtctaaaaaaaacaaaacaaaacaaaacaaaaggtcaaaatggtaaattgtatgctctgtgtagttttccacaattttttttaaaagttaagggtcatgaaagcaaaaaataaattttgatgattttgaaattttgcatagcgcaggccctgagggaagttggtttggttttgttatgagacgggggtgggaagggatgtgttgtagttattgtttttaattgtggggttcctatgtct

SEQ ID NO: 7249 - DNA, 711 bp, Homo sapiens
ccatggctgaaatccaggtgatgtgactcccctgctagctcccttcttataagtagaattgcgacataggctgtggtcagcttacaagtgtgatgatgactctcatgtcagcttacaaatgtcatgatgactctcatgcctcaagtcagctattagaagaaatactggccaggcacggtgggtggatcacctgaggtcaggagttcgagaccagcctgaccaacatggagaaaccccgtctctactaaaaatacaaaaaaaattagccgggcgtggtggcgcatgcctgtaatcccagctacttgggaggctgaggcaggagaatcgttccattgcactccagcctgggcaacaagagcgaaactctatctaaaaaaaaaaaagaagaagaaatacctttcatagctcrgaaaaatgagcgacatcctgggtctctctttgtatgaaggttataaaagattgccacacccccacacgtagtataatgccctcaagtgttagagtgtgtcatcacagggcacagcaaacctcaccaaccattagtattatcaccctcacacatggaaagagcccgctgctgaggtcttgaatctcacatgcaaacagtccacagttggaattgtgactgtcatatgtgagcatccagccacagttgggatggtgacacatttctaaactcaaaatcataggcagatgaggtctctactattt

SEQ ID NO: 7250 - DNA, 672 bp, Homo sapiens
aagaacaactcttcatttaccatgaaaagaggagcttcacgttatctgttgaaagaattctcagtagctgatcttagtgtgtaaggctccacctcctttatttctggtaagcctgccatctaggtcatcctgtcttgttgctgtcctctctcattttttcaggtggccctctgtcattttcaccctggatggcttcctctcttttagtcacttacccaaggttatttttccttsaaagcacttgtcaaatctcatctcctcagagaaatgttctctggccactcaacatccatttttgtcttcagcagtatagtctcatgcattgctctctgtgcctagatcttgtctccctcataagaacatgggtttgtaagccagggatgcttgtgtctgctgctgctgcatctttcacagagctaagcactttttttcaaaaaattttattttattattattatactttaagttttagggtacatgtgcacaatgtgcaggttagttacatatgtatacatgtgccatgctggtgtgctgcacacattaactcgtcatttagcattaggtatatctcctaatgctatccctccccactccgcccaccccacaacagtccccagagtgtgatgttccccttcctgtgtccgtgtgttctcattgttcagttcccaccta

SEQ ID NO: 7251 - DNA, 1714 bp, Homo sapiens
cacaggacgagcttaactgccctggcaccgagccgtgtcaagtgctgtctgccgggaagctgggtagagactccaggcccayggtttccatcaggactgatcacacgggcaccccctgcctggcgtgtaccaagttccagactaaggaaagcaggtttcagcacagaccacattgtttgtacagacagttcaggcacagggaaccacacctaccacctagggaatgggggagccctcctgagatccagactccagctgagggccagcctgcagcaaccctgtctgaggttgtatctcgggccagctgttagctgtcttctgcacagaaccatgattaaagtttgttagtttcccactgttagatatttaggtagttatctttgtttttctattaataaaaaatgtgatgaggatctttctaactcagttattttgcttttttcaggggagtaattcctagaagtagagaaagtagctttactgagcattttaatatcttttatatcttcctaggatatttatgtatttcatccttccgtttatcttctttttatcctatatcagtaaaatattcataatattatattgataaaacatatagtatggattgttcaaaattacgatcttcattagtactttgtgaatgttttgtgtgtattaaggggacactgtagctacttgttggctcagctattgtttttgatgctccgtcaggccccagttgtgacagcgttgaggaagatatgaatgcttctgctcaaggtgcttctgccacagttttggaagaaacaaggaaggaaacggctcctgtgcagctccctgtttcagggccagaactggctgccatgatgaagattggaacaagggtcatgagaggtgtggactggaaatggggcgatcaggtactcagagatttgatgtgaacacattagccacacattagttatcttctgcatagttctgtacgatattggtgggtggaaattggaataatccaggatgtgtcagttgatcgatgacacaggtgttggttcccgagcagctgaagggagtgaacacaaacagggaatcataagtagggcatctgagcagaatcaagtctggaaagagaggcagctcttttcaggaaactcactggcatgaggctcagtttgatgggtcactggaacaagagtgtgagagtgagcaagagagtaaatctcattctgaaagttggtgtagtgaaggctctgaggcaggaagcccagatgctgcccctgtgggctgatggccatgtgctgcgaagtgccctgaagccagtagttagggatctacttcatgggcctgtggccacgtttccatcttccctcatcgcagatctcttctaaatctctgccaggtgcccccaggtggaagtcacttaccacagccctagctaagttagggcagtgttcaccttcccatggtctgtctggcttttctcagccacgctggtaagccctggctttgtcacagtcatcttagaaatagcagtgtctggagacagcatccatcctagaaacagctttctcctgcagaagtgagagacagagcttccccctggggcccaggggaaactgaagcaaagggaatgtggaggtgctggtgcttgtttcaggtttccgctcttgcaaggcccgtgagggattgtggggacaggacttgctgcaaagccctgtctctgcattgactcaga

SEQ ID NO: 7252 - DNA, 459 bp, Homo sapiens
  misc_feature (1)...(459): n = A,T,C or G
ctgcccatcccatcctgccctcctgaggagcacccatgaccaggcactccctagggcccctcgggtgtccctcccaccctcccctcccaggcagcctcctcaggcttttccagcttgtccagcccaccttcatcctctgctcctgcctcccaggcacagcgagctctcccagtactcaaacacctgctaacgtcctcatgttagtaatcaaatattaccttcctttgctgtcactccagaactgtattcactccagagaaatttcttaatcagaggacagctactaagataggagtttcaggcattgtatcanagtcggttgygggaatacattgtcaaacatggtgctctatgacnnnnnnnnnnnnnnnnnnnnnnnnnnnnnnnnnnnnnnnnnnnnnnnnnnnnnnnnnnnnnnnnnnnnnnnnnnnnnnnnnnnnnnnnnnnnnnnnnnnnagt

SEQ ID NO: 7253 - DNA, 644 bp, Homo sapiens
tgtttggttagacgtaacagaacacctgataaatagtgacttgagcaagtaagaggcttattctcaggcaacaagaagtctgcttttgtttcattggtcagaaccagctgmaccaagggggactgaggaagtgtgattaactgggcacattggtattctgaacaaaacagggtttttgactagtaaggaagagggaggaataggtgtatattttgcagtgtctgccacagccgtcttactaaaaaaagaacaaacgtgtttctctcatgatttttcccttctgtaccaaatttagtcataaaaccacaagcccagcaacccatacagccagcacacatttatcccatgtttgaaggaagaggtctcatcttgatttaatggctcagcattttgtatttgtctgcctgcttcttccaggttcatttcataaagagctgattgatcttgaacttgatgcagcccattgataccatcactactaataaaaggtttcagggcaatcaactttaaattggaagcaatggagatgagcaaacattttcaaatgagcatatcttctgcaaaacttagcagacttccaggatggttggtacaagagaagaggtcatagaagaagctaaatataaagtttgcagttctcatag

SEQ ID NO: 7254 - DNA, 593 bp, Homo sapiens
atggtttcctaaaaagactttttatccttctgaaaaatctcaactttagcattcattaagatcagaaaacaatcctaacatgccaggcacagctacttgtaatttgaaacagagtttgtaaccccaaacaccacattttaacgatttttaatttatgattgaactctaggtactcaagtcaacattctcagttccacattsatgattcctattgtggtcatttagtttaattctttgacttttattcttaaatagattgtcatgctacttcttataaacatccattttaaaattgaaaagaacattgaatgcaattgagaatgacagcacatttagagtacatttagatgtaattgagagggaagggggtaaacttgtttttctaagaaaacatcagagcggatatacagtagggtcagggcaatgagtgcaaggcgacagttccagataggtagtgcacgacagccaggagaggaagtgacagctggtggctttagtaaacagatttcagtttaggattttctgaacattttaatatgcttctccactgtaccttttgttcccaattcaataacaaagccgtttcttatttg

SEQ ID NO: 7255 - DNA, 621 bp, Homo sapiens
atctccaaccaatctctaaccaatatcccccaactccatcaccttcagacagtgactgtctatatgctgatgactcaagccctgccctttctcctaagtttcttttttctttttttcttttctttttttttttttttttgagacagggtcttgctctgtcactcaggctggagagcagtggcatgatcatagctcactgcagcctcaacctccgggactcaagcaatcctcttgcctcagcctccagagtagctgggatcacaggcacacaccatcatacccagctaaattttgaattgttttatagggacagggtctcatcatgttgcccaagctggtctcaacctcctgrgcttaggcagtcctcccacctcagtctcccaaagtgctgggattacaggcgggagccaccgcacctggcccttctctcctacgtttctaatctaattcataaccaaaggctgagtgggactggccaataggtgaaaacaacaggccagcattctccaagtccaaagagagaggccactaatcaagcacagcatgtgtttctcaagcctgactgcatatcagaatcacctggaaaatttttacaccactaagagggctgagctccttccc

SEQ ID NO: 7256 - DNA, 785 bp, Homo sapiens
cagaacactgctgctggcatctgaatgtttgtccctcacacaggattccagaacactgctgctgtggtstgttttttttcttttactttttgtctttttaaaattactttattaatatttatttttaattgacatatgacattgcaagttttttgtaatgtaaaatgtgatggacaaacattcagaccaatgcagtagcgttctggaatcctatgtgagggacaaagtatgcatacattgtgaaaaggtcaaatctagctaattaacaaatacatcaactcacatagttatcatctttgtggtgaatacacataacattaactttctatttctcaagaatacaatatgtcatcatcaattacaatcaccttgctctacagcacatctcctgaaatgtattccttctgtctagctctaagtatatatcctctgattaacatcacggcaactcccctttacccctagctctgatacccaccattgtactttgtaattctatgagatcaactttttaacataccagtaggagacatgtcatgatatatttgtctttttgtgcctgacctatttcacttaacctattgtcctccaggttcatccatgttgtttacaaatgacagggttttctttttttactgccaaatagtataccacattttctttcttttttaattatatttctgtattgaattatttatatacatattttttattatactttaagttcttggatacatgtgcacaacgtgcaggtttgttatgtttgcatacatgtgccatgttgg

SEQ ID NO: 7257 - DNA, 630 bp, Homo sapiens
agaagctcagacatcttcactttttgaggctgataccatggaggctgaagaaagatatgcatgtccaaggccaactgagctaaatatgggattgacctgggagggcattgataatgtttcatagtagtgtctgaaagtataatttgggccattggctgggcttaatttttaatgaatgaaatagtaactattccatttcatttcacaaaaatgatttaaagttgtttacatgaattacatttaatatgatagctcacttttcattcaaataatttaatactaggaaaaatataaactagaaagtttatatttyttagcagcaaaactaaaatgctatagttaagtcatgatgtccaatagttgctataatcgggccaaacatttgactttacgctccctggtggccaaagggaaaagggaaactgtatctttcctatggggaaaaagtcaccctagtacctttgggacaaaaaaaaaaaaaaaacaacagcttttattaaccctttattttaaaatatgttttcttatctggagctttatgtgaaaggctgtaagaaatgcaacattggccgtgcagtggctcacacctgtaatcctagcactttaggaggccaaggcgggtggatcact

SEQ ID NO: 7258 - DNA, 630 bp, Homo sapiens
agaagctcagacatcttcactttttgaggctgataccatggaggctgaagaaagatatgcatgtccaaggccaactgagctaaatatgggattgacctgggagggcattgataatgtttcatagtagtgtctgaaagtataatttgggccattggctgggcttaatttttaatgaatgaaatagtaactattccatttcatttcacaaaaatgatttaaagttgtttacatgaattacatttaatatgatagctcacttttcattcaaataatttaatactaggaaaaatataaactagaaagtttatattttttagcagcaaaactaaaatgctatagttaagtcatgatgtccaatagttgctataatcgggccaaacatttgactytacgctccctggtggccaaagggaaaagggaaactgtatctttcctatggggaaaaagtcaccctagtacctttgggacaaaaaaaaaaaaaaaacaacagcttttattaaccctttattttaaaatatgttttcttatctggagctttatgtgaaaggctgtaagaaatgcaacattggccgtgcagtggctcacacctgtaatcctagcactttaggaggccaaggcgggtggatcact

SEQ ID NO: 7259 - DNA, 630 bp, Homo sapiens
agaagctcagacatcttcactttttgaggctgataccatggaggctgaagaaagatatgcatgtccaaggccaactgagctaaatatgggattgacctgggagggcattgataatgtttcatagtagtgtctgaaagtataatttgggccattggctgggcttaatttttaatgaatgaaatagtaactattccatttcatttcacaaaaatgatttaaagttgtttacatgaattacatttaatatgatagctcacttttcattcaaataatttaatactaggaaaaatataaactagaaagtttatattttttagcagcaaaactaaaatgctatagttaagtcatgatgtccaatagttgctataatcgggccaaacatttgactttacgctccctggtggccaaagggaaaagggaaactgtatctttcctatggggaaaaagtcaccctagtacctytgggacaaaaaaaaaaaaaaaacaacagcttttattaaccctttattttaaaatatgttttcttatctggagctttatgtgaaaggctgtaagaaatgcaacattggccgtgcagtggctcacacctgtaatcctagcactttaggaggccaaggcgggtggatcact

SEQ ID NO: 7260 - DNA, 574 bp, Homo sapiens
tactatgtattttgtaaatcataccccaaaataagtaattgaaagggatgagattcaaatcaacattggcagaagctagtactttctttctcttctgcaggggattgtcttttgcagtcctgaggctgggtacactcccctttggatgcttgttgctctctgagagcatttttctggcttcaggaacatcctgctggaaggggcagagttggtgcctcatccaatgacagatggacttagtgtatcacaaccccagcttcctctctccctagttgtgaggcctctgaggcagttccacattgtctcctagaggtccccagtggtaagactgagctccggtcacccacagtggtaatttgcttgacaacacacctgttatgcacagccgtccttcacctttctcatttccttctcccctacctgtgtatcctgagatcacctcccaaataaactacctccacttcaatctttatctcagsttttgcctctgggaaaatccaaactaagagttttcttttgaggaaattgaggaacctctcaaggatctggttttctcactttggcaaggaggagg

SEQ ID NO: 7261 - DNA, 779 bp, Homo sapiens
ggatcccaaacttcagaccacagggaggggctggctgaagcaggagagaaacccatgaggggtyaccctgagggcccaatcagaaggcacatggggggtcagggagggttaagaatgctctctggggcctgtgagtcatgggcctggcagcttggggtttcccaagactgctcagacgggctgtggcatgcagggagctcagccagaacctcccttgcaaatctgcaccctttcccccagcaacccccccgcttccagcacccctctgaccagcaacccctccttggcaaggtagaactcccaatggcccaccctgagatggcttcaaatcaagtcccacgggcagaaagcaaacagtggctccactccagtgtgcctagagatcccgcttcattcattcatttgttcattcattcactcactctttaataaaatactcattgacccctcccatctgccagtcactgcccttggcacagagctcagtttaatggaaaaaggagaaaagagaacagtccgtgctggggaggcacagccaggagtccaggagggcaggccatggagaaagtgatgtcagagctgggcctaaagggtgtgcaggggtcagccaggcgaggctctggaacaagagctatccaggcgcttgctctctgagctgggcacagctgaatgtggctgagcatgtgggaagtgcaggatgagggccagactcaggcaggaaccaaagcagcaaggcttcctagactctgtgccaggattggggctttttcccagggggg

SEQ ID NO: 7262 - DNA, 1529 bp, Homo sapiens
tttctaataatacataatacaggagaaaattggttaatctctagattgggttcaatatattatttatattttgagaattttaattttttatgaaggtctaatatttttggaataagatcaccaacaaagttatgttctagtgtaacttcatatgttgtggataaatgtaacacatgaagttctttatcaagcttttcttttatcattctcttttcatgtccagttaacacttcatggcctgtaaagatggctacaaatgctgtgctttgttgccctcctatcgcattaagaaatttgatcataataacatgggaaataatcctgagaggccagccttcctgcacaaaagcctacaagaaagaaacaaatgagaccaaggaaaccaactgtactgatgagagaataacctgggtctccagacctgatcagaattcggaccttcagattcgtaccgtggccatcactcatgacgggtattacagatgcataatggtaacacctgatgggaatttccatcgtggatatcacctccaagtgttaggtaaggagcatcatatattgaggtatttcacatcaccagatttgtgacggaaacaaatgtctctctgaattccatatgctttatgtgaaaaccgaagcatttttttccctctttcctctctgcagttacacctgaagtgaccctgtttcaaaacaggaatagaactgcagtatgcaaggcagttgcagggaagccagctgcgcatatctcctggatcccagagggcgattgtgccactaagcaagaatactggagcaatggcacagtgactgttaagagtacatgccactgggaggtccacaatgtgtctaccgtgacctgccacgtctcccatttgactggcaacaagagtctgtacatagagctacttcctggtcagtaattcttttagttttattttttatttttttccattcttttaaargagttaagaaaaaaaaagatgtgcaaatatattttgttcgaggatgctctccccactcttcatttttatctcttccctgaccaaaataaagagatgagttgaggagaatagtacagacatttgttgtaaaaagcccttttttagaatgcagtttaattctactattaatgttcacttctatgctagtagttaattagcatgagtagtatacttttaaaaataatacttatggcttattgaaagataaagtatactttgaagcatgtaattatggttctattagaaggatacatttactcaaagttgcttttatgaatttttagtttgttgtaattttgttttctggacttttcatcattgaatttcttaaatgtcttataataacatctatgattcatttaatcactgtttagtttatttactctctgctctcatcctactctcatttcttgttatttaaaaactattaaatatcaacaaacatatttaaagtgcaattgttctgtaaggcttcctgaaaaacattagctctacccctgtctttccaacccaattgccatctcc

SEQ ID NO: 7263 - DNA, 782 bp, Homo sapiens
aatcaagaaatacactcatgctttctctttcaaatgactttttttccttggacttcataagtgctttaccttttttgtttccttaagaatgtatgtacctatcgtgaactatcactaagcctattgacaaaactagagaaccccttagtaatattttctacatggtcagatttattaggtaatctgttagttctattttttctcaaagtcattccttcttgagttttggtatgtgtttggtctaatctctcctgattggcctctagatctgctgtacagctattgtcctggacactctcattgcctcagtcctctacttagcctgtgtctatttaatctgagtttcttctgtcttctatacatttgtttgtttttaactctttctttcatatatgagacttttcttcactctttggtaatccttgggtatggattcattttgaagtgagtactatatgagctacttggaagctcwactagttaatggttggatttgtcaactagttagcttcagttcagtgaaaagaagctgtgattttttaataactagagatttgttatgtatctgaaggccttttctctggggctgttcaggctctgcagaaattaactcagcagtttctggccttggagagataagcctgactaccagtgtttgggaaaggagggagcaatatgtgtatgtgtgtgagtgtgcatgtgagtgtgccactgttgagaatcagacttccttttatacctctcttcagtctggtatttcattctcaccctccctgatgtct

SEQ ID NO: 7264 - DNA, 815 bp, Homo sapiens
atcaccatgtgctggcaattctaaacaatgtcaatgagaacctactgtttcctaaaaaaaatccttagttggtctaagttctaaacaattattacaatttccatttaattttaacactaatatgcaagcctcaaattagcacattttcatttgttatttaatattatcttatgcacgaaggttaattcagaaaactcctagttatacagccaaacctcaacgcatgcagactcagtgacacacatttgtttggagagtaggttggtcatagttcagaatctttcaagctcactttgggtacaattcagctctccagccctgtagttctacatattcctgtatttattcagtagattcaaaacaaacaataatagcacagtgattgtgaaggcacagaaatagagcttgaaatacttcaatttgacattctgtgtgactacgtaaagttcttacttttttggaacttcaagcaagagtagttcattcacttcagtatcacctcgttgttggaaaattctgtgtaatgtaggtataactatgagaaagcttttccagacaagatgaagctgtgtccacaggaaagacaaatttcgtgaagttaatgtcaacctttgaagtactatgcaatctaaaagaaaatgtggcacaaaaagatcagctcaagttttattctttcctttatataattatttttcttttccaagtaatttttttttatttctgttgtgaagctttggatgagtgatgtggttcggctgtgtccccacccaaatctcatcttgaattgtaactcccacaatttccacgtcacraga

SEQ ID NO: 7265 - DNA, 846 bp, Homo sapiens
aacatagctcagtcctgccttgaggcactgaccagggctttrggttgcttgtgactaagtaaagctggcttggcagattgcatctgaatgtgagaaactggatacaactgtcaagtcaagaaatggaaatggctttcactaggtcgtccatggatatttaggataagtctcagccaagctgactcttgccccttgagttgaagccctttcatttctcacatcctctgtgaaaggtatttttgttcaaataggcctgcacatctcaggaaagaccatttgattctttcagtataactcataggaattgtgctttgttgtgcacccctcatgggtaagatgaagctcaggacttccagggcagctgactctgggggcaggaggtgggtctacccaggactgggaggagccctgacccaaacttatgacacttttcctaaaggccagacatgagggcagtgagaaggctatacctccactgcagccatgatgggtgctggagcaaagcccttccccactgggaccctgaggagagacaattgccatgtcacactcagccaccagcttctcacaccttgccaggtctgggctacattctccagctctcagctcacaaaggcaggtctaagaaggccccaggagtgctacacaggaccagtgctggcatgcaccacctactagaccagacccagtcacctcccctcaagtgatgctaaaatggtttgccctgacccttctaaataatttcaaggtcctttgtctttcttttacaacatacacttagagattctcctgtgataccccctcgcctactatgaagtagctggagctgctctcactaaaaaaagg

SEQ ID NO: 7266 - DNA, 846 bp, Homo sapiens
aacatagctcagtcctgccttgaggcactgaccagggctttgggttgcttgtgactaagtaaagctggcttggcagattgcatctgaatgtgagaaactggatacaactgtcaagtcaagaaatggaaatggctttcactaggtcgtccatggatatttaggataagtctcagccaagctgactcttgccccttgagttgaagccctttcatttctcacatcctctgtgaaaggkatttttgttcaaataggcctgcacatctcaggaaagaccatttgattctttcagtataactcataggaattgtgctttgttgtgcacccctcatgggtaagatgaagctcaggacttccagggcagctgactctgggggcaggaggtgggtctacccaggactgggaggagccctgacccaaacttatgacacttttcctaaaggccagacatgagggcagtgagaaggctatacctccactgcagccatgatgggtgctggagcaaagcccttccccactgggaccctgaggagagacaattgccatgtcacactcagccaccagcttctcacaccttgccaggtctgggctacattctccagctctcagctcacaaaggcaggtctaagaaggccccaggagtgctacacaggaccagtgctggcatgcaccacctactagaccagacccagtcacctcccctcaagtgatgctaaaatggtttgccctgacccttctaaataatttcaaggtcctttgtctttcttttacaacatacacttagagattctcctgtgataccccctcgcctactatgaagtagctggagctgctctcactaaaaaaagg

SEQ ID NO: 7267 - DNA, 846 bp, Homo sapiens
aacatagctcagtcctgccttgaggcactgaccagggctttgggttgcttgtgactaagtaaagctggcttggcagattgcatctgaatgtgagaaactggatacaactgtcaagtcaagaaatggaaatggctttcactaggtcgtccatggatatttaggataagtctcagccaagctgactcttgccccttgagttgaagccctttcatttctcacatcctctgtgaaaggtatttttgttcawataggcctgcacatctcaggaaagaccatttgattctttcagtataactcataggaattgtgctttgttgtgcacccctcatgggtaagatgaagctcaggacttccagggcagctgactctgggggcaggaggtgggtctacccaggactgggaggagccctgacccaaacttatgacacttttcctaaaggccagacatgagggcagtgagaaggctatacctccactgcagccatgatgggtgctggagcaaagcccttccccactgggaccctgaggagagacaattgccatgtcacactcagccaccagcttctcacaccttgccaggtctgggctacattctccagctctcagctcacaaaggcaggtctaagaaggccccaggagtgctacacaggaccagtgctggcatgcaccacctactagaccagacccagtcacctcccctcaagtgatgctaaaatggtttgccctgacccttctaaataatttcaaggtcctttgtctttcttttacaacatacacttagagattctcctgtgataccccctcgcctactatgaagtagctggagctgctctcactaaaaaaagg

SEQ ID NO: 7268 - DNA, 846 bp, Homo sapiens
aacatagctcagtcctgccttgaggcactgaccagggctttgggttgcttgtgactaagtaaagctggcttggcagattgcatctgaatgtgagaaactggatacaactgtcaagtcaagaaatggaaatggctttcactaggtcgtccatggatatttaggataagtctcagccaagctgactcttgccccttgagttgaagccctttcatttctcacatcctctgtgaaaggtatttttgttcaaataggcctgcacatctcaggaaagrccatttgattctttcagtataactcataggaattgtgctttgttgtgcacccctcatgggtaagatgaagctcaggacttccagggcagctgactctgggggcaggaggtgggtctacccaggactgggaggagccctgacccaaacttatgacacttttcctaaaggccagacatgagggcagtgagaaggctatacctccactgcagccatgatgggtgctggagcaaagcccttccccactgggaccctgaggagagacaattgccatgtcacactcagccaccagcttctcacaccttgccaggtctgggctacattctccagctctcagctcacaaaggcaggtctaagaaggccccaggagtgctacacaggaccagtgctggcatgcaccacctactagaccagacccagtcacctcccctcaagtgatgctaaaatggtttgccctgacccttctaaataatttcaaggtcctttgtctttcttttacaacatacacttagagattctcctgtgataccccctcgcctactatgaagtagctggagctgctctcactaaaaaaagg

SEQ ID NO: 7269 - DNA, 846 bp, Homo sapiens
aacatagctcagtcctgccttgaggcactgaccagggctttgggttgcttgtgactaagtaaagctggcttggcagattgcatctgaatgtgagaaactggatacaactgtcaagtcaagaaatggaaatggctttcactaggtcgtccatggatatttaggataagtctcagccaagctgactcttgccccttgagttgaagccctttcatttctcacatcctctgtgaaaggtatttttgttcaaataggcctgcacatctcaggaaagaccatttgattctttcagtataactcataggaattgtgctktgttgtgcacccctcatgggtaagatgaagctcaggacttccagggcagctgactctgggggcaggaggtgggtctacccaggactgggaggagccctgacccaaacttatgacacttttcctaaaggccagacatgagggcagtgagaaggctatacctccactgcagccatgatgggtgctggagcaaagcccttccccactgggaccctgaggagagacaattgccatgtcacactcagccaccagcttctcacaccttgccaggtctgggctacattctccagctctcagctcacaaaggcaggtctaagaaggccccaggagtgctacacaggaccagtgctggcatgcaccacctactagaccagacccagtcacctcccctcaagtgatgctaaaatggtttgccctgacccttctaaataatttcaaggtcctttgtctttcttttacaacatacacttagagattctcctgtgataccccctcgcctactatgaagtagctggagctgctctcactaaaaaaagg

SEQ ID NO: 7270 - DNA, 846 bp, Homo sapiens
aacatagctcagtcctgccttgaggcactgaccagggctttgggttgcttgtgactaagtaaagctggcttggcagattgcatctgaatgtgagaaactggatacaactgtcaagtcaagaaatggaaatggctttcactaggtcgtccatggatatttaggataagtctcagccaagctgactcttgccccttgagttgaagccctttcatttctcacatcctctgtgaaaggtatttttgttcaaataggcctgcacatctcaggaaagaccatttgattctttcagtataactcataggaattgtgctttgttgtgcacccctcatgggtaagatgaagctcaggacttccagggcagctgactctgggggcaggaggtgggtctacccaggrctgggaggagccctgacccaaacttatgacacttttcctaaaggccagacatgagggcagtgagaaggctatacctccactgcagccatgatgggtgctggagcaaagcccttccccactgggaccctgaggagagacaattgccatgtcacactcagccaccagcttctcacaccttgccaggtctgggctacattctccagctctcagctcacaaaggcaggtctaagaaggccccaggagtgctacacaggaccagtgctggcatgcaccacctactagaccagacccagtcacctcccctcaagtgatgctaaaatggtttgccctgacccttctaaataatttcaaggtcctttgtctttcttttacaacatacacttagagattctcctgtgataccccctcgcctactatgaagtagctggagctgctctcactaaaaaaagg

SEQ ID NO: 7271 - DNA, 795 bp, Homo sapiens
tttttgtttgtggtcgtgacttactgataatrtaatccaaaatacattttttattttgtatttatttatttatttttgagacggagtctcagtcttctgcccatgctggagtatagtggtgtgatattggctcactgcaccctccgcctcctggattcaagcgatgctcctgcctcagcctcctgagtagctgagactacaaacgtacgccaccatgcctggctagtttttatacaaaatacgttttttaaaaaacaattttttttttggaggtcgggggaccgtcgcccattctgttgcccaaactggagtgcagtggtgcaatcttggctcactgcaacctctgcctcccaggttcaagcgattcttgtactcagcctcctgagtagctggaattataggtgtgtgccatcatgccaagctaatttttgtatttttagtagagatgaagtttcgccatgttggcgaggctagtctcagactcctggcctcaagtgattggctgacctcagcctcccaaagtagaaaatcttcttgaaaaataaaattccaaatctcaaaaggccctatataattttggtgttggaaatttacttgtcaatgaaaatgactatttacacaaattataagcttccatattaatatatatgtgtgtgaacctgaaattcaaattttattatattgtttatgaaaggtacagcctctgagattcatcagatggtatttacctttagggcatatctaaaaataaaatacagtacatgaaatccagtgctttaatccagtgattcttaa

SEQ ID NO: 7272 - DNA, 795 bp, Homo sapiens
tttttgtttgtggtcgtgacttactgataatataatccaaaatacattttttattttgtatttatttatttatttttgagacggagtctcagtcttctgcccatgctggagtatagtggtgtgatattggctcactgcaccctccgcctcctggattcaagcgatgctcctgcctcagcctcctgagtagctgagactacaaacgtacgccaccatgcctggctagtttttatacaaaatacgttttttaaaaaacaattttttttttggaggtcgggggaccrtcgcccattctgttgcccaaactggagtgcagtggtgcaatcttggctcactgcaacctctgcctcccaggttcaagcgattcttgtactcagcctcctgagtagctggaattataggtgtgtgccatcatgccaagctaatttttgtatttttagtagagatgaagtttcgccatgttggcgaggctagtctcagactcctggcctcaagtgattggctgacctcagcctcccaaagtagaaaatcttcttgaaaaataaaattccaaatctcaaaaggccctatataattttggtgttggaaatttacttgtcaatgaaaatgactatttacacaaattataagcttccatattaatatatatgtgtgtgaacctgaaattcaaattttattatattgtttatgaaaggtacagcctctgagattcatcagatggtatttacctttagggcatatctaaaaataaaatacagtacatgaaatccagtgctttaatccagtgattcttaa

SEQ ID NO: 7273 - DNA, 827 bp, Homo sapiens
ctcattaatggaactatccttttccttttttgaccacttccttatgttacccctgaaatctagttggggctctgtggtgtctgattttccctggctgcttctttagttttgtctccttttccaggctcaacgaggtgctgatggaagcagaagagcctgaagtcttgcaggactcactggatagatgttattcgactacttcaacttactttcaactacatgcctcattccagcagtatagaagtgccttttactcatttgaggaacaggacgtcagcttggcccttgacgtggacaataggttttttactttgacagtgataaggcaccacctggccttccagatgggagtcatattcccacactaagcagcccttactaagctgagagatgtcattgctgcaggcaggacstataggcacatgtaggtttgaatgaaactgtagttccctttggaagcccagtcataggatgggaaagtgggcatggctctattcctattctcagaccatgccagtggccacctgtgctcagtctgaagacgttggacccaagttaggtgtgacacgttcacacgactatgtagcacatgccgggagtgatctgccagacattctaatttgaaccagatatctctgggtagctacaaagttcctcaggggtttcattttgcaggcatgtctctgagcttctatacctgctcaaggtcagtgtcatctttgtgtttagctcatccaaaggtgttaccctggtttcattgaacctaaccccattctttgtatcttcagtgttggtttgttttagctgatccatctgtaacacaggag

SEQ ID NO: 7274 - DNA, 827 bp, Homo sapiens
ctcattaatggaactatccttttccttttttgaccacttccttatgttacccctgaaatctagttggggctctgtggtgtctgattttccctggctgcttctttagttttgtctccttttccaggctcaacgaggtgctgatggaagcagaagagcctgaagtcttgcaggactcactggatagatgttattcgactacttcaacttactttcaactacatgcctcattccagcagtatagaagtgccttttactcatttgaggaacaggacgtcagcttggcccttgacgtggacaataggttttttactttgacagtgataaggcaccacctggccttccagatgggagtcatattcccacactaagcagcccttactaagctgagagatgtcattgctgcaggcaggacgtataggcacatgtaggtttgaatgaaactgtagttccctttggaagcccagtcataggatgggaaagtgggcatggctctattcctattctcagaccwtgccagtggccacctgtgctcagtctgaagacgttggacccaagttaggtgtgacacgttcacacgactatgtagcacatgccgggagtgatctgccagacattctaatttgaaccagatatctctgggtagctacaaagttcctcaggggtttcattttgcaggcatgtctctgagcttctatacctgctcaaggtcagtgtcatctttgtgtttagctcatccaaaggtgttaccctggtttcattgaacctaaccccattctttgtatcttcagtgttggtttgttttagctgatccatctgtaacacaggag

SEQ ID NO: 7275 - DNA, 827 bp, Homo sapiens
ctcattaatggaactatccttttccttttttgaccacttccttatgttacccctgaaatctagttggggctctgtggtgtctgattttccctggctgcttctttagttttgtctccttttccaggctcaacgaggtgctgatggaagcagaagagcctgaagtcttgcaggactcactggatagatgttattcgactacttcaacttactttcaactacatgcctcattccagcagtatagaagtgccttttactcatttgaggaacaggacgtcagcttggcccttgacgtggacaataggttttttactttgacagtgataaggcaccacctggccttccagatgggagtcatattcccacactaagcagcccttactaagctgagagatgtcattgctgcaggcaggacgtataggcacatgtaggtttgaatgaaactgtagttccctttggaagcccagtcataggatgggaaagtgggcatggctctattcctattctcagaccatgccagtggccacctgtgctcagtctgaagacrttggacccaagttaggtgtgacacgttcacacgactatgtagcacatgccgggagtgatctgccagacattctaatttgaaccagatatctctgggtagctacaaagttcctcaggggtttcattttgcaggcatgtctctgagcttctatacctgctcaaggtcagtgtcatctttgtgtttagctcatccaaaggtgttaccctggtttcattgaacctaaccccattctttgtatcttcagtgttggtttgttttagctgatccatctgtaacacaggag

SEQ ID NO: 7276 - DNA, 827 bp, Homo sapiens
ctcattaatggaactatccttttccttttttgaccacttccttatgttacccctgaaatctagttggggctctgtggtgtctgattttccctggctgcttctttagttttgtctccttttccaggctcaacgaggtgctgatggaagcagaagagcctgaagtcttgcaggactcactggatagatgttattcgactacttcaacttactttcaactacatgcctcattccagcagtatagaagtgccttttactcatttgaggaacaggacgtcagcttggcccttgacgtggacaataggttttttactttgacagtgataaggcaccacctggccttccagatgggagtcatattcccacactaagcagcccttactaagctgagagatgtcattgctgcaggcaggacgtataggcacatgtaggtttgaatgaaactgtagttccctttggaagcccagtcataggatgggaaagtgggcatggctctattcctattctcagaccatgccagtggccacctgtgctcagtctgaagacgttggacccaagttaggtgtgacacgttcacacgactatgtagcacatgccgggagtgatctgccagacattctaatttgaaccagatatctctgggtagctacaaagttcctcaggggtttcattttgcaggcatgtctctgagctkctatacctgctcaaggtcagtgtcatctttgtgtttagctcatccaaaggtgttaccctggtttcattgaacctaaccccattctttgtatcttcagtgttggtttgttttagctgatccatctgtaacacaggag

SEQ ID NO: 7277 - DNA, 828 bp, Homo sapiens
ctcctgtgttacagatggatcagctaaaacaaaccaacactgaagatacaaagaatggggttaggttcaatgaaaccagggtaacacctttggatgagctaaacacaaagatgacactgaccttgagcaggtatagcagctcagagacatgcctgcaaaatgaaacccctgaggaactttgtagctacccagagatatctggttcaaattagaatgtctggcagatcactcccggcatgtgctacatagtcgtgtgaacgtgtcacacctaacttgggtccaatgtcttcagactgagcacaggtggccactggcawggtctgagaataggaatagagccatgcccactttcccatcctatgactgggcttccaaagggaactacagtttcattcaaacctacatgtgcctatacgtcctgcctgcagcaatgacatctctcagcttagtaagggctgcttagtgtgggaatatgactcccatctggaaggccaggtggtgccttatcactgtcaaagtaaaaaacctattgtccacgtcaagggccaagctgacgtcctgttcctcaaatgagtaaaaggcacttctgtactgctggaatgaggcatgtagttgaaagtaagttgaagtagtcgaataacatctatccagtgagtcctgcaagacttcaggctcttctgcttccatcagcacctcgttgagcctggaaaaggagacaaaactaaagcagccagggaaaatcagacaccacagagccccaactagatttcaggggtaacataaggaagtggtcaaaaaaggaaaaggataggtccattaatgaggtaa

SEQ ID NO: 7278 - DNA, 773 bp, Homo sapiens
gttaacacagaattaagcgaccacaattgctgaaagttacctggggcatggtggcttttgatcttcttccccttcttggtacttttcaatttctgcaataaattcagacatggacagacacattaagctgattcccctacacacataacattccactgtctaatcctcacacagggacctcaggctcctcagcataagaataggacactgtgagagatatatttcaggaggcctgaaggatggtcatgatagagattccttggtttttgtcccagaaactaagggtaaaatgtccctattctggtagatcattatcccaatatcatttgtcccaagtttgtgcaaacggttatgccatatctttccaatcaatttaaagcaaatgccctcaaacgatttctaggagaaaaactgcaatattcagccctgtctcatcaaatactcagattgttcatagttgtgaggattttagacactgaaattagagtgagaaaggaaatctacaaacccttgagtcaaaatcatagttctctgaatttgtcccatctgcccaggtccaatgccttgagagtagaatcagagtgccacaggcatggcctgagactaggaagagagccacgctcactgacccatcccatgtttgggcttccaggtagaactagagtttcgttcaacctatatgtgcctataggtcctcagtgcagcaatgacatctctcagctcagtaacggcctcttagagcaggaataggatctctatacrgaaaactcagt

SEQ ID NO: 7279 - DNA, 788 bp, Homo sapiens
cgggcgaggccatgtagagcctcgaagatcatgggaagtgggacagaattactacccagccaacaaagcaaggagacaccttcatcctgtcagaaaacggggaaactaacacagaggagcggcttgggatgcagagcctcaatgtcctgtccacaagatggcaatggtcaccatgacctctgggacgcttatgaagggcgatgacgaagcacaggggacacgccgggcgggcgcctcttcagggctggggctccccgcgcccaggggcagcccaggtccccggaacccaagccgcgtctgcctccgggccgcgcgggggcgctgtggtccggcggcggcccggggcgctgcgtggtcgcggcaggggcggagggggccgcggggagggaggcgggaagagcgcggcacttccgctggccgctggctcgctggccgctcctggaggcggcggcgggagcgcagggggcgcgcggcccggggactcgcattccccggttccccctccaccccacgcggcctggaccatggacgccaggtgggggctagggcagcagcgagctcacgtgaccgagcccccgggccacgtgactgccgcgcctcagcacgggggccgggtggggtcccggctgctcggccgtcggccagcatatcgctgcccggagccagcggggatgggagctrcggcttggttttgtgctccttggggagcttcgggcggaggggctggggaccctgacgtcccggatcttggaggggagtgtgggggaaagggcgctttctctgacctg

SEQ ID NO: 7280 - DNA, 810 bp, Homo sapiens
caaacccatccagccctatctggctctgccagaccgagctccccactcttcccccaacagacctcacactctgcccccagcatgtctgctcatgctagacgccccctttcccgacacccccatagtcccaaccccccatcatgcgagacgcagctgatttctgccaggcttagctgtcacagctcccccgctattgatggtaaccacattacgttcgcatccgagatttggggttttcctgcctcccgggctccgagccggagggcataatccatttccagttcagctctgtaatcccccagttcctagcaagggcctttgcatttgtgggtattcaatgaataaatgaatgagtgaatgaatgactgaatatatccccacagtttagagttcctgcccagaggctgcaaactgccatctgaggagccargtctcggccagaggtggcttttatttgtcacacatggtgttttgttttttgttttttaatttttaattggttgtcaacatttaaaaccaggaaggccccctacaatacagacttccagattctctagaagaatcaaaagatctggaaatgccactccctggtccctcgtggcggccctggctggagcaaagaagtgctgtcccctctgagcgggcatgtgctcaccaggcacgctctccccactctcaagagcctctccctgccctagggctgttcttcaggacacttgccccagacacccatggcctcctggcacctgaagaggtccgagtttgtagaccctaggcaagtgaggaggcagagacctggagagacagcac

SEQ ID NO: 7281 - DNA, 816 bp, Homo sapiens
ataatgtgactttaagctcccaaggggatgatgaggattatttctcaggctcagagaaaacagcaagtttagaagttctctgtgtgggtcatatctctgacctaatcctttcagtttacccagcacactggtccagcaaggagaatgaatgtaggttaggttgacatgagttcatagctatgctgctgagtttatcagaagcagagaaaatatgaagcaaataggccagatcagccacattaagtaaatcccgttgctatgcttcagaattaatktgaggagctaaaacgttattagccacaatagtaaccaagggagacttcagttagaatgatgtcctaaaggactgtgtaaaggaagatcaaaagaaatctgtcagaaaatgcaatagcttcaagatcgaacattaggttagaggacaatataaacctgaattgtttggtacagttctatatagattgtctgtgccagccaggaaacatgttgagtagcattaagataggcttcaggtgataaaagagatcagaaattcagtgacgagtgataatttcaaagaggttatttaagtacctgtgttcccatctaaataatgctgagtccccttagtattgtgaagaataattgtggaaaaaacatattattttgaaatgccaatttatcatacagttttttatctattgaaaatttggcatttaaaattattttgtaaactgtgttttccaataagtacggcttaggtcagggatgtttaagtgggaatgtgcatcagaaacatcttgggagatttttaaaatacggagtcccagaatcagtctc

SEQ ID NO: 7282 - DNA, 627 bp, Homo sapiens
ttttatttctttctttgcatgtttgctctggctagaaattccagtactctattgaatagaagtagtaaaattgggcatccttgtcttgttccagatcttagtgaaaaggctttcaccttttccctattcagtaggatattagctgtgggcttgtcatatatggcctttatcatgctgaagtatgttccttctataaacaatttgttgagggttttttccatgaagagatgttaaattttatcaaatgctttattcagcatctgttgaaatcatcatatttttaccccacgattctgttaacatatccctgtgattctctttaacatatccccatgatacgttgaaacatccttgcattcctgggataaaacccacttgatcatagtaaatcaaattttaagtgtgttgttaaattctatttgctagtattttttgagaatttttgtacctatgtttgtcaaggatattggtctgtagtttgttgttgttgttgtgtctttgtctggttttggtatcagggtagtgcaagaatgttcttaatactgyatgtcatagaacattcttgccaccaccacctcaaccccatcttcaccactaatgccagtacccacaggcttttgtgataat

SEQ ID NO: 7283 - DNA, 808 bp, Homo sapiens
cccttaaggttttttggccaaatctgggtcacatgcacagccatagaccaatcagttggtaacatgggattaccatgaccagctgagagtgattatgaaataccctaaggaacttaggtagaaggctcaccttccttaagatctttctagttttgtcagtaaggaagaaggtttaaatggttgttaggtagaaaaccagcagggatgatggcttagtctaaaacagtcttattacagagtaggtgcttactaggttgataaggcaccatcagcctgaggtataggaagtccaggggacagggacgccctcctagtcctagttcccagtgcttatcaggccctgccccccacccccacagattgcctgggcccccacttcacctggctgcaggctgtcttcaccaatttccctgtgctgatccagtttgtcaatggtatgaagtgtgtggctggtctctgcccccgagactttgaagactatggttgcacctgcaggtttgagatggaagggttgcctgtggatgaatctgacaggtaagtgagttccacaggtgagcaagaccaaaaaaagtgagctcatgggaggcctggytgataccttggcaagagcacaaatacagaaaagcccctggacttgggactcaggagagggtttaattccactacctactagttgggtgactcatctttacatggcaatgtcatctgtgatcagctctcactctaaaaagttattaagatcctatgttatgtctgttatgcaaaacttcattttagtgcactgaatatttaaaatagaccactgcca

SEQ ID NO: 7284 - DNA, 780 bp, Homo sapiens
gtatatatatagttcacttggaagaacttaagaaatcattttcaaaataagcttccacaaaaattttaccacagaccaggactgacaagggagccactgcctctgccataatcagaaaattgcaacagagctgtagactccagaatcactcgtctcttccaaggtcaagaagctgccaagttaggaaaccagcttgcaaatcaagatgccgcctaacaacttctagctccaatctcttgttgcctctattatgttccatgcaagcaaaataaatgttgtgccttgactctctccttatgtagctctcttctgaatcaaagtatcatgtgaatacacatagtaggtgaaacctaaattgtatgtggaacctttctgcaagagcatgggaaattccctattagcttttcagcttctatagtgtaagaagacactaaattgttatgagacacttaattgctgtgcttccaccacatagggatagaccattatttattgattgtttttgtaaacaccattacagaggaaacagtttttgggggtttttttgtttttagttttttgagacagagccttgttctgtcacccaggctggagtgcagtggcmggatcttggctcactgcaagctccgcctcccaggttcacgccatttccctgcctcagcctcctgagtagctgggactacagggtacccgccaccacgcctggctaatttttttgtatttttagtagagacggggtttcaccgtgttagtcaggatggtctcgatctcctgactttg

SEQ ID NO: 7285 - DNA, 780 bp, Homo sapiens
gtatatatatagttcacttggaagaacttaagaaatcattttcaaaataagcttccacaaaaattttaccacagaccaggactgacaagggagccactgcctctgccataatcagaaaattgcaacagagctgtagactccagaatcactcgtctcttccaaggtcaagaagctgccaagttaggaaaccagcttgcaaatcaagatgccgcctaacaacttctagctccaatctcttgttgcctctattatgttccatgcaagcaaaataaatgttgtgccttgactctctccttatgtagctctcttctgaatcaaagtatcatgtgaatacacatagtaggtgaaacctaaattgtatgtggaacctttctgcaagagcatgggaaattccctattagcttttcagcttctatagtgtaagaagacactaaattgttatgagacacttaattgctgtgcttccaccacatagggatagaccattatttattgattgtttttgtaaacaccattacagaggaaacagtttttgggggtttttttgtttttagttttttgagacagagccttgttctgtcacccaggctggagtgcagtggcasgatcttggctcactgcaagctccgcctcccaggttcacgccatttccctgcctcagcctcctgagtagctgggactacagggtacccgccaccacgcctggctaatttttttgtatttttagtagagacggggtttcaccgtgttagtcaggatggtctcgatctcctgactttg

SEQ ID NO: 7286 - DNA, 810 bp, Homo sapiens
atcctgggtcttggttccaagcctctgacctgtaaacagctgtatggagatcagaaatccttcacgcttcaaccccagcttccacacaatgggcgccatagcctgtgcattaggaaatctaacacaccactaaagtgtttccagaaggagatgtaaaggtgattttagaagtgtgattatttttttcaggtgaaagatgtggaagagtttgataaactctgtgaacacacctggaacactggaagaatctaagtgttgatgtatttataagctcagtagattagatttccaagagctgtcygagaatttgtgaggatcttgctgggttgtgaacttgccccggtaggcagctgaagggctataaagaaaaaagaatgtatggaatgcataactgactctttaaatcaaactctctgtttaagggagcacagtctgttcaatttcagtaaaagagagtgacagtgactatagtaagtttacaagaaaagaagaaagaaatcaatgagtggaatttgaagggtcaaggggtttgaacacttaataaactgaacatcaatttaaaaaataattggttttaagtagtcccctatttacacaaaagcagacctcagcaaaggcacactgaccatttctaatctgagaagtgaggactggggtccctatttcacatttgagtgcatcagttctgagtagtgagggcagctcccaagtccacagagctcaagagctggagctgattccaacccagaccaacctggctgcaggctggcccaggatgtctctagcctagtcccatttgcagatccgtgg

SEQ ID NO: 7287 - DNA, 810 bp, Homo sapiens
atcctgggtcttggttccaagcctctgacctgtaaacagctgtatggagatcagaaatccttcacgcttcaaccccagcttccacacaatgggcgccatagcctgtgcattaggaaatctaacacaccactaaagtgtttccagaaggagatgtaaaggtgattttagaagtgtgattatttttttcaggtgaaagatgtggaagagtttgataaactctgtgaacacacctggaacactggaagaatctaagtgttgatgtatttataagctcagtagattagatttccaagagctgtctgagaatttgtgaggatcttgctgggttgtgaacttgccccrgtaggcagctgaagggctataaagaaaaaagaatgtatggaatgcataactgactctttaaatcaaactctctgtttaagggagcacagtctgttcaatttcagtaaaagagagtgacagtgactatagtaagtttacaagaaaagaagaaagaaatcaatgagtggaatttgaagggtcaaggggtttgaacacttaataaactgaacatcaatttaaaaaataattggttttaagtagtcccctatttacacaaaagcagacctcagcaaaggcacactgaccatttctaatctgagaagtgaggactggggtccctatttcacatttgagtgcatcagttctgagtagtgagggcagctcccaagtccacagagctcaagagctggagctgattccaacccagaccaacctggctgcaggctggcccaggatgtctctagcctagtcccatttgcagatccgtgg

SEQ ID NO: 7288 - DNA, 810 bp, Homo sapiens
atcctgggtcttggttccaagcctctgacctgtaaacagctgtatggagatcagaaatccttcacgcttcaaccccagcttccacacaatgggcgccatagcctgtgcattaggaaatctaacacaccactaaagtgtttccagaaggagatgtaaaggtgattttagaagtgtgattatttttttcaggtgaaagatgtggaagagtttgataaactctgtgaacacacctggaacactggaagaatctaagtgttgatgtatttataagctcagtagattagatttccaagagctgtctgagaatttgtgaggatcttgctgggttgtgaacttgccccggtaggcagctgaagggctataaagaaaaaagaatgtatggaatgyataactgactctttaaatcaaactctctgtttaagggagcacagtctgttcaatttcagtaaaagagagtgacagtgactatagtaagtttacaagaaaagaagaaagaaatcaatgagtggaatttgaagggtcaaggggtttgaacacttaataaactgaacatcaatttaaaaaataattggttttaagtagtcccctatttacacaaaagcagacctcagcaaaggcacactgaccatttctaatctgagaagtgaggactggggtccctatttcacatttgagtgcatcagttctgagtagtgagggcagctcccaagtccacagagctcaagagctggagctgattccaacccagaccaacctggctgcaggctggcccaggatgtctctagcctagtcccatttgcagatccgtgg

SEQ ID NO: 7289 - DNA, 589 bp, Homo sapiens
aaccaagcactgccacttacctcccatgtgatctcagttaagttgcctccctcccctaagcctctttctacacctgtaaaatgaagatatgaaatgtttcctcttcatagggctgttgtgatgcttaacttcagaagcaagtggagaacgtaaaacgtggaatccttcttagctaggctcttgtgtctgaggtccttattactaacgaaaaagagggaatkaatactgagaagaaaccagcaaccacggccacagagagcatctcatcagctctatttggctgcaccaacatggagcactccttttagacacagcattgtgccaagtccctgcagaaacatgtccctccctccatctagactgtgcacggccagtgatgcctggtctgaacagtcaggatgaatatggcagaagtggcttcattcagacagagtccgtggcatgaccctgactgtctcatgcaatgagaccctcatgaggaccctgctctcaggaggggggtgtaggcttggagggcacctcgaccttcagggactcactttcattctctcaagcaaaccccagaactatacctggcccatctcatcca

SEQ ID NO: 7290 - DNA, 784 bp, Homo sapiens
cacccagtgcttggcacttagcggagacattcagttaaagaataaatgaataaaaatgaatgaatgaataccttgtataaaaacccattattctggctctttgttaatgagtctcagcctgctgagaatcacaattacatttccacgtagcctaatccagcttcctaaaggatttcttaaaaaaaaaaaaaaatactcaacaggagtccttttccctctagtcacctgccatctcaataagggcttataaatgcactggaacagcaacaggactctcatacacaaacctcaggaccataaccttgcagagccccccagggatgccagtgccttgattcactgggaagtacccagcaaaaatccaatttttcaaggctacccttctgtagcctccaagaaggcacatccaagcttactagatagcaagaagcatttttagatctcttgtctgcactgttgtttttttktttgtttgtttgtttttttgagatagactctcgctctgtcacccaggctggagtgcagtggcatgatctcggctcactgcaacctccgccttccgggttcaagcaattctcctgcctcagtctcctgagtagctgggattacaggcttgcacaaccatgcttggctaatttttgtattcttgggagagacgggttttcaccatgttggccaggctggtcacgaactcctgacctcaagtgatctgcccacctcagcctcccaaagtgctgggattataggcatgagccaccgcacccgccattgtctgcactttttg

SEQ ID NO: 7291 - DNA, 582 bp, Homo sapiens
ggcattgttgagtccctgagcacaggggccagctagataaatatgcatcttgggggagagtgggtcaggacagcaggcaaaggggggctctggtaacccctggtgagaggacaggtaggaggtcatgtgggcaccagggtggggaatagaagtcagcctgtgcaattgagctgctgaaagaacttgctacagagtctcagagtttggccctctcctctgtacyatgttcttgagtgacacaagtgagaacacagtaaagcacctggatcaattctgtgaatgacttaagacaagaaaagggagctcatttatttgaatggcatatctcaggctcaccactgacaggccagcaccaagtttagagattatatctaacataaatctaacatccttcccttactttcaaatgccagagactcaagcacaaaagatgaagggacctgaactgacagaagttcttgtgaacacaagttgacaaactcctatacatccttcaaggaccagatgatctcttccctcctaggtgaagcctttccgagactccccttttatacatgctttcatcctagtccctctcatact

SEQ ID NO: 7292 - DNA, 582 bp, Homo sapiens
ggcattgttgagtccctgagcacaggggccagctagataaatatgcatcttgggggagagtgggtcaggacagcaggcaaaggggggctctggtaacccctggtgagaggacaggtaggaggtcatgtgggcaccagggtggggaatagaagtcagcctgtgcaattgagctgctgaaagaacttgctacagagtctcagagtttggccctctcctctgtaccatgttcttgagtgacacaagtgagaacacagtaaagcacctggatcaattctgtgaatgacttaagacaagaaaagggagctcatttatttgaatggcatatctcaggctcaccactgacaggccagcaccaagtttagagattatatctaacataaatctaacatccttcccttactttcaaatgccagagactcaagcacaaaagatgaagggacctgaactgacagaagttcttgtgaacacaagttgacaaactcctatacatccttcaaggaccagatgatctcttccctcctaggtgaagcctttccgagactccccttttatacatgctttcatcctagtscctctcatact

SEQ ID NO: 7293 - DNA, 582 bp, Homo sapiens
ggcattgttgagtccctgagcacaggggccagctagataaatatgcatcttgggggagagtgggtcaggacagcaggcaaaggggggctctggtaacccctggtgagaggacaggtaggaggtcatgtgggcaccagggtggggaatagaagtcagcctgtgcaattgagctgctgaaagaacttgctacagagtctcagagtttggccctctcctctgtaccatgttcttgagtgacacaagtgagaacacagtaaagcacctggatcaattctgtgaatgacttaagacaagaaaagggagctcatttatttgaatggcatatctcaggctcaccactgacaggccagcaccaagtttagagattatatctaacataaatctaacatccttcccttactttcaaatgccagagactcaagcacaaaagatgaagggacctgaactgacagaagttcttgtgaacacaagttgacaaactcctatacatccttcaaggaccagatgatctcttccctcctaggtgaagcctttccgagactccccttttatacatgctttcatcctagtccytctcatact

SEQ ID NO: 7294 - DNA, 795 bp, Homo sapiens
agccatccaagaagagagctaaaccaagtagacacctcaagtgaggcctccgaaaaccagcaataggaagcctcccagtgtaatttcgtcttggaccaagtaccaccacctcatccccctccccagcttaattgcaggaagaattgttatgctaattagcattattcaccgagttaacagagcacagggtctaaatttagatcccctgctgcagagggctctgaattcattggaagctggcaaagatgctggtggggwtggggaggtccccgggctgggctgcaggacagtggaggggaggtcacggggtcgttctccctctcatcccatcttcagacctcctttaacttagaacagaaggcctgtgactcctggtaggaaagactccgaggaggcaaaatcctctcccaaaggaaggttgagccaaaggaaagggaagggcccgagggctgagtggccatcatgtgcccggcaagacacccaggtcactggtaagagcccagtgccgtggagcggctctggcttcatgtcacacaccctggggtccaggcctgactcttcggcatataagctgagtgaccttaggaaaagttactctgcctgtctggacctcagtgtcttcatccatagaggggatcatgacatcttctttgcagggctgctgtgaaggttgaatgagatactgcatgccaagtggtctcacagagctgggatttgtacccagacatgtctgagtaaaatggctgcgtggttctccccaccctccctggcttcaccccactgtcatgcatgcca

SEQ ID NO: 7295 - DNA, 795 bp, Homo sapiens
agccatccaagaagagagctaaaccaagtagacacctcaagtgaggcctccgaaaaccagcaataggaagcctcccagtgtaatttcgtcttggaccaagtaccaccacctcatccccctccccagcttaattgcaggaagaattgttatgctaattagcattattcaccgagttaacagagcacagggtctaaatttagatcccctgctgcagagggctctgaattcattggaagctggcaaagatgctggtggggttggggaggtccccgggctgggctgcaggacagtggaggggaggtcayggggtcgttctccctctcatcccatcttcagacctcctttaacttagaacagaaggcctgtgactcctggtaggaaagactccgaggaggcaaaatcctctcccaaaggaaggttgagccaaaggaaagggaagggcccgagggctgagtggccatcatgtgcccggcaagacacccaggtcactggtaagagcccagtgccgtggagcggctctggcttcatgtcacacaccctggggtccaggcctgactcttcggcatataagctgagtgaccttaggaaaagttactctgcctgtctggacctcagtgtcttcatccatagaggggatcatgacatcttctttgcagggctgctgtgaaggttgaatgagatactgcatgccaagtggtctcacagagctgggatttgtacccagacatgtctgagtaaaatggctgcgtggttctccccaccctccctggcttcaccccactgtcatgcatgcca

SEQ ID NO: 7296 - DNA, 837 bp, Homo sapiens
ttgcaatgctaacattctgggatcgtagagggagggtgggcacagcacagaagaaggtgtggctagcagggccaaaacacctaagaaagtgtcactccctcccagcccccacccaagcagccaggtgaccttgaaarcatcttcatgcccccacgcccccaggagccagccaggatgacaaagaagtatggtccaacttgctttgcttttattgagcatgagtgtgccagatattgtgccaagggctttgcacatattctttgccaaaaaaggtgggtggctaagttgtaatgggctcttcctggcccagcaatgcccaggcatgtcccagcgtcccttcacagaggtcctgggctgatgagtaaggaaaacaggtgagaggcccaccagactctctttggggcatatgtacaatctttccttcacctccctgccagcctcctgccctagtgtgttggaagacgggtcccttggcccccacatgggcgggccccgctccacagggatgccccagccaggtgtgcagtgctgtgctaagcagcctgccagctccaacagatggcagagccgaatcgccatccatcacagccgtaagtggccaactccccttctggtgctccagacaaacggctctgctcctccgtccctcccccgacccctccgtcaaccactctcgccaggcagccaggcggagtcgtttactcagcaagtcctgcgggcagaatgtggggggaggcagagctgggcgacacaaggaggcacatccatcatcacagagagccagcagcttgctccacacagcgatggagggaccaggagtgtgctcgtggaggatgc

SEQ ID NO: 7297 - DNA, 837 bp, Homo sapiens
ttgcaatgctaacattctgggatcgtagagggagggtgggcacagcacagaagaaggtgtggctagcagggccaaaacacctaagaaagtgtcactccctcccagcccccacccaagcagccaggtgaccttgaaaacatcttcatgcccccacgcccccaggagccagccaggatgacaaagaagtatggtccaacttgctttgcttttattgagcaygagtgtgccagatattgtgccaagggctttgcacatattctttgccaaaaaaggtgggtggctaagttgtaatgggctcttcctggcccagcaatgcccaggcatgtcccagcgtcccttcacagaggtcctgggctgatgagtaaggaaaacaggtgagaggcccaccagactctctttggggcatatgtacaatctttccttcacctccctgccagcctcctgccctagtgtgttggaagacgggtcccttggcccccacatgggcgggccccgctccacagggatgccccagccaggtgtgcagtgctgtgctaagcagcctgccagctccaacagatggcagagccgaatcgccatccatcacagccgtaagtggccaactccccttctggtgctccagacaaacggctctgctcctccgtccctcccccgacccctccgtcaaccactctcgccaggcagccaggcggagtcgtttactcagcaagtcctgcgggcagaatgtggggggaggcagagctgggcgacacaaggaggcacatccatcatcacagagagccagcagcttgctccacacagcgatggagggaccaggagtgtgctcgtggaggatgc

SEQ ID NO: 7298 - DNA, 1913 bp, Homo sapiens
aggtcatgttgctgcagccagtgactatataaggaaaaaagattacattccctttcttgccatcattcctcatcttcacatgactctcttgcatacctccatttgcctgcaaaggggaagtttcctccccctcttcctctaatggggggaagggttaggagggttaggataggctcttttctcattgtatgttccagaaagatgatgcccactaccatatactctccctagtcctcatgttgtatgtgcagtacatttaagatctttacagaaatataggaatatcatgtttaaaaaatgacctataattttgaaacaaaactggtggatatgcatcaagaacagctggtaattttcactacgtacattcccataattttgtctataaagggtaggcctgcctcagtcttgaaaaattgaaaagctttaaaaaggacatctacgaaagttggatacctttaatagttaccatactgataccaatgtcaatcaacatgaaaagtgatgctttgaggttacaaataacatatctaagcaattgtcttgactcttttggatttgatatacactacttcccttttattattgataaaacattcatagaagctgtgtgtttcattgtacagaagcgtctgctgcatttcaagaatatatacaccattttataaaaacctaccctgcagtcaactggaaaagttaccattctctacataggccccacacttggtgctgttgagctttttgttctacctctatgtctacttgttgtgattctaactttatatccaaagcatttttctgatatcatgccttcaatgaatcctttcctagtttccctccacttactaactggtaaactcttttaagacatgagctatagtgcctaaaacataaaatttcactttgaagacaataggaaaacagtgggcatttgttgaatttcatcagtaaaaatatctctaactgatttaatagtgttgcattctatcaagtgtgaagctttacatttgcgaattaaattgaaatggatttttactctatgtgaaggtgaagatcgaggatgtatgatagaaatttaacatatacacggtccttaaaagttataagattatctcacaaaactggtaaacatataggacaaacactattacctccattttagatgtggatacactgagactgagaaaagttaaattaatttccaagcttgacagttatgagtggaggaacttactttttatactgcagtctttctttgttcataatatcactgcactgtaggaaagggagtgggaatctctgtattcggatcaactgacataaataaattctaataattactatacatattaaatggtcttccagaagcccatttccaggtcattgaaaggatatttccattcatcatctagggctatgctgagtcaccagccatttttactctcgtcgttaacaggatggctcccaagaaacctgattcatcccttatcatttcaaaaggaagcagcctgctaattacaactattgtggaaatttggagggaggacaacaggattggctaggtgggactagtcatggttctgaaaaacagtggaagaaaaggctaaggttctggcaatatggtgctctaattccccaaggaggctgagattcctggggtgcacacacggctctattcatgggtgggccacctggcactgtgcagatgccacttccaggttccacccaagactccctgtgggccaggggtggaagaagaataactctgtggcttctggaagatggcaaatcctagragagcaaaatgaaaggaaggtgtgttttgccttttgcctgattataacaagggattctgaattctcagcgcatactcattgcagagatttcttgctgtcaacttcacagcaactgga

SEQ ID NO: 7299 - DNA, 777 bp, Homo sapiens
agaccattattctaagtgaagtaactcaggaatggaaaaccaaacaccctatgttctcactcataaatgagagctaagctatgaggatgcaaaggtataagaatgataaaatggactttggggactttggggaaagggtgggagggggtgaaggataaaaggctatacattgggtagcgtgtacactgtttgggtgatgggagcaccaaaatctcagaaatcaccactaaataaattattcatgtaaccaaacatcacctgttccccaaaaacctattgaaataamatgttttttaaattaaaaaaaatgttgttgtcactgtataaggacttcactaatgtacttagcattcttgatatgataaaatcctatcatctatgcttatttaaaaaaagagaaaaatatatactttttatgataaatatgattaacaaatatgtaatattttagtcccatttctacatttagtttcccaaggtttataagcataaataaaatacattaggaataactaaagaagtatatacatgtttatattagattttaattttatatatattttatatacatgtagagagcatatatgcatatatttgtgtgtgtgtgtgtgtgtgtgagatatgcactcacaattttaggaaaattcttctacatttttcattcacgtatgtcttttacatgtgtctaagaatcttgttagaaatgaattaaaaatcaaagtaaattgatttctacctttgaataaggtggtacttttagtttttgacaacccagtg

SEQ ID NO: 7300 - DNA, 777 bp, Homo sapiens
agaccattattctaagtgaagtaactcaggaatggaaaaccaaacaccctatgttctcactcataaatgagagctaagctatgaggatgcaaaggtataagaatgataaaatggactttggggactttggggaaagggtgggagggggtgaaggataaaaggctatacattgggtagcgtgtacactgtttgggtgatgggagcaccaaaatctcagaaatcaccactaaataaattattcatgtaaccaaacatcacctgttccccaaaaacctattgaaataaaatgttttttaaattaaaaaaaatgttgttgtcactgtataaggacttcactaatgtacttagcattcttgatatgataaaatcctatcatctatgcttatttaaaaaaagagaaaaatatatactttytatgataaatatgattaacaaatatgtaatattttagtcccatttctacatttagtttcccaaggtttataagcataaataaaatacattaggaataactaaagaagtatatacatgtttatattagattttaattttatatatattttatatacatgtagagagcatatatgcatatatttgtgtgtgtgtgtgtgtgtgtgagatatgcactcacaattttaggaaaattcttctacatttttcattcacgtatgtcttttacatgtgtctaagaatcttgttagaaatgaattaaaaatcaaagtaaattgatttctacctttgaataaggtggtacttttagtttttgacaacccagtg

SEQ ID NO: 7301 - DNA, 777 bp, Homo sapiens
agaccattattctaagtgaagtaactcaggaatggaaaaccaaacaccctatgttctcactcataaatgagagctaagctatgaggatgcaaaggtataagaatgataaaatggactttggggactttggggaaagggtgggagggggtgaaggataaaaggctatacattgggtagcgtgtacactgtttgggtgatgggagcaccaaaatctcagaaatcaccactaaataaattattcatgtaaccaaacatcacctgttccccaaaaacctattgaaataaaatgttttttaaattaaaaaaaatgttgttgtcactgtataaggacttcactaatgtacttagcattcttgatatgataaaatcctatcatctatgcttatttaaaaaaagagaaaaatatatactttttatgataaatatgattaacaaatatgtaatattttagtcccatttctacatttagtttcccaaggtttataagcataaataaaatacattaggaataactaaagaagwatatacatgtttatattagattttaattttatatatattttatatacatgtagagagcatatatgcatatatttgtgtgtgtgtgtgtgtgtgtgagatatgcactcacaattttaggaaaattcttctacatttttcattcacgtatgtcttttacatgtgtctaagaatcttgttagaaatgaattaaaaatcaaagtaaattgatttctacctttgaataaggtggtacttttagtttttgacaacccagtg

SEQ ID NO: 7302 - DNA, 777 bp, Homo sapiens
agaccattattctaagtgaagtaactcaggaatggaaaaccaaacaccctatgttctcactcataaatgagagctaagctatgaggatgcaaaggtataagaatgataaaatggactttggggactttggggaaagggtgggagggggtgaaggataaaaggctatacattgggtagcgtgtacactgtttgggtgatgggagcaccaaaatctcagaaatcaccactaaataaattattcatgtaaccaaacatcacctgttccccaaaaacctattgaaataaaatgttttttaaattaaaaaaaatgttgttgtcactgtataaggacttcactaatgtacttagcattcttgatatgataaaatcctatcatctatgcttatttaaaaaaagagaaaaatatatactttttatgataaatatgattaacaaatatgtaatattttagtcccatttctacatttagtttcccaaggtttataagcataaataaaatacattaggaataactaaagaagtatatacatgtttatattagattttaattttatatatattttatatacatgtagagagcatatatgcatatatttktgtgtgtgtgtgtgtgtgtgagatatgcactcacaattttaggaaaattcttctacatttttcattcacgtatgtcttttacatgtgtctaagaatcttgttagaaatgaattaaaaatcaaagtaaattgatttctacctttgaataaggtggtacttttagtttttgacaacccagtg

SEQ ID NO: 7303 - DNA, 777 bp, Homo sapiens
agaccattattctaagtgaagtaactcaggaatggaaaaccaaacaccctatgttctcactcataaatgagagctaagctatgaggatgcaaaggtataagaatgataaaatggactttggggactttggggaaagggtgggagggggtgaaggataaaaggctatacattgggtagcgtgtacactgtttgggtgatgggagcaccaaaatctcagaaatcaccactaaataaattattcatgtaaccaaacatcacctgttccccaaaaacctattgaaataaaatgttttttaaattaaaaaaaatgttgttgtcactgtataaggacttcactaatgtacttagcattcttgatatgataaaatcctatcatctatgcttatttaaaaaaagagaaaaatatatactttttatgataaatatgattaacaaatatgtaatattttagtcccatttctacatttagtttcccaaggtttataagcataaataaaatacattaggaataactaaagaagtatatacatgtttatattagattttaattttatatatattttatatacatgtagagagcatatatgcatatatttgtgtgtgtgtgtgtgtgtgtgwgatatgcactcacaattttaggaaaattcttctacatttttcattcacgtatgtcttttacatgtgtctaagaatcttgttagaaatgaattaaaaatcaaagtaaattgatttctacctttgaataaggtggtacttttagtttttgacaacccagtg

SEQ ID NO: 7304 - DNA, 708 bp, Homo sapiens
tcatttctcagcctccttacccccacccaaatcaatgggttggctttattatgtgctgctgctctccttctcctttcctgcattgcctctttctcttaaaattggctctggtgcaccccaatagctacaaacccttagatacccagagagcacgtcctcctccccagtagagccggaagcatctgtcccaaactgagcttcactgtgaaagagacattatttccactcatgaragctacaaggtatgtgaaatagtgaatttcatgtaaatatatgcacactcaagtgtataaaaaagaaattattctacaaagactgaagaggaacactcactgtcaaaagacatttttaattcttgagcatttgcagggaaaattgactttaagcttggctaaatcatgtagaaactgtgttttcttataaacatgggaaagaaacattcaagaagttttatcaaagaatgggaaatctagcctattgcccaggcctaggctcaccactgtccccaccacctcaagcagcacccccttccctccgttctgagctcactaagccttgttgaggagtggaagatggcagctgtgtgtgtccattggccactgcagctgcctcagtgtccacacctcacctcccacccgtagactccctccacctcttctaataagctccttgccctctggttttgattcggagctccagctactggct

SEQ ID NO: 7305 - DNA, 801 bp, Homo sapiens
tcggctagtctcacaaggccaaaatcaaggtgatggaatttgtctctggaggttctggggctgaatctgcttccaagctcactcaggttgttggtaaaatttagttccctgtagttgtagtaatgaagtccctgtttccttgttaactgtcacttgggggtcatgctttgctcctagaagctgtctgcattccttcacacactttccacawgcccttcctctagcaatagcaagtcaagtcactctgtcattttgattatctacaacttttctcatctcaacttttttattatttccagagaaagtttaccacttttaaggactcatgtgattgggttgggcccaagtagataacccctgatagcctccttattttactgcctatgatttaattacatctatcaagtcccatttgccatgttacatgacatattcaaaggctccaggcattagactgggcatccaggcattagggtgtggacatctttggatgttcattatttagcttatcacaaatgtaatgttcctggcacacagtggataattaataaatggtggcaaagccaatcacttttcactgtctccacttctacaactcaccactctagtctgaaccatcatcatctgtttctagactgattaaataatctctaaactgatttctgtttccactcttgccttcctagattttattcctcacctagcaggcaagaggagtttctaaaacataaatacaagtctttgcttaaaaccaccttctagtgtcccattgcaattagagtaaaatctagtcttgttgtt

SEQ ID NO: 7306 - DNA, 746 bp, Homo sapiens
ttgggtaagtgatttaatggtctatgcctcagtttcctctcttgtaaaacagagataaagatcatatatcgtttatggggttaactgtgaaggctaacgrgggtcacttttatggggtgcttcaccgagtgcctggcttgtgcacgtgtcccttgtatgccaagtatttatattattcttgtttcgtgtactttgaactccgacatctgcaacatatacttcttgattatacgcatcttgattataaaacaaccaaatgcatctacatccggaactgtcttgcgcacgaacttctaaacccaaattggaagagacagctacagatggagcacgcacagctacacgcaaacatacacatatccttctaacacctgcagctcctggccccagaacgcagacacccaagagctacccttagataggagtctatactgggctacctacagaagaacccaggtcgccgctggcggcctcgcagctgcaccccgacagccactttcttggctggttgccgtgaggtcacattggaaaccagcgaggcagaaagcgcgctgtcgtgaagcgttgcaagcctctcgtagcggcctgaaggcggctgtctgtctgctggcttaggggaaaggtcagaatctgggttttccttcttggatggaaatttttttaagggcctacacgtcaggaactgtccccacaaagaaagagtgggtcccagaacagcgcagatctagagagaggccctaatcgcg

SEQ ID NO: 7307 - DNA, 746 bp, Homo sapiens
ttgggtaagtgatttaatggtctatgcctcagtttcctctcttgtaaaacagagataaagatcatatatcgtttatggggttaactgtgaaggctaacgagggtcacttttatggggtgcttcaccgagtgcctggcttgtgcacgtgtcccttgtatgccaagtatttatattattcttgtttcgtgtactttgaactccgacatctgcaacatatacttcttgattatacgcatcttgattataaaacaaccaaatgcatctacatccggaactgtcttgcgcaygaacttctaaacccaaattggaagagacagctacagatggagcacgcacagctacacgcaaacatacacatatccttctaacacctgcagctcctggccccagaacgcagacacccaagagctacccttagataggagtctatactgggctacctacagaagaacccaggtcgccgctggcggcctcgcagctgcaccccgacagccactttcttggctggttgccgtgaggtcacattggaaaccagcgaggcagaaagcgcgctgtcgtgaagcgttgcaagcctctcgtagcggcctgaaggcggctgtctgtctgctggcttaggggaaaggtcagaatctgggttttccttcttggatggaaatttttttaagggcctacacgtcaggaactgtccccacaaagaaagagtgggtcccagaacagcgcagatctagagagaggccctaatcgcg

SEQ ID NO: 7308 - DNA, 852 bp, Homo sapiens
tattttatgtttaaagcttaaatggattgaagacataaaggacttgcattttatttcactaaaaaacaggtttcttcccgttgagagtgtgtgtgtrtgtgtgtgtgtgtgtgtgtgtgtgtgtgtgtctttccaaataaatactgcttgctctttaaacacaggtaactgaggggggatttgagccatcttgtccactcctcacccacctcccccagctctacccccaccgcagatccccagtgctccacctcctctcccaggtcaattgttgctttatagctggatgttttctaggccaccttctcggttccaggtggcagagtcccttgcttcccccccacccagtccaacacattgtaacctagagttcaaagacagtgaaaagtcagcagttggagcctctgttggttggagagaatgggaggagaaagaaacagagacagagagaaaagagagaagcgcttcaagcaagttttcaaagctgcttgccaagaggtagtatgcaaacagacacccacctcccctccccaccagccaaataaggatctgggagaaaggcctctgtgctctccttctactgccttagcggggaaggggagacacacctgatagccctttttgaactctggcttctgtttaaggatgtttagaaggcttctagcttttaaagggcaagtgccctggttggtgccccatcccccttcaactcttccaggccacgagggactggagtccagtgatcacaaaggtgacatggtttacctttgaggttcgatgtccctacagtggaggcggctggagaagaagcctgggcgaagcagttgaaagctgcttgttcactggaggact

SEQ ID NO: 7309 - DNA, 770 bp, Homo sapiens
caatttggtgtatgaggcaggctcacaggtacacccttcagtgatgaggtctagaggacataattcatagacatcctgtttcctctgccaacgttatggcagaaatgcccttggacaagtgaaccaggtttctttcattcaagtcctacccagaaatctatagaaatgtctctttttgtttgctcaggacagccacttgcacctactctgggtgaaagggaaagtacttaaaaagattctactggctacagtggaaatctccaaagtgagttacagtaacttaaaattagcacactccttcagcaaaactttgccaaatagctttttttttttttttttttttttttttttgagacagagtctcgctcagtcgcccaggctggagtgcagtggctctgtctccrctcaccgcaagctccacctcctggtttcacgccattctcctgcctcagcctcccgagtagctgggactacaggcgaccaccaccacgcccaactaactttttttgtatttttttagtagagacggggtttcgccgtgttagccaggatggtcgcgatctcctgacctcgtgatctgctctcctgggactcccaaagtgctgggattacaggcgtgagccactgcgcccggctgccaaatatcttttaaaactctaagaaagagaatctttccagagcagggattccagtgctgagatcccccgttgctgctggtgctttcctcacaataacctgctttgaagtctgacatcatgggatgcaagggt

SEQ ID NO: 7310 - DNA, 804 bp, Homo sapiens
tcgagaatttagaataaaaytctccgtgtcttttacttttctttggtgagttggttagctaattagcttaaagctagttcgagcagatgctgtataactcccagattcccctgtaggatagagatactcactcccctagctgccaagaatgttgaccctgctgaaagctcatagcggaattcctcccaagaaatcacccttagttgaataaagctgcttcatccaaggttatgtctctcccagggacagtccacttccagtgactggtcagtgtaggtatgtaaaggccagcctgcttgttccatttaggatgtctcagaaaggccatctcaacctcaaatctctccatggcattgtttgagaagtccaatattggcatcgctttgcaggttaacctctccctctgtgcaattctgctctgtgtgtgtgtgtgtgtgtgtgtgtgtgtgtgtgtgtgtgtgtgtgtctcaaatgtgttattcctgataacattctccaatacacaactacatataaaactccatctcagagtctatttccctgacagcttgacctaggacaattagtacaatagtgacccatggagccactaaaatagattttgaaactgaattcccaaatagctggtaggtaatgattatgagtggagtagtaataggccccagccactagtgttgaattgttaaaacttttactgatagtgaacgggagtgggatctgtggtgaaaggaaatacactggcaggtgtaatatcccaggcatgtgggaggttcagggcaagtgataatgaaaagcgtactgcgt

SEQ ID NO: 7311 - DNA, 754 bp, Homo sapiens
ggatcccaaacaccgtgagctcctggaaaccagtttagccgggccaggtsgggtgggggttagggtgtgaacggaagggaactacatctcccatcatcacttgagcgtttttctaggcagggcagatgccaccctattgcaaagcctattgggaattgtagtttacacaccctcagggtttctggcttagtaagggcaccgctcagcctcttaaaagtctccattctcggcctggcgcggtagctcccgcttataatcctagcactttgggagaccgaggtgggtggatcatctgaggtcaggagttcaagaacagcctggccaacatggtgaaaccctgtctctactaaaaatacaaaaattaggccgggcactgtggctcacacctgtaatcccagcactttgggaggccgaggcgggcggatacgaggtcaggagattgagaccatcctgactaacacggtgaaaccccgtctctactaaaaacacagaaaaaattagctgggtgtagtggtggtcacctgtagtcccagctaatcaggaggctgaggcaggagaatggtgtgaacccgggaggcggagcttgcagtgagccgagatcgcgccactgctctccagcctgggcaacagagcgagactccatctcaaaaaaaaaaaaaaaaaaaaaaattagccggacgtggtggcacatgcctgtaatcctagctacttgggaggctgaggcagaagaactgcttgaacctgggaggtggag

SEQ ID NO: 7312 - DNA, 626 bp, Homo sapiens
aagtgttaaaaaccatcataatttggggtaaggttagtccccccttagcttcacaaggatgggtactatcttctgtggtggtctttggagcacaaatggcaagttgaggaccacagcagttaactttttttttgagatggagcctcactctgtcatccaggctggagtgcagttgtgtgatcttggcttaccgcaacctccacctccygggttcaagcgattctcctacctcagcctcctgagtagctggtattttaagtgcacaccaccatgcctggctgatttttgtaactttagtaaagacagggttttgctgtgttggccacgctggtctcattcaaactcctgacctcaagcgatccacctgccttagcctcccaaagtggtgggattacaggcgtgagccaccatgcctggccgagcggttaacttatggaacaagacctaggcgcctggtactgtgccgtgtacttgaagtggttatagattagactcccacagttataaactatgagctaggtgctaatctcatctccatgttaaagatggagcagctcagatttagggacttgacaggttaggcagtctcataaaggtggagtctggatctgaagccagatctggct

SEQ ID NO: 7313 - DNA, 626 bp, Homo sapiens
aagtgttaaaaaccatcataatttggggtaaggttagtccccccttagcttcacaaggatgggtactatcttctgtggtggtctttggagcacaaatggcaagttgaggaccacagcagttaactttttttttgagatggagcctcactctgtcatccaggctggagtgcagttgtgtgatcttggcttaccgcaacctccacctcctgggttcaagcgattctcctrcctcagcctcctgagtagctggtattttaagtgcacaccaccatgcctggctgatttttgtaactttagtaaagacagggttttgctgtgttggccacgctggtctcattcaaactcctgacctcaagcgatccacctgccttagcctcccaaagtggtgggattacaggcgtgagccaccatgcctggccgagcggttaacttatggaacaagacctaggcgcctggtactgtgccgtgtacttgaagtggttatagattagactcccacagttataaactatgagctaggtgctaatctcatctccatgttaaagatggagcagctcagatttagggacttgacaggttaggcagtctcataaaggtggagtctggatctgaagccagatctggct

SEQ ID NO: 7314 - DNA, 626 bp, Homo sapiens
aagtgttaaaaaccatcataatttggggtaaggttagtccccccttagcttcacaaggatgggtactatcttctgtggtggtctttggagcacaaatggcaagttgaggaccacagcagttaactttttttttgagatggagcctcactctgtcatccaggctggagtgcagttgtgtgatcttggcttaccgcaacctccacctcctgggttcaagcgattctcctacctcagcctcctgagtagctggtattwtaagtgcacaccaccatgcctggctgatttttgtaactttagtaaagacagggttttgctgtgttggccacgctggtctcattcaaactcctgacctcaagcgatccacctgccttagcctcccaaagtggtgggattacaggcgtgagccaccatgcctggccgagcggttaacttatggaacaagacctaggcgcctggtactgtgccgtgtacttgaagtggttatagattagactcccacagttataaactatgagctaggtgctaatctcatctccatgttaaagatggagcagctcagatttagggacttgacaggttaggcagtctcataaaggtggagtctggatctgaagccagatctggct

SEQ ID NO: 7315 - DNA, 2114 bp, Homo sapiens
gaaaatatatctgcatccaaatgagttttcatttgtttccattctgtttgcttttggtgagaacatccttttttctccctgcagcacagctgaagccagtattgtctgtaatctatttttgtttgcttagagtcttcaagagctagggaaatgactgatgacatttttagtttccaagtctgagaaaatggagacgtattggaattgagaactcatgagttgggaagcagaaagtcataaagactcgctaaagcagtagtttgagtcaaatcatatcgctgggggacaacagcagatttggcacattaacccatcatttgttcttgtgtggctatgccactgctagaggcttagctaatatgtcaggaagaaaaatccccaaaccagtaaagccactgccaaagtcctacatgtatgtgcaggcatacaccaataacattgaaaacaacatttggaaagggtctctcctgcttggttataactttaacagaccaaaataatgctgcctttagtgtttctgagaaggtaacacatgaaacccagtttcccctggactgtgggatattgttttgagaacctatttgtgggggaaggcaggtcagtcacacgttcaaaagttcacaaattaagaacatacaaatgacaggaccaccaaatttagaaaatgtcctacaatgtgcattttattccatatcattatacaatgtttacatatagttaaaactctcaagaaaacgtcctttaccagttgtatgtggtgtctaaatctttaacatgaaggactgaaaagagtggaaatccacactgattgttatcctacagattgtcatgagctgcacgtgtgccaatcagaaaggaatggaagtctcrgaagagcagcgtggcttacagacccttggctttagtgaattcaggcatgcgggatccatagtctcatcttgtagtaaaactcaagacaaaataaattagtgttggacagagttctacattgtacaatgttgaacaaaagaccacagggggaccttttgttcaaagtagcaccaatccacacctgattgtgtttccaacattaaccttcctgttgactctatcattggcactttgaatggaacttctcctgctttagtgaggattcctacgctgactaagcacactgtgttgctaaactctctacaaagtgtggcagcatcaacccgggaaatggcacatttgaaccaggatcgccctgacatgggcttgcctttttgtatgtgttttccccaccccctgacctagctggtatcttgtggatgtttctgtgacagtggtaaaagtaaataaattgcatttaaggggtaagcaggtgtttaaaaacaaaacaaaacaaaacaaaatgaaagaatgtggtcgcagctaaggaggttttcacatgttgtttaactccagtaaagtctgatccagcatctgatgcatactaaggttttcttctttggcatgagccactttctctgtggtgagattagaaaattaagtcatgaatagctgtgctttggacacaatggtggtttgtacatttaggcaggcaaacatcaatcacaaacacaggatgagatgattagaactaggcatgcttgtaagacattactcatttctagacaagaacctaagacggaggggagggcatctttgacccaaaggagccatggcacggattctcacagagcagtcaggtgcacctccaccaacaattcactgaggataaaatgcacgtggggtttggtgaaggttcactgacggtgtgccgtgggaacagggagaggtaaaaaccaaatacagctgcagcactgttatacaaactgaagaagttacgaacagcagacatttccaaggtacaggcagttaaaagtctgggagttgtgcggtaacacaaactcacaaaagcaaagatgacataaataggttttctgagaacttttaaaatgatttatttctgttgctcataaaaaattgtcaacatgtttcatgcacacttcattaggacattctcttaatatttttatagtgttctatttattagcatgacattctccccagactccaacagcaccattagactgagtaaagcatacctttca

SEQ ID NO: 7316 - DNA, 837 bp, Homo sapiens
gatcctgatgccacatcaaagatgagtaagttcgatcctcaccctcaccaaaagcatatgtgtgtgtgtgygcgcacatgtacacacactcaccatcaactgccaccccaaatcaattaaatatgatctggggactaggcacttctgtggattatcccactcagtactggcctcgattaatgcagataatggagagctgactggatacagcttacagtatttaatctttcccggcattgtatttgcagaagccaaagtaatgagatggaaataggttaaccagcaagacacctgtcgccgaagctcgtaggctaaaaagatcaatacttaaggagaaatgtttgtctttatgttttgcaccagtgcttcagtccaacatttggtcctgggaggctgaggataaagtgttaatgaattaattttctagctcattctgaaaataaattacccatttctttgagttccttgtgtaccgaggtctgatgagccttcttggtcagtccacgcacacctccactttggagcaaggttgtcattctgcacacatagaagcagagtctgttcttgactggccctggggaagctaacaactcccaggttcctgagagttggaacgtccttctagtgtctaacttcaatctctcctgctgcggcaacactcattttccttctcttgcatctatgctgagatcagcaatcccaggccacctgaggggcacctcagaatccaatggctgaggattgagcccttcctgcatcaatcttgggctggcctgttagcctccctgcgcttgtgcagctgtgtgtgagggttaagcatccctgccctccctgcct

SEQ ID NO: 7317 - DNA, 837 bp, Homo sapiens
gatcctgatgccacatcaaagatgagtaagttcgatcctcaccctcaccaaaagcatatgtgtgtgtgtgcgcrcacatgtacacacactcaccatcaactgccaccccaaatcaattaaatatgatctggggactaggcacttctgtggattatcccactcagtactggcctcgattaatgcagataatggagagctgactggatacagcttacagtatttaatctttcccggcattgtatttgcagaagccaaagtaatgagatggaaataggttaaccagcaagacacctgtcgccgaagctcgtaggctaaaaagatcaatacttaaggagaaatgtttgtctttatgttttgcaccagtgcttcagtccaacatttggtcctgggaggctgaggataaagtgttaatgaattaattttctagctcattctgaaaataaattacccatttctttgagttccttgtgtaccgaggtctgatgagccttcttggtcagtccacgcacacctccactttggagcaaggttgtcattctgcacacatagaagcagagtctgttcttgactggccctggggaagctaacaactcccaggttcctgagagttggaacgtccttctagtgtctaacttcaatctctcctgctgcggcaacactcattttccttctcttgcatctatgctgagatcagcaatcccaggccacctgaggggcacctcagaatccaatggctgaggattgagcccttcctgcatcaatcttgggctggcctgttagcctccctgcgcttgtgcagctgtgtgtgagggttaagcatccctgccctccctgcct

SEQ ID NO: 7318 - DNA, 838 bp, Homo sapiens
ggccaccccaccaagccctggctccatttgatccttggctaacgcttgtagggtgtaggggtagcggtggtgagggggcagagggatgccctggccaggcaggcccctcagcacaccctccgctctgccaccccagccaggatcaacttgaaacagcacagaggagcccgccatccccgtgggagagaagctggagtccaggctccctggagagggagttaatactgcagcacggcgcactctagccaaggcggagaagctgctgagtcacagtccagctgcctggccagccctgagctgcctgctggggcccccagctgctctcagcccagggggctgcctctggcccccagacaggctgccttcccacctccttctccagagactcagcatcttgggcctccagggttccccactccccagcaccccacarcatctcccaaacccacaggcagctgtcctggggcggaggagagggtcttccattggttgagtgtcaagatgcttgggagcacgccaggaagggtgggggaccccgaatgagtgattgagtggggacagatggaggcttggggaccagtgggccctgggctgcctggtgtaggatacggaaagtgtgtgtgtgggggggtgcacccgtgggccccaggaggtctgttgtgcgcatgctctgagtgtgagggaggacgggtaggaccgtgggggtctgccctggtcgtgctcccaagagaggcactgctttctgcagagcgcgtgggcaactgtcagctggggaagcgctcaccaggggaaaggggagctctctgtggcttagcagtgattaacccacacaatcaat

SEQ ID NO: 7319 - DNA, 838 bp, Homo sapiens
ggccaccccaccaagccctggctccatttgatccttggctaacgcttgtagggtgtaggggtagcggtggtgagggggcagagggatgccctggccaggcaggcccctcagcacaccctccgctctgccaccccagccaggatcaacttgaaacagcacagaggagcccgccatccccgtgggagagaagctggagtccaggctccctggagagggagttaatactgcagcacggcgcactctagccaaggcggagaagctgctgagtcacagtccagctgcctggccagccctgagctgcctgctggggcccccagctgctctcagcccagggggctgcctctggcccccagacaggctgccttcccacctccttctccagagactcagcatcttgggcctccagggttccccactccccagcaccccacaacatctcccaaacccacaggcagctgtcctggggcggaggagagggtcttccattggttgagtgtcaagatgcttgggagcacsccaggaagggtgggggaccccgaatgagtgattgagtggggacagatggaggcttggggaccagtgggccctgggctgcctggtgtaggatacggaaagtgtgtgtgtgggggggtgcacccgtgggccccaggaggtctgttgtgcgcatgctctgagtgtgagggaggacgggtaggaccgtgggggtctgccctggtcgtgctcccaagagaggcactgctttctgcagagcgcgtgggcaactgtcagctggggaagcgctcaccaggggaaaggggagctctctgtggcttagcagtgattaacccacacaatcaat

SEQ ID NO: 7320 - DNA, 838 bp, Homo sapiens
ggccaccccaccaagccctggctccatttgatccttggctaacgcttgtagggtgtaggggtagcggtggtgagggggcagagggatgccctggccaggcaggcccctcagcacaccctccgctctgccaccccagccaggatcaacttgaaacagcacagaggagcccgccatccccgtgggagagaagctggagtccaggctccctggagagggagttaatactgcagcacggcgcactctagccaaggcggagaagctgctgagtcacagtccagctgcctggccagccctgagctgcctgctggggcccccagctgctctcagcccagggggctgcctctggcccccagacaggctgccttcccacctccttctccagagactcagcatcttgggcctccagggttccccactccccagcaccccacaacatctcccaaacccacaggcagctgtcctggggcggaggagagggtcttccattggttgagtgtcaagatgcttgggagcacgccaggaagggtgggggaccccgaatgagtgattgagtggggacagatggaggcttggggaccagtgggccctgrgctgcctggtgtaggatacggaaagtgtgtgtgtgggggggtgcacccgtgggccccaggaggtctgttgtgcgcatgctctgagtgtgagggaggacgggtaggaccgtgggggtctgccctggtcgtgctcccaagagaggcactgctttctgcagagcgcgtgggcaactgtcagctggggaagcgctcaccaggggaaaggggagctctctgtggcttagcagtgattaacccacacaatcaat

SEQ ID NO: 7321 - DNA, 838 bp, Homo sapiens
ggccaccccaccaagccctggctccatttgatccttggctaacgcttgtagggtgtaggggtagcggtggtgagggggcagagggatgccctggccaggcaggcccctcagcacaccctccgctctgccaccccagccaggatcaacttgaaacagcacagaggagcccgccatccccgtgggagagaagctggagtccaggctccctggagagggagttaatactgcagcacggcgcactctagccaaggcggagaagctgctgagtcacagtccagctgcctggccagccctgagctgcctgctggggcccccagctgctctcagcccagggggctgcctctggcccccagacaggctgccttcccacctccttctccagagactcagcatcttgggcctccagggttccccactccccagcaccccacaacatctcccaaacccacaggcagctgtcctggggcggaggagagggtcttccattggttgagtgtcaagatgcttgggagcacgccaggaagggtgggggaccccgaatgagtgattgagtggggacagatggaggcttggggaccagtgggccctgggctgcctggtgtaggatacggaaagtgtgtgtgtgkgggggtgcacccgtgggccccaggaggtctgttgtgcgcatgctctgagtgtgagggaggacgggtaggaccgtgggggtctgccctggtcgtgctcccaagagaggcactgctttctgcagagcgcgtgggcaactgtcagctggggaagcgctcaccaggggaaaggggagctctctgtggcttagcagtgattaacccacacaatcaat

SEQ ID NO: 7322 - DNA, 838 bp, Homo sapiens
ggccaccccaccaagccctggctccatttgatccttggctaacgcttgtagggtgtaggggtagcggtggtgagggggcagagggatgccctggccaggcaggcccctcagcacaccctccgctctgccaccccagccaggatcaacttgaaacagcacagaggagcccgccatccccgtgggagagaagctggagtccaggctccctggagagggagttaatactgcagcacggcgcactctagccaaggcggagaagctgctgagtcacagtccagctgcctggccagccctgagctgcctgctggggcccccagctgctctcagcccagggggctgcctctggcccccagacaggctgccttcccacctccttctccagagactcagcatcttgggcctccagggttccccactccccagcaccccacaacatctcccaaacccacaggcagctgtcctggggcggaggagagggtcttccattggttgagtgtcaagatgcttgggagcacgccaggaagggtgggggaccccgaatgagtgattgagtggggacagatggaggcttggggaccagtgggccctgggctgcctggtgtaggatacggaaagtgtgtgtgtgggggggtgcacccgtgggccccaggaggtctgttgtgcgcatgctctgagtgtgagggaggacgggtaggaccgtgggggtctgccctggtcgtgctcccaagagaggcactgctttctgcagagcscgtgggcaactgtcagctggggaagcgctcaccaggggaaaggggagctctctgtggcttagcagtgattaacccacacaatcaat

SEQ ID NO: 7323 - DNA, 786 bp, Homo sapiens
catagtcatatgatgttctctctgttctgcctgcatctgcatccacatttcccccttcttatacagacaacagtcgttggattagggctgaccctaatcaagcttgacctcattttaacttgattatatttgcaaacatgctatctccaaacaaggtcacattcacagatactggggttaggacttgaatatctcttctgggggacaaaattcaacccatgacatgatattttaaggaaatrtaataatctgttaatatgactctcaggaaccccattctggaacaattgagcagcacaatcacaacctgtggcttacagcccggattttggaacatttctacaagagatgtttaagtctctaaacaaaccaacaactgaagcatccaacactccccatgctcccaaaaagttctcatacttacctatctgcattgtttgctggaaatcaaatacacagaggctgagaccatgaagcactaacagctaagttactcacctcaccccatcacctattgcatacaaatgcaggtaccaggaagataacaaaataattggaatccaaacagaaatcccataccatagcattccctagaatgtgcatgtgcacacacacacatacactttacacattcttttcattagcactactggttttgagatgttttctctgtctggaataatcactcatctttgtgaagtagttctgatgactcagaaagagctcttgcttcctcactgtgaaggtcaatggaaagacgtacctaatgagcacatgggtgttaag

SEQ ID NO: 7324 - DNA, 841 bp, Homo sapiens
ggtttttgtctttagttctgtttatgtaatgaatcatatttattgactgggctgtattgaaccaaacttgcaccccagacatgaagccaacttgatcgtggtggataagattttttttgtgctgctggattcggtttgccaatatttaattgaagatttttgcatcgatgttcatcaagaatattggcctgaagttttcttatttttgttgcatctctttcaggttttggtatcaggatgattttgtgctcatagagtaagttagggaggagtctttccttttcaattttttggaatagtttcagtagaaatggtaccagctcttctttgtacctctggtaggattcaggtgttaataccatcttgcttggtaggctatttattactgcctcaatttcagaactcattattggtctatttagagattcagtttcttcctggttcagtctcgggagggtgaaggtgtccaggaatttgtctatttcttctggattttctagtttatgtgcatagaggtgtttatagtattctgtaatgtttgtttgtatttctctggggtcagtggtgatattcccccttattatttctgattgtgtctatttgattcttctttcttttcttctttactagtctagctagctagctattttatctaaaaaaatggctactggatttattgattttttgaaggwttttcatgtctctatcttcttcaatttatcttggatcttggttatttcttgtcttctgctagctttggggtttatttgctcttggatatttttcaatcttatcttttactatttgggacctacaagtagtcggctttttcaatgttagg

SEQ ID NO: 7325 - DNA, 772 bp, Homo sapiens
catgttagccggatggtcttgatctcctgacctcgtcatccgcccacctcggcctcccaaagtgctgggattacaggcgtgagccactgcgcccagccaatttctacaaaactttcaaaatgaactttcttaaaattttaagagtagaattaaatttaggttatttatttctgaggtttttttctgaagagcaattatttctaaaaagcttttaacaaacttctaattatcttttagccatttttccaaactgccctttgcaaacaattattgaacttctcctagtgaacttayattctacaacactgactttattctgctggacagagaatacctttatgtcacttgcatgtgacaatgtactatgcgctaaaagtaatgtttcaagtaactttataccaggaaagggagatcgaagtacaaaaaataataataaagtaattttagacaactaaatttcggtcaaggtataacaagttcgacaagtagagttcatgaacagccaattaataggaatgttgtaggagagaacttgagattaaatggatttggaaagagaggctatccagttataggacaaattcaaacaggttgaaaaaattctgtgaagacaaataaatttcaaacggtactgcataaaccattctagtaattaataattaggaatgacagggcctttccgaacaaagatataccggcaggccaaagcagcacgccgaaaagcagagcaaacagggcggtgaacccagaaagtttgtttactaagcagaga

SEQ ID NO: 7326 - DNA, 811 bp, Homo sapiens
caatccaaggaacggcttgtatgttcctggagcagagggcttcatgctcacaggtgcacaaagtggaaacggttttggtttttggtttttccttttagcttttaatacttttaaaattatttttcttgagaccgggtcttcctctgttgcccaggctggagtgcagtggtgtgattgcagctcactgtagcctcaaactcctgggcataagtgatccttctgcctcagcctccgagtagctgagactacaggcatgcatcatcacgcctggctaattttttttagttttatttttgaagaggccggtctcactatgttggtcagggtggtctcaaactcctgggctcaagcgatcctcccaaagtgctcggattacaggcatgagccaccacacccagcctagcttttactatattttatctgataatccttttatggaaaaaagaagggcagactcttttacagtttgaagaagctccatattccatcaggagccatcttgagcaatacytgggtttctaagagctccccagagccagttctccagctcaccttgctttctaatctaaggttgccctcaccttggacaagaagcacgagtccctcagagtaattcagagtatccaaactcaaaagtctatgtacatggaggccttgctagaccttaatggtgacattttcatcaatatccggttttctgccatgagtccctatccctctttttcttaacatattcaagccagaatattttttcagccattctgtaactgcacagtttcttccaagtctctactttgtctcccattaacta

SEQ ID NO: 7327 - DNA, 842 bp, Homo sapiens
gttttttttctcatctgaaaaatggggctatttgataatgcctacctccacgggaatgggatgggggtgtgttgtacatgagaatgctgcatcagatgagagggttgcaaactgtagaaatgtgcatagtctagcaaaggctgagcctccaagtcagagtggggccaggtcctggagtcagggcagggttgggatggaccagacattttgagcatagggttcatgtttccaaagcaacggcatgcctcccccaccctccagtttcccaggaagtgtctatcccaccctattattgcatcagtttccaaaccttcactttttgatgaagcattcttgggttcctttgctcatgcaacagtcggattctgagcacctatcacattccaggtgctatgctactgaggataycatgagtggaacagtcatggtacttgccctcatggagcttacagtctataggaaggtagattgtaaccaatcatcaaacaacgaagtcagatgacagtggtggtgattgttacaagggcgaggcaggaggcactatgagagtgtgcagaagggagaaccggcctttgtctggggctcagagaaagcttccctcaggggcatgtaacagagctgtgacctgaaggcaaaagttagggtgtcacccaggagcagagggcaggcaggaaccagatacaggacagagcatgctgtgggaggaaccaaaggaccctgggtggggctagggtcccctgagcaagggtccatgtgtataaggaggctggagggggcagggccttgctatgcaggaccttatgggctgtgcaaggatgatggtcttgatcctgagagccagg

SEQ ID NO: 7328 - DNA, 805 bp, Homo sapiens
tccatacaatgatatatgtatgctttcacgtcttttagaggacattaatttttcttaccttaaagtcctttctacttgtgctgttccctctgtcttctcagagctaattccctcactcgtcatctggatgctcctgcgttatgacatcagctctcctcaaacatttggccattcttgattccaccttcctctctgaggctgagcactggcaattctgtttgctcaccctgcttgaagggaaagggaacaactgttgagagcagaagatgggcatggccacacacccctgacatctgggagtgaagkatcctcattccttctaagacttgcccagccccaggaaaccccccatttgataccaaacctatcacatgcatctgccccaggcatccactcctgtggatactacgtggccaatggcagaagcaagaaactacataagggccacttgttgctcctgctgcgatatcccagccagtcacctgtccactgtcccagtgacgcccttccctgtcaccaccagccacctccaccttggggccctctcggggtcaggcccactgctgtttccttggttaatctgctcccatctcctttccatcttccctcgtgggttacagcctagcttattattattttttttttttttttgagatgggggtcttactgtgtcgcccaggctggagtacaatggcacaatctcagctcaatgcaacctccgcctcctgggttcaagtgattcttgtgcctcagcctccagagtagctgggattacaggctccccttaccaggcctggctaatttt

SEQ ID NO: 7329 - DNA, 1539 bp, Homo sapiens
gatattcacagctattaattgagctcttccaagatgtcaggcaatttgttaactcttcatgtgcatcatcttattgaatacggcaacccatacaggtggtaaaattaatatgcacatttaatagaggggcaaactaaggccaggagaggttacttgtctctgatcacagaagaactagtgagtagtagaggtggaatttgagtctggatgtggctgattccagaatccaagcatttgggccctctacttgttagtcttcaatgatgttgcttatgccatatcctatttcttggtattggtttgtgcatttgttaaagaagattagcatagaataatgggtctcactgtgtgactttgttcccccacaacatgtgacaatgtctacagacatttttggttgtcacaacatgggaggaggtgtgtgcatgctgctggcatctagagggtagaggcagggatgctactagatattccataacacacaagtcagtctcctgacaaagaagtattcagcctcaaatgtcagtagtgctaagtgccaccagtagacaccccagtgtagaccatctgaaacctcttccaaccttgaaagttcatggcactcttccagagctcccccgtcagtgacatcagtgttaagtgcaggaaggtgtctccagaagactcttgaggcccaggctcgccaatgtctcgagacaatagatttcaaaggtgatggctatgagccactcccatgcatgagagctctggtggtctaccttctaccctggggtctccagcgtcatggactcaagactccacacaagcctcagcactgtgtttacattcaccatgtggatccccatgaggcaagaggtgaagactgcaatccaaatgctggggttctctcttgctgttttcttcctctccattttaaasaggcagccaggctctgttcagcttcttagtctcaaggatctctgcaggatggaaagcagaaaagcccctcaacagtcagagagaggggagccagaaatggtggtacctaggggaggtggccagatcttgggggcacactgaagtgtgatgcacctggggagccagcccctaagcctgggaaatccagccctgccaaaaaagtgcagggtcccaaacaggcctatgcagcagggggacctgggaattctcccaggcaaccaaagcagcctggggcgggactcagtagagacattgccccagaccggagtgcctctggagggtcctacgcagctgtgttcagggtgaggggcagaagcttaaaacaccactgtaccctgcctgaactgcagtcacatggaaagagggaagatgaagacggaagcctgcgagcagaactggggggcggggaccaagcctgggctcctctccaccctgtgattggacccactgtggccggtgccattccagagccaccctgggtttggcgtgaggcatctcccagctgttatttgacctctagctcccatgggcttatttgaaaatacctgcctgcctttcccttccagctccacctgggaagcc

SEQ ID NO: 7330 - DNA, 1539 bp, Homo sapiens
gatattcacagctattaattgagctcttccaagatgtcaggcaatttgttaactcttcatgtgcatcatcttattgaatacggcaacccatacaggtggtaaaattaatatgcacatttaatagaggggcaaactaaggccaggagaggttacttgtctctgatcacagaagaactagtgagtagtagaggtggaatttgagtctggatgtggctgattccagaatccaagcatttgggccctctacttgttagtcttcaatgatgttgcttatgccatatcctatttcttggtattggtttgtgcatttgttaaagaagattagcatagaataatgggtctcactgtgtgactttgttcccccacaacatgtgacaatgtctacagacatttttggttgtcacaacatgggaggaggtgtgtgcatgctgctggcatctagagggtagaggcagggatgctactagatattccataacacacaagtcagtctcctgacaaagaagtattcagcctcaaatgtcagtagtgctaagtgccaccagtagacaccccagtgtagaccatctgaaacctcttccaaccttgaaagttcatggcactcttccagagctcccccgtcagtgacatcagtgttaagtgcaggaaggtgtctccagaagactcttgaggcccaggctcgccaatgtctcgagacaatagatttcaaaggtgatggctatgagccactcccatgcatgagagctctggtggtctaccttctaccctggggtctccagcgtcatggactcaagactccacacaagcctcagcactgtgtttacattcaccatgtggatccccatgaggcaagaggtgaagactgcaatccaaatgctggggttctctcttgctgttttcttcctctccattttaaacaggcagccaggctctgttcagcttcttagtctcaaggatctctgcaggatggaaagcagaaaagcccctcaacagtcagrgagaggggagccagaaatggtggtacctaggggaggtggccagatcttgggggcacactgaagtgtgatgcacctggggagccagcccctaagcctgggaaatccagccctgccaaaaaagtgcagggtcccaaacaggcctatgcagcagggggacctgggaattctcccaggcaaccaaagcagcctggggcgggactcagtagagacattgccccagaccggagtgcctctggagggtcctacgcagctgtgttcagggtgaggggcagaagcttaaaacaccactgtaccctgcctgaactgcagtcacatggaaagagggaagatgaagacggaagcctgcgagcagaactggggggcggggaccaagcctgggctcctctccaccctgtgattggacccactgtggccggtgccattccagagccaccctgggtttggcgtgaggcatctcccagctgttatttgacctctagctcccatgggcttatttgaaaatacctgcctgcctttcccttccagctccacctgggaagcc

SEQ ID NO: 7331 - DNA, 1539 bp, Homo sapiens
gatattcacagctattaattgagctcttccaagatgtcaggcaatttgttaactcttcatgtgcatcatcttattgaatacggcaacccatacaggtggtaaaattaatatgcacatttaatagaggggcaaactaaggccaggagaggttacttgtctctgatcacagaagaactagtgagtagtagaggtggaatttgagtctggatgtggctgattccagaatccaagcatttgggccctctacttgttagtcttcaatgatgttgcttatgccatatcctatttcttggtattggtttgtgcatttgttaaagaagattagcatagaataatgggtctcactgtgtgactttgttcccccacaacatgtgacaatgtctacagacatttttggttgtcacaacatgggaggaggtgtgtgcatgctgctggcatctagagggtagaggcagggatgctactagatattccataacacacaagtcagtctcctgacaaagaagtattcagcctcaaatgtcagtagtgctaagtgccaccagtagacaccccagtgtagaccatctgaaacctcttccaaccttgaaagttcatggcactcttccagagctcccccgtcagtgacatcagtgttaagtgcaggaaggtgtctccagaagactcttgaggcccaggctcgccaatgtctcgagacaatagatttcaaaggtgatggctatgagccactcccatgcatgagagctctggtggtctaccttctaccctggggtctccagcgtcatggactcaagactccacacaagcctcagcactgtgtttacattcaccatgtggatccccatgaggcaagaggtgaagactgcaatccaaatgctggggttctctcttgctgttttcttcctctccattttaaacaggcagccaggctctgttcagcttcttagtctcaaggatctctgcaggatggaaagcagaaaagcccctcaacagtcagagagaggggagccagaaatggtggtacctaggggaggtggccagatcttgggggcacactgaagtgtgatgcacctggggagccagcccctaagcctgggaaatccagccctgccaaaaaagtgcagggtcccaaacaggcctatgcagcagggggacctgggaattctcccaggcaaccaaagcagcctggggygggactcagtagagacattgccccagaccggagtgcctctggagggtcctacgcagctgtgttcagggtgaggggcagaagcttaaaacaccactgtaccctgcctgaactgcagtcacatggaaagagggaagatgaagacggaagcctgcgagcagaactggggggcggggaccaagcctgggctcctctccaccctgtgattggacccactgtggccggtgccattccagagccaccctgggtttggcgtgaggcatctcccagctgttatttgacctctagctcccatgggcttatttgaaaatacctgcctgcctttcccttccagctccacctgggaagcc

SEQ ID NO: 7332 - DNA, 772 bp, Homo sapiens
cctggttttagaactcaagtcccatttccctatggacccacaggaatattttggagatcgttaatcttcatttctgattgattttctgtcaatatttcccccaccccaacctttccatcaagtagttaatgagctgtaaacaaacacttgaatgcaccggggcagtggttttccaagaagccttttgaaccgtgaaccaaggccgggcagtacaaaccacaccctctggtttgctgtgggcgcatttgtgcctctagtttttctcacatgggttccccaggactggtgaagtgagaagagycccccgcctcctggaggcaaagcaagtaacaattaactcgccataaaggggagtgcactgaataaaccccaaatctctcccctctgcctcccgccccaagtgtagccacttctctgggtcaagcgctccagaaggttcacccgcacgggaggtggcagaatccaggagcaccgtaggtatccgaccccctcctggcagggcttagatggatagagctgggaaaagtttgaagcctgtgttcctgtgagaggggaggcttgggcccacccacatggcactgcatggccagggtgacgctggaggttcccgaggggcctgaagacttagaaggtcccaaagatgacagtggtagagactccgtgccggaccccacaatctggtttgtgtcagccctgggagtgtcatgcaagacccctcaccgcgggtctcagtttccccatccatcctgcttccgtcgcagcggtattagaa

SEQ ID NO: 7333 - DNA, 772 bp, Homo sapiens
cctggttttagaactcaagtcccatttccctatggacccacaggaatattttggagatcgttaatcttcatttctgattgattttctgtcaatatttcccccaccccaacctttccatcaagtagttaatgagctgtaaacaaacacttgaatgcaccggggcagtggttttccaagaagccttttgaaccgtgaaccaaggccgggcagtacaaaccacaccctctggtttgctgtgggcgcatttgtgcctctagtttttctcacatgggttccccaggactggtgaagtgagaagagtcccccgcctcctggaggcaaagcaagtaacaattaactcgccataaaggggagtgcactgaataaaccccaaatctctcccctctgcctcccgccccaagtgtagccacttctctgggtcaagcgctccagaaggttcacccgcacgggaggtggcagaatccaggagcaccgtaggtatccgaccccctcctggcagggcttagatggatagagctgggaaaagtttgaagcctgtgttcctgtgagaggggaggcttgggcccacccacatggcactgcatggccagggtgacgctggaggttcccgaggggcctgaagacttagaaggtyccaaagatgacagtggtagagactccgtgccggaccccacaatctggtttgtgtcagccctgggagtgtcatgcaagacccctcaccgcgggtctcagtttccccatccatcctgcttccgtcgcagcggtattagaa

SEQ ID NO: 7334 - DNA, 801 bp, Homo sapiens
aaacataattatcaccaaatatttcattttttccattgtttaaccccttaaagttctatctaaaatgaattacgtgattggacttaataaatttttgctgatgataattatctctctgtctgtactcctggagataaactccaggagtttacwccacaggagtaatgttaatagatcccatctacatgtaagacctgtctagacatggagacgagtagggggtttgaaggcatcactttatgcgagagtaacaataagaggagccatccacgcactgtatcattgaaataaagtttaacaaaatcacaagatgttgtgggaagtcagggaccctgaacggagggactggctgaagccatggcagaagaacataaattgtgaagatttcatggacatttattagttccccaaattaatacttttataatttcttatgcctgtctttactgcagtctctgaacataaattgtgaagatttcatggacatttatcacttccccaatcaatactcttacaatttcctgtgcctgattactttaatctcttaatcccgtcatcttcataagctgcggatgtatgtcccctcaggaacctgtgatgattgcgttaactgcacaaattgttcataaagcatgtgtgtttgaacaatgtgaaatctgggcaccttgaaaaaagaacaggataacagcgatgttcagggaacaagggagataactattaggtctgactgcctgggagccggggcaggacagagtcatatttctcttattgctgaaaatgggtaagagaaatatcgctgaa

SEQ ID NO: 7335 - DNA, 801 bp, Homo sapiens
aaacataattatcaccaaatatttcattttttccattgtttaaccccttaaagttctatctaaaatgaattacgtgattggacttaataaatttttgctgatgataattatctctctgtctgtactcctggagataaactccaggagtttactccacaggagtaatgttaatagatcccatctacatgtaagacctgtctagacatggagacgagtagggggtttgaaggcatcactttatgcgagagtaacaataagaggagccatccacgcactgtatcattgaaataaagtttaacwaaatcacaagatgttgtgggaagtcagggaccctgaacggagggactggctgaagccatggcagaagaacataaattgtgaagatttcatggacatttattagttccccaaattaatacttttataatttcttatgcctgtctttactgcagtctctgaacataaattgtgaagatttcatggacatttatcacttccccaatcaatactcttacaatttcctgtgcctgattactttaatctcttaatcccgtcatcttcataagctgcggatgtatgtcccctcaggaacctgtgatgattgcgttaactgcacaaattgttcataaagcatgtgtgtttgaacaatgtgaaatctgggcaccttgaaaaaagaacaggataacagcgatgttcagggaacaagggagataactattaggtctgactgcctgggagccggggcaggacagagtcatatttctcttattgctgaaaatgggtaagagaaatatcgctgaa

SEQ ID NO: 7336 - DNA, 801 bp, Homo sapiens
aaacataattatcaccaaatatttcattttttccattgtttaaccccttaaagttctatctaaaatgaattacgtgattggacttaataaatttttgctgatgataattatctctctgtctgtactcctggagataaactccaggagtttactccacaggagtaatgttaatagatcccatctacatgtaagacctgtctagacatggagacgagtagggggtttgaaggcatcactttatgcgagagtaacaataagaggagccatccacgcactgtatcattgaaataaagtttaacaaaatcacaagatgttgtgggaagtcagggaccctgaacggagggactggctgaagccatggcagaagaacataaattgtgaagatttcatggacatttattagttccccaaattaatacttttataatttcttatgcctgtctttactgcagtctctraacataaattgtgaagatttcatggacatttatcacttccccaatcaatactcttacaatttcctgtgcctgattactttaatctcttaatcccgtcatcttcataagctgcggatgtatgtcccctcaggaacctgtgatgattgcgttaactgcacaaattgttcataaagcatgtgtgtttgaacaatgtgaaatctgggcaccttgaaaaaagaacaggataacagcgatgttcagggaacaagggagataactattaggtctgactgcctgggagccggggcaggacagagtcatatttctcttattgctgaaaatgggtaagagaaatatcgctgaa

SEQ ID NO: 7337 - DNA, 862 bp, Homo sapiens
ttggcacatcctttaaatcacttccctttcctccttctctaggtattacttccctttcctccttctctagactctttcttattctcacaggaacttgctccagattattataactttccttgttcctatttgtttctgagcaacaactctttaccatgttgcaagataaaatcttgtcattatgtgaaactctctttgttaacacttaaccctagaataattttctcttccatttaatataatttcaaaatactccttgaggcaacctttaatattatatgagtttatgtattttttgttaacctaatattttgatttatatatgcaactttgtttttaaaacacttatgaattttgagttttcattttatataaaaattaaactacttaagattaaaaaggaaagtgtgaattcagccagtgactgtttcatgtaatccactgtggcttttctaaaataacagttagaggacataaaactatcctacagatctttataatttctactcttagaaatgaaatagatattttacatttaattttttcatgtcaatatttgtggccaggtcactatagaatgatgcaacattaagataactttgggaagtggctttattcattttatttatttatatttttattttttgagacacggtatcactcgtctcccaggatgaagtgcagtggctcgatcttggctcactggagcctcaaccttccaggctcaagcaatccttgcacctcagcctcccgagtagctgagactatcagcgtgtcaccacactcggctaatttttgtattttttgtagagatagggttttgccatgttgcccaggctgatctcaaattcctgmtcacaaa

SEQ ID NO: 7338 - DNA, 357 bp, Homo sapiens
ttatcctagggtatgcttctgagagaactcaaactaagacaagatgtaagccattttttcttcttatcatgtatcattttgaaatttgaccagaattatacacaccattttgcatggaaaaaagcacactttgtatttataaatcctcttcacaaagttaggatttaatccactttagccattgtaacataatacctgcctaagaatttctcgaatccatcccaagccaacactgatctggctgaagccttcatctctcacttgaatttctacaatagtctcctagctgctctctgactccactctttctcccaacaaatccacacttctcactatctatctkcagtgacattcacc

SEQ ID NO: 7339 - DNA, 611 bp, Homo sapiens
tcaagttctggccaagtgaccttgggcaaatggcctcacctctctacatctccatgtctttgttggtaagatggagatgacaccattacctgcctcagacagtgacggtgagggtgaaataagctgctgcctgtattgagcacagtgcctgacagcaggcacacacgtccatactaactcttgttttttattataagctcaataaacatttgaaagatgaatgtgcctccctttataccaaacaagcaatcccttatggcaaacctacctttagatggacccttctgtatacccaaaattgtgatgaacactttgcatacattagtatattttgtctgtacarccactttgctagaaaggtttaatgaccagcctgttacaaatgaggaaattgagaacaaaaaaatcagtggcttctcttggtggcacgggagttaagtgtgagaggctgggccaaacctggtctgcgtgatacaagcttgttctcttaaccaaactatggaagcataaaagaggagcctcactattctactggaagttgaggaagtaagggaggctgatggaggggcacaggcagacatgaggagagaggaggaggtggaggggtggag

SEQ ID NO: 7340 - DNA, 611 bp, Homo sapiens
tcaagttctggccaagtgaccttgggcaaatggcctcacctctctacatctccatgtctttgttggtaagatggagatgacaccattacctgcctcagacagtgacggtgagggtgaaataagctgctgcctgtattgagcacagtgcctgacagcaggcacacacgtccatactaactcttgttttttattataagctcaataaacatttgaaagatgaatgtgcctccctttataccaaacaagcaatcccttatggcaaacctacctttagatggacccttctgtatacccaaaattgtgatgaacactttgcatacattagtatattttgtctgtacagccactttgctagaaaggtttaatgaccagcctgttacaaatgaggaaattgagaacaaaaaaatcagtggcttctcttggtggcacgggagttaagtgtgagaggctgggccaaacctggtctgygtgatacaagcttgttctcttaaccaaactatggaagcataaaagaggagcctcactattctactggaagttgaggaagtaagggaggctgatggaggggcacaggcagacatgaggagagaggaggaggtggaggggtggag

SEQ ID NO: 7341 - DNA, 820 bp, Homo sapiens
ccaaagataagtcccccactagaggtttaaaaaaaagttcccaagaagaggcccccagggctgaggccccctgggaagagcccctattcaagggataagatagagccccaaagaagagctcccagagctaccaaggaaggggccccctacccagggctgtgattgatcccccaaggaagagtcccctccgarggctgaaataaagtccacaaagaaaaagcccctgagggctgcggtagagtcccgaagagacaccctcctgccacctgtgacagagtaaacgtcctcaaaaaaagagccctcccagggctgacgtggagcccccaaggaacagccccccaccccaggactgaaatagagccccaaaaagagacccccatatcaggctgagatagagacctccagaaagagcccctcaccccagggaagggaccctccaccaggctgagataaccccctccaggcggtgcccccacaaggggctaagcttgggcccccaaggaagggcccccagtcccacacatgtggctgaggtacagccgctatggaagagtctcctccaaaagctgaaatcaagtccctaaggaaaagcccttggtctgaggtagagcctgtcactccccaaccccacaaagaagtgccccacacacaaacccttgggggctgacagccaggccttgcttaagagggcatggctgtgccacaggaaggacaaaaaaaaaaaaaaaaacagtcaggggccacaaccagccaaagttagaaattcaacttttagaacgtaccagaaatctgccctgtaagatgccacaaaagctgctct

SEQ ID NO: 7342 - DNA, 722 bp, Homo sapiens
tctctatagaatccactgatatatttgtacaaggacttccatttctgtataaatattaacacaacaaattaaaacgcatagtaactacagtgccttctgagggtgaaatattatggtacattcatataatagaatatttgcaacctttgaaaacaaaatgtgctaatttggattggtatctcagacatatcattaaatggaaagataaaatttcagagcattatatattactaagatataatcatttttgagaatttaaatatatatatatataaatatgtatgtgtaggtaggtttgtattgtaggtaggttgatatagaaatggtaatgctaaacaataagggaatgtgcctaagttgtgtcaaaaataaaatttgaaaaattcaaaaattgggaacaagtaggttgttgctctaaccacaactcgtcaaattttaaaaagacgagtacacaagaaaaagtattctcttgaggacattaaagctcaataaaacaaacatcaagtggtcaatataaaaatacatgaaatataatgaaatataaaaataggtcaattaccrtttcaaatttgctatggccaaatgcagattcctagtttctaccccaaattttctcctattaaatcttcctcttaataaaaggtgtcactatctccacacagttcagattagagacttcagcaagatcctaatagttaactggcaaactctctttcaattag

SEQ ID NO: 7343 - DNA, 816 bp, Homo sapiens
tttgatatagtaggtaacagttacttgcccagtaaaaaatgcattcaatactcttctgtgaaatagatgtgcagctgagaattttgcagatgagaaaacaggcacaaatatatttatttaatacatgtttgaaaagaattaaaaccaaagttttctctccaagaccagtgatttgaacacatcaaagcatccactacacttcctaccgttaataatctcagtgatccttgacaaattgcattaaatggctaagttctttacaactacaagaagaaaggcttgaactaattcacctttaacatttttgctggctccaaacgcttaccgtcatatacagttataagtgtaatgacttaggttcagtaggttaatttttattaataataacaagcaaagtgatttgacattgcttttctcagcccattgacatatttatatgctaatgttaagtgccctttgaatgcttggtaaagaattcttgaaaatcatgatactttaattttttttcatcttttgctttctttttcaattatgtatgtatataaaatattcaaagaaatgcatatggatatattatataatgtattattatattaaaatgatctaagaatttatattaataacttataactatgcctagatatagaggaacccaagaaaagttgttcaatgtataatgatcaaataaattaggccttgaacagatgtgtgtgtgtttctgtgcacgtctgtatttgaaaggaaggaaaaagtgaaaaatmtttgtctctctaactccagaaaaatatccccacttttgttgatagccaacatagt

SEQ ID NO: 7344 - DNA, 789 bp, Homo sapiens
gcacttctccttcctgctgccatgtgaaaaaggacatatttgcttccccttttgccatgattgtaagtttcctgaggctttcccacccatgctgaactgtgaggcaattaaatctctatcccttataaattacccagtctcaggtatgtctttattagcagtatgagaatggactaatacagaaatgctcaggaattactgctatgccaatgttacctttacatgcatgatatgtaaattgactaatttccaatgagaagtactttataaatccacatgttttctgttgattggctataataattgatattagctatagagtaagaaatgtttaagggagacctctaataatgaattcataagcttcttctctcacacttttatayttgatttttatgctattattcatttacaagagtaagcaccaaaggagttgcaagcttatcttgtatctcgctttttttcagcggaacttttgtaagtgataaaataaattaaaacaactataagaagtgatagattaattcattcaaattagtgcaatgcttgtgaatagttaaaacatttatatttaaaggaaacatatagacattttaaatgtcttagagaaattgagaatgtcactatgtctttactagtgctgaaacaggaaaaataattgaaaaaaactttttttaacaagttttattatttaaaaattcgcctgctatggttaagaataaatcatttgtgaaagaaaaacaaaataaggtcaggttatttatgtgaatctatttcatattatgtttt

SEQ ID NO: 7345 - DNA, 789 bp, Homo sapiens
gcacttctccttcctgctgccatgtgaaaaaggacatatttgcttccccttttgccatgattgtaagtttcctgaggctttcccacccatgctgaactgtgaggcaattaaatctctatcccttataaattacccagtctcaggtatgtctttattagcagtatgagaatggactaatacagaaatgctcaggaattactgctatgccaatgttacctttacatgcatgatatgtaaattgactaatttccaatgagaagtactttataaatccacatgttttctgttgattggctataataattgatattagctatagagtaagaaatgtttaagggagacctctaataatgaattcataagcttcttctctcacacttttatatttgatttttatgctattatycatttacaagagtaagcaccaaaggagttgcaagcttatcttgtatctcgctttttttcagcggaacttttgtaagtgataaaataaattaaaacaactataagaagtgatagattaattcattcaaattagtgcaatgcttgtgaatagttaaaacatttatatttaaaggaaacatatagacattttaaatgtcttagagaaattgagaatgtcactatgtctttactagtgctgaaacaggaaaaataattgaaaaaaactttttttaacaagttttattatttaaaaattcgcctgctatggttaagaataaatcatttgtgaaagaaaaacaaaataaggtcaggttatttatgtgaatctatttcatattatgtttt

SEQ ID NO: 7346 - DNA, 789 bp, Homo sapiens
gcacttctccttcctgctgccatgtgaaaaaggacatatttgcttccccttttgccatgattgtaagtttcctgaggctttcccacccatgctgaactgtgaggcaattaaatctctatcccttataaattacccagtctcaggtatgtctttattagcagtatgagaatggactaatacagaaatgctcaggaattactgctatgccaatgttacctttacatgcatgatatgtaaattgactaatttccaatgagaagtactttataaatccacatgttttctgttgattggctataataattgatattagctatagagtaagaaatgtttaagggagacctctaataatgaattcataagcttcttctctcacacttttatatttgatttttatgctattattcatttacaagagtaagcaccaaaggagttgcaagyttatcttgtatctcgctttttttcagcggaacttttgtaagtgataaaataaattaaaacaactataagaagtgatagattaattcattcaaattagtgcaatgcttgtgaatagttaaaacatttatatttaaaggaaacatatagacattttaaatgtcttagagaaattgagaatgtcactatgtctttactagtgctgaaacaggaaaaataattgaaaaaaactttttttaacaagttttattatttaaaaattcgcctgctatggttaagaataaatcatttgtgaaagaaaaacaaaataaggtcaggttatttatgtgaatctatttcatattatgtttt

SEQ ID NO: 7347 - DNA, 789 bp, Homo sapiens
gcacttctccttcctgctgccatgtgaaaaaggacatatttgcttccccttttgccatgattgtaagtttcctgaggctttcccacccatgctgaactgtgaggcaattaaatctctatcccttataaattacccagtctcaggtatgtctttattagcagtatgagaatggactaatacagaaatgctcaggaattactgctatgccaatgttacctttacatgcatgatatgtaaattgactaatttccaatgagaagtactttataaatccacatgttttctgttgattggctataataattgatattagctatagagtaagaaatgtttaagggagacctctaataatgaattcataagcttcttctctcacacttttatatttgatttttatgctattattcatttacaagagtaagcaccaaaggagttgcaagcttatcttktatctcgctttttttcagcggaacttttgtaagtgataaaataaattaaaacaactataagaagtgatagattaattcattcaaattagtgcaatgcttgtgaatagttaaaacatttatatttaaaggaaacatatagacattttaaatgtcttagagaaattgagaatgtcactatgtctttactagtgctgaaacaggaaaaataattgaaaaaaactttttttaacaagttttattatttaaaaattcgcctgctatggttaagaataaatcatttgtgaaagaaaaacaaaataaggtcaggttatttatgtgaatctatttcatattatgtttt

SEQ ID NO: 7348 - DNA, 813 bp, Homo sapiens
aaaaagaattcctctaatcatgtcaccatctcatataatgaatccagggaatcccagaaatagaaaattagtttcaggggacccctgaggcactttaaagccttttaaaaaattacagtaataataaattagatattgctcttcagaggccaacagagcagcagaagcatcaagatcaggtccaaagagttatgcccacattacaggcttcctgagctgctcagccctctttaaagcttagttgaatctctaaatacctttaaaaagacatacaatytaacacagactgagtgggtatttttgtttagtggtagcataaaatttggtccttaatggtagcagctgtcttcatccatttcaaactcaggtaatattaagtacatcaagacaatacataaagaatacaacaaaggagaaaaaagccaaaactgacaaacacctcaaggagtcactaagtttgcttgcaccctttcacttgatctccctctcagtctcttttttgtggagagaagggtatgacagaacttttttctcaaaagatgataaacaatggcatcaaatggacaaaatggttataaagtaactttaaaaatctgaccccaaggaatccaggacacatacagataattcagaggtatacttctgatttggggcaaattctagactaaagaaatgatcatctcaggtaaatgttacaatagatgaaactaagtccagttttttggcgatttttttttaaagtgtcctcactaccaccttcagctatcaatcatttctcatagctcaagcggaaggtcatcttcatctttccca

SEQ ID NO: 7349 - DNA, 813 bp, Homo sapiens
aaaaagaattcctctaatcatgtcaccatctcatataatgaatccagggaatcccagaaatagaaaattagtttcaggggacccctgaggcactttaaagccttttaaaaaattacagtaataataaattagatattgctcttcagaggccaacagagcagcagaagcatcaagatcaggtccaaagagttatgcccacattacaggcttcctgagctgctcagccctctttaaagcttagttgaatctctaaatacctttaaaaagacatacaatctaacacagactgagtgggtatttttgtttagtggtagcataaaatttggtccttaatggtagcagctgtcttcatccatttcaaactcaggtaatattaagtacatcaagacaatacataaagaatacaacaaagragaaaaaagccaaaactgacaaacacctcaaggagtcactaagtttgcttgcaccctttcacttgatctccctctcagtctcttttttgtggagagaagggtatgacagaacttttttctcaaaagatgataaacaatggcatcaaatggacaaaatggttataaagtaactttaaaaatctgaccccaaggaatccaggacacatacagataattcagaggtatacttctgatttggggcaaattctagactaaagaaatgatcatctcaggtaaatgttacaatagatgaaactaagtccagttttttggcgatttttttttaaagtgtcctcactaccaccttcagctatcaatcatttctcatagctcaagcggaaggtcatcttcatctttccca

SEQ ID NO: 7350 - DNA, 813 bp, Homo sapiens
aaaaagaattcctctaatcatgtcaccatctcatataatgaatccagggaatcccagaaatagaaaattagtttcaggggacccctgaggcactttaaagccttttaaaaaattacagtaataataaattagatattgctcttcagaggccaacagagcagcagaagcatcaagatcaggtccaaagagttatgcccacattacaggcttcctgagctgctcagccctctttaaagcttagttgaatctctaaatacctttaaaaagacatacaatctaacacagactgagtgggtatttttgtttagtggtagcataaaatttggtccttaatggtagcagctgtcttcatccatttcaaactcaggtaatattaagtacatcaagacaatacataaagaatacaacaaaggagaaaaaagccaaaactgacaaacacctcaaggagtcactaagttygcttgcaccctttcacttgatctccctctcagtctcttttttgtggagagaagggtatgacagaacttttttctcaaaagatgataaacaatggcatcaaatggacaaaatggttataaagtaactttaaaaatctgaccccaaggaatccaggacacatacagataattcagaggtatacttctgatttggggcaaattctagactaaagaaatgatcatctcaggtaaatgttacaatagatgaaactaagtccagttttttggcgatttttttttaaagtgtcctcactaccaccttcagctatcaatcatttctcatagctcaagcggaaggtcatcttcatctttccca

SEQ ID NO: 7351 - DNA, 813 bp, Homo sapiens
aaaaagaattcctctaatcatgtcaccatctcatataatgaatccagggaatcccagaaatagaaaattagtttcaggggacccctgaggcactttaaagccttttaaaaaattacagtaataataaattagatattgctcttcagaggccaacagagcagcagaagcatcaagatcaggtccaaagagttatgcccacattacaggcttcctgagctgctcagccctctttaaagcttagttgaatctctaaatacctttaaaaagacatacaatctaacacagactgagtgggtatttttgtttagtggtagcataaaatttggtccttaatggtagcagctgtcttcatccatttcaaactcaggtaatattaagtacatcaagacaatacataaagaatacaacaaaggagaaaaaagccaaaactgacaaacacctcaaggagtcactaagtttgcttgcaccctttcacttgatctccctctcagtctcttttttgtggagagaagggtatgacagaacttttttctcaaaagatgataaacaatggcatcaaatggacaaaatggttataaagtaactttaaaaatctgaccccaaggaatccaggacacatacagataattcagaggtatacttctgatttggggcaaattctagactaaagaaatgatcatctcaggtaaatgttacaatagatgaaactaagtccagttttttggcgatttttttttaaagtgtcctcactaccaccttcagctatcaatcatttctsatagctcaagcggaaggtcatcttcatctttccca

SEQ ID NO: 7352 - DNA, 813 bp, Homo sapiens
aaaaagaattcctctaatcatgtcaccatctcatataatgaatccagggaatcccagaaatagaaaattagtttcaggggacccctgaggcactttaaagccttttaaaaaattacagtaataataaattagatattgctcttcagaggccaacagagcagcagaagcatcaagatcaggtccaaagagttatgcccacattacaggcttcctgagctgctcagccctctttaaagcttagttgaatctctaaatacctttaaaaagacatacaatctaacacagactgagtgggtatttttgtttagtggtagcataaaatttggtccttaatggtagcagctgtcttcatccatttcaaactcaggtaatattaagtacatcaagacaatacataaagaatacaacaaaggagaaaaaagccaaaactgacaaacacctcaaggagtcactaagtttgcttgcaccctttcacttgatctccctctcagtctcttttttgtggagagaagggtatgacagaacttttttctcaaaagatgataaacaatggcatcaaatggacaaaatggttataaagtaactttaaaaatctgaccccaaggaatccaggacacatacagataattcagaggtatacttctgatttggggcaaattctagactaaagaaatgatcatctcaggtaaatgttacaatagatgaaactaagtccagttttttggcgatttttttttaaagtgtcctcactaccaccttcagctatcaatcatttctcatagctcaagcrgaaggtcatcttcatctttccca

SEQ ID NO: 7353 - DNA, 746 bp, Homo sapiens
tttcccagtcccgccatccatgtctgttctggccagagggatgctggtctaccagtccaccatccagctcaactagaatctgcttcagactgggacacgttggttttggcagaggctggggggctggggctgcatcttatccaacatgcctcctcttttctaaggatatagtgaatctaataaagtacaagctctgccactttgtaggcactagcatcctaggccaggattgctcttcctgtgaragtagcacacctagaagcttcagagaggtaaaagcttcaaaccacattaactcattcaaatacgtttaatttgaatctaatatgcctaatgtacctaatatatgcgagtcattgtgctaggcactgggcatacagcaatgaacaaagcaggcaaagatctctggccttgtgatgcttcatttccagtagatagatagaaatgcatatacaataaaatgccaaggagtgatcagtgttatggagaaaaacaaggtaggccaagggggcaaggtggcagagagggcctctctgaggaggtacatttgaggtagacagtgggggaaaggcatatcaggcagagagaacagcaagtgcaaaagccctgaggcctaagtatgctggaatgttttagaagtggcaaaaggcggccaatgaagtgacattccaggggctacagagtggaagagagaagacagtgggcagccagctcaatggcaccttgtggcccatggtgagaactct

SEQ ID NO: 7354 - DNA, 746 bp, Homo sapiens
aggctgaaaacacagacgaatgcacgatgtgccccatgtagacgtgttcacagaatcgagagtgtggggagacgtgcaggcatgtaccgtgtagacgcgctcgcagaatccagagtgtggggaaacgtgcaggcgtgcaccgtgtaaatgcactcacagaatccagagtgtagggagacatacaggtgtgcaccgtgtggacgcgctcgcagaatccagagtgtagggagacaygcaggtgtgcaccgtgtggacgcgatcgcagaatccagagtgtggggagacgtgcaggcgtgcaccgtgtggacgcgctcgcagaatccagagtgtggggagacgtgcaggcgtgcaccgtgtggacgcgctcgcagaatccagagtgtagggagacgtgcaggcatgtaccgtgtagacgcgctcccagaatccagagtgtggggaaaagtgcaggcgtgcaccatgtggacgcgctcgcagaatccagagtgtagggaaacgtgcaggcgtgcaccgtgtagacgcgctcgcagaatccaaagtgtggggagacgtgcaggcgtgcaccgtgtggacacgctcgcagaatccagagtgtggggagacgtgcaggcgtgcaccgtgtggacgcgctcgcagaatccagagtgtggggagacgtgcaggcgtgcaccgtgtggacgcgctcgcagaatccagagtgtggggagacgtgcaggcgtgcaccgtgtggacgcgctcgcagaatc

SEQ ID NO: 7355 - DNA, 815 bp, Homo sapiens
atccccaagcggccgtcagagtccctatgagttatcttgtcgcctccatgctctttaatctcgttaatgtcaggacgtttttatcctttgctttctggaggcagtcacaggttggttggggccaaagattacaaacaaggatgttttatgaagctactcagcaggttggggaatagctgggtttggctgtaggataagcgagttgtaggcgtcctgcccactggttcaaacatcagttcgagagcagggaggggcggtagaaataactgcagagccccccgggcagcacctttgaaggctgtgatgtcagctcaatacatgtgcaaggccgtgtccataaaatcagccacaacaggcctgtgtatttttgtggctatggcttgtgtagagctagtaacgacggtcaccatctcagaatacagcagctgccagtgtcagattacttcccayaggacgtcatcgcgaggcagcttgtttctactgctggacccctgcttggtatgagtgttattcctccactctgttcatggggccactgagaccaagagcttagtgacttggtgaatggcacggccatggaggacgccaagctctcccgcccgcaccccggtgatgttatggctgaaacgtgtctcccaaaaagtgtgtgatggagcccagcgcctccagacatgaccttatttggaaatagagtcttgggggaaaccaagtcggcacatttctgttaagtcacctgacttacggtgctcgttatgcagccgcagcagactgccgcgttccacaggaacacttccccagctcagactcacattcgt

SEQ ID NO: 7356 - DNA, 772 bp, Homo sapiens
taagcccatgactgtaatgacagctatacacttgctgtcataggaggaaccctggaagaattctatatgccattgatgagtatatcatttcagtgcacacaggagaagacttcagtaggtcctacacttactgctattcccaaatatgtaaattttaraagagacttttcttccatctttccatactgggagaaaactatgggaaggtacaactgagtgagtgtcaactaaggaaatgttttgcttccaatcatgcatctatgcacataatatatttcaaaggcaccagatgttttgacctgacaccttttgaagacaccccgttccattgtaaagggatggtattgtgtgatggaacaatggtgacttttggatcaaagtgagtctatgtgggaatccttactctgccactgggcactctgggctttagtaaagtggaactaaaccactgtccctgtggaattgttgcctgtaggagagttaactcacccttaaagcagtaagcacgatcaatgtaattgtgggcactcagcaagtaacatttattttccttagtgagatagataggggatttaggcccatgggaagaatctttttaactccattcaaataaatttgaaaaccaagttaagatggataaatctctaggaaaatatgacctaacaaaattaaaccatatagagatagaaagactgggcagagcaatttccacaggaaaaaattagaggaaggtgtaaaagagctccctgaaaaagaaggaccaggaagattg

SEQ ID NO: 7357 - DNA, 767 bp, Homo sapiens
gttattctaaagttcaaccagagtgaaattgacacattaaccaagagacaactcaatggaaaataataaataactgaaaaaaaatcaattgtttatataaaaacttacgtaagtatttaaagcaccaaaaataatgttcagaaggttgatgtttgaagtattagggtagattgtaggacattttagaaaatatgttctcaaggaattaaagggtttaaaatgtttaaaactgaaaatatctttgaaaagataagcaatatttaaattgattacatggataggattgatttttttaacaataaaagccaatggaatgaactccaacacaaagattattagtaggttgcactatataaaaatagaaatttttgaatgtcaaaaaaaaaaaaaaacagacaaaaaacaactcaccctgtgcttgctcagtctattggggctgactttagggcatgcagttgggggctggctactttggtgttgaccccacatccccaaccagtgatgtgcactttactctggcttataagaccccctmtctaggctcactcctccacccagagctaggcttctctagctccctcaattaacacactgaatttctttaaataggtttatttctgtttttgtttgtttgtttgcctgtacatcagcaccagactgtcttttactgtagacaggcatggagcagggactaggggtggctatcaggggtcttccatgaacagacttagccttctccttcatttccatcattcacctcttcctca

SEQ ID NO: 7358 - DNA, 2265 bp, Homo sapiens
tttgcacagccctgcattcctggggcggccaccctcacagcctttgaccccaggctcccttattcaatcaatcagacatatcactggcaaatcaatctttcttttttttttttttttttttttcagacggagtctcgctctttcgcccaggctggactgcagtgacgctatctcggctcactgcaagctccgccccccgggttcacgccattctcctgcctcagcctcccaagtagctgggactacaggtgcccgccactgcacccggctaattttttttttttttttgtatttttagtagagacggggtttcactgtgttagccaggatggtctccatctcctgacctcgtgatctgcctgcctcggcctcccaaagtgctgggattacaggcgtgagctaccgcacccggccgcaaatcaatctttcttaaaagctgcttgtaacacatcacatcttggctcaaaaacttttagagattccctatttttcaccatatgaagtcactgacctggttctccattaacattactcggctctctctccctaacccttccccagccctccttcctcaggccccaagattagcatctaagaagccagcatccaatctgttagcaaacaaaccacacctgtgaacaaccttggctctccctctctccccgtctcgtttcctcccacctccactcctggccctagccattctggaaagacctggaatacttagagcatctgaagatctgaaatgcaggaagggaaggcactatgaaaagcagacatccaattctgggtgaggcttgacctccctatccttggtgcccaaagttatcttcatccactcagcgtagtttcagatttcatttcctcactctgatagtccacccaattagaaattcatgtagatgggtcacaaatgttcttttacatgtaaatactttccagagggttaaggtatgaagaactgagaatgaagctcttagctcaatcagagctgacttcaaactctaagcagctatcctgtggacttggggactggtgagggtacgctggggtgcatggtgggcgaacagtaaggttgcctttgcacagcatggaagacctaagggatatgatagggtgggggagaggaaggggccccccaaaaggggtgggggaggggaaggagccccccaaaagaaagcatagaaagcaaagcaaaaggatgccaaaacttattttgcttacatcaaaatttcactttacaggttaagcatgaatcgaggaaaggaaacagaaatcctcttcctagtcctctttcctctgttttctcctctgggtaccagaattgcgacagagtgggacagctcaggcagctgcaggtcttggccagtgctcttcctcacccaggccatgcagcatcaacacagtcaccgtagaactcctcttaagacaagcaaaggaactttccaacccagttgagtgcacttttcccaagtgtgtggtaaaaagttaaatgacactttgtgaaagggatccttaagctacaaaaacattttcccccatcacactaagcacttggttttgtccttgtagttgcaaaaggggctggagtcatttgatgaattctgaatgttgtaaggctgcttttctggaagggtaaacagggaaccttttagatgccaagaccttttagaataacgacccttcagaggaaactgaagtgcaaaggattgaagtaaccttccagaaggtacacagctggtgagacaaagcctgkactgggtcccaagcctgcctgactccggactcccacaccccacagtgataccagaatcaccctgaaaatgggaaacatgctgcagctgctgtcctgattccagcctctgaccaggagagctggattgaccaggaagccaatgaagctaagtttcagggccccctgtctgcctaaggcctctcccaaggccctgcaccaaagtttctatttgtgactttgttttcttagaaaaaactcctcaattatgtgaattcacctctgctgacaagtaactccttagaggacgtgagttttagaaggacaagctccaaaagcatctctagatagcctccagaaccctgctggtgtgactctttttggaactaggtacagaaaaccccaggcagatggactggcctttggggattaagggagatgttccagagcagctcaaatgatctctggtgcctgacttttgaacatccagtttataaacaaatccaaagtggtttctttcctgtcttcatttg

SEQ ID NO: 7359 - DNA, 2265 bp, Homo sapiens
tttgcacagccctgcattcctggggcggccaccctcacagcctttgaccccaggctcccttattcaatcaatcagacatatcactggcaaatcaatctttcttttttttttttttttttttttcagacggagtctcgctctttcgcccaggctggactgcagtgacgctatctcggctcactgcaagctccgccccccgggttcacgccattctcctgcctcagcctcccaagtagctgggactacaggtgcccgccactgcacccggctaattttttttttttttttgtatttttagtagagacggggtttcactgtgttagccaggatggtctccatctcctgacctcgtgatctgcctgcctcggcctcccaaagtgctgggattacaggcgtgagctaccgcacccggccgcaaatcaatctttcttaaaagctgcttgtaacacatcacatcttggctcaaaaacttttagagattccctatttttcaccatatgaagtcactgacctggttctccattaacattactcggctctctctccctaacccttccccagccctccttcctcaggccccaagattagcatctaagaagccagcatccaatctgttagcaaacaaaccacacctgtgaacaaccttggctctccctctctccccgtctcgtttcctcccacctccactcctggccctagccattctggaaagacctggaatacttagagcatctgaagatctgaaatgcaggaagggaaggcactatgaaaagcagacatccaattctgggtgaggcttgacctccctatccttggtgcccaaagttatcttcatccactcagcgtagtttcagatttcatttcctcactctgatagtccacccaattagaaattcatgtagatgggtcacaaatgttcttttacatgtaaatactttccagagggttaaggtatgaagaactgagaatgaagctcttagctcaatcagagctgacttcaaactctaagcagctatcctgtggacttggggactggtgagggtacgctggggtgcatggtgggcgaacagtaaggttgcctttgcacagcatggaagacctaagggatatgatagggtgggggagaggaaggggccccccaaaaggggtgggggaggggaaggagccccccaaaagaaagcatagaaagcaaagcaaaaggatgccaaaacttattttgcttacatcaaaatttcactttacaggttaagcatgaatcgaggaaaggaaacagaaatcctcttcctagtcctctttcctctgttttctcctctgggtaccagaattgcgacagagtgggacagctcaggcagctgcaggtcttggccagtgctcttcctcacccaggccatgcagcatcaacacagtcaccgtagaactcctcttaagacaagcaaaggaactttccaacccagttgagtgcacttttcccaagtgtgtggtaaaaagttaaatgacactttgtgaaagggatccttaagctacaaaaacattttcccccatcacactaagcacttggttttgtccttgtagttgcaaaaggggctggagtcatttgatgaattctgaatgttgtaaggctgcttttctggaagggtaaacagggaaccttttagatgccaagaccttttagaataacgacccttcagaggaaactgaagtgcaaaggattgaagtaaccttccagaaggtacacagctggtgagacaaagcctgtactgggtcccaagcctgcctgactccggactcccacaccccacagtgataccagaatcaccctgaaaatgggaaacaygctgcagctgctgtcctgattccagcctctgaccaggagagctggattgaccaggaagccaatgaagctaagtttcagggccccctgtctgcctaaggcctctcccaaggccctgcaccaaagtttctatttgtgactttgttttcttagaaaaaactcctcaattatgtgaattcacctctgctgacaagtaactccttagaggacgtgagttttagaaggacaagctccaaaagcatctctagatagcctccagaaccctgctggtgtgactctttttggaactaggtacagaaaaccccaggcagatggactggcctttggggattaagggagatgttccagagcagctcaaatgatctctggtgcctgacttttgaacatccagtttataaacaaatccaaagtggtttctttcctgtcttcatttg

SEQ ID NO: 7360 - DNA, 1316 bp, Homo sapiens
gcccaacatcctcttcacgtggctctccctgtatccctcatgggagggggcatcattcacggtttttataatgccttccacatttgcaaataaaatgaattccgctccaccttaagaactaagtcaaaagaaagaaatcaatttttgaagccaaattcaatgaactaaattcgtaatttaaaataaaaccttttagattctttcactatatttccccctctagttactttttattactacatttcaaattcctacttctgacatccctttttcactgaagttcaaccagttaattttttttttttttgagacggagtctcacgcccagcctggagtgcagtggcaccatctcggctcactgcaagccccacctcccgggttcacactattctcctgcctcagcctcccgagtagctgagactacaggcgcccaccaccatgcctggctaattttttgtatttttagtagagacagggtttcaccatgttagccaagatggtctcgatctcctgacctcatgatctgcctgcctcggcctcccaaagtgctgggattacaggcatgagccaccrcacctggcccattttttaaaaatatatatacttctattaaatgccaagaatgatggatccaaaccaacaccaaagataaatgcacgttatcctgttcctggaggaaatcggctacacacattgtttacttcaaaccccagcacttgattcagttcaagtgccactatttttgctaatttaaattatcttgcaaaaaattaaaacattctgagatcctttgctacttgctttaaatattattcatatattgtccaaaaaattcttgattttctttgtgtgccttttctgaataaatagttttccctctttctacaaggtgactacattttgtcttgagatcaaaatatttccaaagaaacatatggccaatgtcatggaaaagccctccccatatgtcagcgtttgatttacatgccacatatctaccttcggggggtggatatgtagatgagaaatagtcacggtggcggttccccggttcatctttcccttgaagcatcctaaactctggggaagagaaaaacaagtgttttagaactctggataagcatcagcaggacatttctggggacccactttgtagttcaggtgcagaatggtcaggttggtatcgccaaaacagggacaagctgcccataaacatcatggcactgtaaaaaggcggccaggctgaactgcaaagtcatctagggagaaaaaagaactaaaatctttcaagctcctatgatgctctgggcacagtg

SEQ ID NO: 7361 - DNA, 697 bp, Homo sapiens
ctctgaatgttcctagtatcacacaaatcacagaggacataaagaaaaaagagagagaaatgtaggtctataattatgcagacgaaggagacagggaggcctaagataagtgtgaggaaagcagctcaggccctgggctgggaacacgcgcagtcacactcacgtggtgtgagagccacagcagggacagggctgacccctcgcaggcaccatccaccctgtgcaccagctcccaccctgtgaaatgaccaccatacaggcgcaggaaacagagcaaccagccgcacacggcgggtggcacagacccaggagcatccttggaggtggagcctggtgtcccccagcagcatgacaggtggggcacacaagcggcgggtggctccggaactcagagctcagggcacgggctgagggcaagtccttcccgatggctcgctcgctggccggcattctccctgaaggacacggagctcttggcccttgaggcgaacttcacaaggccagagagactgagccccaccaggtgaagakctgggggtggcaggcagccaggctggcgttggtgcctctacctcctggctgagcagcaggaagaaccaggagcccagaggtcacaacagcagcacagccactgccagcaacagcggaggttcacaagccagatgccatcaaccagaagctactcagtcctcaaatc

SEQ ID NO: 7362 - DNA, 697 bp, Homo sapiens
ctctgaatgttcctagtatcacacaaatcacagaggacataaagaaaaaagagagagaaatgtaggtctataattatgcagacgaaggagacagggaggcctaagataagtgtgaggaaagcagctcaggccctgggctgggaacacgcgcagtcacactcacgtggtgtgagagccacagcagggacagggctgacccctcgcaggcaccatccaccctgtgcaccagctcccaccctgtgaaatgaccaccatacaggcgcaggaaacagagcaaccagccgcacacggcgggtggcacagacccaggagcatccttggaggtggagcctggtgtcccccagcagcatgacaggtggggcacacaagcggcgggtggctccggaactcagagctcagggcacgggctgagggcaagtccttcccgatggctcgctcgctggccggcattctccctgaaggacacggagctcttggcccttgaggcgaacttcacaaggccagagagactgagccccaccaggtgaagagctgggggtggcaggcagccaggctggcgttggtgcctctacctcctggctgagcagcaggaagaaccaggagcccagaggtcacaacagcrgcacagccactgccagcaacagcggaggttcacaagccagatgccatcaaccagaagctactcagtcctcaaatc

SEQ ID NO: 7363 - DNA, 795 bp, Homo sapiens
catcagaatggttaacccaaactcccatgggaaaaagcattattaactagaatacattgcgtgtgtatggtttcttttgcctttagtcttacagattctattcatttccagaattacttaggtgagcactctcccctctccccccacttcagtaaggttgattcattcatttgtaatacagttaaattgttttgtcattttatgcattccatcctggagtctcccagtcttctaaataaatttttaaaatttgcatacatttagattcactttttgtgctgtgaagttctgttttgacaaatgcatcatgtcctgtatccaccattacaatttgataaagaatggttttaccaccctaaaatatatttgtgcttcacttattcaacctttcccatctccccctgatctcctagcaaccactgatctttttactatctccataattgtcccttttccagaatgtcatgtacttggaagcatacagtatgtagccttttcttttagtaatattccattgtatagatataccacagtttgtctgttcacctttgatggccatcttgactatgcccagattttggtgattatgaataaagctgctttaaggaattgtatgtagatttttgtatgtaaggtttcaaatcagttcagtcaatacyagaagcacgatcgccagattgtatggtataactatgttagcttttaaatatattacctttgcattgctgtttcttggatcagaataatcttttgctattttccctgcccacttcctcaccaaatccctttgactgt

SEQ ID NO: 7364 - DNA, 647 bp, Homo sapiens
tatttgcttttacaataactgccgaacccccaataattacatcttcatggtcacaattcttagaagaatttgtggtttccccacccataaatgctcacttggggctcacagagacttctcagtggccatatctagataaagcacaaattcacaaatccagacaatgccccatagtctgacacttttccctctgaatatatgtttcccctttgtcctctcaacttaaaagcaaccaaaatctgttaagaacagatctctgacctctgactagccataatgcataaaaccccttatgggaaaaaaacacaatttggtcatgatataataatttgttacacaaaactcttctaccccaagttgagaggaaagcaacagaaaacaaaaacaaaaaatcactgaatgtggtttcaatagtgtcaatggaatggtgataatttattacagtaacttaattaaattgctgctcttaacaatgsgtagtatggcacagaactcattacaagtagcctgaaaatctgctgttaattttaaccttgacatgcgaagtcctaacagaggagattctggttagaaggaaaataagtgatatattttagtcatcatgaaagacagtgatatactttcaatacttaaagaaaaccaaagct

SEQ ID NO: 7365 - DNA, 597 bp, Homo sapiens
ggatctccactatcgatacactagaatttcttaatcagtttcctcagtgctgctggttcagagtgagtaggactttatgtctcttcttgatcttttcagccacatgaagttcttaaaagattgagaaatctcggccgggtgcagtggctcatgcctgtaatcccagcactttgggaggctgaggtgggcagatcacgagttcaggagatcgagaccatcctggctaacacagtgaaaccccgtctctactaaaaatacaaaaaaattagccgggcgtggtggtgggcacctgtagtcccagctactcgggaggctgaggcaggagaatggtgtgaacccgggaggcagagcttccagtgagtggagattgcgccmctgcacctctagcctgggtgacagaacgagagtccgtttcaaaaaaaaaaaaaaaaaaaaaaaaaaaaagatcgggaaatctcttcacattccaagatcatcagcagggaaaacaccatttcagaactactttgtggttttgtcagcaatatgccctacatctaagtgctagtctgctttttgtttataccccttgtagaatgtaactttgtattacttcat

SEQ ID NO: 7366 - DNA, 827 bp, Homo sapiens
gggatcctttgtttcccaaacacagaagcaatcagtgccaggaaatcagtgcccttacgatgctggaatgtggctttaggggagaagacaatgaacactgtgaggtgatgaatgggtgctctgaggtctgtagaacccagaaatggattcaagtgtatctctttaaaagagaggtttcagcctgccgcgaagcgttctgttcacaatccggccagcatgtatgttgctgttgtctgatgctgtgatgctgtttctgtccccttcctcttaaaaaaaaaaaaaaattaaatgggacctctgtttggtgattttatttgccaactcgaagaaagtgatggtttaaatgtggacgtgaataccacagttaatccttgcttgttgtcgtccagtgtttagccggccaagtaaatgagcccagcaggttataaaagctttgccatagagcctggacgatggcttctgtgggatggagatcccaaatagcaagactgtccgggtgccggggagcccgcatctgaaacagtcgtgcacacattaagcatgttgccagctgataagctttggactgggataacctattttttacggtctttgttgkttttgcttttgcccggctttgtggggagatgcactgtcagatggattaaatgacatgggttgttcttcctcaaccgaacaaggtttgttttcatacatcttgtccttccgcagctatggagagagaagcgaggggtttttatattttaaaaggaggcacattgagctgatgtgtgagtttgggtgcctgattagccgacgaaggaatacttggatactgttgctaggtt

SEQ ID NO: 7367 - DNA, 464 bp, Homo sapiens
ttcttcgtagactcttccagcagcccccgaagcccggtctcctccccagctgaccacagcccttctttcgaccaggatgcccgattagtgcacctgccttttcacatttagagttatggctggcttcatagacatcagggtgcatgtgctgtttatacccaggctaaccaggaagctcagagtagacatcaggctgcccaggttatctatgcccaggctagcaggtgagctcgggatagacattggggtgcctgggctaactatcccaaggctagccggggagcttggagccctggcaggcamagcaccggcccctgggcctcgcactggagagctgcacagcatctaccactgagtgggccacagcacagcacagttgcaacagcagggtcctgaaactcggagaaacatctggctaccctcaaaagccaggaagctctgtcaccattcctgggagaggcctg

SEQ ID NO: 7368 - DNA, 810 bp, Homo sapiens
caggcaaaagtggcatgaggggattatgaggcgtatttgagttggttagagcaaggtggtagcatgaccaaattcagaacttcaatcttctgttcattcatccacagacgaaaaagcagttaactatcacaatttgctggatgaaggaagctatacaatcccatccaatcatcccacttgtacacagtktgggtcagagggtcatgtcattcagaacaaggagcagatggctcagtccaaacactacaatgcgtaacatgcttggagagcatgtcagagcccatagcactattcagtccctttccctctcccaaatgtggttcaccattggcccgccattgcctcgcactgtgtcagagacatgtcccatctgcatctttgctcaagctctctctcttgcccctttggctttccatttctctcatggttcaaactgtctcctttcaccaggactcaaattttagttgctgcctccactgcagggccattcttgatgccacagtccccagagtgttcccgttgtctgaactcctggaacactcatggtgccatgcaatttggctcttggatcacttccttgaacttggcacggcactttgtatacagtaagctctttttaaatgtgtggttaagaaattaattccagtcacatagggtgggagtaaggggtggctagaaagagcaggatagaacattgttttgggcttatgtatttggaatataaatgtcttatctcccaaaacagcacacctgtagtgacatcagtaatagtaatgacagtggttacagtaggatgaggaaaaggaatag

SEQ ID NO: 7369 - DNA, 638 bp, Homo sapiens
tcccttgaacccaggggttcaaggccagtctgatcaacatagtaagatcctgtctttacaaaaaacaattttaaagttagctgtgaacagtaatgcacacttataaagctgtatattaagactaaggcttaagaaacccttgagcctaggagttcaaggctgcagtgcaagctatgattacaccactgcacttcagcccacgtgacagaatgagatgctgtctctacatgatgatgataataacaataatatatttcaaaactattctggtattagaaacttaactactcttacctgtactaccatttaaaaaccaagagtccaaattgtggggcatagggtggtagagtaagtagaagatatacaatgaaaatacttggaatatactgtgaggcatgktgaacgagcagaagtattgggtttctccatcctttggctaatcagtgtaaaattataaaatgctccttctttttttttttttttttttttttttttttttttgaaacggagtctcgctgtgtcccccaggctggagtgcagtggagccatctcggctcactgcaagctccgcctcccgggttcgcgccattctcctgcctccgcctcctgagtagctgggattacaggcgcccgctacc

SEQ ID NO: 7370 - DNA, 811 bp, Homo sapiens
atcctgaatctccaacaccatgcaaactaagagagggaatcctctgtagagggaatggaagtaaaaaggcacaagtggtgatgtcaccttctgaacagagatggaacatttcttcctctgagaaaaaagagaaaagatagytttaagtggcaaaagaacatgaagcaatgtgaggtgaagaaacagaaaagactatggatggaattcctagatgtgagatacacaaagttccatttcaaagagaaatatctatagataggcataaagttacacacctgaactaccaactctgaaccagtaactcaagagaatattttgtgtgtcccacaagccatatggctctggggacaaattatctgaaagtgcccaataagaaaaatatttgaggaaggggagttggtgagtgaatgaattaaaggacatcagaaagatcattgactgttctccttcccaggaaacaaagtggctaagtcaaaacacgggcagctgtgggatagcaaagaacaaaaacttccaggcccaggttttagtgatagctactatggaagttagccactcaactttagaaccagaggcttcttttcctcctcccttcttatcttttctagtttatagcaaatttatattgagccacttattctttctgaatgctagttcccctttagcatttctttttcttcattccctttggagtggcccaatgctttggccccttatcaaagcattttataagaaacagtgtgacagctctaatttgcatctggttatgcaagatgtggttaagaacatggactctggaggtaaatacacc

SEQ ID NO: 7371 - DNA, 866 bp, Homo sapiens
tctcccatgcctgtgcacatcccttgcytcccacccagctagcccctgatccttccaccagcctcccactccactacagtcactctgaatttgggcgtttctctccacacccgtctcccacccaccaggcacaccaacctctctatgtcagcaactgaagctgttctctgggggccctctgccaaccccacagtcaggccatattctcaccccttggtagtatggcaaaatatgaaagatgccacgtgaaccctttctggaatgtaaatgtgttgcctctcttgctctggaagggccttgagcctctgggatgaagttggttctgaaactgaccaagtctaagccacgttccctagaagagtgatctgtgccccagcaactcctcccacctcctgctcccagactcccactccctattcccaccagaaacttccctcttcagccctggacactgctggataatgcactagagagcgcttatcaattaactgtcttctaccacactcagcaaccctttctgcagttctttctattcaacacagataatatgagcagtatagactagcataaaagaattaggaaagatcaaatgcttgaaactttatttcaaccagttcaggaccccgagagctgcctcccaactttgcctcttccctcatctgccttgaaatagcctccttgactgcagcattcccagcccagctcaggatttcccacttgtcccagcctttcttcagtccagttctcctcccagttaaatggagatatgaaataaatgcccacatgaagtgcatgccaaaattgattatgctaacttaaagtgttttcaaaagacacgagtggtattacaggcatttaaatatatt

SEQ ID NO: 7372 - DNA, 866 bp, Homo sapiens
tctcccatgcctgtgcacatcccttgcttcccacccagctagcccctgatccttccaccagcctcccactccactacagtcactctgaatttgggcstttctctccacacccgtctcccacccaccaggcacaccaacctctctatgtcagcaactgaagctgttctctgggggccctctgccaaccccacagtcaggccatattctcaccccttggtagtatggcaaaatatgaaagatgccacgtgaaccctttctggaatgtaaatgtgttgcctctcttgctctggaagggccttgagcctctgggatgaagttggttctgaaactgaccaagtctaagccacgttccctagaagagtgatctgtgccccagcaactcctcccacctcctgctcccagactcccactccctattcccaccagaaacttccctcttcagccctggacactgctggataatgcactagagagcgcttatcaattaactgtcttctaccacactcagcaaccctttctgcagttctttctattcaacacagataatatgagcagtatagactagcataaaagaattaggaaagatcaaatgcttgaaactttatttcaaccagttcaggaccccgagagctgcctcccaactttgcctcttccctcatctgccttgaaatagcctccttgactgcagcattcccagcccagctcaggatttcccacttgtcccagcctttcttcagtccagttctcctcccagttaaatggagatatgaaataaatgcccacatgaagtgcatgccaaaattgattatgctaacttaaagtgttttcaaaagacacgagtggtattacaggcatttaaatatatt

SEQ ID NO: 7373 - DNA, 866 bp, Homo sapiens
tctcccatgcctgtgcacatcccttgcttcccacccagctagcccctgatccttccaccagcctcccactccactacagtcactctgaatttgggcgtttctctccacacccgtctcccacccaccaggcacaccaacctctctatgtcagcaactgaagctgttctctgggggccctctgccaaccccacagtcaggccatattctcaccccttggtagtatggcaaaatatgaaagatgccacgtgaaccctttctggaatgtaaatgtgttgcctctcttgctctggaagggccttgagcctctgggatgaagttggttctgaaactgaccaagtctaagccacgttccctagaagagtgatctgtgccccagcaactcctcccacctcctgctcccagactcccactccctattcccaccagaaacttccctcttcagccctggacactgcwggataatgcactagagagcgcttatcaattaactgtcttctaccacactcagcaaccctttctgcagttctttctattcaacacagataatatgagcagtatagactagcataaaagaattaggaaagatcaaatgcttgaaactttatttcaaccagttcaggaccccgagagctgcctcccaactttgcctcttccctcatctgccttgaaatagcctccttgactgcagcattcccagcccagctcaggatttcccacttgtcccagcctttcttcagtccagttctcctcccagttaaatggagatatgaaataaatgcccacatgaagtgcatgccaaaattgattatgctaacttaaagtgttttcaaaagacacgagtggtattacaggcatttaaatatatt

SEQ ID NO: 7374 - DNA, 794 bp, Homo sapiens
cctcattgtttttcctttctggtgagtagaccggtgatgtgccctgcctttggtcagtgtgcagaggtggcctcagtgcatggttaccctcagggcattgccctttccatacgtgggtctccagttatttgtgtcaagtgcagttggagaaaagaatgtgatggagccatttttataaataattaaaacaacactctgtggtgtggaaaaggcttattacaacgggagatggaaaatgtgtgacctgacgggcaagcagcagctcttactctgtcttgtttcatgratgtagacctttctttgtgattaacagcttttctagtcactcaatgaaaagtcactgtccaatcaccagttctctaaaagagaggtatgttctgtgttacaataattatagccattacttgaatgccagacactggattaggtccttcccatatcttggctctagtctacacaataactcataaggatgagtattatcacttccacttcccagataaggaaaactgatacttgtttatttcattctctatgaccactggttctaattatggtttgagtatcctttcgatatgattggctctcgatcagtctgttgattttgtttagccacagaccagcaatgaaaagcatatattacatctcccatgacaatcatttccttgggaagcataatgttccatgtgttgattgacagaaaccagagtaacatgtggggaagacttagatggtttggaaggaacagcttttaaccaaccataatttggggctagtctgggaacttgggatcc

SEQ ID NO: 7375 - DNA, 823 bp, Homo sapiens
atttttgcctaggaagataaaaagctttatatccatgttcccagcagtaaagggactccaggaaatccacttgtactagccaatttcacacagcactgttacatagatttgattaccacaaaaatgtgattcccaagaaataagatgtttgaattgttaatgtgcattctctccttgtatgcaaagctacaggaaaggccacttataataagagccttctgggtaagcaagtaattggcaaaggaaactagaagactttagccatccttaggctggtgcttttaacttcttcccaggaattctgacggactgactccttaccaagcggtgctgactcttaaacctgttggtcgctgtgtcctccccactgtgcagggctgcagagtctctcatcaaattattactccttagaattctctcttctgtggccgggcgtggtggcgcaygcctgtaatcccagcactttgggaagctgaggtgggtggatcacctgaggtcaggagttcgagacaagcctgaccaacatggtgaaactcctgtctcaatgaaatacaaaaaaaaaaaaaaaaaaaattagccaggtgtggtggtgcatgcctgtaatcccagctacatgggaggctgaggcaggagaatcgcttgaacctgggaggcagaggttgcagtgagctgagatcgcaccattgcactccagcctgggcgacaagagtgaaactctgtctgaaaaaataataataataattctctcttccattaataaaacagtttccaaagtatgttcctcaaaacatttccatggtttaataggtatcactcaaaaaag

SEQ ID NO: 7376 - DNA, 824 bp, Homo sapiens
aaagacagaattgagaggccagatatacctgtgtaggaatctgatatctcaggctcatctgatgttgtagggcttgagaaaacatcataagttgcttaaaaaaaaaaaaaaggcaaaacaagagagatgttaattttggttaaatttgattaatttagaaagattacatgacatgttgtaatgctggttgaaggacagttttatgtaggtactggtrcattttggctccaggctgccagccttgtcactaacatctaagcaccgaaactcgcctttggtccttttttgctctgaaccgcaggattttatatagtgagccctgatgctggcctccagggtgatgagaacatagtgctatatatttataatcatgcagtgccagctgtaaatcaaagagctgcaaagagtataaacataaataaagtcagatggcagtttggggagagattttcaaagaaggaaaacagcagtcccattgaggcaatttgcccaaagtctattgctcagtctttctgcttagtaaaagttactgttacaatatcttatgtatggacagcacttcacagtttgcagagacttactcatacatcaacttattgaacccttttaacatccctgagaaataggtgaggtaggcagtagccccactttgtagacaataggaggttatctccattttttagataaccaagttgtggtttatagcatgaacacatctgccagtggtcacacactgaaattgtcccatccagtgtattttcctttccttcagcaggaccagaaacagcagggctaaaaccaggattctcttttggcaccttccc

SEQ ID NO: 7377 - DNA, 814 bp, Homo sapiens
ccatagcttgaaatggccaaagaaaccagagagatcacagtgcattgattctacctttacagaaaatccaaacgtactaggttcccagggttctaactcatgccagaattctgctagtgcattttcagaactggcaagagatactagaagtagatctagaagttccaaacatagtaaatttctgttagagcaattgtttgtatttaaggagataacatgtacaatgacacagcactcccagatctatgttaatgttacaattttctttgtacaaataacaatcaatattcatgtcgttcttttagtttactgttatgccataagtaagaaaaatagggtttttaattcaagttctccaactcttttttgagactatttgtaaaaaatgggatagtaatctcttcctcatttattttagagtttgttgaggataaaagcagagtaatagctctgtgttttgaaaataaagggagtttatagagatgaggctcaacaatgataaygatgagtcatccatcactctaacctgatagaacaatcaactataattaggaaagacatttttctctctcaaacgccatcacaattgaatgccaagaagaaattgcttgtaagtcattcaagcttttagaagatctttcttttgccaggctttttgggtgggtttaccaagtgctgattcctctgagaaggatttgcctcagacctttggaaactgagatctccagatctcagaaatataactcagtaatataaactttaaagctgaacctaaacacttaggtttgaattttaagtctctccccagccagtt

SEQ ID NO: 7378 - DNA, 814 bp, Homo sapiens
ccatagcttgaaatggccaaagaaaccagagagatcacagtgcattgattctacctttacagaaaatccaaacgtactaggttcccagggttctaactcatgccagaattctgctagtgcattttcagaactggcaagagatactagaagtagatctagaagttccaaacatagtaaatttctgttagagcaattgtttgtatttaaggagataacatgtacaatgacacagcactcccagatctatgttaatgttacaattttctttgtacaaataacaatcaatattcatgtcgttcttttagtttactgttatgccataagtaagaaaaatagggtttttaattcaagttctccaactcttttttgagactatttgtaaaaaatgggatagtaatctcttcctcatttattttagagtttgttgaggataaaagcagagtaatagctctgtgttttgaaaataaagggagtttatagagatgaggctcaacaatgataacgatgagtcatccatcactctaacctgatagaacaatcaactataattaggaaagacatttttctctctcaaacgccatcacaattgaatgccaagaagaaattgcttgtaagtcattcaagcttttagaagatctttcttttgccaggctttktgggtgggtttaccaagtgctgattcctctgagaaggatttgcctcagacctttggaaactgagatctccagatctcagaaatataactcagtaatataaactttaaagctgaacctaaacacttaggtttgaattttaagtctctccccagccagtt

SEQ ID NO: 7379 - DNA, 765 bp, Homo sapiens
aaacaaaattacagattgagtatgccaaatctgaaaatctgaaattcagaatgctcccaaatccaaaactttttgagtacttatatgatgctcaaaggaaatgctccttgaaacacttcagattttggattttcagatttgagatgctcaactggtatgtataatgcaaatgttccccaatctgaaaaaatctgaaatccagaacacttctggtccaaagcatttcagatgagatatatgaatttttcatttagttaaatttcttcactcttaaggaccatgttttattttgaaattgtctatcctattttttaatatgataatagatagtagttgttcttcagatatttttactttggagaataaaaagttgatagctttatttgcctaccatttgtttcatttttttctcttgacctgtaagatcctaaagtctagtaaggatagggaataggccataatgctgatgtgatcctaatctacttgctttgcttgctataggcattctctgcattctttctggatatgagagcctaagcctgaaggtggatctgagcttgatggtgtttgaaaaataagaaatggttaaaattggcagatggtgctagggtcaaaaacaagctattagtcaattttgatgcaagttatagaggttaattgaagtttgttactgctgcatcacatgmaaataggtggaatttgctattattgaaggataagtttggattaatctgaattaagataatagattaaatgcactttgag

SEQ ID NO: 7380 - DNA, 814 bp, Homo sapiens
attgaggcagggtgtgtgaaaaggcttcgtaatatttaatgcaccattagtacgactccagtctcagaagggctgggtggagtccatattttttttgttaataggaggctgactgcgttctggtgcttcttgaaaggtcatggttcccaaggtctccccaggtcacagtggctgagtggaagctgaggatgaacccagggatttgggtttgggaacgttctagaagggaatacaaggtattagtgactctaaggcttagagcagaatcctcccccactcccttgccatccgggcaccaaatactgttgatttctccattgtgatgccttctccacctccatacactctttccactctcatcacttctagggaaacacactggtactcctacgatgggatttgtggttgatctttaygctaccctcaccctttttgtcccttctgcacatgcctaccagattagtcctggttaaaccccacttagcatatgtcaggctcactgtttggagatttcggtggttccatcatgttcatatacaaagtccctctttcttcactgggcattttaggtcccacagtgatgcactgtctgctttgctgactcactctcttctcttccattttaagtccacctggtcatttgacagtctctttttccgtaagtgtatgtttcatagcctcttttatttcttgaaatatatttcttcaaatatattccaactggtcattgtgcattctgtgcatgggcattctttttttaattattatttcaataggtttttggggaacaggtggtgtttggttacatgaataa

SEQ ID NO: 7381 - DNA, 828 bp, Homo sapiens
atttccaatgattatcagccaggttacagtcctgacatagctgataactaatgttggaaactggatagactgggacattgttcctgttggcttatgtgccttattgatgctgaaaagctaagtttagttactgtttcaaatacctttattttgttgatctaaaatattctatgaacactttccaagaagatctacctttaaaaatttcaaaatgggtgtcaacrgcttggaagagaatttgggagataatagtggagcactctcccaactcaggctgcaatactaatgcacttagtgtcacagtaggagaaaaattctaacgactgtaacagagttgagtcatggtttatgggcagaaattttcttgttaatgaacacaagagaaccatgcatcttacaaatggtggtgtcttagattaataaaaaaattaatatttgttttctgtaagtttatcgtgtacctgaaatttacaatttcattttcattttcattttgacctatgggcctttgagcaagttttcaaaatctccaggtgaaactggcgtttttcttttcagtttgtttttaatttccagctttcttgtatagagatcaaagagagtgttctatatttatatatttaaataatttattgaggtttttgtggccttaatatatggcaggtttaatcaatgtttccaagctatttgaatagaaaaagattcccctcttttgaagaaacggagtccttatatacttacaggagatgttcggcagccttttatttaaatggggtgataaataaaataaaattctaaaatcattgcagaaggtgaaaaattaaagaa

SEQ ID NO: 7382 - DNA, 824 bp, Homo sapiens
aggatccttgagacagctggcttcccayccttccctggggcctccaggaccactgtcccctccccataccctcctacccaccgtggaacaaccctggctgctgtacacacaagcggggaccctcgcaattgccttcagttgggctgtgctgagccctccttcccagagacccttctcatcagctccactccactttcagcctgaaatggtgtctctaccatcgccaagctctgtggcagccctccctgcagtcagcctgcctcatgcagggttttctgaaacaggaattccaggcttctttgctggggaggtcaatggacaggagtctggccatgaagtgggaccaaggaggatgtgcctctgctccccaaaagtgagagaggcactctggctggcctacaggatgaccaggaacaggcctcagggttccccatgaccctgactctgagcctgtggatgaagggaatccgtcatcaggggaacaaggaggttgaggaaggcctcccagagaggctgatcacagagctgggttctgaaggatgaagaggagtttgcagagccaatcagaggaaagggcatgcaaagggaggctctgagacttgggaagagcccagccccactggggagcctgaagctgctctgtgctgctgccacatgcccttcagaagggcaaggggaggcaggtgatggaaagagccctggtgtcttcccgtaggggctcttagtgggaattaggcaagaccagtggcagaatccaacttgtgggttaggaaaagaccctgggaggctgtgcagaagccagcccagggctgtgggagccaaga

SEQ ID NO: 7383 - DNA, 826 bp, Homo sapiens
ctggtgctgaacaacagccagggggctgctactggggatggctcctcctcgcccygcctccctgtctcctttcactgcatctgatcttttcttctcttcctcagcattgtatcagttccccttggctgctcattgctggttttggaggcactaaattgttacaacctctgcttgttgggtaaggaggagtttggcagcatatattcaaaagttaacacaacctttctctttgcaattctaccactaaggatttatctaaagaaaataatggatcggcctggctcggtggctcactactgtaatcccagcactttgggaggccgaggtgggctgatcacctgaggtcgggagttcgagaccagcctgaccaacaaggagaaaccctgtctctactaaaaatacaaaattagccaggcatggtggtacatgcctgtaatcccagctattcaggaggctgaggcaggagaattgcttgaaaccgggaggtggaagttgcagtgagctgagatcgtgccattgcactccagcctggacaacaagagcaaaactctgtctcaaaaaaaaaaagaaaaagaaaataagaatggatcatgtgcaaatttctagctgcaatgatttcaattagagtattttttataatgctgggacactgggaacaatctaaagggtcagccatagggggctggtctgatgcctgagagctcagacacgggaaggatgtgcatccactcaggatatctgggctccatggcctggaaaactgttgccagaaaggggtcccaatccagaccccaagagagggggatctcgtgtaagaaaaaatttg

SEQ ID NO: 7384 - DNA, 826 bp, Homo sapiens
ctggtgctgaacaacagccagggggctgctactggggatggctcctcctcgccccgcctccctgtctcctttcactgcatctgatcttttcttctcttcctcagcattgtatcagttccccttggctgctcattgctggttttggaggcactaaattgttacaacctctgcttgttgggtaaggaggagtttggcagcatatattcaaaagttaacacaacctttctctttgcaattctaccactaaggatttatctaaagaaaataatggatcrgcctggctcggtggctcactactgtaatcccagcactttgggaggccgaggtgggctgatcacctgaggtcgggagttcgagaccagcctgaccaacaaggagaaaccctgtctctactaaaaatacaaaattagccaggcatggtggtacatgcctgtaatcccagctattcaggaggctgaggcaggagaattgcttgaaaccgggaggtggaagttgcagtgagctgagatcgtgccattgcactccagcctggacaacaagagcaaaactctgtctcaaaaaaaaaaagaaaaagaaaataagaatggatcatgtgcaaatttctagctgcaatgatttcaattagagtattttttataatgctgggacactgggaacaatctaaagggtcagccatagggggctggtctgatgcctgagagctcagacacgggaaggatgtgcatccactcaggatatctgggctccatggcctggaaaactgttgccagaaaggggtcccaatccagaccccaagagagggggatctcgtgtaagaaaaaatttg

SEQ ID NO: 7385 - DNA, 826 bp, Homo sapiens
ctggtgctgaacaacagccagggggctgctactggggatggctcctcctcgccccgcctccctgtctcctttcactgcatctgatcttttcttctcttcctcagcattgtatcagttccccttggctgctcattgctggttttggaggcactaaattgttacaacctctgcttgttgggtaaggaggagtttggcagcatatattcaaaagttaacacaacctttctctttgcaattctaccactaaggatttatctaaagaaaataatggatcggcctggctcggtggctcactactgtaatcccagcactttgggaggccgaggtgggctgatcacctgaggtcgggagttcgagrccagcctgaccaacaaggagaaaccctgtctctactaaaaatacaaaattagccaggcatggtggtacatgcctgtaatcccagctattcaggaggctgaggcaggagaattgcttgaaaccgggaggtggaagttgcagtgagctgagatcgtgccattgcactccagcctggacaacaagagcaaaactctgtctcaaaaaaaaaaagaaaaagaaaataagaatggatcatgtgcaaatttctagctgcaatgatttcaattagagtattttttataatgctgggacactgggaacaatctaaagggtcagccatagggggctggtctgatgcctgagagctcagacacgggaaggatgtgcatccactcaggatatctgggctccatggcctggaaaactgttgccagaaaggggtcccaatccagaccccaagagagggggatctcgtgtaagaaaaaatttg

SEQ ID NO: 7386 - DNA, 777 bp, Homo sapiens
aaggtctttgtgacctgtatcttgtgccaaattcctatctcatcctgtgacttagaatgccttaaccttctgggaatgcagcccagtatgtctcagccacattttacccagctcctattcaagatggagttgctctggttcaaacacctctgacacttacaaaggtatgacctttagccaattgcttaagcactgtcaggctcaaattcctcctctgtcaaatgggaacaacagcacctagctcacctgatcactggggaattaaaaggtctcaggaacacaaaacactccacatagtgcctggtctgttgtttatatttgataaatgccacttaatgataatagtgattataataaggctagcagtaatattaaaccataacaatcatgttgaaggggaagatggactgagggaaagaaatatccctgtgggaattcaagtcaggaaacaaaaaagtagctgttcttgagctcgttcaagtaatacatgcaaaataaaagacaaattatcaaagtaaaaggttaatggggattattcctgagtggtagaattatgctgattttcttttcttttggattctctgtatgtaaaactttctacaaagaaagtattttactttactaattaagagataatttttttttttaattcctcccttaggtgacygcagttcacagaatttcagaaccggaagacactttaagtaccatctactccaacctcatcactctactgatgaagaaccagagcatccagaatggagtgctgtccccact

SEQ ID NO: 7387 - DNA, 822 bp, Homo sapiens
actcatcctactggatttggaagactcatctgctttgcccagtactatctgactacattatcctatcaggcttgaaagtgatggggcatggcctgaccacactatctcctactttgcttctgttgatcttatctcccactgagcctttagcattctgattcatcaggctccaacctgcactcattgcctttgaactcacctatccacgggatcatcatatgcttcataacgatgaagcctgtcaaaggagattacacaaagaataaaataacgtggcatactgatggcaaataggataatacttaaaatcctgtaataccggatttcttctaaaaagcataagtcttccacctccattgacttaactgttttcagaacaggtagagaagttatttaaactattattttatgcagaagtaaaaataaaatcgccatccattttatggatgagaaaacatcacaagaggttaagagacttggtcagggtcacacagaagcaaagctagaacccaagtcctgtaattaaatggtgttagctgatttttttctttaccatccttttcatctcaccctttgagatgctggcatataagaccctttacttcgtagaaataaactttayaatagtgatagtgagacagattgagctagaaaatgtgaaatcaaactaacctgcaggtagaatcgcatattttatgactaaggcatctgcttagagtttgaaatttctcaaatgcccactaagtcagggaatgcagcagaaatacaaaggacatgattctatttttaaaaatgtataaaaaaaaattactccctagcatc

SEQ ID NO: 7388 - DNA, 2918 bp, Homo sapiens
tgggccaaagtaaagacagctgcttctgctgccttctgtgacatttcctgagttcttactaagtgccaggcattctttcacttaattctctccagaaatctaggagatagagattagcattgtaggattcagactctagctcctagagctctggagtgactccatgtccatgcctttctgtgacccccagccctcaaatagggcaggacctgtgagtagctcctaaacaaggaaatatagcaaagggaatgggacgtcatttctatgattatgttatattataaaaaacgtgggctcgcaaggatgacatgcaaattcatgaagcattccataaaagacgggggcttggccaggcatggtggctcacacctataatcccagcactttgggaggccaaggcgggcggataacctgaggtcaggagttcaagaccagcctggccaacatggtgaaaccccatctctactaaaaatacaaaaattagctgggcatggtggtgcgtacctgtaatcccagctactcaggaggctgagacaggagaatcacttgaacctgggaggcggaggttgcagtgagccgagatcgtgccactgcactccagcctgggcaacaaagagaaaaactccgtctcaaaaaagaaaaaaaaaaaaaaaaagacctgggcttactagcagactggtgctagacattttcttccttgctgaatttgaagaagtgtgtgccatgatctgaaggggcatacagagaggctttgtggtaaggaattacaggcagcctctaggacctgagagcagcccccgaccaacagttaccacaaagattttagttctacaaccacaaggagatgaattctgctaacaaccttcataagcctggaagtggatccatccccagttgagcgtccagatgaagaacccagccctggctgacaccttcactgcagccctggagaggacccagctaagcctaaaaaatgtgcgctgttataagcccataagtttgtgataatttattatgaagcaatagaaaactaaggtaagtactakctccatcttacagatgagaaacctaaagctcagagactttgaccacaggcacacacttagcatgaggcacagcagggacagagcccagtctccagactcagcaggctggttttctctttaggaccccagctgcagagctggtcattgttctctcagtggccacctagatacaggaagagcaacctgcatagtattgattgaaatacctttttttccattttaatttaacaaacatttgttgagccctctctgtgtgcccagcactgtgccaggtgcaagggattccaggttgtggcgggtacagtggtggacgtggacaacagacaagccatgtcagtgtgataaggtttacagcatgaggagagacgggatgtgctgggagcatgcgatgggcagccagcctccgccgggtgccagggagagcctcccacaggaagtgatacacagatcccttggggtgggcctggtggtgagccagcctctctgaattgcaagtgagtgagtaggtgagtgggtgggttttactggcgaagggtccccaggagaagaggactcttccagcaatgtgaaatcaccctgcttccgtgcactggcttccaggacacctgtctcaaggacccagggcctccatgactgccctatgacgcctaagaactcagatcccagtgagcaccacttcccggatgcatcagggtggctggggtggagaagcagttgtttggctgtgactctcctcttctaaacatccccagacatctggcaggggaagcactgtaggttggggtgggaggcaaagcagggaaatagggggtacatggatgagggtatgagcagagccagaaaaaagagcaggaattagaaaggggcaccccctcctatagcccagctgcagtctgtagtgacttggcagacccaggagtccttgctgatcaactggctggatggtatggataatgcagggtcccaggaggaagccgtcaacatactcaaactgggggatttgagaagtattcaataaggagactattgtcaaaggtcttggaaaaggattgcaggaacctggaccaagagcatcaggctttcctgatgctggacctgatggccccaggggaggtcactggacctgcagagctctggagctgagtagatagggctgcctggcagcagctgtggcctcatggagggatgcagccaggctgtggctgccccacaggaggttaagtgccctgacctcactctcctctctgcctcccataagctatcggcgctccccagtgaccaaggcagagggtaagggcacccatagacgtagttcccacagtcctagggggcagagcaaggtggagaaagttggcaggcagactggaaaaaggcacccaatcctgactcattttccttctctgtacaagagtgttgatgagcatgcttatgttttgcttgttccaaatttgaaaagcaatcatgtatctaacggtcccagcctggagtctggcaggcacaggctggttgccagcatttggtttccaagagtcagcaacaagaacacaaaatcggggccactgagaagtcagtcaccagccccagaagccctgggcagcagaacaatcactgacaagaggttggctcaggaggtcttagagtccttgccaggaatggaacccagaaaccctttctccacacactcactcacaccccaatcctgcagctgtgggaggctggagagcagcagcagcaggcctgtaggcagcgcagcgtcggccctcagggtggcagaggggcaggcagctagaccaggaggcccagctctgcctagaatcgtgggcccagctggtaggaaactgggcagtgctgagttcacttcccccagtgtgg

SEQ ID NO: 7389 - DNA, 2918 bp, Homo sapiens
tgggccaaagtaaagacagctgcttctgctgccttctgtgacatttcctgagttcttactaagtgccaggcattctttcacttaattctctccagaaatctaggagatagagattagcattgtaggattcagactctagctcctagagctctggagtgactccatgtccatgcctttctgtgacccccagccctcaaatagggcaggacctgtgagtagctcctaaacaaggaaatatagcaaagggaatgggacgtcatttctatgattatgttatattataaaaaacgtgggctcgcaaggatgacatgcaaattcatgaagcattccataaaagacgggggcttggccaggcatggtggctcacacctataatcccagcactttgggaggccaaggcgggcggataacctgaggtcaggagttcaagaccagcctggccaacatggtgaaaccccatctctactaaaaatacaaaaattagctgggcatggtggtgcgtacctgtaatcccagctactcaggaggctgagacaggagaatcacttgaacctgggaggcggaggttgcagtgagccgagatcgtgccactgcactccagcctgggcaacaaagagaaaaactccgtctcaaaaaagaaaaaaaaaaaaaaaaagacctgggcttactagcagactggtgctagacattttcttccttgctgaatttgaagaagtgtgtgccatgatctgaaggggcatacagagaggctttgtggtaaggaattacaggcagcctctaggacctgagagcagcccccgaccaacagttaccacaaagattttagttctacaaccacaaggagatgaattctgctaacaaccttcataagcctggaagtggatccatccccagttgagcgtccagatgaagaacccagccctggctgacaccttcactgcagccctggagaggacccagctaagcctaaaaaatgtgcgctgttataagcccataagtttgtgataatttattatgaagcaatagaaaactaaggtaagtactagctccatcttacagatgagaaacctaaagctcagagactttgaccacaggcacacacttagcatgaggcacagcagggacagagcccagtctccagactcagcaggctggttttctctttaggaccccagctgcagagctggtcattgttctctcagtggccacctagatacaggaagagcaacctgcatagtattgattgaaatacctttttttccattttaatttaacaaacatttgttgagccctctctgtgtgcccagcactgtgccaggtgcaagggattccaggttgtggcgggtacagtggtggacgtggacaacagacaagccatgtcagtgtgataaggtttacagcatgaggagagacgggatgtgctgggagcatgcgatgggcagccagcctccgccgggtgccagggagagcctcccacaggaagtgatacacagatcccttggggtgggcctggtggtgagccagcctctctgaattgcaagtgagtgagtaggtgagtgggtgggttttactggcgaagggtccccaggagaagaggactcttccagcaatgtgaaatcaccctgcttccgtgcactggcttccaggacacctgtctcaaggacccagggcctccatgactgccctatgacgcctaagaactcagatcccagtgagcaccacttcccggatgcatcagggtggctggggtggagaagcagttgtttggctgtgactctcctcttctaaacatccccagacatctggcaggggaagcactgtaggttggggtgggaggcaaagcagggaaatagggggtacatggatgagggtatgagcagagccagaaaaaagagcaggaattagaaaggggcaccccctcctatagcccagctgcagtctgtagtgacttggcagacccaggagtccttgctgatcaactggctggatggtatggataatgcagggtcccaggaggaagccgtcaacatactcaaactgggggatttgagaagtattcaataaggagactattgtcaaaggtcttggaaaaggattgcaggaacctggaccaagagcatcaggctttcctgatgctggacctgatggccccaggggaggtcactggacctgcagagctctggagctgagtagatagggctgcctggcagcagctgtggcctcatggagggatgcagccaggctgtggctgccccacaggaggttaagtgccctgacctcactctcctctctgcctcccataagctatcggcgctccccagtgaccaaggcagagggtaagggcacccatagacgtagttcccacagtcctagggggcagagcaaggtggagaaagttggcaggcagactggaaaaaggcacccaatcctgactcattttccttctctgtacaagagtgttgatgagcatgcttatgttttgcttgttccaaatttgaaaagcaatcatgtatctaacggtcccagcctggagtctggcaggcacaggctggttgccagcatttggtttccaagagtcagcaacaagaacacaaaatcggggccactgagaagtcagtcaccagccccagaagccctgggcagcagaacaatcactgacaagaggttggctcaggaggtcttagagtccttgccaggaatggaacccagaaaccctttctccacacactcactcacaccccaatcctgcagctgtgggaggctggagagcagcagcagcaggcctgtaggcagcgcagcgtcggccytcagggtggcagaggggcaggcagctagaccaggaggcccagctctgcctagaatcgtgggcccagctggtaggaaactgggcagtgctgagttcacttcccccagtgtgg

SEQ ID NO: 7390 - DNA, 723 bp, Homo sapiens
gggtttccatagatggtgattccttcctaaacttagactacattcatcttaggataatgtgtaaagttgctttccacaccccttagagcacagcctatagtggggaggtcctagacatttttctggtttataccacccatgatctaaccatctgcaaatctcaattgagttaagactatggaattgcattatgaatatttgactaatgaagtaaagctcctttcatttaacaatttcaatttctcaatttcaaatcaatttaaacatatatatacatttgtgtatttcatttagttttactattttttcattttatgtagatattactaatgtaattttatgtataaattcatatatatttgatttggacagaaaaaagtatggttcctgtattgtttcctcaaaagttgataattcataygtaagagcatgaatgcttatttagcattggaactaatctttctggcttgtttgatcaattaattttcttttctaaaaacatttttattattttattttattttatacagatggggtcttgttacattggccaggcttgtcttgaattcctggcctcaagcaatcctcccatcttggcctcccaaaatgctgggattataggtgtgagctaccatgccagcccagttaactctatttaaccactcactggtaactgttttaagaaactcagcaagttgtgtgttgtttgggtacacctagaag

SEQ ID NO: 7391 - DNA, 611 bp, Homo sapiens
aggaacttgttgggyccagccttggccctcaccctgctgtgctggtgacctggcagttctatggggacaaggccccagcctatatgccttttgtggcagtctttcccttttcctagttctttagtaaccaggtcataccttattcccagcaaagggtttcctgctttgaatgtccattcctcagagatagaattccctggcctgacgttcaactctagaaaccagttgccagcacctgctgctgctgctgctgctgttgctgctgttgctgctgctgctgctgctgctgctgttgctgctgcctcctaacacaagcctgcctgaaatttgggcctgaaattgggtgtttcatctctcattccttcgcagctcaggtggacaccctcccttattaacttggaggagtcattctacagacctttctctttttttacttctttctttcagatggatttctcagccttagaatatatgttttccttgtatctcaaattttaacctgtggcataaagtccacttgatgccagtctttaaccagagtgacatgtttcctcatgtgtgctcttttctagtcaggactatctgctgcttccctgggctgtagttctggg

SEQ ID NO: 7392 - DNA, 611 bp, Homo sapiens
aggaacttgttgggcccagccttggccctcaccctgctgtgctggtgacctggcagttctatggggacaaggccccagcctatatgccttttgtggcagtctttcccttttcctagttctttagtaaccaggtcataccttattcccagcaaagggtttcctgctttgaatgtccattcctcagagatagaattccctggcctgacgttcaactctagaaaccagttgccagcrcctgctgctgctgctgctgctgttgctgctgttgctgctgctgctgctgctgctgctgttgctgctgcctcctaacacaagcctgcctgaaatttgggcctgaaattgggtgtttcatctctcattccttcgcagctcaggtggacaccctcccttattaacttggaggagtcattctacagacctttctctttttttacttctttctttcagatggatttctcagccttagaatatatgttttccttgtatctcaaattttaacctgtggcataaagtccacttgatgccagtctttaaccagagtgacatgtttcctcatgtgtgctcttttctagtcaggactatctgctgcttccctgggctgtagttctggg

SEQ ID NO: 7393 - DNA, 824 bp, Homo sapiens
gggaaatgttgattacatgtagttgtctgcaattgaacggtagtgggggttgaggtgggtggcyggacctgatggccagaaagattaaggctaaatgcatctgaagaaaagcagagccagagtctgtctctggtggcaagtgtgtcccaggtgacctgcctagagataccactaatcaggaggagaagccaagggggcctgtcaaagggggtgttcttatgaggataattgtttgttgaagtactgtcagaaacagatatgtcaggagatgggaactaaaacactacaggtatgagtgagtgatcagatcttataatgagaggggctaggccttctctaaggaaggctgagagatgagtgaggcttagcaagggagaggaaagcaatagacccagctgtgaaagtgtaaagcaggatctttcagagtcaggcctagaacactgggtgtgattagctagttctcttttagttgaaaattacagaaactgattctggatagcttcaagagagatacaaaagaggttagggagtcagttactgaaaggataactgatatatcttgtagaatcagaggactgagatacttgccaaggataaactagaatcagagatgaatcagtagggtgactatagcttacaataatctattttacacttcaaaatagctagaagagaataattcaaatgtttctagcataaagaaaagacaactagcctgggcgacagagcaagactcagtctcaaaaaaaaaaaaaaaaaaaagaaaagacaaatatttaaggcaatgaatatcccaagtatactgatttgatcttcactaatta

SEQ ID NO: 7394 - DNA, 753 bp, Homo sapiens
acttccctaagccttcaaggaacaaaatttgaaattttttattccaaagttatgtttgcattcacatcaaacattttaaatagtatgtgctgctgggaactgacaaaccccaaagctattatgggccttgtcaattttcaagcgctgaaaaagtaaggtgtagtaatgtttatgaaagaacatgatgccagatgtacttaatgtcagaaaaatcagtttgagttcctgtgttcttgtaacctcactgcagattgtcagcccaagtgatatgcagaaaatatatagcttgcctgactgcctttacccaaagagtcgatattatggaatagatggattagaatttctatttgaatagacatttttttctcttctgattttttgttcatttgcatggctgctaaaatttctgcaaacaaattacatataacagggaaactgctgaagaactttggtttttattacatttgaacaagttttgragaaaatgtcttctaacaataaaatacagtgttcaaataaaatcaaatacttgttgacccattctaagcaagccactttgcaaattctgcaggaagcataagactagtccataccttgcaacctggaaagaaaatgctagaagtgcaaatagttaaggactagtccttcttttttgttttgcattctcatgattccattctttctatactcatgatgtaccataattgaccctttgtgtcacccactcattggagaatttctgaacatgtgagc

SEQ ID NO: 7395 - DNA, 1084 bp, Homo sapiens
ataagagcttaggaaatgccatcaagatacctctacccagtgccccaatattgacagagccaataggaataacttgctggagaggtgagctttgcccaggtgaatgtccagcctttcttctcttccctctagtactatccgaagataactttggaaattaagagctcacaatctgagaacactcaggggccagctttttgaagaattgacctgtgtcactcctggaaggacttttctctggatccaatcgaaaggcagaagccaccccaattcatcctttgtagttgtctctctgcacagtgttttggttttgtttgttttttgtcctggaagcagtggcatcataaggttatggatgtgctcttgtgtgccaaatttgaaacaggcctttctgttcttaattacagtaacattttataatttgactctgacaggcaccctgttactttcattacctatgctaccgtacttttcatgtcttacccctttcctccgtaagtcttctctgttaacagcacctattgacatctaatacactacatattgtatttatttattgtatgccttctaccattaaagtgctgaaaaaaggagaataggaatctaagaatcttagccctttttctttcttttggctaccactttattcctaataaagcctaaaatagttcctcacacgttataggtgctcagtaaaatatattcaaatatatatcaaaaataaattcattcaacatatatgtgaacgtatgattttcattcatatgaatgaatgaatgaattytatccttataacagccctatgagagaaacgcatcattaggcctgttctacaagatgacgaaattgaggcactggaaattaagttctcaagtagaaaatggcaaagaagatttcaaatccaggcagtctgattctcagtctatcctcttggccaccactttataatgattcttctccttatcagctatacgattaaacctaattaccttaacaacagtgctgtggggagaagctattccttctagtctggcgtgggtctgaatattgcctttgacagctcctaactaggtgttttttggca

SEQ ID NO: 7396 - DNA, 822 bp, Homo sapiens
agtatatatagtgtcaaaaacagtagtttatttcttgctcatgatacagtagtaggcaggcaaaaagatcagaggaatttcccttctttacgcggtaattcagggacacaggctgattaatctgccattttcaacaaatggcttccagggtcgccttgaagattttatccattctgatcagccagaagggaaagagagcatgaaaaaatgtacatctaaggtgcaggcctagaaaatacacttttcacttctgctcacattttgtgggctagaactcagtcacaaggccacatgaagctacaaggagggtggaaaatgtaatctacctgtgtgcctaagaaaaaaggaaaaacatggatttgtgtgaaaagcttgaagttacctccaaattgtgtatctccagttgtcatctgttgtgagtgttctatttcacacataaaaaacacacccttccccaaggacacagcccaaagtcccaacaaattggtatatctaactcaaagtctgggatttctgagcactgtgaagtccttttagtcagaaatggatgtgcttcttcwcagtccaatatgctataaactaaaagtacattatctgacctaccataagcacacatatccaataaacaatggtgtaataaagacaggataactgtaattaaagttcctatttggaaagtggacatatgtgagccattcagatgtcattggtacaggttcagtatctactctctgaaatgcttgggacgaggaatgtttcagacttcacttttttttggaatttggaatatttgcatagagacaatgaggtatcttgggggtg

SEQ ID NO: 7397 - DNA, 665 bp, Homo sapiens
tgactatgctgactgctaaacaatttgaaagtcctgtgacagtcatccttcaggttaaaacttctgggggtggggcgtctaccagaagatggaatacaattttgtgagtgcagggggaaaacaggataaagaacagtcagaaaaagccagaaccaagtcgtcaaacgggtaggggaggcagcagggatggaggggagaggagtctttgctacagacagggcaggcayaggcggcgcggagggcggccttacctccgcggaggggccagtttcagtgtcaacgctgaggtctgaacagcctggaaggacgctggtctcttaaacatagctgccaccagacggccttaaagtgtctcagggacgctcctcagccctttgctgctgtgggtggcttggagagtacagggcagggctgctcgaggtggaggtgtggcaatgatggcgtggctgctgagtcctagacgcccggccgcggggaagtggaggtgggctgtctggggaagcagagttcagcattacttaaggatgttagggtctttgctgcactggagcctaaacaggcccagaatctgaaggacgatgttaggtgtactattcttgaaagggatttcagggtgttcctgagataagcgatgttgtgttccccccccatcacccaaaccctgg

SEQ ID NO: 7398 - DNA, 224 bp, Homo sapiens
ttgcctggagsctgccttagtaaccggcttgggtgccctggtcctcctaggactgaagacttctgttctcaacttacacatttccttctgcccttcagtcctgtgtttatgtattagtccattcccatggtgctaataaagacatacccaagactgtgtgtttataaaggaaagaggtttaattgactcacagttccacagggctggggaggcctcaggaaact

SEQ ID NO: 7399 - DNA, 781 bp, Homo sapiens
cattgaactatggagaaaaacacaccctcaggctagagacccctctctgaaaggtctggctgaaaatctgagcctgtggagcatgttcctgctaccttcagcaacaaggactctaactgcataaggggagaaaacacctttaattcatgctcgatggttttaagaaaattaatgctctctgttcttggaaaaaacaaaatagcacaacatactgtttcccttagtcccttagackcagtgatgttgttcttaagattcacaaaagaatttgaacctgaaacatccggtaggaaagtcagtaggctaaagtggatggagaagttcaggtctgggcacctggtattttgcatttagtcacttttactagttgtattgtcttgggcaagccatttgattacccagagcttctgtcttctcatgagtaaatggggatgagaagcctgtccctttaaacctgtcctcctgtggagtgctgtctgggtcctggggaaatcttccagagccctctattcctattcctggcttgttcctcactgacttctgagttggtcccctctaaacccaaccaggaactcaactttgggacccagccagggtccaggctgggccctttggaaaggcgtcctcttaggctctcctgtaccttggcacttggctttcccttcagctccgtttggctctcatcctgcctctcagcctctccaattacatcatgttggaaccatccacacagctggcactagtacctccttcccacccctattctgctacttggcaaatt

SEQ ID NO: 7400 - DNA, 793 bp, Homo sapiens
ttccatttagagggagatagaaacaaacaagcagttataatacagattgatgagttctgtgttagcgaaatacaatgtattacaatcttttccctaaagctttctctggccaccccaacttttagtcataattttcttatttgaacttctggagtgctagttgttttcacaacgtattttctcytaaaaatatattctttctctattactgatttagatctgtattctcgggcggtgggggggactcattttatgtatcccagaccctaaaacagttctctctaaagagtaagaactaacctacaggggcgtcccctaaggggacggagcccacgtgtgccgtggcgctgagaaatctctgcctggtgctggagctgctgtgcggggcgtgcagtggtgctgggtcgggccaaggggctgcccacccggagctgggatgccagaagggctgttggtgaggacatttcaccattcggtctctccttttgtgggcaagcaggtggtaaagacagggagcaacagtaagaagtatagcccaccagcctccagtctctgtggctccaggacacccaggtccatggaaagaaattattccttagatttgatccagatgaagaaatggggcccgctggcaacagctcaccgccagagcctccacaaaaagaagcgcagaaggaagggactgtggactcaaagcaggcccgggagcaagtgggcagaagacccttgacgcctcctcacagtccgcagagctcgtcccccagggagaggatgattaggaatgtttgaaggg

SEQ ID NO: 7401 - DNA, 745 bp, Homo sapiens
ttcttttttgaaactaaatccatgtatgtacaaactcttccaggttaaagactaccttgccattctctgtaattttctatttaactaattatcttaattaattaacatattaacttattttaaaaatctaattttaagactttggagatgctaaataactataggttgagtagctcttatccaaaatgccttagaccagaagtgttttggatcttggattttggaaaatttgcatatacattatgaaatgtcttgggaatggaactcaaatttaaacatgaaattcatctatgttttatatacaccttatacacatagcctaaaggtaatcttatacaatattttaaataattttatkcataagacaaaatttgtgtacattgaaccatcagaaagcaaaggtgacactatctcagccacctttgtgaagagtgtggttgtttggcattgccatcattcttgactgaatttatatgctaccaattttattacttacaaataagaacttaatagtaaaaatatggcataccattaatacagtgagaaaaacagtatgttcagtgtaactaaggacaatagcatcaccagaatacctggatctgctgttaaacaactggaacaacaaacaataaaaggccttccgtctctatctatgatgctgtattttgactaaaaggttactgtgcacattattttattttttgggtgagaagaaacagcagaagctgtttagggaccaggaagt

SEQ ID NO: 7402 - DNA, 745 bp, Homo sapiens
ttcttttttgaaactaaatccatgtatgtacaaactcttccaggttaaagactaccttgccattctctgtaattttctatttaactaattatcttaattaattaacatattaacttattttaaaaatctaattttaagactttggagatgctaaataactataggttgagtagctcttatccaaaatgccttagaccagaagtgttttggatcttggattttggaaaatttgcatatacattatgaaatgtcttgggaatggaactcaaatttaaacatgaaattcatctatgttttatatacaccttatacacatagcctaaaggtaatcttatacaatattttaaataattttatgcataagacaaaatttgtgtacattgaaccatcagaaagcaaaggtgacactatctcagccacctttgtgaagagtgtggttgtttggcattgccatcattcttgactgaatttatatgctaccaattttattacttacaaataagaacttaatagtaaaaatatggcataccattaatacagtgagaaaaacagtatgttcagtgtaactaaggacaatagcatcaccagaatacctggatctgctgttaaacaactggaacaacaaacaataaaaggccttccgtctctatctatgatgctgtattttgactaaaaggttactgtgcacattattttrttttttgggtgagaagaaacagcagaagctgtttagggaccaggaagt

SEQ ID NO: 7403 - DNA, 1670 bp, Homo sapiens
tggatccagcctcagaacctttgtatctgctactccctctgcccagaaggctcttctccaggctctctgcacagctggctccttcacttaactcaggtctttgctcaaataccattcatgaggcctagatgaggcaagaatgtctggaaacatttttagttgtcacaagggggagtgggggaacaaacagcatctggtggctagaggctgaggttgctgctgaatatactatgatacacaggactgtcctgtgcaacaaagaattctccagtccaaaatgtcaaaagtcccatggttgagaaaccccaccctaaacaattcaaatatggctagtctcagcttacttaaaaaaaaaaaaaaaaaaaaaaaaactgaccaaaaggataatactacctgctctaactcattatcttgtagggaggatagaaattgataatgttcacataagtgtcttgaaaagtgttttataaatgttatttttctttttagctcttgatacttcttcagatcatacaagtaggcttaaaaggcatttatcatcttactcatttacaatggaattatgatactttgactttaaagaggatcatttttctaaagagaacatagagcttcttatctatcaaagcctagttagcaaccattactgtccctatttttgagatttaaaaaaatggcagaagaaacatatgaccctttcttcaaggagaaaaaaacgaagttatagttatttcattcattgattcaatgattattatggaatgctaatatgtgtaaaacactaacaacaaagtgaaacaatattacccttcctatataatagataatgagctgagtgttcctgtgtgtggctggtggctaccatatcggacagtggagatttaagcatcttctatatgttagcagtttttttttttcaggatttcaatttttgaaaacttccagcacgaactgaaatcatagtgatctttcaggctgcaatgaccttgcaaaacttgctttaccccatagcactagaatccaacacctaatcccttgggttccgccttggctcaaatgctgatatttcagtctcagcaactgctttgctttcctcaacatctcattaaatacctgacattcggactgtgacacccaggcacagatgtgggaaaggagcaagtttctgtttgaggggactgggaccagactgcctggtctgtgggtcccgctgattcctgagtcactgtctacagttgtccctgaacgtggcataagcaggtggtgtctgatcartcaggattaatgatgcaaaaggaagctggcacctcttcaaagacttgctcacagaggccacagggagtagagaaagcaaatccttggccctgggttccgaccctgatcctgggttctgtgtccaggtgtgctccttgacctcagatgtttccatgaaacaggcttctgttagtctcctttcataactcaccctagtaagggatctgaaactcacagtagaaacatttcttcttcttccctaaaatcctgtgggggcaggtactattattatctccctcttctgatagatgcagataagaaaaccccagggtcatgtagatcaagagacatataataacagatgtttcaaattaggcacccacgggctattttgggctggcagatgtagttttttt

SEQ ID NO: 7404 - DNA, 1670 bp, Homo sapiens
tggatccagcctcagaacctttgtatctgctactccctctgcccagaaggctcttctccaggctctctgcacagctggctccttcacttaactcaggtctttgctcaaataccattcatgaggcctagatgaggcaagaatgtctggaaacatttttagttgtcacaagggggagtgggggaacaaacagcatctggtggctagaggctgaggttgctgctgaatatactatgatacacaggactgtcctgtgcaacaaagaattctccagtccaaaatgtcaaaagtcccatggttgagaaaccccaccctaaacaattcaaatatggctagtctcagcttacttaaaaaaaaaaaaaaaaaaaaaaaaactgaccaaaaggataatactacctgctctaactcattatcttgtagggaggatagaaattgataatgttcacataagtgtcttgaaaagtgttttataaatgttatttttctttttagctcttgatacttcttcagatcatacaagtaggcttaaaaggcatttatcatcttactcatttacaatggaattatgatactttgactttaaagaggatcatttttctaaagagaacatagagcttcttatctatcaaagcctagttagcaaccattactgtccctatttttgagatttaaaaaaatggcagaagaaacatatgaccctttcttcaaggagaaaaaaacgaagttatagttatttcattcattgattcaatgattattatggaatgctaatatgtgtaaaacactaacaacaaagtgaaacaatattacccttcctatataatagataatgagctgagtgttcctgtgtgtggctggtggctaccatatcggacagtggagatttaagcatcttctatatgttagcagtttttttttttcaggatttcaatttttgaaaacttccagcacgaactgaaatcatagtgatctttcaggctgcaatgaccttgcaaaacttgctttaccccatagcactagaatccaacacctaatcccttgggttccgccttggctcaaatgctgatatttcagtctcagcaactgctttgctttcctcaacatctcattaaatacctgacattcggactgtgacacccaggcacagatgtgggaaaggagcaagtttctgtttgaggggactgggaccagactgcctggtctgtgggtcccgctgattcctgagtcactgtctacagttgtccctgaacgtggcataagcaggtggtgtctgatcagtcaggattaatgatgcaaaaggaagctggcacctcttcaaagacttgctcacagaggccacagggagtagagaaagcaaatccttggccctgggttccgaccctgatcctgggttctgtgtccaggtgtgctccytgacctcagatgtttccatgaaacaggcttctgttagtctcctttcataactcaccctagtaagggatctgaaactcacagtagaaacatttcttcttcttccctaaaatcctgtgggggcaggtactattattatctccctcttctgatagatgcagataagaaaaccccagggtcatgtagatcaagagacatataataacagatgtttcaaattaggcacccacgggctattttgggctggcagatgtagttttttt

SEQ ID NO: 7405 - DNA, 975 bp, Homo sapiens
tttggagaggggtagggaagaaggtctgatttggctgagcaagcacttctgcccagcagccttctctgcagccccagattcaatttgagacgtcttaagggaggcttaaaaaaaagacattgtcacttttccctgtaatgaatgcaggggttttagtttactggcacactcaaggcagctggtgatggcttccagatgcaggttatctgcctcccctgtggacttagcggaaagcttttggtgttttacatgcaaagcacgcaagagggcagaggcgtctctgggggtgggtggagggaacagagaagcagagaggacttygcaaggggctcagggacaaggaggccgcctgctgctgcttctgagggtgttttcccaagagcaggagagggcggggtggagcagccacacccacaaagaatgggagctcctttgcaggacaggtgtaggcttctcgcaagaaacagcctcctgagtttatatcttcctgagaaaatgagatacagaaaagccaaaccttcaaaaccactaaataaataatgagagatctctcatcctgaactggcacttttaacatgtcagagcgcttttctagtatttcgttccatgcattccaagaactcaagactgttcacatgaaccaaaaacaactatgttaattagcctgccagaacgtcagggtatgagaaaatggaggcccagagaggggcagtgactaactcagggtcaaccagctttctgatggttgaaccccaaaagaacattttgcgtatataaagtgatatatcagtcagatctcatgacactaattttaaatggatccattaaccaaaaagaacatattgtagtgatgtataaccagagctggacagttaattgctgactatgtttttgattgttaagaaagtgaataaatcccacagttgttcttaatagttgctagggtttctcagattttgttttacaggttctctt

SEQ ID NO: 7406 - DNA, 841 bp, Homo sapiens
caggtcagcaggacagccaagccctgactcagcttcccagccacagtgtgaagcgtatgagtgtgaaagtctctccttcagagaaaagaccagtggtccaaagaccctgcccattcccgtagctgtgcttccccaaagaatctctgaggaggttgacataatggtgaagtgctcagactctggagtcaggctgcctggagtcaaatcctggttcttaccacctttatgaccttaagcaaattgcatgcctcctccttagcctcagttaacccatatgttaagtggaaataatataatccccctttatgatgttgttttgaagagtagtaattattattgctgcttttattccatctctgagaattaactaggcccaggttatcacatcttagagactaaatcttcccttcctagacaaatatgtgcccccmaaaaaagtcatatttatagtttcctggctctgaaatgaccctccctaactagtaaagatatttaacttcatcactctttctgttatttctttgagtggggctgacctcttccggcatatggcttctaatgggctaggtataaagtaggccagagaaaaagagggtgtaacttccctgccctgtcccttcctcttgtccccaccaagacatggaaaggacgaaaagaactgaggagtcccagctccgctattaaccgctgcctgcctagggtaggctgaaaaatggctcttctaaaaatgcctacatcctaaactctaatgtatgtgaatgtgtactccacatagcaaaaaggattacaaatcaagaattcaggttcttcaagtggatagattatcctggattatttgagg

SEQ ID NO: 7407 - DNA, 872 bp, Homo sapiens
ggcatcaccattgaagaacctgtaagtgatgttttccttgcttcactacgtatgtggctacttgggctctctgaccagagtgagggtgagggatgggacaagagggtggtcaggtgccttcagagatgaaattgagggctgtgcttgagtgatttctagggaacacacgttggatgccacaatactgtcacagaaacctgtgctttgctggttagtcatccccagatatgagcactggagcctcagtgcctgctgagttagagcctggccctacagagccttggtgcaagccagctttgcccagcatcattatcatcttctgtaaaatggggatggtaaccttgtgggcatgttttgtgcaactgagaaagtgttcaaaagraagaaatatcttagtgcctcatacatagtacgtggtcaatcaattggaaccttgacgatgatgtgctgaagctctcactcttattaataggctcatcatcggctcctgagagagcatggggacttacatcccaggaagttggagagacatagccagatccatttccactggcctaggatttttttttaaactttttattttaaaatgatttttgattcgcaggaagtttcaaaaaatagtagacaagtccgtatactagtttcctccaatggtagcatccgacataaccgcagtacagtatcaacactaggaaactggcattggtacaatccacagaccttagtcttcagaactttcacagctccacgtgtgctcacttgtatacgcctgtgtgagcgcaggcataggtagttctgtgtgatttcatcacgtgcagatttgtgcagctgtcaccatagtcaagcgcaggactgttccagcgtgacatttt

SEQ ID NO: 7408 - DNA, 850 bp, Homo sapiens
tcagtaatggctgtccagcgggtcacaaagcccagcctagggacacacctaagattctcccagaagctaaaacagaaaggtaacaaagagggcaatcccagaaatccccagcaggagtcgatcatacagcaaaagccaagggacaccccaggtataaacccaagaaccgaaagcagacacacgaatggatattcacaccctcgatatttgtagcagcactgtccactcaataaccaaaaggtggaagccatctaagcatccactgatggatgaatggatacagaaaatgtgatacatatgtacaatggaatactattcagccgtaaaaaggaaggaaattctgacacatgctactacttggatgagttttgaaaagaaactatgctggccgggcgcagtggctcatggcctgtaatcctagcactttgggagaccgaggtgggtggatcacttgaggtcaggagttcgagaccagcctggccaacatggtgaaaccccgtctctactaaaaatacaaaaattggccaggcgtggtggcacacatctgtaatcccagctactcgggaggatgaggcatgagaatcacttgaaccctggaggcagaggttgcagtgagccgagattgcaccatagcactccagcctgggcaacaagagygaaactctgtcttaaaaacaagaaaaaaaaaaaaaggacactatgctaagtgaaataagccagttataaaggacaaaccctatatgattttaatcgtatgaggcactcagaatagtaaaattcacagagacagaaagtagaatggtggttgccaggggctggggagaggaggaatgggaagttactgcttaat

SEQ ID NO: 7409 - DNA, 1443 bp, Homo sapiens
taggggcaagaatggaatcaagacacttatttagggctggacatgtggctcacacctgtaatctcaacactttgggaggctgaggcaggaggattgcttgagcccaggtgttcgagaccagcctgggctacatagtgagatcctgtttcttaaaagaaaaaaaataattagctgggcatgatggtgcacacctgtagtcccagacactggggaggcagaggcaggaggatcgcctgagcccagaagttctaagctgcagtgagctgtgattgcaccactgcactccaacctggkcaacagtgcaaaactatctctaaagaaatttttaaattaaaaaaattaaaaagacacttattcaggaaaaaggaggctctgccaggaggtggggcccagggcctctaagaacctttgctctagcccactctgtccaaaacacaacagttacaaaaggaggaggatgaaaaaataactaaaagataaaaaaagaaaaaacagtaatacaagtttctcaaaaacaaacagttcaacacaaaacaggggaagctataatcattacaaatagtatcagtagaaataaagtcagtttttttcttttcttcttaaaaaaaaacaaaacaaacaaaaacataaacgggatccatgtgcagaacgtgaagatttgttacatagtatacatgtgccatggtggtttgctgcacctattgaactgtcctttaggttccctcccctcacccccctacccccaacaggccctggtgtgtattgttcccctctctgtgtccatgtgttctcattgttcaactccctcttacgagtgagaacatgcagtgtttggctttctgttcctggattagtttgctgaggatgatgtttccagcttcatccatgtccctgcaaaggacatgaactcattcctttttatggctgcgtagttttccatggtgtatatgtgccacattctctttatccagtctatcattgatgggcatttgggttggttccgtgtctttgctattgtaaatagtgctgaaagtcatttctactgcctatgcttttggaaatgcatctgaggagtggactaaaaatgccaaccctcaccctcagcccagtggcttcatagtacatggggactagcaggtggtaccttcaagttctgggacactttgtttcttccagcacttctgcaagggctatggtgggagggccgtgtcactttgggggtcagtatctcggggcaatggtgtggctgcatgcaacactgtattgtgttgtaatacaacctttatttgtatctaaccatatttattaaaatataataatctaccttacatcattgttttctctctcaaggctcattctgccccaaactatttttccccttgcttttgtacagtgagatctgcaatctgaatgccagcttgctgaggccatgcctgtggctat

SEQ ID NO: 7410 - DNA, 638 bp, Homo sapiens
gcttctgcttctgtccttgtgctctgttctttgaaactgttaagtttctttcattgatcttcctagatgtttacctctacttgcattgactatgtagcattataaatacaaaaccttataatagtatgtaacatagagtcattatgaatacarttgttctcccttatttgaagttttgctttctgaggtttcagttatccgaggtcatctgtggccatccgtgatgcacagaaaatatgaaatagaaaattatagaaataaataatttatgtcttaaattgcccactgttctgaatagcaggataaaatctcatgccatcaaactctgtcccacccagcatgtgaatcatctctttgtccactgtatccacgttatccaggccacctaacctgcctgcccttttgccacttgctagccatcttgcttgtcagatcaactgtctcagtatcgcagtgcttgtgttcaagtaaccctgattttactttataatggctccaaagcacaggagtagtgatgcggcatattgttataatttttctattttattattagttattgttaacttcttcattgtgcttaatttataaagtaaactttatcataggtctgcatgtataggaaaaaacaaaatacaggg

SEQ ID NO: 7411 - DNA, 658 bp, Homo sapiens
tcaagaccaggggcaccatgggggtccttgattacattgttcaggaaaccaatgagggaacgtcttggcttctttatagaaattacataatatagaagaaaaaagcaaaacacagccaacaaacaaaaatgctgataagtccttttgaaggacaatacacaaaagctcagttgaagctttcacacatagacatgcatttttcatttttcttcttggagatgaatttctatgtgtgtactttatttgtacttgggctccaaaatcatgtatcctttcctcttgctgtaggcagttacatggtgtcttagactacttgggctgttataacaaaaatacaataaactgggtggcttcaacaacaaacatttatttctcacagttatggaggctagaaagtccaagatcaaggcacaggcagactccatgtccagtgaaggcctatttcctctttcatagatggctgtcttctaactgtgtccacacttggcrgaaaggtgaaggagctctctggggtctcttttataagagcactaattccaatcatgagggctctatcttcatggcttcgtcactttcctgccaagagtccctacctcctgatgccatcaccttgggcgttaggattttgccatataaatttgggggtacacaaacattt

SEQ ID NO: 7412 - DNA, 648 bp, Homo sapiens
atttttcatgttttatactaatgtagaacattttgtttcctactgtttttcatcattgtcactgtttgctaaatattttcacatggaaggggggagagagagagacaaagtcaggaggaaaaagaacccccctccaaacttgtgtccaaagctaatttcctcccgttgggcttggctataactctacaagtaaaacagtcaccccgagcaatacgtacaggaactcaatagtaacgtgattaagttcctagtcaacaagactacactcgactgtatgttaacaaacctaattatagccccgtggtrataaattgggccagggccctggctgcacatctctgaggtcatgtctaggagagctgtttgaccctcttgtctcagggaagagaattgtcctggagaggggtccctgtctcagcatggtagaggggctgttttctccctgacctagttgtccagcccctgggaggatgggtggatgccaggaagcatttcagagcggaaggtcatcggcatgagaactgggtattaggatttgctggaggagaccggaagggcagtggcttctgagccattggcccctttcacgttgtgagtggcatcaggatgtctgagaggagagcatggtgtttttgcttcattggatcc

SEQ ID NO: 7413 - DNA, 658 bp, Homo sapiens
taaatggaatgcttcagtcatgtgtcaactttatggctccttggtaattttctgatttttttttctttctttctttgtttttacttatttagaaaatagaagaaaaatgacaaggaggtttagaatatgtgtatgtgttggacactgtcttttatggatcatagcctcctgcatccatctgatggaatccatggttctcttccttagacatgtatacacatgcagcagcagacataactttacagaaagttccagttgttttaaagatctctttaagtccatgaactccaggccaagaaaatatcaaaatgggacatccttagaaatgcagagttagtggcaagtaggtgatatrtttcagcttatatgccaaagttttatttcaagcaaaacaagtcaacatggattttattgaaggacactcagcatttatttatttcagtcgtatttttaagcaacccttcaaaacccactttattgattgagccccattaaataggattctaccatttaagatctctttttacttactcaggactataatgactgaagcccatcagcagtgttgttacatgataacattggcagatccatcaggaaatgtattaccagctctcctaactggctcattttattgaatcgtcttgttatgtttcct

SEQ ID NO: 7414 - DNA, 2563 bp, Homo sapiens
cccaccatgccccttgtgttgaggaatgatatatctaattccaaggaactgagatcttgttttttaaagcataatcttaaattttatcaaatacatatttgacaactgtgaaataatgttttcctctttaacctcttaatatcatgaattatattaatagatttctcaatgttgtgccatcccttctttgctggaataaatcccacttagtcatggtgaattattcattgaatatactcctggatttgattttctaatatattattaaagatctttacttcatatataaataaaaaattagtcagatatctgttttttattgtatgccaactttttcaagtttgggctaccagacttacactacccatataaaaataattagaattattgcaaaggacttcctttcctgtgctctgtaaagttagataatcaacatcctttatctatcccctgaaggaccacaaaacagttaggaaaccatctaaactaacacctttcttggagctaattcttcagacaagattttgattttttaaaagatatttatatagtgatatcttctatcttatttctaccaattttagtaatctgacaaaatatatatatatatatattcaaatgatactttgaagatcattagcctagaattgtacaaagtattttcatataattgatgtaatatgtttattgcattgtcaattttgcatttttagctcttcgaatcacttaatattttatctattttctcacaaaatacactcttgcaattaaatataaattgtattcttttttgttttctaatttataaaactgggctttaatctgtattaattctttccttctatctctatgtattaggctggtgcaaaagttactttcaccacaacctaatatttgatttgctgttcttttttatttattttgaatagttgatttattttcttccttcttaaaaaaatattaaaaaaaatttttgtttttaagaaacatgcctaagtgctttatttctgagtcctttcatattcatgcattcttttttgttgttttcagatgaatgacagtttggctaaagatagaaggtggaggcataacctttwccatcatgctgttgtaatcattgcttcgttactgtaatcattgcttcgttatcttctggcatctaacattgcaaagaagtctgagggccgtccagatttttattttccttcttagatatttgtttttattgttggctggttgattgttattattgttttaatgctgtgatgcttttataattctttcttcatccttgaaattcaacactttcccttttaattaagtttcccttttacccatgaacgttttccatttgcagctcatccatcattttctacaggttggctattgtgattccacccactcctagtgtggagacaaaagctactctctaagcctgcatggctggaagttagattatgagctctggcaaagtcccctgggtaaatgtcattttgttgacaccctggatcatggggccagctggcctgccccaggcagaatcaatatcttctggttgtattccctccaggaaatgagttgtcttgagctgaggtgtcaggatacaaggggcaacttgaggcttaactgtcagtccaggtggggaggtgaagagggatcctattttgaagacaaatttgtcagagccattctgatgttatgacaactatttacaaccacaaatcactccttctcaaagatgcaaaggaaaaaggaaacaagaggaagacaagcttgaagataatctaaactcagcctcaaagttgagttttcatttctttaggactctgggtaacagggagggcatatccattttctaatagcatgtttatttcttttattcacgttcacattatcaaggtagggaagggctattgggaaccaactgcttcatttcttgtctttcttgctaaatttcaaatttgttcatggcacttgccctgtgttttcttatcatacgtttttttggggggagatcagaggacagagactcctctgtgcataccttggtggttgcatgtgtatgcaaatgagaaaggctagaggaagaaaaaagcattgttcaaagggaaaaaatgaatggtctttttatgaaaaaaatacatgtttcctaagcttctagtggcctgtgcctcactcacgtaaggaaacgagagacaatgtgatttaggaaattaagaagtgacacagaatggaagcgatctccgcaggggttgggagtggacaatccggcctgattgtaatcaaacctaatgtcattggtgatgagaaataagaaaagacagttaagtccgatcgcatcaatattttcagggattaggtatgcaataccaagaatgcagtaatgagaactagcggtaccacatggaaaagccactatttttagaagttaattaataaacattcattctgcttctgttggaaattgctttaaatacccccactgaataaatatttcatactttatttaatatcccattaatgccaccatttcctaagagaggggttctgggtaacctcaaga

SEQ ID NO: 7415 - DNA, 2563 bp, Homo sapiens
cccaccatgccccttgtgttgaggaatgatatatctaattccaaggaactgagatcttgttttttaaagcataatcttaaattttatcaaatacatatttgacaactgtgaaataatgttttcctctttaacctcttaatatcatgaattatattaatagatttctcaatgttgtgccatcccttctttgctggaataaatcccacttagtcatggtgaattattcattgaatatactcctggatttgattttctaatatattattaaagatctttacttcatatataaataaaaaattagtcagatatctgttttttattgtatgccaactttttcaagtttgggctaccagacttacactacccatataaaaataattagaattattgcaaaggacttcctttcctgtgctctgtaaagttagataatcaacatcctttatctatcccctgaaggaccacaaaacagttaggaaaccatctaaactaacacctttcttggagctaattcttcagacaagattttgattttttaaaagatatttatatagtgatatcttctatcttatttctaccaattttagtaatctgacaaaatatatatatatatatattcaaatgatactttgaagatcattagcctagaattgtacaaagtattttcatataattgatgtaatatgtttattgcattgtcaattttgcatttttagctcttcgaatcacttaatattttatctattttctcacaaaatacactcttgcaattaaatataaattgtattcttttttgttttctaatttataaaactgggctttaatctgtattaattctttccttctatctctatgtattaggctggtgcaaaagttactttcaccacaacctaatatttgatttgctgttcttttttatttattttgaatagttgatttattttcttccttcttaaaaaaatattaaaaaaaatttttgtttttaagaaacatgcctaagtgctttatttctgagtcctttcatattcatgcattcttttttgttgttttcagatgaatgacagtttggctaaagatagaaggtggaggcataacctttaccatcatgctgttgtaatcattgcttcgttactgtaatcattgcttcrttatcttctggcatctaacattgcaaagaagtctgagggccgtccagatttttattttccttcttagatatttgtttttattgttggctggttgattgttattattgttttaatgctgtgatgcttttataattctttcttcatccttgaaattcaacactttcccttttaattaagtttcccttttacccatgaacgttttccatttgcagctcatccatcattttctacaggttggctattgtgattccacccactcctagtgtggagacaaaagctactctctaagcctgcatggctggaagttagattatgagctctggcaaagtcccctgggtaaatgtcattttgttgacaccctggatcatggggccagctggcctgccccaggcagaatcaatatcttctggttgtattccctccaggaaatgagttgtcttgagctgaggtgtcaggatacaaggggcaacttgaggcttaactgtcagtccaggtggggaggtgaagagggatcctattttgaagacaaatttgtcagagccattctgatgttatgacaactatttacaaccacaaatcactccttctcaaagatgcaaaggaaaaaggaaacaagaggaagacaagcttgaagataatctaaactcagcctcaaagttgagttttcatttctttaggactctgggtaacagggagggcatatccattttctaatagcatgtttatttcttttattcacgttcacattatcaaggtagggaagggctattgggaaccaactgcttcatttcttgtctttcttgctaaatttcaaatttgttcatggcacttgccctgtgttttcttatcatacgtttttttggggggagatcagaggacagagactcctctgtgcataccttggtggttgcatgtgtatgcaaatgagaaaggctagaggaagaaaaaagcattgttcaaagggaaaaaatgaatggtctttttatgaaaaaaatacatgtttcctaagcttctagtggcctgtgcctcactcacgtaaggaaacgagagacaatgtgatttaggaaattaagaagtgacacagaatggaagcgatctccgcaggggttgggagtggacaatccggcctgattgtaatcaaacctaatgtcattggtgatgagaaataagaaaagacagttaagtccgatcgcatcaatattttcagggattaggtatgcaataccaagaatgcagtaatgagaactagcggtaccacatggaaaagccactatttttagaagttaattaataaacattcattctgcttctgttggaaattgctttaaatacccccactgaataaatatttcatactttatttaatatcccattaatgccaccatttcctaagagaggggttctgggtaacctcaaga

SEQ ID NO: 7416 - DNA, 813 bp, Homo sapiens
caaacaaggttcacacattacatttagattatgtgtatcacaagtctctcttaaaatattataattcttcctctttgtgtgctatttgttctttttctttaaacaactaaatcctttgtcttgtggaatatctaggtttcactgatcaaagcattgtgatgtcatttaacatgaccctccatcctcatattttttgtaaactgggagttrgatctagaggcctgactagatatgtcgttttttaaacactgtttagtgtctctgtatgctttctattgccttacatcaaaagaaaaataatgtcccgtttgttcctcttttagtaatggaaagattaattagtgaattcaggtcatgtcagcctgatccatctattataaaatttaacatctagtgtttcttatctaacagttttagcaactattaatgaccattatctagacatatgaagttttgcaaatgtggttttctctatcatttcttctcatttattagctgtgattcttttcaaaagataactttcctctaccaattattttgctactctgacatgtaatccatgaaagaaaaattactaatctctcacatttgaaatacaaactgtcagaacctgggagatattgcaaccactttttcatccagtggacaagaagagctgactcaggaggtctagcacggggctatcttcagcaatcagtgcctttcccaatgcagctgtttgagcactgaatgcttgcagccaacccttcttgtattcaccctgagttatcttcttgagggtctttgtcagggctttatctgcagaacacctag

SEQ ID NO: 7417 - DNA, 813 bp, Homo sapiens
caaacaaggttcacacattacatttagattatgtgtatcacaagtctctcttaaaatattataattcttcctctttgtgtgctatttgttctttttctttaaacaactaaatcctttgtcttgtggaatatctaggtttcactgatcaaagcattgtgatgtcatttaacatgaccctccatcctcatattttttgtaaactgggagttagatctagaggcctgactagatatgtcgttttttaaacactgtttagtgtctctgtatgctttctattgccttacatcaaaagaaaaataatgtcccgtttgttcctcttttagtaatggaaagattaattagtgaattcaggtcatgtcagcctgatccatctattataaaatttaacatctagtgtttcttatctaacagttttagcaactattaatgaccattatctagacatatgaagttttgcaaatgtggttttctctatcatttcttctcatttattagctgtgattcttttcaaaagataactttcctctaccaattattttgctactctgacatgtaatccatgaaagaaaaattactaatctctcacatttgaaatacaaactgtcagaacctgggagayattgcaaccactttttcatccagtggacaagaagagctgactcaggaggtctagcacggggctatcttcagcaatcagtgcctttcccaatgcagctgtttgagcactgaatgcttgcagccaacccttcttgtattcaccctgagttatcttcttgagggtctttgtcagggctttatctgcagaacacctag

SEQ ID NO: 7418 - DNA, 813 bp, Homo sapiens
caaacaaggttcacacattacatttagattatgtgtatcacaagtctctcttaaaatattataattcttcctctttgtgtgctatttgttctttttctttaaacaactaaatcctttgtcttgtggaatatctaggtttcactgatcaaagcattgtgatgtcatttaacatgaccctccatcctcatattttttgtaaactgggagttagatctagaggcctgactagatatgtcgttttttaaacactgtttagtgtctctgtatgctttctattgccttacatcaaaagaaaaataatgtcccgtttgttcctcttttagtaatggaaagattaattagtgaattcaggtcatgtcagcctgatccatctattataaaatttaacatctagtgtttcttatctaacagttttagcaactattaatgaccattatctagacatatgaagttttgcaaatgtggttttctctatcatttcttctcatttattagctgtgattcttttcaaaagataactttcctctaccaattattttgctactctgacatgtaatccatgaaagaaaaattactaatctctcacatttgaaatacaaactgtcagaacctgggagatattgcaaccactttttcatccagtggacaagaagagctgactcaggaggtctagcacggggctwtcttcagcaatcagtgcctttcccaatgcagctgtttgagcactgaatgcttgcagccaacccttcttgtattcaccctgagttatcttcttgagggtctttgtcagggctttatctgcagaacacctag

SEQ ID NO: 7419 - DNA, 813 bp, Homo sapiens
caaacaaggttcacacattacatttagattatgtgtatcacaagtctctcttaaaatattataattcttcctctttgtgtgctatttgttctttttctttaaacaactaaatcctttgtcttgtggaatatctaggtttcactgatcaaagcattgtgatgtcatttaacatgaccctccatcctcatattttttgtaaactgggagttagatctagaggcctgactagatatgtcgttttttaaacactgtttagtgtctctgtatgctttctattgccttacatcaaaagaaaaataatgtcccgtttgttcctcttttagtaatggaaagattaattagtgaattcaggtcatgtcagcctgatccatctattataaaatttaacatctagtgtttcttatctaacagttttagcaactattaatgaccattatctagacatatgaagttttgcaaatgtggttttctctatcatttcttctcatttattagctgtgattcttttcaaaagataactttcctctaccaattattttgctactctgacatgtaatccatgaaagaaaaattactaatctctcacatttgaaatacaaactgtcagaacctgggagatattgcaaccactttttcatccagtggacaagaagagctgactcaggaggtctagcacggggctatcttcagcaatcagtgcctttcccaatgcagctgtttgagcactgaatgcttgcagccaacccttyttgtattcaccctgagttatcttcttgagggtctttgtcagggctttatctgcagaacacctag

SEQ ID NO: 7420 - DNA, 790 bp, Homo sapiens
tttatattatgaatcattgggatgggtgtttcactgtctagaactcatattttcctatgacttcccttttgactcattatacttagtgaactaagtttctagtaacagtccaggaggcaggggcctgtttcatgactgacagtggttttgtgctgcgaagagatcaaaaggcttgattttacattgtcataccttatttttcctggactttgcttatgctctgttgatggtgatagcacaaggattcctataagtttgtatataataatgtagttgtttgtagaatttggagcttagaataagtattttttttctttaaaacagaaaattgtaatagtttcccttaaagggctgtcctctcacacagttaaaattagctgtcttactaggtaaaactatattattttgtaatgattaaactagtatggccattcacctcatgtctctcaacagtttcttgtcaaatttgggagaaaaaaaaaagcgaccttataagattactgcattccaaatgctagagtgcattatgcctgggaccaaatgggacaggatatatgctcgcctctacttggctgtgtaaaatttgcttggaaaagagacattctrtcttttgaaagagagcatgactttcccttgcattgtgatctatgagctgtagctaagagcaccctcggcagtgcagaccctaaggcaaacctaccacatgtgtctctccttctcccaaggatgttttctacaggcaaaacccgaatagtagagtgagcataaaggctgtcttgagagagagaga

SEQ ID NO: 7421 - DNA, 811 bp, Homo sapiens
cacagcccaataccatgcttcccatatagatttccagaaagtattttcttcaaaataagctgtttactctaaaaacactgaaagaaacataaaaacatttagaatcaaatgcaaactgtttgaatataaatcatctggaatcaggtggccttgttctagatccccaatattttttattttatttatttatttatttatttatttattttgcatgaagccctacatattatcacccaagtgactgctgttctttggggctcagtttcttycattgtaaaacagagctcggagaagttgaaaggtgtgctggagtcatctctcctggaggtcacacaaggtgtctggttaagcagaagttctgtgcttttctagtatctagaggttatgaggttttagctctcaaatcaatttttttttaacaatgaacaagaagtgcagattgatgcaattaactcaaagtccttcatttccgggctgagaactgtgggataaaggatggaagcaatcgtgagagcagcttagcgttcctgctgtggaaatgaatgatgtggaggccatgggaagagctccctttcccacctatgcagtgccatcaccccaccccccagacccaacgttagtgctaggcaacctggtcaaagccctgaccttacccctcataatagtttgataagaatgaatttcagaagcaaacatggtgcaataagtgcacataatttgaaaatgaaattgaacagaatggcttagaataaaaaggagcaatctcattcccagacctttctttgctttcctagtttttttgggcaatttc

SEQ ID NO: 7422 - DNA, 655 bp, Homo sapiens
ctcacttcagaattattatgtaagcaaagagattcttcccatttgtttataaaattttgaattgtgtttatctcatttacaattcaaagagtcctaattactcgcttgtgtatgtgtgtctgtgtcagtaatcagatatgttcgtatatgtctagaaaaatctagaaagaatagcaggaataaaattagggtggctggtatggggtaacttcatttttgagtaaatacatctgtattctttgaatattttacaataagcatatgttacttttataatctttaaaatgaagaaaagagaagagactacagcataaaaagtaagctccttcagggctccaaggtctaattaaagcagcagaaacctcataagtttctctttcttttggtgcttttaagtagtgcacgagtccacttgagagccaataattataagtttcttcttaggccctgaaaacataatttatccgttaagaaaagctactcagatggggccatatatgataaaaggcccatgctcagagagacaaagaacttactggctcgcctttgtaggcctgatrtcttccggtccaggtccacatggcaagccttaaaagcacaagctcgtcctagttctctttcttgccttcttggattataaatacgtgcattatag

SEQ ID NO: 7423 - DNA, 728 bp, Homo sapiens
ttctcttctctgactgaaattcatctgtgtttattcctcaagctcttgcacttatatattttattacagcttcttcataccctttcccactcccaaacctaatccttttcttctttaccctgagggcccctgccaatataacttcaggtgaaacaaatgaaaatactagcttttgccccaggcttcagccttcttccaccaaaattaaaacgtaaaaacatcacatggatattaatattatattccctgccctgtaaaccttctataacgttctgtggtctgtcagtcaacagcatttattgagtgtccactatgaaaaggaagtcagtgccctttggaggactaaaggaagaaaaagtattctttgctttcctttactaccagtaaaagttccgtcttgttgtttccctccrctcggaattcctccacgcccccgtacctgtctgcaaacgctggaccaacacttgccctaagtgttttgttcctctcaggtacccattctcctggtttcccaaagaaatcttcaccgtacctataaactgtccaattcataataagctacgccccatcagctccaaaaggccatgacagaggcagtgaactaaaatctgtgaaccctgctgatgcgcctggaactgtagtagacactttacgttcctaataacattcattcctagagctagtctgcaagatgaaaattactcccatctctcagatcttgccaatca

SEQ ID NO: 7424 - DNA, 860 bp, Homo sapiens
cttgagcccagaagttcgagaccagcctgggcaaaatggtgaaaccctgtcactacaaaaaacacaaaaattagtcagtcatggtggtgtccacccgtagtctcagctactggggagtttgaggtgggaagattgcttgagcccaggaggttgagactgcactgagccaagtcacaccaccgaactctagtctggrcaacagagcaagacactctctctatgaaaagaaaaacaaattccctgtggcctagggaaatttaacttgatttaatctgtgtggatagtctagccatttttagtttggaacatgttaagttgatatggaagctgtccttcctaagcactttaattatattcttattaatcacaacaactccactgaggtagttgatactatccttacttcttagcgagtaaaaggtggcttgaaattgtttaagggatttgctcaggattacacagttaccaaaacacaggctgtgtactctgaatttcaaagcccagttttgtgttgttttgtttttttgttttgtttttttttgagactgagtttcgctcttgttgcccaggctggagtgcaatggtgtaatcttggctcacagcaacctccacctcccgaagcccaggtttttattttattttattttattttttatttttattatttttattttattattattatactttaagttttagggtacatgtgcacaatgtgcaggttagttacatatgtatacatgtgccatgttggtgtgctgcacccattaactcgtaatttaacattaggtatatctcctaatgctatccctccccgctccctcctccccacaataggccccagtgtgtgatgttcgcct

SEQ ID NO: 7425 - DNA, 455 bp, Homo sapiens
aggcaggagaatctcttgaacctgggaggcagagtttgcagtgagccaagatcgcaccattgcactccagcctgggtgacagagcgagactccatctcaaaaaaaaaaaagttactcattaacagcatagaccaattggtttctattggaatttctccattattttcacaatgtcccaggctgtgaawccaggatttaataacgaaccataatgccacatctgtgtcacgtgggtagggaccagtcctgatccattaagtccgggtctccaggtaactggactcactgctgggcaaaacagaatgtccggcgtgcgttcctaacgggggaccgcagagcctcataggaaatgtagtgtcaccttccaatgatgtttaccatcaaggaccttgggaaccaggttctctctacgcatgtgccaccccgcccacttcgccattttcctccggaagtgc

SEQ ID NO: 7426 - DNA, 1578 bp, Homo sapiens
  misc_feature (1)...(1578): n = A,T,C or G
ctaccaccgaggttcctaacagggaaattgccagcttgaatgcttggggttgatgtgggagtgcgtgtgaaacgggtgtggggtgaaagggcagtgaactttgtaggtgggtagatagggggtgctgaagggctttcaggtaagaggcacagaggaaactgggagaggcagcgaaagcacttcacgcctcagataaccagaagatgctcccaccagcgccatgacagtttgccagtgccatggcaacacaggaagtccccaccccttgccatggaaacagctggaagttactgcccatttctagctatttctgagtaacccgccccttaattagcatgtcattaaaagtgaattataaaaatgactacaagccacccttaggctgctactctgggagcacaacccacagagggctccctgccctgcangagcggacgcagggctgtaacaccgccaatgcctccatagagctgctttattccaccacaggcttgcttttggattccttcatgagcgacgccaagaacctgcccttcctcagtgtgactcttgcctaaaatctatccctggttttctcttttcctaagcatgccctgacttgttctttcatctcctctgaacttgcaattgctcctcagtgactctattctgcagatccagaaaactcaaccttaatcttcccagagccctgttgtctccaatattggaatctctagccttgctttctcagacacctagattacagtcctctctcttgaacacctattggtaaggtatccggggatcctttaaatacacgatgattggcagggtttacataggggaaatcagtgcctgacaattcgccttccaggatatggattgtcattccctctctttgtgggccccagtctcctatacataaaagtagagattgtaatactcatttgacttgcagatacctcaccccgaacccacctactataaygtaaaagccaagaatgcaaaccctttcctcaccccgtgaaggtaaagtcctcagagccaaggagagaaggctcaaggatggtacctgggtgtttccaacactaaccatgcattgtagtttttagtgttcaagtttaagcttcttatgttaaagttaccccagctttaattatattgtaacaagatttatttttgtaatcccatttttggattcttgatttcttggtaaagaaatacagttatttttgtataccaatcttatatagtgttacattccaaaatttgttcatgagtcctaacactttttagtaaatttcttatgattttctaaatgcaagatcatgtcatctgtacataaagataactgtacttcttcctttccaatctagatgccgtttatttatttacattgccaagttgtcccagctaccactgttatcaagtaaaagggtctcactgcccaaagctctagaagccagtaacatgacactgagtttttgagaagagaaaaactttaaagtcaaaccaaaacctatgggatacaggccaggcgcagtggctcatgcctgtaatcccagcactttgggaggccgagttgggtggatcacaagg

SEQ ID NO: 7427 - DNA, 1578 bp, Homo sapiens
  misc_feature (1)...(1578): n = A,T,C or G
ctaccaccgaggttcctaacagggaaattgccagcttgaatgcttggggttgatgtgggagtgcgtgtgaaacgggtgtggggtgaaagggcagtgaactttgtaggtgggtagatagggggtgctgaagggctttcaggtaagaggcacagaggaaactgggagaggcagcgaaagcacttcacgcctcagataaccagaagatgctcccaccagcgccatgacagtttgccagtgccatggcaacacaggaagtccccaccccttgccatggaaacagctggaagttactgcccatttctagctatttctgagtaacccgccccttaattagcatgtcattaaaagtgaattataaaaatgactacaagccacccttaggctgctactctgggagcacaacccacagagggctccctgccctgcangagcggacgcagggctgtaacaccgccaatgcctccatagagctgctttattccaccacaggcttgcttttggattccttcatgagcgacgccaagaacctgcccttcctcagtgtgactcttgcctaaaatctatccctggttttctcttttcctaagcatgccctgacttgttctttcatctcctctgaacttgcaattgctcctcagtgactctattctgcagatccagaaaactcaaccttaatcttcccagagccctgttgtctccaatattggaatctctagccttgctttctcagacacctagattacagtcctctctcttgaacacctattggtaaggtatccggggatcctttaaatacacgatgattggcagggtttacataggggaaatcagtgcctgacaattcgccttccaggatatggattgtcattccctctctttgtgggccccagtctcctatacataaaagtagagattgtaatactcatttgacttgcagatacctcaccccgaacccacctactataacgtaaaagccaagaatgcaaaccctttcctcaccccgtgaaggtaaagtcctcagagccaaggagagaaggctcaaggatggtacctgggtgtttccaacactaaccatgcattgtagtttttagtgttcaagtttaagcttcttatgttaaagttaccccagctttaattatattgtaacaagatttatttttgtaatyccatttttggattcttgatttcttggtaaagaaatacagttatttttgtataccaatcttatatagtgttacattccaaaatttgttcatgagtcctaacactttttagtaaatttcttatgattttctaaatgcaagatcatgtcatctgtacataaagataactgtacttcttcctttccaatctagatgccgtttatttatttacattgccaagttgtcccagctaccactgttatcaagtaaaagggtctcactgcccaaagctctagaagccagtaacatgacactgagtttttgagaagagaaaaactttaaagtcaaaccaaaacctatgggatacaggccaggcgcagtggctcatgcctgtaatcccagcactttgggaggccgagttgggtggatcacaagg

SEQ ID NO: 7428 - DNA, 675 bp, Homo sapiens
tgaatttgccataactaatgatggaactagaacgaaagatttagatagtttaccaaataaagacatcttcaataaattgggggagttagatggaagtaatggcattttgagtgacataggcttattacagatgcttcagagatctatacgttttttgaaagaaaaaggtagactatgttgtaaaagctataagtagagggatgaggatgaaggtttggtgggtgacataggtaggactcaggggacctgagagcaccagagggaaatgaaatagagtcagattagcaaagaggtagactaattgagattacaatcyccaactccatctccaaagcacacacccttattatgcagaactcatcaactctaatcagcagatttcagcagaggataacagcacgaattctcaacaataagcaggatcagtggtattttagcaggtgccagcatctgtactcagggactgaatcaaataccaaaactctagaaaccacagaaggaccagaagtcatatcagaaaatatctttaatattttctatgagggaggatgcacctgataggtatcttccagagaaaaatatcaaagataggtgtattaggccattcttgcattgctataaagaaatacctgatactgggtaattcataaagaaaagagttttaattgactcata

SEQ ID NO: 7429 - DNA, 675 bp, Homo sapiens
tgaatttgccataactaatgatggaactagaacgaaagatttagatagtttaccaaataaagacatcttcaataaattgggggagttagatggaagtaatggcattttgagtgacataggcttattacagatgcttcagagatctatacgttttttgaaagaaaaaggtagactatgttgtaaaagctataagtagagggatgaggatgaaggtttggtgggtgacataggtaggactcaggggacctgagagcaccagagggaaatgaaatagagtcagattagcaaagaggtagactaattgagattacaatctccaactccatctccaaagcacacacccttattatgcagaactcatcaactctaatcagcagatttcagcagaggataacagcacraattctcaacaataagcaggatcagtggtattttagcaggtgccagcatctgtactcagggactgaatcaaataccaaaactctagaaaccacagaaggaccagaagtcatatcagaaaatatctttaatattttctatgagggaggatgcacctgataggtatcttccagagaaaaatatcaaagataggtgtattaggccattcttgcattgctataaagaaatacctgatactgggtaattcataaagaaaagagttttaattgactcata

SEQ ID NO: 7430 - DNA, 761 bp, Homo sapiens
ctcttaaaagacctaggctcatgttcccactgtgggttctgatgcatggtccatggagccggcccccaggctcacctgccacggtgcaggctgcacctggcacctggaccgggctctcgggggactgaacrgaagcactgggcctggcgtgaggaggacgtgctcccgacacgtctcccttggtggctttgggaattacagcacagctttctcctaaggagtcctccccaactcctttctccagcacttctctcttctcagtgtgggtcagtggctaaacaaaaatctgttcctctactcacaacactcctgacgccaaatgtgtagattttctatggcaagcaattttctgtttctctgcagacaccaactgggtgtcctacaatttaattcaattctggcattacctggagttagctcagatcccacaggtgaaaggctcagccccacaaaaccacccttccactttagatgtcaggtgcaaatagtgggtccccaggttaccacacttttgtcccacttggctacaaattggggtttccatgacacactcctcgggttccgtaatttgctataatggctcacagaactcagagaaacactttacttgggtttaccagtttattatcacacaaatgcacagccagatgaaggggctcagggcacagtctgggagggtcctgagtgtgggagctttgatctccgtggagtcgcccctttcccagtacgtgcatgcgttggttcacaacctggacgctccc

SEQ ID NO: 7431 - DNA, 917 bp, Homo sapiens
cccctggatcctcttctgagagccaagtgaagcaaataggaacccaattcaccacccagatccaggcccatctgaatctagccagcccagaagagccctgtagaaccacagctgacctatggaaatgagaagtaaatgtttgttgttgttagcattgagatttggggattactttttatgtggcatcatcacaacaaagcctgactaatatattgtataaagttaattgagtactaacaacatgccaggtattgttctaagtcctttatataaagaatcccatctaatcgttacagcactgcataaggaggtatcataagtatctccattcagctgattagaattgaggcatctggtcaatccccttcatgttattcctcctcacttcctgcatccgaatgaaccaagcctcctgtgttcattagaaccacagaccaagcctrctggagaaagacagggctatgaagatgggaatgaattggcaaacagctttgggatgacaatgttaaggccaggcaaatgctctcagtaacctcaaatgagtgttgatgttcatgaagcctgctcaaaaaagacacagaaattgacgtcttttatctgaggacccttccttagcctcaggacttaaggctatgggagcatgagccacataaccatgagaggcagggggttcagtgagaagaataagctcaagagtctcacctgtgggtcagaatctcagctgtgccacacatactgtgtgatcttgagcaaatcaccaaacctctctattcctcatttttgtcacctgtaaagtgggactattacttgtacctacatcctggatttgttgggacagtaaatgagttagtgttcccaaggtgcttaacacagagcctttgcatgcagcaagcacccagtcaatgcccatgaccatg

SEQ ID NO: 7432 - DNA, 917 bp, Homo sapiens
cccctggatcctcttctgagagccaagtgaagcaaataggaacccaattcaccacccagatccaggcccatctgaatctagccagcccagaagagccctgtagaaccacagctgacctatggaaatgagaagtaaatgtttgttgttgttagcattgagatttggggattactttttatgtggcatcatcacaacaaagcctgactaatatattgtataaagttaattgagtactaacaacatgccaggtattgttctaagtcctttatataaagaatcccatctaatcgttacagcactgcataaggaggtatcataagtatctccattcagctgattagaattgaggcatctggtcaatccccttcatgttattcctcctcacttcctgcatccgaatgaaccaagcctcctgtgttcattagaaccacagaccaagcctgctggagaaagacagggctatgaagatgggaatgaattggcaaacagctttggratgacaatgttaaggccaggcaaatgctctcagtaacctcaaatgagtgttgatgttcatgaagcctgctcaaaaaagacacagaaattgacgtcttttatctgaggacccttccttagcctcaggacttaaggctatgggagcatgagccacataaccatgagaggcagggggttcagtgagaagaataagctcaagagtctcacctgtgggtcagaatctcagctgtgccacacatactgtgtgatcttgagcaaatcaccaaacctctctattcctcatttttgtcacctgtaaagtgggactattacttgtacctacatcctggatttgttgggacagtaaatgagttagtgttcccaaggtgcttaacacagagcctttgcatgcagcaagcacccagtcaatgcccatgaccatg

SEQ ID NO: 7433 - DNA, 584 bp, Homo sapiens
tccttgataattttctccttgtgacttattatttttgattgattttcaccattatttagtgattaggttaattagcagtttatctattatttttccctaagcaaccagattttgaatttactagtcatattatattcttactttaataatttattattttatgttttgtctttattaatttatttcttctacttgatttgggcttattttatagtttttaatcctaatttcttgagttgaatatgcttatttttattgctattgcttgttgatataagtaataagactwtaaatttatttttctgagtactgcttgaactgcatagcagaggtgctaatatgtgatgtttccttattactttctagatattcttcgcttttatttgaatttctttgagctatatgaaagagaatttaaaaggccgggcatggtggctcacgcctgtaatcccagcattttgggaggctgaggtgggcatatcacttgaggtcaggatttcgagaccagcatggccaacacggtgaaaccttgtctccacaaaaaatacaaaaattagccaggcatggtggcatgtgcctgtaat

SEQ ID NO: 7434 - DNA, 753 bp, Homo sapiens
atccagtctctcctgcactttgcgtccactctgtggtttacatgtccgttacacttggagtgcgtcttcagtaactccctatcacaggaaagtcaatcgtgttcttgcatgtctgaaaatgtctttaagtgtcctgcaaacttgatgatattttaggcaaagaattctagtgtcattcttttttttttttttttttttgagacagagtctcacactgtcaccccaggctggagtgcaatggcgcaatcttggctcactgcaaccaccgcctcctgggctcaagcgattctcctgccccagcctcccgagtagctgggatcacagaygcccaccaccatgcccggctaattttttgtatttttagtagagacagggtttcactatgttggccaggccagtctcaaactcctgacctcatgatccgcccgcttctgcctcccaaagtgttgggattataggcgtgagccaccacgcccggcctctagtgtaattctagtgtgaaatcattttccctcaggattttcaaggtatgactccatttgtcttcatatcccgcactgagtggttaaaaagaaaacagcgatcaacatgcactaaaatggatagctctccaaggcacaacgttgaatgaaaactacaactcttcaagtaaattatgaagagtgataccttttatatcaaaggaatctggagggggactcaccagtgcttcactgcggggaggggaaggggcgctggaattggggggcctgg

SEQ ID NO: 7435 - DNA, 794 bp, Homo sapiens
caatgaatcctattatgtaaaggataaaatgagaggagtaagggagcagaaaactagaaaggatgtcaagaatgagtgaccaatgaggctggaacaaaacagagaaggatggtattacagaaaccaagtggaggttctagaatgatagaatggttaatattaataagtgcttcagtgaggccaagagaaggcaaaaggataaatgatacataaagctaaaatagctacttggrttgaaacaaaatgtgtgaccagttttgatgacataataggattttgtggaaatgaaagccggaatgcggtgggctatggagagaaatgaggatggtagtgtgcattttgtccaagacacttatgttcgaaggaaaagttatagtagccgtggaataaagcaccagctatttctaaaaatacagtccatgaaagcagatataccccttattgactgttataaatttcttttacagtgtctgacactgaattcatttgttaaatgaatgcataaactatataggagagacatgaggatgtctatttatcaatagaaaaaaaaagagactcagtgtaggtggtggactccaagtaagagcaaactttaagagagccttgggctaagatgttgtggctaggaggaggagaagctctgggactgagcataaaacacacacattggaatgaagactctcctactcatacccgtgggaataggatggtgaataatgccagaaaatttcagtgcacttccaccgggaagttgagggatgcagagacctattcgcattcttgagattttg

SEQ ID NO: 7436 - DNA, 529 bp, Homo sapiens
ctgtatgtctttcattcttctctgagcctctaagtctccaaaaccaggacatcttctagaacttctgcatttctttgatgggctttagggaaataaatgtgttgccacatctttaaccgtctgtctttgttcatttccatgctgttatgacagaataccaaacaaagactgggtaatttataaacaatagaagtttgtttggttcacagttctataggctagaaagtccaagatcaaggggctgtattgggcatcggcctatgtgctgtgtcataacatggcagaaggcatcacrtggtgagaaggagaaggaaggccaaagtcgcctttataacacactcttttttttttctttctttctttcttttttgttttttggttggtttctttttgttgttgttgttgagacggagtctccctctgtcacccaggctggagtacagtggcacgatcttggctcactgcaacctccgcctcccgggtttaagcaattccctgtgtcagcctcctgagtagctgggattacagg

SEQ ID NO: 7437 - DNA, 636 bp, Homo sapiens
ccccttgtatatttggtactggagtttaatgcccgcctcttcttctgggctgtaaatgcaatgaggatggaactgtatctacgggtctcatcactgtcaccccccacctagaatgtggtaactgtttagtccacacttagggaatcaatggatggatgaatggatgccccttaccagctcttgggaaattgatcttggaaacataatttaatctctcttagattctgtttcctcgtctgtagcaggaagactaaaaatgtacaacgttcacaaagctatgtcaggattaggcaaaataaggcaaagtgatcaacagtgctggtgcacagagctcagagaactcagaaatattccgcatgattggaacagactgttccattttaagctgagatctcctttattcactgtgcatatttcagatcaacttcaatttgaggtggaaagtgcacagtgacatcagtcttgcaaactggtgtacatccgggctgaatccaacccaatcagacctgaaaccaggtcgtccgrgccatgcgcgggagttcgcgttgttttctgagctacagcttccagaaaccaagatgtgcccattcgaacatcaagactgggctcctccctcccatgctgtgcatctcccgc

SEQ ID NO: 7438 - DNA, 644 bp, Homo sapiens
ggttcatcatctatatttcctgccccagtcttggaatcagtcatttctccaagaaactagttcctctcatcagaggaaggttttagaaactaagatcttggcactagatgtgctgtttgctggtggagtgtcacatcttttaggtcctctctggtgataaaacaaagaaatgtatatgtgtataatttatgtataggcaccgtctacaaatatttctatatgggaccatttttatctacactaaactaagcatacrctaatactgatgtctccaattctaatctactatgacatggatcttctatctgctactctttgcttaactgtaaattccctctctaacagtaagaaaccttgctcccaccatctgccatccacttagttgttcaagtccagcatacatatacataacatacatgtatataacatacatgtttcagaattgttaacctatacccccatgggaaaccattttatcaactagagtatagaatttatgtacagttctttttgccattagttagtcttacagactccactcatttccaaggtcagcattttttactacagctcccttcagtgtggttccttcatacatttgtaatacaattagattctcttgttgcattctgcattccttcctg

SEQ ID NO: 7439 - DNA, 776 bp, Homo sapiens
aattcarcataatagcctctaatggagtaggaaacatataaaatcctgtgttgctttatgaaatgttgcttatttgctgcatggttttaaaaagtatcagttttatttaatagtgggatctttatgtcagtgattactgatgtttccagcaagctaattcataccagggagacaatgtaaacatttagaaaggggattatatttctgtactatctgcatatgtcagatgacaacgagagtttcaaagtacaatcttatgaagggttgtattgcagatttggcctagaagcccaaaaccattaaatttttatcaaaattatacctgaaaattcttcatgttgtttattagcagtcattatctttacaaagatataggaaataaagtgatttccatctgttgcaatcacttgccttttacaatagacaaaattgttattttcattagattttacaaaaggaatgatatataaatttttaaaaggcatgtttaggttttttcaccagagaaatttagattattcttgcataaaatcaataaacataatccagcacataaacagatccaaagacaaaaaccacatgattatctcaatagatgcagaaaaggcctttgacaaaactcaacaacacttcatgctaaaaactctcaataaattaggtattgatgggacatatctcataataataagaggtatctatgacaaacccacagcaaatatcatactgaatggacaaaaactggaagcattccctgtgaaaactggcacaagactggg

SEQ ID NO: 7440 - DNA, 776 bp, Homo sapiens
aattcagcataatagcctctaatggartaggaaacatataaaatcctgtgttgctttatgaaatgttgcttatttgctgcatggttttaaaaagtatcagttttatttaatagtgggatctttatgtcagtgattactgatgtttccagcaagctaattcataccagggagacaatgtaaacatttagaaaggggattatatttctgtactatctgcatatgtcagatgacaacgagagtttcaaagtacaatcttatgaagggttgtattgcagatttggcctagaagcccaaaaccattaaatttttatcaaaattatacctgaaaattcttcatgttgtttattagcagtcattatctttacaaagatataggaaataaagtgatttccatctgttgcaatcacttgccttttacaatagacaaaattgttattttcattagattttacaaaaggaatgatatataaatttttaaaaggcatgtttaggttttttcaccagagaaatttagattattcttgcataaaatcaataaacataatccagcacataaacagatccaaagacaaaaaccacatgattatctcaatagatgcagaaaaggcctttgacaaaactcaacaacacttcatgctaaaaactctcaataaattaggtattgatgggacatatctcataataataagaggtatctatgacaaacccacagcaaatatcatactgaatggacaaaaactggaagcattccctgtgaaaactggcacaagactggg

SEQ ID NO: 7441 - DNA, 776 bp, Homo sapiens
aattcagcataatagcctctaatggagtrggaaacatataaaatcctgtgttgctttatgaaatgttgcttatttgctgcatggttttaaaaagtatcagttttatttaatagtgggatctttatgtcagtgattactgatgtttccagcaagctaattcataccagggagacaatgtaaacatttagaaaggggattatatttctgtactatctgcatatgtcagatgacaacgagagtttcaaagtacaatcttatgaagggttgtattgcagatttggcctagaagcccaaaaccattaaatttttatcaaaattatacctgaaaattcttcatgttgtttattagcagtcattatctttacaaagatataggaaataaagtgatttccatctgttgcaatcacttgccttttacaatagacaaaattgttattttcattagattttacaaaaggaatgatatataaatttttaaaaggcatgtttaggttttttcaccagagaaatttagattattcttgcataaaatcaataaacataatccagcacataaacagatccaaagacaaaaaccacatgattatctcaatagatgcagaaaaggcctttgacaaaactcaacaacacttcatgctaaaaactctcaataaattaggtattgatgggacatatctcataataataagaggtatctatgacaaacccacagcaaatatcatactgaatggacaaaaactggaagcattccctgtgaaaactggcacaagactggg

SEQ ID NO: 7442 - DNA, 776 bp, Homo sapiens
aattcagcataatagcctctaatggagtaggaaacatataaaatcctgtgttgctttatgaaatgttgcttatttgctgcatggttttaaaaagtatcagttttatttaatagtgggatctttatgtcagtgattactgatgtttccagcaagctaattcataccagggagacaatgtaaacatttagaaaggggattatatttctgtactatctgcatatgtcagatgacaacgagagtttcaaagtacaatcttatgaagggttgtattgcagatttggcctagaagcccaaaaccattaaatttttatcaaaattatacctgaaaattcttcatgttgtttattagcagtcattatctttacaaagatataggaaataaagtgatttccatctgttgcaatcacttgccttttacaatagacaaaattgttattttcattagattttacaaaaggaatgatatataaatttttaaaaggcatgtttaggttytttcaccagagaaatttagattattcttgcataaaatcaataaacataatccagcacataaacagatccaaagacaaaaaccacatgattatctcaatagatgcagaaaaggcctttgacaaaactcaacaacacttcatgctaaaaactctcaataaattaggtattgatgggacatatctcataataataagaggtatctatgacaaacccacagcaaatatcatactgaatggacaaaaactggaagcattccctgtgaaaactggcacaagactggg

SEQ ID NO: 7443 - DNA, 778 bp, Homo sapiens
attacatataaagtgattggaagatattttaagacacactagagcaacggtatcattgcattgggtagaggcatagcactttgcagagctcgcatattatgtttcttggaatgttgttttatgtgcagatttttctcctagaaactatgatttttgaacgattagcaagttcttttccctaggcttctctcaaaggcatactgaaaagtattaaatccaacagactgtataaattttagttagaaaatggcaggttagtctctgaagacaatcatagagcagatttgacttgtgaacctcggagaaaatataggagatactgttctccctagtaatcatgagaaaataaggtcacatcaagcagcaatagagtgtcttatatgcacttatctgctaccaaatattttatttaaattccacgtgagtataactgcacactttctcttttataggttcctttgtctttgcggttacagtcacagatgctgatattggaccaaattctgaactgcattattctctttcgggtagaaattctgaaaaatttcacattgacccactgaggggagccattatggccgccggaccactaaacggagcttcagaagtgacattttctgtgcatgtaaaagatggtggctcatttccaaagacagattctacaacagtgactgttagattcgtgaataaggccgatttccctaaagtsagagccaaagaacaaacgttcatgtttcctgaaaaccaaccagtcagctctcttgtcaccaccatcaca

SEQ ID NO: 7444 - DNA, 508 bp, Homo sapiens
agcagttctcctgcctcagcctcctgtgtagctgggattacaggctcacgccatcatgcccagctaatttttgtatttttagtagaggtgaggtttcaccatcttggccagcctggtctcaaactctgacctcatgtgatccacccacctcggcctcccaaagtgctgggattacaggtgtgagccactgcacctggccactaataaaaaatataatgttagacaccagctgcgtgcctgcaactgtcttggcactttattatcattattattattattattatttttgagatggagtcttgctctgtcacccaggctggagtgcagtggtgcgatcttggctcactgcaacctctgcttcccaggttcaggcgattctcctgcctcagcctcccaagtagctgggattaaaggcatgcaccaccacacccagctarttttttgtatttttagtaaagacagggtttcaccactttggccagactggtctcgaactcctagccttagg

SEQ ID NO: 7445 - DNA, 877 bp, Homo sapiens
attcttcacaatttatgttcttctgtcacggcttcagcaggtcagtccctccgttcggggtccctgacttcccccaacattagttaagctttgtttttcttctacgctaggcacatcttccatatttcaaagtcttgtattgttctattcagttcatgttggggcattgagtcccactgggctgtggaggtatgctccttaggtctcaggaattgcatcatggtaaactcatttgggtccatgtagatatcactgttgtcttggcagaaagacaacggaaagtctccagttctatagaaatctagggccatgggtggtcataaattgttgctccagaatgctacacaggagggcctccggagtaaaaatttttggttaaaagaaagggtaagttctttatactgagtttgcacaccactttcacttagataatatgttataggtgaacgaaataataaattcttaagatatttttgttcacactttacataaatttgacagaaatgccaactatctacatcacagaatgtttttattattaattatatttatggcagcttgtgaggagattgatatatatcatgggarcaaccttctgttagacctcagaaaagcaagtcacttaaccactctgcttctcagttttcctgtctataatctgagagcagtaacttccatgtctactttgaagaggaaagagtaggaatagagtcagaaggtgctcatgtattgcaatttgtcattttgctttgaacactttaaaactaagaaagccaatcatatgacagaagtaacaacaaaacatttctgaacattccttttggaagggtttcagattttgttaaatttatttgttttattaaaaataagtacatat

SEQ ID NO: 7446 - DNA, 877 bp, Homo sapiens
attcttcacaatttatgttcttctgtcacggcttcagcaggtcagtccctccgttcggggtccctgacttcccccaacattagttaagctttgtttttcttctacgctaggcacatcttccatatttcaaagtcttgtattgttctattcagttcatgttggggcattgagtcccactgggctgtggaggtatgctccttaggtctcaggaattgcatcatggtaaactcatttgggtccatgtagatatcactgttgtcttggcagaaagacaacggaaagtctccagttctatagaaatctagggccatgggtggtcataaattgttgctccagaatgctacacaggagggcctccggagtaaaaatttttggttaaaagaaagggtaagttctttatactgagtttgcacaccactttcacttagataatatgttataggtgaacgaaataataaattcttaagatatttttgttcacactttacataaatttgacagaaatgccaactatctacatcacagaatgtttttattattaattatatttatggcagcttgtgaggagattgatatatatcatgggagyaaccttctgttagacctcagaaaagcaagtcacttaaccactctgcttctcagttttcctgtctataatctgagagcagtaacttccatgtctactttgaagaggaaagagtaggaatagagtcagaaggtgctcatgtattgcaatttgtcattttgctttgaacactttaaaactaagaaagccaatcatatgacagaagtaacaacaaaacatttctgaacattccttttggaagggtttcagattttgttaaatttatttgttttattaaaaataagtacatat

SEQ ID NO: 7447 - DNA, 667 bp, Homo sapiens
aaggatgtggatacaggggctataaaaggttgtgggaatttggcaatatatcacagccatcttcatgtttgtaatggatattttttttcaggccacacatcatatattcagcctattttcaccaattgtattccaatttctttttggtgaactatttcttccccaatgtatgcactcttggtaaattaagctattttgtgctcctatgtaatctaagctaggggtggcagagcaggaccagaactaggttaaggcaagtgaagttcttagggtgcaaaatttaagtagcacacgtatttatataacattgagtgtattaatcttttttttttttatyaaatttatttttttattgataattcttgggtgtttctcacagagggggatttggcagggtcatgggacaatagtggagggaaggtcagcagataaacaagtgaacaaaggtctctggttttcctaggcagaggaccctgaggccttccgcagtgtttgtgtccctgattacttgagattagggattggtgatgactcttaaggagcatgctgccttcaagcatctgtttaacaaagcacatcttgcaccgcccttaatccatttaaccctgagtggacacagcacatgtttcagagagcacagggttgggggtaaggtcacagatcaaca

SEQ ID NO: 7448 - DNA, 667 bp, Homo sapiens
aaggatgtggatacaggggctataaaaggttgtgggaatttggcaatatatcacagccatcttcatgtttgtaatggatattttttttcaggccacacatcatatattcagcctattttcaccaattgtattccaatttctttttggtgaactatttcttccccaatgtatgcactcttggtaaattaagctattttgtgctcctatgtaatctaagctaggggtggcagagcaggaccagaactaggttaaggcaagtgaagttcttagggtgcaaaatttaagtagcacacgtatttatataacattgagtgtattaatcttttttttttttatcaaatttatttttttattgataattcttgggtgtttctcacagagggggatttggcagggtcatgggacaatagtggagggaaggtcagcagataaacaagtgaacaaaggtctctggttttcctaggcagaggaccctgmggccttccgcagtgtttgtgtccctgattacttgagattagggattggtgatgactcttaaggagcatgctgccttcaagcatctgtttaacaaagcacatcttgcaccgcccttaatccatttaaccctgagtggacacagcacatgtttcagagagcacagggttgggggtaaggtcacagatcaaca

SEQ ID NO: 7449 - DNA, 612 bp, Homo sapiens
agtgyttttgtgtttacaaatctggatatgatttagtaagctttaaagagatagtaagcacacagtaaggaaatcagatttacataattttctgcttgcttacagaacacagcagttgagattatcttttacatttgggaagactgttttaatatgataagatgaaataccacctacagtacgcttgatcttgctagtttgactttttaaaataaattacaggctgatttgtcatcgtgacttttaacataaattgctattataatctaaaggagcaattctaaaggagactgcctttttacctcatctacataaaaagatttaggttatttctacatttattcttttctctgtgcaatttatttgctgtaactttacatggcaggaacaacaaaaatctatgttttgctcatttcatccattcttctattcatgctgataagtagcaaatagcagcttaaatggagaaatggcacaagtaaaagaaatacgtccactttactttttgtatataaaaaagtgttctttaaggggaggtgtgtgcctttttctcccattggaaacataattaaattacaagtttggggaaataagatgagctaaggcattact

SEQ ID NO: 7450 - DNA, 802 bp, Homo sapiens
  misc_feature (1)...(802): n = A,T,C or G
gattataatagcaatctggcagatttaacgtttgtaataaccttctctatccctattgatgtgttgtacccatttttctgacactatttttcttctaattagaatttgctttatgtctttttattcctgtatcattaaccattccatgcccttatgctttaggtatttatattagaaatggaatgtagctgggttttattttttatcaatctatcacttttttttttttttttttttgagacggagtcttgctctgtcgccaggctggagtgcagtggcgcgatctcggctcactgcaacctccgactccctggttcactccctggttcaagcgattctcctgcctcagcctccggagtagatgggattacaggcacacgccaccacacccagctaatttttgtatttttagtagagacggggttttaccatgttggccaggatggtcttggtcttctgactttgtgatccgcccacctcagcctcccaaagtgttgggattatacgtgtgagccacygcacgcggccaaatctgtcaattctaattgtctttttttcaggttttttttgctttgttttttgagacagagtctctcactctttcactcaggctggagtgcagtggcctgatcatggctgactgcatcctcagcctcctcggcttaggcgatcctcctgcctcagacttccaagtagctgggactacaggagcacatcaccatacctggctaattttttagcttttggaanagaaatggcgtttcaccatgttttccagggtagccttgaattctgtctaaaa

SEQ ID NO: 7451 - DNA, 801 bp, Homo sapiens
cccgaaggaacacagggaaaggatacagttgcgtccatgggaaagttattatcatctccgctgaagttaaacattcgggagggtctgctttccatctcctccgcctgagagcctgtgaagggggaggcgcgtcgggggcttgtccggagggcctggccggtcacattttccgaggggagtcagggacagggagaggctgttagaggcagccagggccctgaggaggtcctctgagcctccagcctgtgctcctgccctgcgtctgcctcgctctttctccagtgctgagaaatccattgctcctctctcctgctcggggctgcgctctgcaggggtgtcrgggctgcgctctgcaggggtgtcggggctgggcttcacctctgcaagttcctgggcagatggagagggggaggaaagagaggccctggcccctgaacaggaaagctggaaatgtggaactcagggagatctaaaggaagaattcgggcttctggaaaattctccctctcctcaaaatgtactagaaatggaagtgagtcaggcagagcggcgggaggacctgtcttccaggagctgggctcaccggtgcttactagtgacctttgagataataaatctgccccagaaaattatcttcctgctgcagctgcccttagaggtcagggagaaggtggactttcaggtttcacggggaacaagtgttccaggccgaggacaccgcagcctccaagccttcaaagcctgaacaccttctcaggcccctcagaggcccctgcctcagagatgggtcccttcctcctc

SEQ ID NO: 7452 - DNA, 786 bp, Homo sapiens
caactgatacctagcagaatgacaacaattaaggcacaggaagaagttccagacattgtccaatttctcattgctaccttgttttcttaggaacttacaacttcagacaagagaacattaatgcattaatgaggctaccaaaaagaaaaagaaaaaaaacacataggcagtgttgctacacatggattataaaattatacattccagtcatagtcagttaaaagtacataagcaaatgtgatctagcagacagagcctgggaatctagatgaccttggatatcgaatctaattccctgagtttgagtctccccatctgtaaaacaaagaaatgaaaactttcccagaatggtaaagattaactgaaacctgtgaaaacactggatacttagttggcttgtaagtgtctgtctaaaaaataataattcactaggaaactgcaaagaataactgtaaatttccaaatttaagtcgaaattgtgttgtaagcatatttactttaagcaagtaacgtaaactatgtgcacaagtatggttttcgttgtttaaaatgattttcaatgtataaggtgactcaaatgggatctaataaggcactcacttcacttggtcaggaacaatttcctgggtgtctctgatcaagaaaagagatgaagagaaagaarcaggtttacaaaggacaaggaaagaagacacaggattagaatgggttaacaaagcaaagaataagccttcccaaagtgagcaatgaagcaagtggaaacaaggaaagttgaacagtaaattt

SEQ ID NO: 7453 - DNA, 690 bp, Homo sapiens
aaaaataaaaataaataagatgtactcttctagctacccaggaatgccagtttaaaataacctaattaaaatactatatttttaaacaaatttcagcgtctcataaaattctttaagctaattaaaattcatgaaaggttggttttatatgcttcataacccccctggaagttttgtggaaacacaaacttacccctacataatagatgttaatactgaagcacaaagaaatgagaagatttgcaatcacattaagagtaagtgacaggccaggtacggtggctcacacctgtaatcccagcactttgggaggtctagacaggtggattacttgtggtcaggagttcaaggccagcctagccaacatggtgaagcctcatctctacaaaaacacaaaaattaactcggcatgatggtgggtgcctataatcccagctacttgggaggctgaggcgggagaatctcttgaacccaggtggcggaggttgcagtgagccgagattgtgcrctccagcagcctgggcaacagagcaaaaatgctgtctaaaaaaaaaaaaaaaaaaaaaaaagagtaagtgacagattatgaatccaaatttagctttctgatttccattctagctgttgggctacatagcttatttagtagaggcaataaaaccaactcataaacaccttacagatatttca

SEQ ID NO: 7454 - DNA, 690 bp, Homo sapiens
aaaaataaaaataaataagatgtactcttctagctacccaggaatgccagtttaaaataacctaattaaaatactatatttttaaacaaatttcagcgtctcataaaattctttaagctaattaaaattcatgaaaggttggttttatatgcttcataacccccctggaagttttgtggaaacacaaacttacccctacataatagatgttaatactgaagcacaaagaaatgagaagatttgcaatcacattaagagtaagtgacaggccaggtacggtggctcacacctgtaatcccagcactttgggaggtctagacaggtggattacttgtggtcaggagttcaaggccagcctagccaacatggtgaagcctcatctctacaaaaacacaaaaattaactcggcatgatggtgggtgcctataatcccagctacttgggaggctgaggcgggagaatctcttgaacccaggtggcggaggttgcagtgagccgagattgtgcactccagcagcctgggcaacagagcaaaaatkctgtctaaaaaaaaaaaaaaaaaaaaaaaagagtaagtgacagattatgaatccaaatttagctttctgatttccattctagctgttgggctacatagcttatttagtagaggcaataaaaccaactcataaacaccttacagatatttca

SEQ ID NO: 7455 - DNA, 1291 bp, Homo sapiens
tgaagaaaacagacccaagatgaggatgagcaaaggggcgggtggacacatctgaaaagcaaaaagagaaagtgggggtgcaaaacactggttacggggcacatgcgatggcgatgcgtgaatccagaactcaaccgcaagcacgctacccgtgaaggaaacggaaaacgaggctcttccttccttacttgtgggtcgagcagccaaagccacagtccagggcggcagctgggccatgcacccaggcgaggctaggacagcagtcctcggagaccctccgcgccctccccagcggcggcagggcggcaggagccagcagagcttttccaccaaaaccatccttctcagcaccgtgctcctcgcccgctttggctgatcctccagtgggagtgggggcctgggctgcctagggccttggactgcactgtgtcccttgaaacacacccaggaagggacgtgctcgttagcgagtctgctaattatcctgactgtgacatgcgtttgtcttagcctcctcacggcttcttcagcgggtggctggttggttgagataccaagagaggagcaaggccggcatgcgtcgagccctatcgcttccactgggctcagcctcgtgtctgggagggcctctaaaccatgagccgcggcgcagttaaaaataagacaggaraaaggaaaaagaaacaaggcaatacaagagaacttaaaaaaaaaaaaaacaaaaaaaacggagcccaaccaagagagaggatccggttgccccggaggctttagtacaatgcaggtttgaaatcataaccaagcagccgtgagcagcgtgagcccgagtgcagcaatgccagcgagaaggaggaagagcaaggcggagcagggaggcgaagccacgagcccccttacctgcaagtctgggcccagctccttccccaggttcccgatgggggagtcccgggacacggaagtcacagtggagaggaagctagaggactctgtgaggtggggcaagggggataggccatccccaatgcggttcacctgctccaggaaggcctgcagctctttcttgaaagccttcatcttggcgttgatggtccccagcagctggggctcctgctggtccccctcaccctgctcctcttcgccctggaggccaggccccggtaagggcgcaccaccccgcagccccgcatcatggaggaagctgtcggtgtccgtgatgaggcgctccaccgtccgctctagccgctgggcctcgtgttttagggtcactaggtactcagagtcctcccgggcc

SEQ ID NO: 7456 - DNA, 786 bp, Homo sapiens
accaccatgcccagctaatttttgtatttttagtagatacggggtttcactatgttggccaggctggtctcgaactcctgacctcaggtgatccacccgccttggcctcccaaagttctggaattacaggcgtgagccaccgcgcctggccataagttccattttctgggcgttccttttcatcagctctcaagggcaggagatggtgacaaagttagggatgaggatggtgttgggatggattgcggtggagacaggggtgtagctgagggcagggtctaggatgcaacaaatcaacatttgccctggatgtgyagtttaggggaacagccaacaacattagtaaccaagatcaagattttaggatcatttgcgcctccgccctccaaacatgcacacactaaggtgtccatcaggtgccctgggtagtccatgttaccagatgtgtctgaaattatgctgatgttggcacaatacaattatcaaggagacccaccagggaagaccgtgaacttgagaaggacccatacattcaggaccctgcccctcttcccaaaagccatgtatttcaggtttcatagactggacacatctggcttttctcaagcatcttgtgacccaagcctccctgtggtcctaggctcctccctatggacacaaagcctaagtcagacaccatgttggacacacccacaagggggcagacgtgggcagtgccatgtgatacatgtgactggagaggcgcacgggtgatggtgggctagttgcgccgaagtgacgccatag

SEQ ID NO: 7457 - DNA, 820 bp, Homo sapiens
aacatttctgatgcatgctgaatccagaattcaaatgaagcaaaataaaggcaccaggggctcttacgagacagagtgactcaaaacagagggaatgtggggacttggggcataagattgatcatgaatcaccaaatagaaaaaccttgggatggctttcaagaagaatcctccttgaagttttaactttcacctacaagcaagttttctcactgctctgtacagcagggtaaggacagcagcctcacagcatcagtctgaggatagaatgggttaatgcagccaggcacagtggctcatgcctgtaatcccagcactttaggaggccgaagcaggcgtatcatgaggtcaagagatcaagacaccctggccaacayggtgaaaccccgtctatactaaaatacaaaaatactagctgagtgtggtggtgcatgcctgtaggcccagctacttgggaggctgaggcaggagaattgcttgaacctgggagacggaggttgcagtgagccaagatcgcaccactgcactccagcctgggtgacagagtgagactttgtctctgccaaaaaaaaaaaaaaaagaatgggttaatgcctgagaactctttggcacagtgcccagcacaaattcagcagtcactcagtgttggctatcatctttggtgatgttggtcccaaacccagacctctgctcttgtcctcggctcatacacccacctgtatagcccatatgcactttaaacatgagtccaaaatggaatccaaaatattagatgccctcgttgccaccaccaggtttgctttcctctcaagccactgag

SEQ ID NO: 7458 - DNA, 820 bp, Homo sapiens
aacatttctgatgcatgctgaatccagaattcaaatgaagcaaaataaaggcaccaggggctcttacgagacagagtgactcaaaacagagggaatgtggggacttggggcataagattgatcatgaatcaccaaatagaaaaaccttgggatggctttcaagaagaatcctccttgaagttttaactttcacctacaagcaagttttctcactgctctgtacagcagggtaaggacagcagcctcacagcatcagtctgaggatagaatgggttaatgcagccaggcacagtggctcatgcctgtaatcccagcactttaggaggccgaagcaggcgtatcatgaggtcaagagatcaagacaccctggccaacatggtgaaaccccgtcyatactaaaatacaaaaatactagctgagtgtggtggtgcatgcctgtaggcccagctacttgggaggctgaggcaggagaattgcttgaacctgggagacggaggttgcagtgagccaagatcgcaccactgcactccagcctgggtgacagagtgagactttgtctctgccaaaaaaaaaaaaaaaagaatgggttaatgcctgagaactctttggcacagtgcccagcacaaattcagcagtcactcagtgttggctatcatctttggtgatgttggtcccaaacccagacctctgctcttgtcctcggctcatacacccacctgtatagcccatatgcactttaaacatgagtccaaaatggaatccaaaatattagatgccctcgttgccaccaccaggtttgctttcctctcaagccactgag

SEQ ID NO: 7459 - DNA, 820 bp, Homo sapiens
aacatttctgatgcatgctgaatccagaattcaaatgaagcaaaataaaggcaccaggggctcttacgagacagagtgactcaaaacagagggaatgtggggacttggggcataagattgatcatgaatcaccaaatagaaaaaccttgggatggctttcaagaagaatcctccttgaagttttaactttcacctacaagcaagttttctcactgctctgtacagcagggtaaggacagcagcctcacagcatcagtctgaggatagaatgggttaatgcagccaggcacagtggctcatgcctgtaatcccagcactttaggaggccgaagcaggcgtatcatgaggtcaagagatcaagacaccctggccaacatggtgaaaccccgtctatactaaaatacaaaaatactagctgagtgtggtggtgcatgcctgtaggcccagctacttgggaggctgaggcaggagaattgcttgaacctgggagacggaggttgcagtgagccaagatcrcaccactgcactccagcctgggtgacagagtgagactttgtctctgccaaaaaaaaaaaaaaaagaatgggttaatgcctgagaactctttggcacagtgcccagcacaaattcagcagtcactcagtgttggctatcatctttggtgatgttggtcccaaacccagacctctgctcttgtcctcggctcatacacccacctgtatagcccatatgcactttaaacatgagtccaaaatggaatccaaaatattagatgccctcgttgccaccaccaggtttgctttcctctcaagccactgag

SEQ ID NO: 7460 - DNA, 820 bp, Homo sapiens
aacatttctgatgcatgctgaatccagaattcaaatgaagcaaaataaaggcaccaggggctcttacgagacagagtgactcaaaacagagggaatgtggggacttggggcataagattgatcatgaatcaccaaatagaaaaaccttgggatggctttcaagaagaatcctccttgaagttttaactttcacctacaagcaagttttctcactgctctgtacagcagggtaaggacagcagcctcacagcatcagtctgaggatagaatgggttaatgcagccaggcacagtggctcatgcctgtaatcccagcactttaggaggccgaagcaggcgtatcatgaggtcaagagatcaagacaccctggccaacatggtgaaaccccgtctatactaaaatacaaaaatactagctgagtgtggtggtgcatgcctgtaggcccagctacttgggaggctgaggcaggagaattgcttgaacctgggagacggaggttgcagtgagccaagatcgcaccactgcactccagcctgggtgacagagtgagactttgtctcygccaaaaaaaaaaaaaaaagaatgggttaatgcctgagaactctttggcacagtgcccagcacaaattcagcagtcactcagtgttggctatcatctttggtgatgttggtcccaaacccagacctctgctcttgtcctcggctcatacacccacctgtatagcccatatgcactttaaacatgagtccaaaatggaatccaaaatattagatgccctcgttgccaccaccaggtttgctttcctctcaagccactgag

SEQ ID NO: 7461 - DNA, 820 bp, Homo sapiens
aacatttctgatgcatgctgaatccagaattcaaatgaagcaaaataaaggcaccaggggctcttacgagacagagtgactcaaaacagagggaatgtggggacttggggcataagattgatcatgaatcaccaaatagaaaaaccttgggatggctttcaagaagaatcctccttgaagttttaactttcacctacaagcaagttttctcactgctctgtacagcagggtaaggacagcagcctcacagcatcagtctgaggatagaatgggttaatgcagccaggcacagtggctcatgcctgtaatcccagcactttaggaggccgaagcaggcgtatcatgaggtcaagagatcaagacaccctggccaacatggtgaaaccccgtctatactaaaatacaaaaatactagctgagtgtggtggtgcatgcctgtaggcccagctacttgggaggctgaggcaggagaattgcttgaacctgggagacggaggttgcagtgagccaagatcgcaccactgcactccagcctgggtgacagagtgagactttgtctctgcmaaaaaaaaaaaaaaaagaatgggttaatgcctgagaactctttggcacagtgcccagcacaaattcagcagtcactcagtgttggctatcatctttggtgatgttggtcccaaacccagacctctgctcttgtcctcggctcatacacccacctgtatagcccatatgcactttaaacatgagtccaaaatggaatccaaaatattagatgccctcgttgccaccaccaggtttgctttcctctcaagccactgag

SEQ ID NO: 7462 - DNA, 812 bp, Homo sapiens
tcctgaccccattaaaaccaaagagcaggaagaatggcagggaggtttcaaaggctctgagaggatctgggggaagggctggccagaaggccaatcacctgtggccatgtgattagctttctcaccagcccttggaataatcattggctacaaacagctcagtcccccagccataactctcttatccaacttgccatcaaaagttaaaggaagattcatcaccgccattgactttgaggttcttcccaagaatccactccatttccagagaccagttccaaaggcattttgagcaatgataatgactttggagtgaggacagaacctcccaaagcaatatagagtaaagtgtcacttaacaacaggaatacattctgagaaatgtcattaggcattttcatcgtagttggaacatcataggctatacttccacacacctagatgatagtgcctactacacacttcagctatatggtatggcctattgctcctaggtacaaacctgtgcagcatgctactctactgaatactgtaggcatttgtgtatgcaaagttatctaaacatagaaaaggtgcacagcaaaaatagtattataatcttatgggaccactattgaataygcagtccactgttgaccaagagagttaggcagcacatgactggactttgaagggacaggacttggggacgccaagttctggaatcaaagaccttctacatctctctcacgtcaacattacagagaatcctagaacttgaggactgaaaggaacctttcagggtatctcactcaggctcccaccccaccaag

SEQ ID NO: 7463 - DNA, 801 bp, Homo sapiens
gtttaatggtcagatgttccactttgcttatgtcagccctgtaaagtgaaaaatcatcccatgtcctagacgatttccaagtatacagctgaacattcatacaggtgaaaaacccacaggtaatgatctcagcccaaacacaaattttgcagacaaatgtaggcattttttgttttattttattttatgtagagatggcagtctcgctatgttgcccaggctggtctcaaactcctggcctcaaggaatccttctgcttcagccttccaaagtactgggattacaggtctgaaccatcatgcccaattaggcctttttattaacatggttataagtatatgacattttctcgtacattttgttgtcaatcaagggtagactttttgtgtgtgttgtttgtaacttggccaagaattgttgacaattttgtaaaatcagattaataatgttaatgcccccagaagtatataaatcatgaacacagcatacctatgtcagtacatattgtagtggttaagttcctgaagattcctcacagagagaaatggactctactgattccttatgtcacagttgttgcactgcatagatttaaaaataaattttgggttgcaatttcaaaayagtaaaaagactttttaaaaaatattgtattgataagcaaatggggtcactgggtgtgacagggctgagggcccttgcagttgcaaaagcttggacttcccagccaaccagccctggaaggttctccgtggcctcccactccattcattcatttgcaggagcagcccttcattgggg

SEQ ID NO: 7464 - DNA, 675 bp, Homo sapiens
tggaaggggctccagcagaggcagcccacgagcagaatgcactttgaccccacttcaatggcctcctgaaagtagggggagtgttcctggcagagggtgaagagctaatttctgatcatcctgagagaaggcttgggaggtgacagaatgtccctgcctttcctacctgcccacccaccccttccaccctgtcccaaccttctcactggtgggaagttctcagtaggaaagagatgagggtttggtcaaaaattccctttcaagggtaggcgttattggttaattttactaatcacaaattgagaatcagagaagtaaaactgtcagaggtgtgtgaccagagcaactccatcttgaatagaagctggggaaaakaaggctgaaacctactgggctgcattcccagacgcttaaggcattctaagtcacagaatgagataggaggtcagcacaagatacgagtcataaagaccttgtgataaaacaggttgcagtaaagaagccagccaaaacccaccaaaactaaaatggtcacgagagtgaccactggtcgtcctcactcctgccctcccattagtgccatgacagtttacagatgccatggcaacatcaggaacttaccctatgtggtctaaaaaggggaggcatgaataagccaccccttgtttaacatat

SEQ ID NO: 7465 - DNA, 761 bp, Homo sapiens
ggagctttcctatcaatccctattcattcattcattcattcaacagaaatgtcctatgcccccagtattgttctagatgctgggaatgttgtggtccttcctgtgtccaaggcattcatattccagtcaattgttggggtgagagaagtgaattgctgaatgctgattaagaaaaccatcagaaagtgtaaagcagagaattaaaacagggcagggagactgggagtaaccaagggtgggaggtagttgctttcggttgggagggcagggacatttttttggagggagaagcagttcagctgagctctgggtgaagaaggagcccgtcttgccaagacccaggggaggcttcccccagcagaggccccaaggtgaayggggcttggccaggaaccaaaaactgaaagggaccagagaggaatcctcatcctgccttctctgaccttgctttgagcttttacaaactgctttaaaaatctcttcattttaaattaaaaaaaaaaaaaaataggggactctgagctctagagaacaagccaggccagccagtgggagacatgggctattcagcttgccctggtgccctgaggtcaggatgaccctccagctgacctcagtcaggaaccccaagtgtgaatgccccctagtcctcctcaaggggacactgagatagggtggggagggggtggcaggagcccagcccctcctgcacatcaaagcaaggcaaggatgtggggaatgaacatgggcatttggaagca

SEQ ID NO: 7466 - DNA, 761 bp, Homo sapiens
ggagctttcctatcaatccctattcattcattcattcattcaacagaaatgtcctatgcccccagtattgttctagatgctgggaatgttgtggtccttcctgtgtccaaggcattcatattccagtcaattgttggggtgagagaagtgaattgctgaatgctgattaagaaaaccatcagaaagtgtaaagcagagaattaaaacagggcagggagactgggagtaaccaagggtgggaggtagttgctttcggttgggagggcagggacatttttttggagggagaagcagttcagctgagctctgggtgaagaaggagcccgtcttgccaagacccaggggaggcttcccccagcagaggccccaaggtgaatggggcttggccaggaaccaaaaactgaaagggaccagagaggaatcctcatcctgccttctctgaccttgctttgagcttttacaaactgctttaaaaatctcttcattttaaattaaaaaaaaaaaaaaataggggactctgagctctagagaacaagccaggccagccagtgggagacatgggctattcagcttgccctggtgccctgaggtcaggatgaccctccagctgacctcagtcaggaaccccaagtgtgaatgccccctagtcctcctcaaggggacactgagatagggtggggagggggtggcaggagcccagcccctcctgcacawcaaagcaaggcaaggatgtggggaatgaacatgggcatttggaagca

SEQ ID NO: 7467 - DNA, 588 bp, Homo sapiens
atccattaattcagcactaagtattcttcagaaatcttcctattttaggactttcatctcaaattgggctcagtgctgagcttctctctggtattgcattatattaacttgttgctgcctcttatcatagactaatgaggctaacctgggttgaacccctctttgttcatagaatctcttgcttattgaacattgtagctaggaatatgaattgcctcatgataggatagtatgctttctgtaaaattccatgatctttcctggtgactctgggtttgcttagctttgttccctacaggcatattgcacaatttattttattctgagttagtttgagatgtgtcaggaaacgccacctggagaaaagaagattagcagagttayttatatgcctggcatattatagttgcttcaaaatattatggaactattatcctttcagtttttaccctaacattcttaattggctaataagtcattcagaatacatactgagattatggtaaccatatcttacactacagaagaaatttaagcgctggaaatgtgtgtagtaccatgtacaataaattaacactcaaaaagctt

SEQ ID NO: 7468 - DNA, 822 bp, Homo sapiens
ttatctaatccatattcaaacattaaatcaaaattgatcagaggccaggcacagtggctcatgcctgtaatcccagcactttgggaggccaaggcagaggatcgcttgargccaagaatttgagaacagcctgggtaatatagcaagaccttcatctctatgataagtttaaaaacaaaaatgaaacaatttttaaaatgttttaatggatcaaaagcctaaacataagacttaaaacaataaaacccttagaagaaaacacagggcaaaagcttcacaacattggatttgacagtcatttctcagatttgacatcaaaggcacagacaacaaaagaaaatatagacaaattgtacttcctaaacaatgtttacattttgtacatcaaaagatactatcaacaaagtaaaaacacaacccacaaaatgaaagaaaatatcatatctgataagggattaatgtgcagcatacatagagaacttctaaaactcaacaacaagaagacaacctgattcaaaatgggcaaaagtcttaaggtgactcaccttctttgcgggatgcctgggagttgccatctgctcatccccattggccttaaaaagccagtggaccaaaaggtggcagtcttttttttctacaaacaggaattggaagcagtggctggcaggccagtgcgatctctggttcctgtctatttatgagcctactctctgtgagtcctgtggtggcctcagagctggcagaagcacactgggtttgtccctgcctccctccaactatgagttgggccatactaaactgcccaccatattgaaaaaaaaa

SEQ ID NO: 7469 - DNA, 719 bp, Homo sapiens
ttctatttctgtacccaaaaaaagctgaaagcagggcctcaaaggatatttgtatacccatgttggtagcagcatttttgagctaaaccatgaaagcaacccatggtccatcaatggatgaatggataagctaaatgtggtatatctgtacaatgaaatatatttcaccttaaaagggaaggaaattctgatgtcggctacaatatagatgaatcttgagaacattatgtgaagtgaaataagccagtctctagcagacgagtactgtatgattccacttatatgaggtatttagagcagttcaaaattatagagtcagacagtagaatagcgggtgccagcagctggggaaaagggaatatggggaattattgtttaatggatacagagtttcaattttacaagatgaaacatgttatggagatgaatgatggtgatgattgcacaacactatgaatgcatttaaaaatactgaactgtgtacttaaaaatagtcacgatgacaaattttttgtttcatgtattttaccacaatttatcaaatggggwaacactttataatcatttgaaaggataggagtgctcataggggtgaagtttagaagctactaactacaacataaaatactaataacagaggaaaaagaaaatcattaacagcagcatctaaccagatttcaaccaatggggtttcataattcgttatgttcaactaaata

SEQ ID NO: 7470 - DNA, 819 bp, Homo sapiens
aggtcaggagattgagatcattctgactaacacagtgaaacctcatctctactaaaaatacaaacattagccaggtgtggtgacatgcgcctgtagtcccagctactcaggaggctgaggcaggagaatcacttgaacccaggaggcagaggttgcagtgagccgagatcrcaccactgcactccagcctggtgacagagcgagactctgtctcaaaaaaaaaaaaaagaaaaagaaaaagaaaagaaatacagaaaatgagcaaagcaaagtgtcaagagctgagaattggtttagtctggaaactgtttcttgtagtttctctagctgtgctttattacctaaactcaaatcttgaggaatggggtggaggcttcattgttaattcagctaattcggaagtccaagttgcgaaaggagtttggtaacatcagaatgggtcagattgtctacacaaagggggaaggagtctagttgctgtcaatcttggtgacggctgaaggtcaggacttgagccccctaagctgtgggtgggtgggtccatcgggtgccccaagacttgaaaatcaggcacactggggagggacaggtgcttgggtgcagctttgaatgtgagtaggtagaggaagtccagccaagctgcccaggcttacttgtagagggcctgcttgtgtcacttcctactgacaatgacaaattccccacctcgagccttcacactgtggaaggtcaggcaggagatgagcagcctggagccagggctttggccacacaggtaaatttagggaaattccctaggagggtgagtggctaggaggt

SEQ ID NO: 7471 - DNA, 681 bp, Homo sapiens
atgtctcactccagcctcaatgctcacccctttccattcactcctccarccacagtgaacttttcttcagtccagaaaggatttttcctctaggccctcaaacatgccatttctttcattcagaacactcttcccctactttttcatctagcctactcctatttatccttaggtcccagcttagacatcatttcctcagagaagccttccataacctactaaactgtacacactttaaatgtcctccattattccagaaaaactcatattgttcctttctaagcatgtaaactcacttctacatatctgtttaatgtttaactcctcactacattatacatcttataagaacagttatctagtgaattccaaatggctaattcaacaattggtgcatagtaagtttcaacacatattgaatgaatgaaagaaacctaggccgggcacagtggctcatgcctgtaatcccagcactttgggaggctgaggcgggcagatcatttgaggttaggagttcaagaccagcctgaccaacatggtgaaaccccgtctccactaaaaatacaaaaaatttagccgggcatggtggcaggtgcctgtagtcccagctactcaggaggctgagacaggagaatcacttgaacctaggaggcggaggttgcagtaagctgagatcacacc

SEQ ID NO: 7472 - DNA, 681 bp, Homo sapiens
atgtctcactccagcctcaatgctcacccctttccattcactcctccagccacagtgaacttttcttcagtccagaaaggatttttcctctaggccctcaaacatgccatttctttcattcagaacactcttcccctactttttcatctagcctactcctrtttatccttaggtcccagcttagacatcatttcctcagagaagccttccataacctactaaactgtacacactttaaatgtcctccattattccagaaaaactcatattgttcctttctaagcatgtaaactcacttctacatatctgtttaatgtttaactcctcactacattatacatcttataagaacagttatctagtgaattccaaatggctaattcaacaattggtgcatagtaagtttcaacacatattgaatgaatgaaagaaacctaggccgggcacagtggctcatgcctgtaatcccagcactttgggaggctgaggcgggcagatcatttgaggttaggagttcaagaccagcctgaccaacatggtgaaaccccgtctccactaaaaatacaaaaaatttagccgggcatggtggcaggtgcctgtagtcccagctactcaggaggctgagacaggagaatcacttgaacctaggaggcggaggttgcagtaagctgagatcacacc

SEQ ID NO: 7473 - DNA, 681 bp, Homo sapiens
atgtctcactccagcctcaatgctcacccctttccattcactcctccagccacagtgaacttttcttcagtccagaaaggatttttcctctaggccctcaaacatgccatttctttcattcagaacactcttcccctactttttcatctagcctactcctatttatccttaggtcccagcttagacatcatttcctcagagaagccttccataacctactaaactgtacacactttaaatgtcctccattattccagaaaaactcatattgttcctttctaagcatgtaaactcacttctacatatctgtttaatgtttaactcctcactacattatacaycttataagaacagttatctagtgaattccaaatggctaattcaacaattggtgcatagtaagtttcaacacatattgaatgaatgaaagaaacctaggccgggcacagtggctcatgcctgtaatcccagcactttgggaggctgaggcgggcagatcatttgaggttaggagttcaagaccagcctgaccaacatggtgaaaccccgtctccactaaaaatacaaaaaatttagccgggcatggtggcaggtgcctgtagtcccagctactcaggaggctgagacaggagaatcacttgaacctaggaggcggaggttgcagtaagctgagatcacacc

SEQ ID NO: 7474 - DNA, 681 bp, Homo sapiens
atgtctcactccagcctcaatgctcacccctttccattcactcctccagccacagtgaacttttcttcagtccagaaaggatttttcctctaggccctcaaacatgccatttctttcattcagaacactcttcccctactttttcatctagcctactcctatttatccttaggtcccagcttagacatcatttcctcagagaagccttccataacctactaaactgtacacactttaaatgtcctccattattccagaaaaactcatattgttcctttctaagcatgtaaactcacttctacatatctgtttaatgtttaactcctcactacattatacatcttataagaacagttatctagtgaattccamatggctaattcaacaattggtgcatagtaagtttcaacacatattgaatgaatgaaagaaacctaggccgggcacagtggctcatgcctgtaatcccagcactttgggaggctgaggcgggcagatcatttgaggttaggagttcaagaccagcctgaccaacatggtgaaaccccgtctccactaaaaatacaaaaaatttagccgggcatggtggcaggtgcctgtagtcccagctactcaggaggctgagacaggagaatcacttgaacctaggaggcggaggttgcagtaagctgagatcacacc

SEQ ID NO: 7475 - DNA, 784 bp, Homo sapiens
aactgtaacattataactgctgtaagtacagtggtgggaggcacatgatgccatgagactatataatagagatttgagcaaatctgtacacctgttacaaggtaactcagcccagatggagtacttcctttctaggggaacttttgacatcctgttggagcctatttgactttaagataagcccatatgttagaaatttgctccttatattgagtcaaaatctgccacactctaaatgacacaaccctggttctagtatctgaatctccatgaaacgaatccagcactctgttccattgaagatcttcatatagataaagatctctttcttctaggttttacctttccaaggctgtgagattcctcattcacttggtcttcttcagaagtactccacttttttctttattttaaaaaatgtttgtaaaatattctggtatccagcatgagctagagccatggaatgatgagctcagaggagcatacctcagaatacatctgtgaccattcttgttcctgttatatttcgcatttatgaggcycaaccttacatgctttgtggacaattgtatcacacccctgactgacctgcactgagcttgcaactaaatgaaaccccagggtttggggttttttttcttcaaacttggtacctttattcattcaatttattcaccaattttttattcatgcctactatgtatcaggcacatattgtttacttatatggatgtgtttttggacttaagtgcaagattcatttatccgtattgtaccccatttt

SEQ ID NO: 7476 - DNA, 784 bp, Homo sapiens
aactgtaacattataactgctgtaagtacagtggtgggaggcacatgatgccatgagactatataatagagatttgagcaaatctgtacacctgttacaaggtaactcagcccagatggagtacttcctttctaggggaacttttgacatcctgttggagcctatttgactttaagataagcccatatgttagaaatttgctccttatattgagtcaaaatctgccacactctaaatgacacaaccctggttctagtatctgaatctccatgaaacgaatccagcactctgttccattgaagatcttcatatagataaagatctctttcttctaggttttacctttccaaggctgtgagattcctcattcacttggtcttcttcagaagtactccacttttttctttattttaaaaaatgtttgtaaaatattctggtatccagcatgagctagagccatggaatgatgagctcagaggagcatacctcagaatacatctgtgaccattcttgttcctgttatatttcgcatttatgaggcccaaccttacatgctttgtggacaattgtatcacacccctgactgacytgcactgagcttgcaactaaatgaaaccccagggtttggggttttttttcttcaaacttggtacctttattcattcaatttattcaccaattttttattcatgcctactatgtatcaggcacatattgtttacttatatggatgtgtttttggacttaagtgcaagattcatttatccgtattgtaccccatttt

SEQ ID NO: 7477 - DNA, 771 bp, Homo sapiens
gagactccgtcttaaaataaaaaataaaaaaataagaaatacaggcagggcgcgtgggctcatgcttgtaatcccagcactttgggaggctgaggcggacaggctgcttgagctcaagagttccagactagcatcggcaaagcagggagaccccatctttacaaaaaaagtagcctggcatggtgttgtgagcccatagtcccagctaagtagggcagaggtaggagaatcacttgagcccaggagttccaggctgcagtgagccgtggtcgtgccactggactccagcctgggtgaaagagcaagaccctgtcycaaaaagagaaaggaaaaaatttaacatcaagaacttcctttcatcaagacaccactgagagaatacgacaacccacagagtaggaaaagagatttgtaatacacatctgtaacaatggacttcctcctagaatagagaggataaaaagtagcaacacttccgcttgcacccggacggaacttcctgtcacggaaaagaacatcctgtcacggagaagaacatcctgcagaatttcctgtcacgaggaacattccgcaggaggaaatggaggctgaaaggctgcgactcctcgaggaagaggccaagctgaaaaaggtagccagaatgggatttaatgcatcttccatgctccgaaaaagccagctaggtttcctcaacgtcaccagttactcccgtttagccaacgagctgcgtgtgagctgcatggagcggaaaaaggtccaaattcggagctt

SEQ ID NO: 7478 - DNA, 700 bp, Homo sapiens
attgagaccatcccggctaacacggtgaaaccccgtctctaccaacaattaaaaaaattagccgggcatcgtggcgggcgcctgtagacccagctactctggaggctgaggcaagagaatggcgtgaacccgggaggcggagcttgcagtgagccgagatcgcgccactgcattctagcctgggcaacagagcaagactctgtctcaaaaaataaataaataaataaaatacaaaaattagcggggtatggtgcacacctgtagacccagctactcaggagactgggagggaaaatcacttgagcckaggagtcttggagggaaaatcacctgagccctgaaagttgaggctgcagtgatcaccccactgcactccagcccagctgggagacagaataagaccctgtctcaaaaagaaagaaaaataagtaaataaattatgaatttatccaaattgtccatttgtttcattaatggttagtgtctttcatgttctgttcaggacattagtacctattacatgatactagtaaagttttggggtgtcttcaagaggaggctgatatctccagtccccatctggatgtttcctttgccacaaagcttgctgactccccttacgctatgaatttccaggaattttggaggactggggagagttggtagggactacagagaaatccggtgatatctggactat

SEQ ID NO: 7479 - DNA, 819 bp, Homo sapiens
ctgtgagatgctgtccacatcatacaagggtggaaaaataactccatttatggtagcacatgactcagcatatgaagtttactgagttaggcaaggttttatagtaatggctgacrgtattggttattttctccattcacataataagtggagatgctgccttcccatcccacaaagatctgacttccacctaagaagaactaaagatctctggaggccaagagcggtgactcatgcctgtaatcccagcacttttgaaggccgaggtaagtggatcacctgcggtcaggagtttgagaccagcctggccaacagggcaaaaccccgtctctactaaaaatacaaaaattagccaggtatggtggctcacacatgtagtcccaagtatttgggaggctgaggcaggagaatcgcttgaaccccagaggcagaggttgcagtgagctgagatctcgccattgcattccagcctgggtgacagagagaaactccatctcaaataaataaataaagtaataaatatctctggagcaccaacatgtggaaaatgtccaaatgcaaaaagtataaacttatttcactctttcattgaggtttgctttgacccaactatgtttacttgttttaaatatcaataactaagcaatctgtaaattgcattttaagatacactcctatttctattcatctgatgtgtaaaatgatgctatttgtgactaaatgataaaccctgaaacgtaattttaaaattaaattaatattaaggggatgttagtgttatggtcactgcagaatcaccttggaaaggagattctgcaa

SEQ ID NO: 7480 - DNA, 743 bp, Homo sapiens
gatttttaggtcatactttaatttttattcatttcaatgtttgcttttctaattgctattactatttttatttttcttcctggatgatttacaacaatattgyttaatttttaaatatttctggatttaaaaattatatttatgtcattaatatttggtttatttcatatataatctggatatttattgttcatttaaacttgtttgatggctagcatatgactgactataataaatagtgctctttggataattattttgcatttttaaggtttaggattatgaaatatcaggttgatttggttgatatgtttattccaatcttcatatacataccattttttttggtggtggggtatctgcttgttttctgtcaaaatctttatatctatggatttgcttttaattttagttctgctttttttctgtgtataacttaaaactaagtcatacaagtttaaaatttccattgaggtagactttttgcattgcaaatttttcttttgacatttagtaatacatattgcctaagaatctattttgatattaatatgttcactccaactattttgttttttagtagtgactgcgtggtatgttctttttgaggaaggagaatgaccttgggtcactcagctcttgaatctgaagcaatctctgaaatgctgaaagctgaaggctgtggcccagtggcactcagcagttgaagcaataaatatttcagttagggatagaaattatcc

SEQ ID NO: 7481 - DNA, 743 bp, Homo sapiens
gatttttaggtcatactttaatttttattcatttcaatgtttgcttttctaattgctattactatttttatttttcttcctggatgatttacaacaatattgtttaatttttaaatatttctggatttaaaaattatatttatgtcattaatatttggtttatttcatatataatctggatatttattgttcatttaaacttgtttgatggctagcatatgactgactataataaatagtgctctttggataattattttgcatttttaaggtttaggattatgaaatatcaggttgatttggttgatatgkttattccaatcttcatatacataccattttttttggtggtggggtatctgcttgttttctgtcaaaatctttatatctatggatttgcttttaattttagttctgctttttttctgtgtataacttaaaactaagtcatacaagtttaaaatttccattgaggtagactttttgcattgcaaatttttcttttgacatttagtaatacatattgcctaagaatctattttgatattaatatgttcactccaactattttgttttttagtagtgactgcgtggtatgttctttttgaggaaggagaatgaccttgggtcactcagctcttgaatctgaagcaatctctgaaatgctgaaagctgaaggctgtggcccagtggcactcagcagttgaagcaataaatatttcagttagggatagaaattatcc

SEQ ID NO: 7482 - DNA, 786 bp, Homo sapiens
tccacagtggcaaagtcaaagaatcacaatgcatgccatgaacccaccaaaagcactgggtcacacccaggttgtgaggccaggcttggtttccttaaagcctttttgatggggcccagggccagagatgagtgaactttaagtgaaagatgggtgctgggctgatgaaaatggcttcacctccccctcaccgctttgcttatcytctgtatggttgtgtgaaaacattccactcactccttccctctgagaagccttatatttgtccacatgactagctttcttccaacccctgacagcactcacatgcacctattagagtaaattaccctgcaaccaagagaccctgggaaacggaaaagcagaggaagtagaacactatggagccagggagccaagggcattctcccacttattgacctatttccatatccaaaaacctaggattcacttgtttaataactttactttcaggccagtagagccaatttgttctcctgctacttccctctctaagacaaaaatgcaaggtgttttcccatcagaaagaacgagctaccagtccctgcatcaacctggatgagtatcacagctgctgctttgaggaaaagcagccagacatacaagagtccaagcaacctgctcccacctccgtggactttacagataatggaaaacatggatgatgacggaagtcagaagagtggctccctcaggtgtagagacagagactggccaagggcaggaggggtactgctggctacgaaggtgtagacagatgtaaaa

SEQ ID NO: 7483 - DNA, 786 bp, Homo sapiens
tccacagtggcaaagtcaaagaatcacaatgcatgccatgaacccaccaaaagcactgggtcacacccaggttgtgaggccaggcttggtttccttaaagcctttttgatggggcccagggccagagatgagtgaactttaagtgaaagatgggtgctgggctgatgaaaatggcttcacctccccctcaccgctttgcttatcttctgtatggttgtgtgaaaacattccactcactccttccctctgagaagccttatatttgtccacatgactagctttcttccaacccctgacagcactcacatgcacctattagagtaaattaccctgcaaccaagagaccctgggaaacggaaaagcagaggaagtagaacactatggagccagggagccaagggcattctcccacttattgacctatttccatatccaaaaacctaggattcacttgtttaataactttactttcaggccagtagagccaatttgttctcctgctacttccctctctaagacaaaaatgcaaggtgttttcccatcagaaagaacgagctaccagtccctgcatcaacctggatgagtatcacagctgctgctttgaggaaaagcagccagacatacaagagtccamgcaacctgctcccacctccgtggactttacagataatggaaaacatggatgatgacggaagtcagaagagtggctccctcaggtgtagagacagagactggccaagggcaggaggggtactgctggctacgaaggtgtagacagatgtaaaa

SEQ ID NO: 7484 - DNA, 823 bp, Homo sapiens
gctagtgatggaattcctgagatcattgatgtaattgattttacttttttctttttcaaaatacagtgtaattgctcttcaaacacagcacctttagaatagtgttggtttctctgtgtatgattctctaagacattcttccattttctttctctgtagcttttagtatataagaaataggtggccgggcgcggtggctcacgcctgtaatcccagctctttgggaggccgaggcgggcgaatcacgaggtcaggagatcgagaccatcctggctaatacggtgaaaccccgtctctactaaaaatacaaaaaattagccgggtgaggtggcgggtgcctgtagtcccagctactccggaggctgaggcaggagaatggcgtgaacccgggagrcagagcttgcagtgagccgagatcgcgccaccgcactccagtctgggggacagagcgagactctgtctcaaaaaaaaaaaaaaaaaaaaagaaataagtaattaaacactattttcatcagtttatggcagagatgattggactgtgcttcaagataatattatcaaatacctcaatccaaatacgttagaaactgcattttgattacataatttaagaaatagattggcatccatttatatatttatgatgaaggtgagtgaaacttagccatacagggttgtgcgaactcttctaggtggtgcacagtaggccacatttctcttcctgttagcatctcatacttttcataacatcgttgtttaataatgatgtattcactgaatgaaaaacgaatgaatacataattgcttatattgaaaaaataag

SEQ ID NO: 7485 - DNA, 653 bp, Homo sapiens
ctcaagagaaatgagcatgtgtatccacacaaagccttgtgcacacttgcacatgagtgttcatagatgctttccttatattcactccaaactggaaacaacccaaatgtccatcatcaggtgggtgcataaacaagtgacagtgtccccaccgaaggacagagtgctacggagcggtccccaggagagagctgcagarggcacagcagcacgggtcaacctccaacacaggctgctgagtgaaaggctgggccctaggaagtcctggaccaggcaaactcttccatgctgacattcacagattctggctttctaggggcagggtgggaaaaggatggaccggaggggagtgcacgggaaacgtttggggtgatggagacaccctacatcttgtgtaggtgattacaatagtgtaattgcatttgtcaaaatgcactcaattgcatacataaaatggagatgatattttgcgtaatttatagtttggtacagtgacttttaaaagaaaatcacagagatgcaagaaggagagaccatgtcttctgcgcctgagcaagcagtgggcaatgctatgatgctcagggcacctgctgtcctctggccctgagtggagacagcagctggaatgaggacggactcatgtgaggtgcaaa

SEQ ID NO: 7486 - DNA, 761 bp, Homo sapiens
tacttcatactatatataaaactaattttagacctacatatttgagggaaaacaacaaaagttttagaagctaacatttggggtttctttgtgacttctagttaaagaagcagtactgaaaaatattttcttgagttccgataaaaaaagagattactttggcctaggtaatgatttagaaagttttttgaagaagatcaagttgatcggagcctcgaagaacgggtaggatttgaacaggtagaaattatagggaaggatattctaagcacaatcaaaatgtagactttggaaaacattgattacactggtttggctggagcagaagatcttccgttttgagagagctggtgggggagatgcccaagggccaagagttagtgggctttgawtgccagatgaagttggtatttacctcattgtcaatgaaaatgagaatataacgtaatgcaagtaataacatggcggcagtgtcaagtacggattgaggtgaggaagtaagaatgatgcagttggtgtatccaaccctgaaatggtggatacaagagacttccttcaaagatgaatattacaagtactgtgaatagatcattgaatgtggaggtggatgaggtgattcaaagataactaagattttaactcagagtaactggaggattggtgggagatgtttagtagcaagaggaacataagggagaagacgttgtggagaaaataataaatacatttggagcatgtcacacttaaagaatgagcaagat

SEQ ID NO: 7487 - DNA, 566 bp, Homo sapiens
aataataaggattacactgtggaaccttggggattgtgagactcttaaatactaaattccatagtcaggaatggggaatgccccaatttggggctttttggtgtctccatcatgggttgtgtgccgtgtttcttgttcctgatgttttattatgtcamccccaaaaaaaaaaaaaaaaaaaaaaaacccaaaaaacattgcatgcctctgcagtagtcatccttcctttattttcatccttccctctcagattttcccaggcttctggctgattctgcaagagaaggctagagcctggaggtttcccatatcaagaacattttcagaatccttagcactgggactttaaggattcaaaacaaatggatgtcccttgagataaatggctccatccccccatttcttttctgccttggcccttaaggggcaatatagaccacatagcttaaatgaggcaaaatagaaataatcacctattttaaatggagaacatacatatatatctcatgaggaaactgaatgattaagcctccccatgttatctaggaactagataatgttttttt

SEQ ID NO: 7488 - DNA, 418 bp, Homo sapiens
acttgcattttcttttcaggaatttatcccacacatctcagcagtgctctaagatctgtgtagagatattcactgcagcattatttataacctccccaaactgaaaacaatccaaatattcatcagtaagttaaataaggtaagatatgcaacactgtggaatattatgtaggcattaaaataagagggacatttacatgtgcagacatagacaagtgtgcttgatctattccgggaaacaagggaaagcaaactgaaaaacagaatgtgtagtatgarcccatttaaaataaaaagaatatacacataaacacagttatgaacaaacatataaacatatacaaatatgcatatgtttatatgtgtatgagcatttgaaaagatacaccagcttaatagctaatacttctggagaaga

SEQ ID NO: 7489 - DNA, 1252 bp, Homo sapiens
tcaatgtggttaaagatgtcaaaggtcaggaagattaaagaagtcacggggcgggtcattgaggtcaggagggttcagatgagaaaagagaggatgaaggactcagagattacacagggggtcaagaaagccacagacaagctcagaagggatgtcagtgtctcaccaccgggccaaggtcccaggccggggtggggcgtagctgtcatgccggtgcagctgtaggaagtctctgcctgggccctgtgccagctcagtgatctcttgggcccaccaccgtgcctgccggtagctgctgcacttgagaatcaaggacctggatgggaacgatgagatgtccataaatcctcgccctccatacctgtgatcttgcctagagacctcccctttcccacttcctcccttagtccctaatcacaactgcacagggatagggcgtgtatgtatctgccttatttatttatttatttttgagacagagtttagctcttgtcccccaggctggagtgcagtggtgygatctctgctcactgcaacctctgcaccccagcttcaagcgattctcctgcctcagcctcccaaatagctgggattacaggcacgcaccaccacgcccggctaatttttgtatttttagtagagacaaggttttagcatgttggctgggctggtctcgaactcctgacctcaggtgatccacccgcctcggcctcccaaagtgctgggattgtaggtgtgagccaccgcgcccggccatatccaccttactcatagttggatcctagtattgcatcagcaaccagtattgtaccaggcactcgggtttgttgaatgaacaaatgaacaaatggaatttcgtttatgtcagcagttcccttcccaggcttctactaatcccctttctctgggcccagtctaagagcagtcccaagcatctggctagaccagttcctggttcaaaactatgtcccgatccagggaggtggaaaagccttcctctctcctgtggtctctctttctcaactcccagcaaggccgtgggtgggctcaccactcagctggtgtctctcaccccagggaggcctcacctgtgggaggtatcgatccgcacgccgtgccgtgcctccgtgctccttttccccacttgcacctcaaagccagggtcaaagagctgaacaaatgagatggcacctgtctcgaggcacatgtacagcaggaaggagtccttcaccaccagccacctagagcagaa

SEQ ID NO: 7490 - DNA, 1551 bp, Homo sapiens
  misc_feature (1)...(1551): n = A,T,C or G
catgctagtgctgagccctaccttagccaagagagttgtgtacaaaatgcgctcagagatcctgattcttttccaacatttgcactctgctttggctgatgttcatttaggttaaattgtcacttttttttttcaaaacaagaaaacatacttcatcaatttaaaaatgttctggagacatttaatgaatgcaaatgtttctaaagtctaaattacaaagttggttaagaatataggtaagtatattttgaaatatcctgttacctaattttctgagttagccatgaaagattctctccttccttccttccttccttccttccttccttccttccttccttccttccttccttctttccttccttccttccttccttcatttcttccttctttttctatttcccacaccacctgcctttctctttcttctttctttcaactgaactaactggatagttggtggttgctttctatccagtgaatatagtgcagcagaccatgagctccaannnnnnnnnnnnnnnnnnnnnnnnnnnnnnnnnnnnnnnnnnnnnnnnnnnnnnnnnnnnnnnnnnnnnnnnnnnnnnnnnnnnnnnnnnnnnnnnnnnnggctatgtctgggaatggaattgctaggtaatacaaatattcaacattaaaacataaatattcaaattggctgcacctatttattcttcctcaagcagtggataagagattttgtggatcccatgaaggatttgggtgaaaagaataggtataaattcaaattcccttgaccctgattaaaatgttgctactatcacatgaagtggacaatactagagatcccttgcctcactgtgttgatgtttccatatctgccattgttgttatagtcagacaatgatttaggtattttaacacccacacacacacacatacacacacaggcacacagatagagaagagcatcctgctgtgcagtgtgtgctcatattcctccttcccaccatccttgctgataatccaggtactttcccaattctcctagctcctgaaagargaggaagacatgggaaggataaggataacaagtacagaactccagagacaatgttcaggcctgacaaaggagcgactggctggatattaaagatttataattcaactgacatgtgttgatcgatttacttttgctgtttcagaatttacactaaatgttttcatttatttgtaaggcagtcttgcaactagcactatataatgtgctaagtaggatgaatgcttaagaggcaagcagctgccgatgcaaaacaggcatgaagccataaacacacagcatgcttgtaagggagctctgttatagcaaatcaggggaaaggacagtcaagccatcaatggagaatagaaaatactaaggtgtctatatattattttgaatgacctcaataatgtagcataattgcagatataaccttgaagattgaaaggggagaattagaaaagtattgaagatttttttaagtagaaattgaccaattaaaagtcctatgtaacatccttctattt

SEQ ID NO: 7491 - DNA, 765 bp, Homo sapiens
tgttttgttctatacatcaattgtccacttaaaatatttaagcacatatagataattgttttttaaatgatttttacataaaattatgaaaataaactaaagataaaagatcaatgtaaaagtcacaaaatgctatatactttgctagttagaatctatatacaataccaaaaaattaccaaatcaagatttaaaacagaaataactagcatgcattctggagaattcaatggaataaaaacatcagggaagatgggggtgtgggagaaccttttcgggaataattacaacaattaggtaacttttctattattagacaattagataacttttctattattcagtggagccagtgacattcacaattaaaatattttatcatgattattgatcacgtctatactcagaacataagcactgagtataaacaggcattttttttaaagaaacaggtttgattacactgaactaaacatacagattgatattgttaacaaaagctgtctgaaaattatggctgagatgtctggaatcttaattaaaattccagaaaacctggaaaagctaagaaatgaaaggaaaaaataaataattcygttttctggctagctcccaaataccagctttcttcatatgagaatatgagagacacacaagatatactaggtaacatgctactgaaacttgaataagtagtttgcctgagttcttaaaggtaaggtccccctgtaagatgtattttctgctcactctatttgccctggt

SEQ ID NO: 7492 - DNA, 753 bp, Homo sapiens
aagtaacgaatctgtggatgaaagtccaaagattggaaacttttgattttattattgctgagaccccacccacccccatctattgctcttgctctctccctttttccttctttacctctaggttctgcattattgtattttgtctttgggtctctatacatagcttcatgtttacatcatatgtataactgggaatataaatatacagagaccttatttttcctaacaattctagcaaatacctgcggctatattttcctcttatgaattgagtgagtttctgtgattcaatatctatgactgaatactgaatatcctgattggctagcaccaggacagatgcttaactctggggctagggtagggtcagtctcattcmaaccacatggataggaaaattaagatatttgtttccaaggaagaaaagaaagctgagcaggaacaagtaacatacgtctaatacaaggatctgaatcatataactaataagggctaaccttatagatacagatacctaaatgtcattaagcttatccttctctatgtgcaaataaggtcatatgaatatgtttatcatgtttttgctggcttgcagctcccaactttatagcaacctattctctttctttataccctactcccacccatgcaagttcttcaagctttcttactccttccggtagttctaggagtttataaagaccacacatgttctgacaggtcattcttaaacaattgtggctgccacccttt

SEQ ID NO: 7493 - DNA, 310 bp, Homo sapiens
gagtcagttttgatgcctccctcttccttagcccccatagcctatgaattgctcacttgtgggcctttgcttatatggtcctcgataaggaatgctcttmccgttcgcctcagacttctcacaagtcactctgactcattttttttaagagacaggatctcactatgttgccgaggctggattcaaactcctgtgctcaagttatcctcccatcccagtctctcaagtagctgggactgcaggtgcatagcactgtgcccagctccactctgactcattcgttaagattcaacctaatcatctcctcctc

SEQ ID NO: 7494 - DNA, 787 bp, Homo sapiens
agggagctgtgtttctcgctgccttaattcttgtgctgagycatcctaccacagcagaggctgttgggagggaagagctttgcaaacttcaagtgcagaaaccatttaaacaaggagggaatactctccctcagtaacactacccactggtagttacccaccctcctatttatatcttccatccactcattcatttattccatagacttaatagtgtggtgtaggagaaacagcacagacaaaaggtagacagatctgggtttgaagcccagggaagacatgccagctcctggggatctcccagctgccatcagaatgactcatctagaaaagcatgaaggagcaaccatcccatctaggcagctggtgtggattccccaccattctctccatccgtcctactttcttctcccagtgtcttttgaaaatgtctacttctacttttattgttttcactttgcatctgaacctaatgtaaaatttcactatgaaaatgtgaaactaggatctatactttcttagttatacttaagttataataagagagggtatttttcaccttttaaatcatgctgctttaaattgtataaagctcaagcttatcccttcttgattaatttttcagattgttttcaaacttttctcatatttattcatctcaacaattttagtagttcagggatggaatgcgttctgttctacttgtattatcattcttaaaagcaacccaaaacttgcagagtgaatctctctttcttggacagcaaaaatcctaatgctgggtcca

SEQ ID NO: 7495 - DNA, 787 bp, Homo sapiens
agggagctgtgtttctcgctgccttaattcttgtgctgagtcatcctaccacagcagaggctgytgggagggaagagctttgcaaacttcaagtgcagaaaccatttaaacaaggagggaatactctccctcagtaacactacccactggtagttacccaccctcctatttatatcttccatccactcattcatttattccatagacttaatagtgtggtgtaggagaaacagcacagacaaaaggtagacagatctgggtttgaagcccagggaagacatgccagctcctggggatctcccagctgccatcagaatgactcatctagaaaagcatgaaggagcaaccatcccatctaggcagctggtgtggattccccaccattctctccatccgtcctactttcttctcccagtgtcttttgaaaatgtctacttctacttttattgttttcactttgcatctgaacctaatgtaaaatttcactatgaaaatgtgaaactaggatctatactttcttagttatacttaagttataataagagagggtatttttcaccttttaaatcatgctgctttaaattgtataaagctcaagcttatcccttcttgattaatttttcagattgttttcaaacttttctcatatttattcatctcaacaattttagtagttcagggatggaatgcgttctgttctacttgtattatcattcttaaaagcaacccaaaacttgcagagtgaatctctctttcttggacagcaaaaatcctaatgctgggtcca

SEQ ID NO: 7496 - DNA, 787 bp, Homo sapiens
agggagctgtgtttctcgctgccttaattcttgtgctgagtcatcctaccacagcagaggctgttgggagggaagagctttgcaaacttcaagtgcagaaaccatttaaacaaggagggaatactctccctcagtaacactacccactggtagttacccaccctcctatttatatcttccatccactcattcatttattccatagacttaatagtgtggtgtaggagaaacagcacagacaaaaggtagacagatctgggtttgaagcccagggaagacatgccagctcctggggatctcccagctgccatcagaatgactcatctagaaaagcatgaaggagsaaccatcccatctaggcagctggtgtggattccccaccattctctccatccgtcctactttcttctcccagtgtcttttgaaaatgtctacttctacttttattgttttcactttgcatctgaacctaatgtaaaatttcactatgaaaatgtgaaactaggatctatactttcttagttatacttaagttataataagagagggtatttttcaccttttaaatcatgctgctttaaattgtataaagctcaagcttatcccttcttgattaatttttcagattgttttcaaacttttctcatatttattcatctcaacaattttagtagttcagggatggaatgcgttctgttctacttgtattatcattcttaaaagcaacccaaaacttgcagagtgaatctctctttcttggacagcaaaaatcctaatgctgggtcca

SEQ ID NO: 7497 - DNA, 787 bp, Homo sapiens
agggagctgtgtttctcgctgccttaattcttgtgctgagtcatcctaccacagcagaggctgttgggagggaagagctttgcaaacttcaagtgcagaaaccatttaaacaaggagggaatactctccctcagtaacactacccactggtagttacccaccctcctatttatatcttccatccactcattcatttattccatagacttaatagtgtggtgtaggagaaacagcacagacaaaaggtagacagatctgggtttgaagcccagggaagacatgccagctcctggggatctcccagctgccatcagaatgactcatctagaaaagcatgaaggagcaaccatcccatctaggcagctggtgyggattccccaccattctctccatccgtcctactttcttctcccagtgtcttttgaaaatgtctacttctacttttattgttttcactttgcatctgaacctaatgtaaaatttcactatgaaaatgtgaaactaggatctatactttcttagttatacttaagttataataagagagggtatttttcaccttttaaatcatgctgctttaaattgtataaagctcaagcttatcccttcttgattaatttttcagattgttttcaaacttttctcatatttattcatctcaacaattttagtagttcagggatggaatgcgttctgttctacttgtattatcattcttaaaagcaacccaaaacttgcagagtgaatctctctttcttggacagcaaaaatcctaatgctgggtcca

SEQ ID NO: 7498 - DNA, 787 bp, Homo sapiens
agggagctgtgtttctcgctgccttaattcttgtgctgagtcatcctaccacagcagaggctgttgggagggaagagctttgcaaacttcaagtgcagaaaccatttaaacaaggagggaatactctccctcagtaacactacccactggtagttacccaccctcctatttatatcttccatccactcattcatttattccatagacttaatagtgtggtgtaggagaaacagcacagacaaaaggtagacagatctgggtttgaagcccagggaagacatgccagctcctggggatctcccagctgccatcagaatgactcatctagaaaagcatgaaggagcaaccatcccatctaggcagctggtgtggattccccaccattctctccatccrtcctactttcttctcccagtgtcttttgaaaatgtctacttctacttttattgttttcactttgcatctgaacctaatgtaaaatttcactatgaaaatgtgaaactaggatctatactttcttagttatacttaagttataataagagagggtatttttcaccttttaaatcatgctgctttaaattgtataaagctcaagcttatcccttcttgattaatttttcagattgttttcaaacttttctcatatttattcatctcaacaattttagtagttcagggatggaatgcgttctgttctacttgtattatcattcttaaaagcaacccaaaacttgcagagtgaatctctctttcttggacagcaaaaatcctaatgctgggtcca

SEQ ID NO: 7499 - DNA, 572 bp, Homo sapiens
cctcacaacaaccccatgaaatgagtactattattgttattattcccattttttaagagaggaaacaggcacagagaggttaagtgacttacacaagctcacatagccagtaagcaaatcaggcagtttggcctcagagtcacctctctaagcacttactgtccctgtccttcactcagagaaatggtagctataaaataaggaacagggaaaaggaaaattaaatgtagcccttcctccatttgtgatgttgccactctagcggagaataagccaggagcttggatattttggctcactgcttcccaaacatcttcatcccccaaaactggtaaatgtataattccaaygtaattgataacttcataagagcaattaaaaacaagcaaaaattccaccacattgaaaaagacttttgcaactttcctttcaggacatggtgagaccacagccatgggtaaaaggcgactttcactagggacattcactgctcaaggagagcataaaaacatccttgagcagggaaggaagtggtgaggtgctggggaggggctgagagctccagattatca

SEQ ID NO: 7500 - DNA, 572 bp, Homo sapiens
cctcacaacaaccccatgaaatgagtactattattgttattattcccattttttaagagaggaaacaggcacagagaggttaagtgacttacacaagctcacatagccagtaagcaaatcaggcagtttggcctcagagtcacctctctaagcacttactgtccctgtccttcactcagagaaatggtagctataaaataaggaacagggaaaaggaaaattaaatgtagcccttcctccatttgtgatgttgccactctagcggagaataagccaggagcttggatattttggctcactgcttcccaaacatcttcatcccccaaaactggtaaatgtataattccaacgtaattgataacttcataagagcaattaaaaacaagcaaaaattccaccacattgaaaaagacttttgcaactttcctttcaggacatggtgagaccacagccatgggtaaaargcgactttcactagggacattcactgctcaaggagagcataaaaacatccttgagcagggaaggaagtggtgaggtgctggggaggggctgagagctccagattatca

SEQ ID NO: 7501 - DNA, 1463 bp, Homo sapiens
acatgcactgtaagcaattggagatgggagacaagaagggaggaaaaaccaatgccaggtgcattagttagtaggttactactatgggcaattggggctcaatacttgtaggaacctaggagagactggggaacacacctcacaattgtcccactgaagtgcaaagaagctgagatatttatccaccaactcccattctctttaacctagcattgctcctgggatgttacctctcaggcactttcagcctagccacggggcccacaagttcccacagccagagaacatcctcaggcagacagacacaggaagctttctgagtgcaagagacttttctgcaagtgaatcccagaacagaccaagggatatgaggaaagcgcccaacagcgtctactacaactaatctccccctctttactttatggttgagaaaaggaagacgggagargttaagaaacttatgcaatgtcacacagagcatgctagggatatatcacggactggttggtttttctaacttccaggtcaacaatcttttccctaagctaagctctcactaacattctctatgtgatggagactgtgccagggattatttctatagtaaccaaaatcacaagtgcttaccttctagctcccataaatacggaaattgtgtaggatcctaaatgtcttgaatctctgacaataaatgcaccttctttagactgcaaaaaaaatcatttattgaataagtctattccttcttagaaagacaaacctacaactcagggatgaaaatcaaagctatattgacttaccataaataagtgacctgctatattattaatatgaagaattagattgtctttacaagtacacaaaatcttatctcccttatagatttagaagtcacacctataaaataaattgtaattgggacatgcatttataatgtactttagaatactgttactgatttttctaagaaaaattctctatttgaaaaccttgtaccctactgcttatttttgttatattgaccagaataatagattaaaaatcactgtagaataggaagaacactaagacagactgaccggattgtactttggaagaagagcaacaaggtgacagggaggaacacagctgggcaagcagggcgtggggaaggacaccagagttcatgggaagtagaaagaaagaacagatatgggggagtctgaaaagaaaagcaaaaggaaccatattagttgcagtaggggtatgggaagataaaaagaagtggtaaaagggagaacatgatagtaaatctgaagttatgttataaattagattcctattaacattctttgggagatgccaataaagctgtaaattgctttcaaagaatcttgaatgttgcattgtttagattcgtttgtttgatattgtaaaatgatttagctttactgagtgtgcttatgctcatgaagagggaaaat

SEQ ID NO: 7502 - DNA, 1463 bp, Homo sapiens
acatgcactgtaagcaattggagatgggagacaagaagggaggaaaaaccaatgccaggtgcattagttagtaggttactactatgggcaattggggctcaatacttgtaggaacctaggagagactggggaacacacctcacaattgtcccactgaagtgcaaagaagctgagatatttatccaccaactcccattctctttaacctagcattgctcctgggatgttacctctcaggcactttcagcctagccacggggcccacaagttcccacagccagagaacatcctcaggcagacagacacaggaagctttctgagtgcaagagacttttctgcaagtgaatcccagaacagaccaagggatatgaggaaagcgcccaacagcgtctactacaactaatctccccctctttactttatggttgagaaaaggaagacgggagaggttaagaaacttatgcaatgtcacacagagcatgctagggatatatcacggactggttggtttttctaacttccaggtcaacaatcttttccctaagctaagctctcactaacattctctatgtgatggagactgtgccagggattatttctatagtaaccaaaatcacaagtgcttaccttctagctcccataaatacggaaattgtgtaggatcctaaatgtcttgaatctctgacaataaatgcaccttctttagactgcaaaaaaaatcatttattgaataagtctattccttcttagaaagacaaacctacaactcagggatgaaaatcaaagctatattgacttaccataaataagtgacctgctatattattaatatgaagaattagattgtctttacaagtacacaaaatcwtatctcccttatagatttagaagtcacacctataaaataaattgtaattgggacatgcatttataatgtactttagaatactgttactgatttttctaagaaaaattctctatttgaaaaccttgtaccctactgcttatttttgttatattgaccagaataatagattaaaaatcactgtagaataggaagaacactaagacagactgaccggattgtactttggaagaagagcaacaaggtgacagggaggaacacagctgggcaagcagggcgtggggaaggacaccagagttcatgggaagtagaaagaaagaacagatatgggggagtctgaaaagaaaagcaaaaggaaccatattagttgcagtaggggtatgggaagataaaaagaagtggtaaaagggagaacatgatagtaaatctgaagttatgttataaattagattcctattaacattctttgggagatgccaataaagctgtaaattgctttcaaagaatcttgaatgttgcattgtttagattcgtttgtttgatattgtaaaatgatttagctttactgagtgtgcttatgctcatgaagagggaaaat

SEQ ID NO: 7503 - DNA, 1790 bp, Homo sapiens
caaccactttcaggtcaaatggattctgagactatttcctactagggatttaaatatcaatttggaaacaatttataatatcattttaaatcatgtttctaagtaataaaaaaaggataaaatcaagccaaaatgactatactgccttcattgtttctaacaaattaattgttttaatttgcaaatactttttaaagcattaacgtatttatctgtttcaatgagttgacttgaggtaaaagccaggtgggacatgctaggtaaactaatgaaataatacattattttttgagaataatgaaaatatcaaaaaaggaattgcttttaaccatacacttgcattcacgtttttcttcccttgggagaacatcagtttattgatttttataattaatctggactaacagatgtctgactgattagttctggtaacaatatttgtcatttttgatatcttctcagctgttccatatgggatttttttttaatttctatagtttcttaaatcagagccaatgtgtagtcatttcttgacatttatgactcaaattttggtactgctaaacttttaagaatttctcacacttagttctcatatttctgcattcttcacagaaacaactgcaatctcctctttcttcaactttaaggatgaggctgacactgtcaacactgtgagaaaagtaatgctagatgggggcatgaatatcctagaagtgttctaaaaaggagctttgttagaggacaggtaggtagaagatgctgaaaagcatggctttcccagatgccctttctagtatcatcacagtaagaaacagcggtatgaccaataaaactaaataaaacaaaaaccaagctttgttcgggtagtacagtttgtggtcaagaacataagttctggaattgtacaatttggatcccagttctgactctagctcatgatcctkgatgagttatttaaccactcggtttcagcttccccatatagaaaaatgggattaatagtatcccaaccaaccgcactactgggaagactaaaaagagaacacttgcaaggcacttatcacaatgtctggcagacagtgaattctcactaaatctttgctattaactatcgttttgaacttcaattggctaatcatacttatcaaaataccttctgggaagtgcaagtctttagtcaatattgcacgtgtgtttaccaagggcctactcagcaatatcgcagtcataaatactcattatgttgctgataaagtctatcttagccatgttctctagaaacagagcccaaggcaaagcagatgtgctaacactttattgggggagtacaatccaggaatgcagtcatgaaagcaaatgtgagggagatagaagggagtgtgttgttctggatacagcttcatgataagttgactgcccttttgcacaagatctctctggtggacgtttatgaaagtatggtccttttagggtaaaggagagaataaaacttatctaccagcactcacactattcaaaatttgccccacaaccattaacacttataggttctatatacacgggtgaccatcagattccctagtatcctgctaacttctcagcagcagggaagccacaggaccagaaaaagaggtgttcattgaggagagtaagttaatgatttaggaacatttctatgaaaaacacaaggaagtatggagaaattgccacagcaggcccactcatctataggaacagggacacctccggccagagagcaaggcaagtgcatggggctggggtaatga

SEQ ID NO: 7504 - DNA, 1790 bp, Homo sapiens
caaccactttcaggtcaaatggattctgagactatttcctactagggatttaaatatcaatttggaaacaatttataatatcattttaaatcatgtttctaagtaataaaaaaaggataaaatcaagccaaaatgactatactgccttcattgtttctaacaaattaattgttttaatttgcaaatactttttaaagcattaacgtatttatctgtttcaatgagttgacttgaggtaaaagccaggtgggacatgctaggtaaactaatgaaataatacattattttttgagaataatgaaaatatcaaaaaaggaattgcttttaaccatacacttgcattcacgtttttcttcccttgggagaacatcagtttattgatttttataattaatctggactaacagatgtctgactgattagttctggtaacaatatttgtcatttttgatatcttctcagctgttccatatgggatttttttttaatttctatagtttcttaaatcagagccaatgtgtagtcatttcttgacatttatgactcaaattttggtactgctaaacttttaagaatttctcacacttagttctcatatttctgcattcttcacagaaacaactgcaatctcctctttcttcaactttaaggatgaggctgacactgtcaacactgtgagaaaagtaatgctagatgggggcatgaatatcctagaagtgttctaaaaaggagctttgttagaggacaggtaggtagaagatgctgaaaagcatggctttcccagatgccctttctagtatcatcacagtaagaaacagcggtatgaccaataaaactaaataaaacaaaaaccaagctttgttcgggtagtacagtttgtggtcaagaacataagttctggaattgtacaatttggatcccagttctgactctagctcatgatcctggatgagttatttaaccactcggtttcagcttccccatatagaaaaatgggattaatagtatcccaaccaaccgcactactgggaagactaaaaagagaacacttgcaaggcacttatcacaatgtctggcagacagtgaattctcactaaatctttgctattaactatcgktttgaacttcaattggctaatcatacttatcaaaataccttctgggaagtgcaagtctttagtcaatattgcacgtgtgtttaccaagggcctactcagcaatatcgcagtcataaatactcattatgttgctgataaagtctatcttagccatgttctctagaaacagagcccaaggcaaagcagatgtgctaacactttattgggggagtacaatccaggaatgcagtcatgaaagcaaatgtgagggagatagaagggagtgtgttgttctggatacagcttcatgataagttgactgcccttttgcacaagatctctctggtggacgtttatgaaagtatggtccttttagggtaaaggagagaataaaacttatctaccagcactcacactattcaaaatttgccccacaaccattaacacttataggttctatatacacgggtgaccatcagattccctagtatcctgctaacttctcagcagcagggaagccacaggaccagaaaaagaggtgttcattgaggagagtaagttaatgatttaggaacatttctatgaaaaacacaaggaagtatggagaaattgccacagcaggcccactcatctataggaacagggacacctccggccagagagcaaggcaagtgcatggggctggggtaatga

SEQ ID NO: 7505 - DNA, 1790 bp, Homo sapiens
caaccactttcaggtcaaatggattctgagactatttcctactagggatttaaatatcaatttggaaacaatttataatatcattttaaatcatgtttctaagtaataaaaaaaggataaaatcaagccaaaatgactatactgccttcattgtttctaacaaattaattgttttaatttgcaaatactttttaaagcattaacgtatttatctgtttcaatgagttgacttgaggtaaaagccaggtgggacatgctaggtaaactaatgaaataatacattattttttgagaataatgaaaatatcaaaaaaggaattgcttttaaccatacacttgcattcacgtttttcttcccttgggagaacatcagtttattgatttttataattaatctggactaacagatgtctgactgattagttctggtaacaatatttgtcatttttgatatcttctcagctgttccatatgggatttttttttaatttctatagtttcttaaatcagagccaatgtgtagtcatttcttgacatttatgactcaaattttggtactgctaaacttttaagaatttctcacacttagttctcatatttctgcattcttcacagaaacaactgcaatctcctctttcttcaactttaaggatgaggctgacactgtcaacactgtgagaaaagtaatgctagatgggggcatgaatatcctagaagtgttctaaaaaggagctttgttagaggacaggtaggtagaagatgctgaaaagcatggctttcccagatgccctttctagtatcatcacagtaagaaacagcggtatgaccaataaaactaaataaaacaaaaaccaagctttgttcgggtagtacagtttgtggtcaagaacataagttctggaattgtacaatttggatcccagttctgactctagctcatgatcctggatgagttatttaaccactcggtttcagcttccccatatagaaaaatgggattaatagtatcccaaccaaccgcactactgggaagactaaaaagagaacacttgcaaggcacttatcacaatgtctggcagacagtgaattctcactaaatctttgctattaactatcgttttgaacttcaattggctaatcatacttatcaaaataccttctgggaagtgcaagtctttagtcaatattgcacgtgtgtttaccaagggcctactcagcaatatcgcagtcataaatactcattatgttgctgataaagtctatcttagccatgttctctagaaacagagcccaaggcaaagcagatgtgctaacactttattgggggagtacaatccaggaatgcagkcatgaaagcaaatgtgagggagatagaagggagtgtgttgttctggatacagcttcatgataagttgactgcccttttgcacaagatctctctggtggacgtttatgaaagtatggtccttttagggtaaaggagagaataaaacttatctaccagcactcacactattcaaaatttgccccacaaccattaacacttataggttctatatacacgggtgaccatcagattccctagtatcctgctaacttctcagcagcagggaagccacaggaccagaaaaagaggtgttcattgaggagagtaagttaatgatttaggaacatttctatgaaaaacacaaggaagtatggagaaattgccacagcaggcccactcatctataggaacagggacacctccggccagagagcaaggcaagtgcatggggctggggtaatga

SEQ ID NO: 7506 - DNA, 1790 bp, Homo sapiens
caaccactttcaggtcaaatggattctgagactatttcctactagggatttaaatatcaatttggaaacaatttataatatcattttaaatcatgtttctaagtaataaaaaaaggataaaatcaagccaaaatgactatactgccttcattgtttctaacaaattaattgttttaatttgcaaatactttttaaagcattaacgtatttatctgtttcaatgagttgacttgaggtaaaagccaggtgggacatgctaggtaaactaatgaaataatacattattttttgagaataatgaaaatatcaaaaaaggaattgcttttaaccatacacttgcattcacgtttttcttcccttgggagaacatcagtttattgatttttataattaatctggactaacagatgtctgactgattagttctggtaacaatatttgtcatttttgatatcttctcagctgttccatatgggatttttttttaatttctatagtttcttaaatcagagccaatgtgtagtcatttcttgacatttatgactcaaattttggtactgctaaacttttaagaatttctcacacttagttctcatatttctgcattcttcacagaaacaactgcaatctcctctttcttcaactttaaggatgaggctgacactgtcaacactgtgagaaaagtaatgctagatgggggcatgaatatcctagaagtgttctaaaaaggagctttgttagaggacaggtaggtagaagatgctgaaaagcatggctttcccagatgccctttctagtatcatcacagtaagaaacagcggtatgaccaataaaactaaataaaacaaaaaccaagctttgttcgggtagtacagtttgtggtcaagaacataagttctggaattgtacaatttggatcccagttctgactctagctcatgatcctggatgagttatttaaccactcggtttcagcttccccatatagaaaaatgggattaatagtatcccaaccaaccgcactactgggaagactaaaaagagaacacttgcaaggcacttatcacaatgtctggcagacagtgaattctcactaaatctttgctattaactatcgttttgaacttcaattggctaatcatacttatcaaaataccttctgggaagtgcaagtctttagtcaatattgcacgtgtgtttaccaagggcctactcagcaatatcgcagtcataaatactcattatgttgctgataaagtctatcttagccatgttctctagaaacagagcccaaggcaaagcagatgtgctaacactttattgggggagtacaatccaggaatgcagtcatgaaagcaaatgtgagggagatagaagggagtgtgttgttctggatacagcttcatgataagttgactgcccttttgcacaagatctctctggyggacgtttatgaaagtatggtccttttagggtaaaggagagaataaaacttatctaccagcactcacactattcaaaatttgccccacaaccattaacacttataggttctatatacacgggtgaccatcagattccctagtatcctgctaacttctcagcagcagggaagccacaggaccagaaaaagaggtgttcattgaggagagtaagttaatgatttaggaacatttctatgaaaaacacaaggaagtatggagaaattgccacagcaggcccactcatctataggaacagggacacctccggccagagagcaaggcaagtgcatggggctggggtaatga

SEQ ID NO: 7507 - DNA, 1790 bp, Homo sapiens
caaccactttcaggtcaaatggattctgagactatttcctactagggatttaaatatcaatttggaaacaatttataatatcattttaaatcatgtttctaagtaataaaaaaaggataaaatcaagccaaaatgactatactgccttcattgtttctaacaaattaattgttttaatttgcaaatactttttaaagcattaacgtatttatctgtttcaatgagttgacttgaggtaaaagccaggtgggacatgctaggtaaactaatgaaataatacattattttttgagaataatgaaaatatcaaaaaaggaattgcttttaaccatacacttgcattcacgtttttcttcccttgggagaacatcagtttattgatttttataattaatctggactaacagatgtctgactgattagttctggtaacaatatttgtcatttttgatatcttctcagctgttccatatgggatttttttttaatttctatagtttcttaaatcagagccaatgtgtagtcatttcttgacatttatgactcaaattttggtactgctaaacttttaagaatttctcacacttagttctcatatttctgcattcttcacagaaacaactgcaatctcctctttcttcaactttaaggatgaggctgacactgtcaacactgtgagaaaagtaatgctagatgggggcatgaatatcctagaagtgttctaaaaaggagctttgttagaggacaggtaggtagaagatgctgaaaagcatggctttcccagatgccctttctagtatcatcacagtaagaaacagcggtatgaccaataaaactaaataaaacaaaaaccaagctttgttcgggtagtacagtttgtggtcaagaacataagttctggaattgtacaatttggatcccagttctgactctagctcatgatcctggatgagttatttaaccactcggtttcagcttccccatatagaaaaatgggattaatagtatcccaaccaaccgcactactgggaagactaaaaagagaacacttgcaaggcacttatcacaatgtctggcagacagtgaattctcactaaatctttgctattaactatcgttttgaacttcaattggctaatcatacttatcaaaataccttctgggaagtgcaagtctttagtcaatattgcacgtgtgtttaccaagggcctactcagcaatatcgcagtcataaatactcattatgttgctgataaagtctatcttagccatgttctctagaaacagagcccaaggcaaagcagatgtgctaacactttattgggggagtacaatccaggaatgcagtcatgaaagcaaatgtgagggagatagaagggagtgtgttgttctggatacagcttcatgataagttgactgcccttttgcacaagatctctctggtggacgtttatgaaagtatggtccttttagggtaaaggagagaataaaacttatctaccagcactcacactattcaaaatttgccccacaaccattaacacttataggttctatatacacgggtgaccatcagattccctagtatcctgctaacttctcagcagcagggaagccacaggaccagaaaaagargtgttcattgaggagagtaagttaatgatttaggaacatttctatgaaaaacacaaggaagtatggagaaattgccacagcaggcccactcatctataggaacagggacacctccggccagagagcaaggcaagtgcatggggctggggtaatga

SEQ ID NO: 7508 - DNA, 745 bp, Homo sapiens
ttttctatctccattaggccccaagaaatctactatcgtaactgattttcagtcttttcaaatcccattttattatctgtcatatgaatgaatgaaataataaaaaatcaaatacagmcaaaaaacaactgaagcaacctataacagtacagttagaaaacatgacacacataaagaaaagaacttcctcaattattgttttcaaaagtgatgttaaaaactgctcatattgaataatatttagacaaaagtatctttagggtgtctgtgcaagttagtgtttcacatgcattttactgagatgccatgatccctggaggcaaaccagagctactttgggtatatcacataactgaaaaatagctactttatctcaaagaaaatatgagataattggaaaactttaaagaaatattctagttaaatctgaatggaaagaggtgtgaaacagatgaaaaatatgaagattttttagatgatgcctggctcacagagatcctactttagtctgttagaccggcttcaccaaacagcaaataaattgccactgcactgaagtgaatttgatcataacatgaacaaaaataacagcagttttagaaattaaaaagaattaaagggagaatggtacactagatcatctgaagcaggtctctaatacattagaaaagctggacaaaatgtataaaatatttactttaaggcatggtaaagcttacgtgttaatgaagttactagttcagga

SEQ ID NO: 7509 - DNA, 745 bp, Homo sapiens
ttttctatctccattaggccccaagaaatctactatcgtaactgattttcagtcttttcaaatcccattttattatctgtcatatgaatgaatgaaataataaaaaatcaaatacagacaaaaaacaactgaagcaacctataacagtacagttagaaaacatgacacacataaagaaaagaacttcctcaattattgttttcaaaagtgatgttaaaaactgctcatattgaataatatttagacaaaagtatctttagggygtctgtgcaagttagtgtttcacatgcattttactgagatgccatgatccctggaggcaaaccagagctactttgggtatatcacataactgaaaaatagctactttatctcaaagaaaatatgagataattggaaaactttaaagaaatattctagttaaatctgaatggaaagaggtgtgaaacagatgaaaaatatgaagattttttagatgatgcctggctcacagagatcctactttagtctgttagaccggcttcaccaaacagcaaataaattgccactgcactgaagtgaatttgatcataacatgaacaaaaataacagcagttttagaaattaaaaagaattaaagggagaatggtacactagatcatctgaagcaggtctctaatacattagaaaagctggacaaaatgtataaaatatttactttaaggcatggtaaagcttacgtgttaatgaagttactagttcagga

SEQ ID NO: 7510 - DNA, 745 bp, Homo sapiens
ttttctatctccattaggccccaagaaatctactatcgtaactgattttcagtcttttcaaatcccattttattatctgtcatatgaatgaatgaaataataaaaaatcaaatacagacaaaaaacaactgaagcaacctataacagtacagttagaaaacatgacacacataaagaaaagaacttcctcaattattgttttcaaaagtgatgttaaaaactgctcatattgaataatatttagacaaaagtatctttagggtgtctgtgcaagttagtgtttcacatgcattttactgagatgccatgatccctggaggcaaaccagagctactttgggtatatcacataactgaaaaatagctactttatctcaaagaaaatatgagataattggaaaactttaaagaaatattctagttaaatctgaatggaaagaggtgtgaaacagatgaaaaatatgaagattttttagatgatgcctggctcacagagatcctactttagtctgttagaccggcttcaccaaacagcaaataaattgccactgcactgaagtgaatttgatcataacatgaacaaaaatamcagcagttttagaaattaaaaagaattaaagggagaatggtacactagatcatctgaagcaggtctctaatacattagaaaagctggacaaaatgtataaaatatttactttaaggcatggtaaagcttacgtgttaatgaagttactagttcagga

SEQ ID NO: 7511 - DNA, 667 bp, Homo sapiens
aaggagaagataagctaagcacagttactgaataattgtccagaaaaatcagtgggcacagtcatgaatggaccctagaaaccatatggcccaccataaggcataggcatctaggtattatctgcttctaagttcaccgaggactatatctcattctctagtrtaggtcaaagagaactcatcttggggaagtatacttagctaatccaagcagtagaacatgggagagaaaaccaaaacgtcatcaacacacatcaaaacaagccaagaaactgggccaagctccctttggcactctatcctcagggtaaaaagatggtagactggtcgctggaatcctgagaataacagccttccacatgtttgttttccaagtcacactattcctatctgttctcattctccacatcaggtattcatctgtcatggcatactccatatctttctcctttttatgttttaatatctgattttgatagagcatgtgttctagtagcttcttgagaaaaggtacaatgacaggaaactacactttttttcagattttgaatgcctaaatattttctcttatacaactatttaattgataatttgattagtgacggaattctagcttggaagtacattttcttttttttcttttttttattattattatacttcaagt

SEQ ID NO: 7512 - DNA, 667 bp, Homo sapiens
aaggagaagataagctaagcacagttactgaataattgtccagaaaaatcagtgggcacagtcatgaatggaccctagaaaccatatggcccaccataaggcataggcatctaggtattatctgcttctaagttcaccgaggactatatctcattctctagtataggtcaaagagaactcatcttggggaagtatacttagctaatccaagcagtagaacatgggagagaaaaccaaaacgtcatcaacacacatcaaaacaagccaagaaactgggccaagctccctttggcactctatcctcagggtaaaaagatggtagactggtcgctggaatcctgagaataacagccttccacatgtytgttttccaagtcacactattcctatctgttctcattctccacatcaggtattcatctgtcatggcatactccatatctttctcctttttatgttttaatatctgattttgatagagcatgtgttctagtagcttcttgagaaaaggtacaatgacaggaaactacactttttttcagattttgaatgcctaaatattttctcttatacaactatttaattgataatttgattagtgacggaattctagcttggaagtacattttcttttttttcttttttttattattattatacttcaagt

SEQ ID NO: 7513 - DNA, 835 bp, Homo sapiens
atccctccttctgtctgcgacaatctgcttctctggaaaaaggatggtggggatttctctctcctcgtccttcaccggctcctctctcatctctcacctacattttagtttcccctcctttcttgcccgcctccacttctgccttcgttgtctgagtgggcccggctcatcacagtgtygctgggagcctttgagcagggacacaattcagccagtgttcgatgagtcccacacctgctggaggtgaaggagtccaggccctgcccggagcacttccagccaggtggagacacaagacaggaaaaccggtgcctacacccaaggcagagtaagagccgcacactgagaagggaacaagccaagctgtggggctcagagaccacagcccggggggtcaaggaaggcctcggagaggtggcatttggagactgggcgagatttccatactgacagaaaccagtgggaacaaggatagtccaggcagagggacaaatgagaggaagagggaaacagagagtggactgttctggaaatggcaggcagactagcttggctgaagaggtgggatgagaagggtctggtgagataacaggcaagttgggaccagatcatgaggccctgaatctcggctgaatgatttgcacttgactgtgtaggcagtgcggagctattgaaggtcttggaggaagggcatggcattatctgggctgggactagaagagcttctagattttgctcctatcctagaatctcatgaaaggcatttggccttgattctgagcccccgggcctctcaggaatccccaaggggagcaaacaatctgtgtgtctcaaa

SEQ ID NO: 7514 - DNA, 835 bp, Homo sapiens
atccctccttctgtctgcgacaatctgcttctctggaaaaaggatggtggggatttctctctcctcgtccttcaccggctcctctctcatctctcacctacattttagtttcccctcctttcttgcccgcctccacttctgccttcgttgtctgagtgggcccggctcatcacagtgtcgctgggagcctttgagcagggacacaattcagccagtgttcgmtgagtcccacacctgctggaggtgaaggagtccaggccctgcccggagcacttccagccaggtggagacacaagacaggaaaaccggtgcctacacccaaggcagagtaagagccgcacactgagaagggaacaagccaagctgtggggctcagagaccacagcccggggggtcaaggaaggcctcggagaggtggcatttggagactgggcgagatttccatactgacagaaaccagtgggaacaaggatagtccaggcagagggacaaatgagaggaagagggaaacagagagtggactgttctggaaatggcaggcagactagcttggctgaagaggtgggatgagaagggtctggtgagataacaggcaagttgggaccagatcatgaggccctgaatctcggctgaatgatttgcacttgactgtgtaggcagtgcggagctattgaaggtcttggaggaagggcatggcattatctgggctgggactagaagagcttctagattttgctcctatcctagaatctcatgaaaggcatttggccttgattctgagcccccgggcctctcaggaatccccaaggggagcaaacaatctgtgtgtctcaaa

SEQ ID NO: 7515 - DNA, 835 bp, Homo sapiens
atccctccttctgtctgcgacaatctgcttctctggaaaaaggatggtggggatttctctctcctcgtccttcaccggctcctctctcatctctcacctacattttagtttcccctcctttcttgcccgcctccacttctgccttcgttgtctgagtgggcccggctcatcacagtgtcgctgggagcctttgagcagggacacaattcagccagtgttcgatgagtcccacacctgctggaggtgaaggagtccaggccctgcccggagcacttccagccaggtggagacacaagacaggaaaaccggtgcctacacccaaggcagagtaagagccgcacactgagaagggaacaagccaagctgtrgggctcagagaccacagcccggggggtcaaggaaggcctcggagaggtggcatttggagactgggcgagatttccatactgacagaaaccagtgggaacaaggatagtccaggcagagggacaaatgagaggaagagggaaacagagagtggactgttctggaaatggcaggcagactagcttggctgaagaggtgggatgagaagggtctggtgagataacaggcaagttgggaccagatcatgaggccctgaatctcggctgaatgatttgcacttgactgtgtaggcagtgcggagctattgaaggtcttggaggaagggcatggcattatctgggctgggactagaagagcttctagattttgctcctatcctagaatctcatgaaaggcatttggccttgattctgagcccccgggcctctcaggaatccccaaggggagcaaacaatctgtgtgtctcaaa

SEQ ID NO: 7516 - DNA, 792 bp, Homo sapiens
ggagggggagggatagcattaggagatatacttaatgctaaatgacgagttaatgggtgcagcacaccaacatggcacatgtatacatatgtaacaaacctcacgttgtgcacatgtatcctaaaacttgaagtataataataataaaaaaaagaaaaaaaagaaaatgtacttccaagctagaattccgtcactaatcaaattatcaattaaatagttgtataagagaaaatatttaggcattcaaaatctgaaaaaaagtgtagtttcctgtcattgtaccttttctcaagaagctactagaacacatgctctatcaaaatcagatattaaaacataaaaaggagaaagatatggagtatgccatgacagatgaatacctgatgtggagaatgagaacagataggaatagtgtgacttggaaaacaracatgtggaaggctgttattctcaggattccagcgaccagtctaccatctttttaccctgaggatagagtgccaaagggagcttggcccagtttcttggcttgttttgatgtgtgttgatgacgttttggttttctctcccatgttctactgcttggattagctaagtatacttccccaagatgagttctctttgacctatactagagaatgagatatagtcctcggtgaacttagaagcagataatacctagatgcctatgccttatggtgggccatatggtttctagggtccattcatgactgtgcccactgatttttctggacaattattcagtaactgtgcttagcttatcttctcctt

SEQ ID NO: 7517 - DNA, 792 bp, Homo sapiens
ggagggggagggatagcattaggagatatacttaatgctaaatgacgagttaatgggtgcagcacaccaacatggcacatgtatacatatgtaacaaacctcacgttgtgcacatgtatcctaaaacttgaagtataataataataaaaaaaagaaaaaaaagaaaatgtacttccaagctagaattccgtcactaatcaaattatcaattaaatagttgtataagagaaaatatttaggcattcaaaatctgaaaaaaagtgtagtttcctgtcattgtaccttttctcaagaagctactagaacacatgctctatcaaaatcagatattaaaacataaaaaggagaaagatatggagtatgccatgacagatgaatacctgatgtggagaatgagaacagataggaatagtgtgacttggaaaacaaacatgtggaaggctgttattctcaggattccagcgaccagtctaccatctttttaccctgaggatagagtgccaaagggagcttggcccagtttcttggcttgttttgatgtgtgttgatgacgttttggttttctctcccatgttctactgcttggattagctaagtatacttccccaagatgagttctctttgacctayactagagaatgagatatagtcctcggtgaacttagaagcagataatacctagatgcctatgccttatggtgggccatatggtttctagggtccattcatgactgtgcccactgatttttctggacaattattcagtaactgtgcttagcttatcttctcctt

SEQ ID NO: 7518 - DNA, 692 bp, Homo sapiens
tataataagacattgaagtaacttttaattcttatattctgacactttaaattataattgtcaaagaataatttttccagacattttagtcagcagtatcagacttcctagagatttattcacaaaatttctaggtagatcaatgatctgtagttaatctacagagtaacaggattagattgaacagcacttccaggtctttcccacatagttttgtcctggagactagccatgaaatcaaggaatttcagagtgtatatgtggcgagggaggcrgtgggtagtagggagtctgtggatactattatcgtccccattttacagatgcatgccaacaataaagtcaagagaagtttaataacttttcaagaatacacaactaatgtatggttaggctgagaagtgagtgtaagcaattcagatccagacactgctgcggtagatatctctcacactctttgaagtagaggagactagaattaaaaagctcagtagttgtatcttgctgcaaatttaacgtgagttaacaagtggccaacaaaacagtttaaataatagctttgctagtaagaatatatctatttatattaataattactgcaaaccaattactccaaaacttaataaacacactatcaacacacatttattatttctcagttttgtggttcaggattctgggtgcagctttct

SEQ ID NO: 7519 - DNA, 399 bp, Homo sapiens
cggaggaaaacgtccccccggcctcacagttctcaccgttttcttctgattttaaaagaaataaatacattttcgtgtcttcatgtataaatagatacccatgtgttcgcggatacgtgaatgccgcagtgcgtgtgccaagcctgtgyccatgtgcgcagtggggcagccgggcctgctggaggcgtcgcgactctgggcccggagctgtccaaggcactggggatgccgcaagaacaaggcaaagttcccgcccctgggggaactttgtaatgtaagtaaatacataaatactttatgtatttattatttacttcattttttaaaatacagagaggcagggccttgctatgttgcccaggctggtctcgactcctgggctcaagtgatccttctgcc

SEQ ID NO: 7520 - DNA, 474 bp, Homo sapiens
ctgaatgagagggaatattttatagtcagggggaccactatggtttgaatgtatccccaacatttcacgtgttggaaacttaattcccagtgcaacagtgttgagaagtaggacctttaagaagtgactaggtcatgagggttctgccctcatgaatagattatcatcattattgctagagggaatttgttataaaagtgagtttggcccccttgcaaccccctyttgctctctcacattctctctcttgttcatgtgatacgcgttgccatggttacaatgcagcaagaaagccttgccagatgtcagggccattctcttggacttctcagcctccagaaccgttaaccaaatacatttctgttcattataaattacccagtgtggcattctgtgacagcagcacaaaaaagactacgacaggaactttttaatgcatttagtattatctgataatgtgaaggctcaaagaaa

SEQ ID NO: 7521 - DNA, 210 bp, Homo sapiens
ctaattttttcggttgttcatctttccagcttaaaaatagccttkgtagaaaaatatttaattattcacaccagggagaagaaaagctctgtttttattaattttattaaaacttcttgtcttgtttttcttctgatttgtattaactttagggaagcccagggaagagagggactcctggtgaccgtggagcaaagggcctgcgagggg

SEQ ID NO: 7522 - DNA, 575 bp, Homo sapiens
taaataccacatggacaatatggataaagagattaaaatgcacacacatacataccatccattattgagaatcttttaagtggttttcaaaattagtgttttctgcttggaagaaaagattcccttattgaatgaccataacctgaactgaagcttgctttcagcgtaattagctgtgtcctaacttctgataatgatatcaaactttgaatttaattagactctaattgctgttttaaattgtctcctacctcagactttgctttattkgccatctcattctgatttttttctgtttttatattcatgctggtgtagagataacaatagctactaagttactcacaaaacttttaacaaacagggtggcctgaaaaaggaaacactgtttttcaggaagcttcttttaacatggatttgctgtgacagaaaatggctgtatttcaagcacattttcagcttttcctgggaaacagctagcccataattcctttcagttgtgtgtggccacgtggctgagtcttggctaacgaaatctggatagaagtgatcctgcccccataaaacctttcatg

SEQ ID NO: 7523 - DNA, 1684 bp, Homo sapiens
caaatgtgaagacgatgattattttgcattttaagtcccattttgaggtgagaatcagtgcatcttcattttatgaagggatattgcatcttgcctggagaatgcctcagggtgttactgttgctcactgaacttcctagtggtcatttgatttgcctggccgctatgcagccgaggtgggactgcagttgctaagctctcaactggcagctttaaaccaaccttgctccaggccactttgtgatgtcatgctggggacagagctctgccaataaccttcttcctttgctagcttgcttttggtccttccttttcagctgccgccctgccagctctgcccagagttaattcttccctccaggagttgcaggtggtccctcagcagtggctgcctgcagtagccacgggtcctggtctcctgctcctaccagctctcccagggccagtctcttcactcttcttcagagggacaagcataccctccccagaggtgggtttcaacctcatggtccctcctctgagccccagaggtgcggcacagcctcagcctcagaaggcagagcccagccagctctgctaggtgcctccttcacccttctaggttctagtcaccccagcttatctctatgctattctctgccctggagattgaagctactttctgcaattcttatctctgtgtctctgcactaggtcattgtgtctttttgttgatcttcttgagagagtttcttcatttataacagagttgataataccggatctcaaaatgttgctgagaggattagcacacaacctggcacagtgtaggtggtagattactactgtccctttcaattccagcatcrtgtgacgccatcaatataccaggaaggaagtgctaggatcctgcacccatgatgacttggggaccataagctactagagggaggggctggcaggaatttctgtcttcaggaccatgacgataacaacaacagtgacaacagcaaatatgtacaaatcactgagcatgaaccaggtaccacatatattatgcacttatccttatcaaatatttatactagtaatgtttatttgcattaaaaccaaggcacagagaaataaagagatcatttaagactacacagcccaccagcagtacacctaggattcaaactcatttgatactcagtatttgttgcagaatttgcagtttactcagctctacattctctcaattgatcctgagtaattctgcaatgcaaaggggacagaaatggccatcctcactttatagatgaggaaaggaagaatcagggaatttcacacctccagtgagttgctgaggtagggcttgaactcattttgtttctgacaattgacaccaagcctgagctccttcttctaagtctgaccttacaggggcctccctaggtacacagctcccagctgtgggcctttttggatctctgtgctttgattgtgtttgatttatttaaaagcgaccctatcttacatcaatccggggttaactggtgtgagtggtgagcacttcgacttcccaaagagctccctgcctggggagggccctgatgagtggagaagaggaaccagacggtatcttgtctggctttggcaaatggctttatgctgattcctttcaaagcatcttttactgacagagcaatttctcagcaccaga

SEQ ID NO: 7524 - DNA, 801 bp, Homo sapiens
ccaaaagaatatatcatataattatggcttactttaatttttttccttgtttttaatttttctagaataaatatgtaaagacttacttggataactttatttttaaaagcatattttattttttaaaaattaaaatgtcagagaccaaaaatactacttgcccaatgtctgcagtggatattggtagttcctccttcttacttgaaaagtcaggacaagctaactgatgaaatagaaaaaccctacatctcagtgactaatcccaattagaggttggttttcacaaatgcaagggtctattttagctgttcctagtcaggcattctcttgggcagctcttctctgagcagtgacccaggatccaagcctcttacaatctagtggcttcgctgaatctagtgcattaagtcagcaggtgagggaagaggatttagaggattgcattggaggtttcctcagacaagcctggaaataactcacaatacttctgcctgattccattggctgaaactcagtcctatgaccatatctaactgacaggaagactgataaatatttagttatgtgtctacgaggaaaaaggaaataacatggtaaacaactagccaactgtagtcatactagtgtaaccacacttccacatggtgactctacttagttcaggagagtaggggtaagcatccttctgagatcgagaaaatgaggawatgaaacttaatctaactgagaccaatgcaaatacatggaatttatctaatcccacctactggagcagtgaacaggagagaattaaatggacat

SEQ ID NO: 7525 - DNA, 801 bp, Homo sapiens
ccaaaagaatatatcatataattatggcttactttaatttttttccttgtttttaatttttctagaataaatatgtaaagacttacttggataactttatttttaaaagcatattttattttttaaaaattaaaatgtcagagaccaaaaatactacttgcccaatgtctgcagtggatattggtagttcctccttcttacttgaaaagtcaggacaagctaactgatgaaatagaaaaaccctacatctcagtgactaatcccaattagaggttggttttcacaaatgcaagggtctattttagctgttcctagtcaggcattctcttgggcagctcttctctgagcagtgacccaggatccaagcctcttacaatctagtggcttcgctgaatctagtgcattaagtcagcaggtgagggaagaggatttagaggattgcattggaggtttcctcagacaagcctggaaataactcacaatacttctgcctgattccattggctgaaactcagtcctatgaccatatctaactgacaggaagactgataaatatttagttatgtgtctacgaggaaaaaggaaataacatggtaaacaactagccaactgtagtcatactagtgtaaccacacttccacatggtgactctacttagttcaggagagtaggggtaagcatccttctgagatcgagaaaatgaggatatgaaacttaatctaactgaraccaatgcaaatacatggaatttatctaatcccacctactggagcagtgaacaggagagaattaaatggacat

SEQ ID NO: 7526 - DNA, 808 bp, Homo sapiens
ctaagtatggcaacataaattgctgttaggcctgtgaaattgccagaacaaagaaaatgtgcatggattatctatctttacaaatctgtctttgaaaattatttaaatctgggaagaaaaatttgaactggcgaaagtggcatttcactccttccaaatactgtcttatgttaagggataatagcaaaaccaagagaacattattgatttttatacagtttcgataacttgtttttttttgytttcatatcacttcaacttcacttgtaaattgggcacctaaaaatttatcatttcctcaggttgagggtttgaatgtccccaaaatttatgttaaaacttaatcctcagccgggtgcaatggctcatgcctacaattgcagaactttgggagcctcaagtgggcagatcacctgaggtgaggagtttgagaccagcctgaccaaaatggagaaaccccgtctctactaaaaatacaaaattggctgggtatggtggtgcatgcctataatcccagctactcaagagactgaggcaggaaaattgcatgaacccacaaggcagaggttgcagtgagccaagatcatgccattgtactccagcctgggcaacaagagctaaatctcaaaaaaaaaaaaaaaaaaaaaaaaaagatggggcattttgagaagggattaagttatgagggggtccaacctcattaatccattcttgttttataaaatggctagaggtagggctttttgcttctctgccttctgccatctgaggacttagcaagaaggccctcatcagataccaaatccta

SEQ ID NO: 7527 - DNA, 808 bp, Homo sapiens
ctaagtatggcaacataaattgctgttaggcctgtgaaattgccagaacaaagaaaatgtgcatggattatctatctttacaaatctgtctttgaaaattatttaaatctgggaagaaaaatttgaactggcgaaagtggcatttcactccttccaaatactgtcttatgttaagggataatagcaaaaccaagagaacattattgatttttatacagtttcgataacttgtttttttttgttttcatatcacttcaacttcacttgtaaattgggcacctaaaaatttatcatttcctcaggttgagggtttgaatgtccccaaaatttatgttaaaacttaatcctcagccgsgtgcaatggctcatgcctacaattgcagaactttgggagcctcaagtgggcagatcacctgaggtgaggagtttgagaccagcctgaccaaaatggagaaaccccgtctctactaaaaatacaaaattggctgggtatggtggtgcatgcctataatcccagctactcaagagactgaggcaggaaaattgcatgaacccacaaggcagaggttgcagtgagccaagatcatgccattgtactccagcctgggcaacaagagctaaatctcaaaaaaaaaaaaaaaaaaaaaaaaaagatggggcattttgagaagggattaagttatgagggggtccaacctcattaatccattcttgttttataaaatggctagaggtagggctttttgcttctctgccttctgccatctgaggacttagcaagaaggccctcatcagataccaaatccta

SEQ ID NO: 7528 - DNA, 820 bp, Homo sapiens
  misc_feature (1)...(820): n = A,T,C or G
tctgcccctaagggtattagtgtgggtcaccagcaggtgatggagctcaatgatgataggtgctagcaggtgtcaagctggtggtgcctgcttgtccctgaatatggaccggctacaggcaagctgagcagccaagcagagggaggggaccctcacaggccagacgccccaccatgtgggtgaagaatgtgagctatgctgcccttatgaacaacatgtgttattttactttatcagttgattaggggactaatcagctcagggatatgaagcggaaggttacagccatgcccctggtaatccttggactgcaatccctgggcccagctcacgtcagcagcacttgatttccatgcacagtttgcgtatgttggtggaaggttcaaggtcttaccctacgagttttcaaaacatgccattcataagtgtccttttaaaaaaacrcaatagcatttcaaaaattaatacacaaccactgcaagaaaacacagaaaagcataaagagacaaatgaatattcatatttattggtttggtatttttcagtgtttatatacacatatatacacagtatgtacaacattggtttttgttgtttttgttggggaatgtgtccaaaattgtgttcacattttgcataaaaaattttacagcttgctttttttgcttagcaaaataccataagaacttntctgtaacatcagcctgatttaaaatatatatatatatatattgtaaagagggggttttgccatgttgcccagactgatcttgaactcctgggctcaagtgatcctaccaactcagcatcccaaagtgcc

SEQ ID NO: 7529 - DNA, 816 bp, Homo sapiens
aagctgttaatatagctcagtccaagtttgaaagcctcaaaaccaaggaactcagccctcagtctgaggctgaagacctgagagcccctgggagtctgctggtggaactctcagagtccaaaggccaaaaagcaacatgaaagagactgatgtctaagggaagaaggaggaaaaaaaaaggtattctgctcctgaagagagagcagtagtgcaaaacagaaagccaagcaagctgaatgccccacttcttctgcctgctttgttctagccatatccacagcccataggatggtatccactcatactgaggtcatgtcttcctttcttggtccactcattcataagtcaatctcctctggagataccctcacagacatacccagaagcaatgctgcatgcaaccttcaatccagtcaagttgatacctaaaattaaccatcacagacaatgtgacttacagcttttatagggctgcaagcatatgaagatgatagttttacaatgatgaaggagggttgggtcagtttataagtcagktgttttttttttttttttttttttttcgcctgtgggaataaggcaactgagtgaatattgggagaaaacagcctgaaagtggagagagggcagcatgtagcccctgctatgtttgtgttctctgggacacaagatgcatgtcttccatctactctgatatcctttggcaattatagggcacatcacttttgtctgatgggaacaaagaacctgtttgcattaagaacttctttctatgagagaagacaaatatcattggcttcagagtgagacctgact

SEQ ID NO: 7530 - DNA, 816 bp, Homo sapiens
aagctgttaatatagctcagtccaagtttgaaagcctcaaaaccaaggaactcagccctcagtctgaggctgaagacctgagagcccctgggagtctgctggtggaactctcagagtccaaaggccaaaaagcaacatgaaagagactgatgtctaagggaagaaggaggaaaaaaaaaggtattctgctcctgaagagagagcagtagtgcaaaacagaaagccaagcaagctgaatgccccacttcttctgcctgctttgttctagccatatccacagcccataggatggtatccactcatactgaggtcatgtcttcctttcttggtccactcattcataagtcaatctcctctggagataccctcacagacatacccagaagcaatgctgcatgcaaccttcaatccagtcaagttgatacctaaaattaaccatcacagacaatgtgacttacagcttttatagggctgcaagcatatgaagatgatagttttacaatgatgaaggagggttgggtcagtttataagtcagttgktttttttttttttttttttttttcgcctgtgggaataaggcaactgagtgaatattgggagaaaacagcctgaaagtggagagagggcagcatgtagcccctgctatgtttgtgttctctgggacacaagatgcatgtcttccatctactctgatatcctttggcaattatagggcacatcacttttgtctgatgggaacaaagaacctgtttgcattaagaacttctttctatgagagaagacaaatatcattggcttcagagtgagacctgact

SEQ ID NO: 7531 - DNA, 680 bp, Homo sapiens
cctaaattagcaactactctacagaatctagctgtctctgggcaaggcagggggcttagaaaccccttttctggccgggcgcggcggctcacgcctgtaatcccagcactttgggaggccgaggcgggcagatcagaaggtcaggagatcgagaccatcctggctaacacggtgaaaccccgtctctactaaaaatacaaaaaattagccgggtgtggcggtgggcgcctgtagtcccagctactcaggaggctgaggcaggagaatggcatgaacccgagaggcagagcttgcagtgagccgagatagcgtcactgcagtccagcctgggcaaaagagcaagactccgtctcaaaaaaaaaagaaagaaaccccttttctgagtccatattcagataaatctctgtattgagccttccgtgagcccctsgcatctctgagagccttggtctcctgcatgttgcattggctctagatatttgggaagataatccagtccttcctggctctccaaatccaagtagaaccctggagaggactgggtggtccctggggtgggaagggtgggaaacgctcatcccctggcctctgtgtgccttgtagatggagagacagatttccacaagcaagatgggaaggctggactcttttcccaagaacaatatgagagaaacaagtct

SEQ ID NO: 7532 - DNA, 779 bp, Homo sapiens
tgttatggtcttcccctcccaggtttatcatgctcatgagcatccttgtgcgaaagcttttgccttttgaatttttgtgcaaatcattcctaagtattgagtccttgcaagtactttagtgggtttagaggaacaacatccaatagcatcttttttttttttttttttttttttttgagacagaatcttgctctgttgcccaggctagagtgcagcggcgtgatcttggctcactgcaacctccgcctcctgggctcaagcgattctcctgcctcagcctcccgagtagctgggattacaggcatccaccaccatgcctggccaaatttttgtatttttagtagagatagggtttctttatgttggccaggctggtcttgaactcctgatctcaggtgatctgcccacctcggcctcccaaagtgctgggattataggggtgagccactgtgcctggcctccaataacatcctgattacaaataaccacattattctccaagaaacagcagaatgttctttcatttgtattcttttaattcaaaatatgaggctgaatttatagtagtagcaccagcaatatttattgaatgcttactctgtgctgggagctgttgtaagcacttgcatgtaataactcaattctcayagcaacccataaaggaaggtactattattattcccagtttacaagtgagaaaactgaggcacagagagggcaactgacctgctctaagagagctcagtaaccaacttgggattccccggaggtctttgtgg

SEQ ID NO: 7533 - DNA, 2159 bp, Homo sapiens
ctgagctgctctatctgcagggtgtagcgggcctccacctccctcaggctgttctccaagctgggcttcagatttctcacggagtccagcttgatctccaaggactggactgtacatctcagctctgtgagcatcatctcagcagctccaacctccacrgactgcgtggtgaccactgtggtgctctcctcaatctgctgagaccagtacttgtccagctcctcttggttcttctgagccagcttgtcatattgggcttggatatctgccatgatcttggtgaggtcctgagatttgggggcatctacctccacggtcaacccagagctggcaatctgggcttgtaggccttttacttcctcttcgtggttcttcttcgtgaagagcagctcctccttgagagcctcaatctctgtctctcgctgcagctgagtgacattggtgtcatcaatgaccttgcagagcccatggtgtcgttctccacagactggcgcatggccagctctgtctcatacttgactctaaagtcatcagcagcaagatgggcattgttgatctgcagaacgatgcgggcgttgtccacagtatttgtgaagatctgagccctcaggtcctcgatggtcttgaagcaatggctccagtctctgacctggggtcccttcttctccaggtgctcccagattttgctctccagcctccagttctcggtctccaggctcctcactctgtccaggtaggaggccaggtggttgttcaggctttgcacggtctccttcttgttctggatgcctcccattcctgccagacccccagccatccccgaggccaggcccctggaccccatgccaccccggaagctggtggagcgggacacggagatccgggaaccagagcccccagcgactgcagagacgctgaccatgctgctgaccagctgggcgccatagctggcacctggacagagcccagggaccagtagttggtggagaaggtggagcgactggtgaagctcacgctgtccggggaggagggcgagaagacaggactcagctttgccgacaacctattattattttttaacagagatggggttttgtcatgttgcccaggctggtcttgaactcttaagctcaagtgatcctcccgcctctacctcttcccaaagtgctgggactacagacatgagccactgtgcctggcctagagaccacagatttaaataaataattgaaaaataaataaatgggggagaaatgaccatatcttccttccagaagaattttaataaatgtagaaggtgactggatgcaatggtgcactcctataatcccagcattttgggaggttgagatgggaggatcacttgagctcaggcatttgagaccagcttgggcaacacagtgaaaccctatctctacaaaaaatacaaaaattagccaggcatggtggcacaagcctgtagtcccagctacttaggaggctgaggtgggaggatctcttaagcccaggaggtcgaggctacagtgaactgagatcgcattactgcactctagcctgggtaacagagcaagaccctgtctcaaaaaaagagaaacagggaaatagaaaatcaccattcgacagtaatactcataaaagaaagatccaccaatggatgctaaaattagtaggtggaattttgaggagaaataggatattttggtcatctcaaaaaatctcctccaagatatttatccggtgcaatttctcaagttaataaaatttaaatgcaaatttacaaaaagtataaaattattaattataagagaaacatagtaactttatagtagagaaactcaaccaagacacagtttagctaagtgatcaacattaacaccagcagtaagaagacttagtgacatcacaaagcccctgctctgatgcactgaagaaagcataacactgcttatgctgtactctagccaaaaaatgcataacttcaatctaatcacgagaaaagccttagacaaacccaaattgagggacattctgtaaaatagccaaccagttcttttaaaaagtgtcaaggacattaaaaacaagagaagatggaggaacagtcacagattggaagagactgaagagacctggaaactaaatgtaatgagtaaccctgaact

SEQ ID NO: 7534 - DNA, 2159 bp, Homo sapiens
ctgagctgctctatctgcagggtgtagcgggcctccacctccctcaggctgttctccaagctgggcttcagatttctcacggagtccagcttgatctccaaggactggactgtacatctcagctctgtgagcatcatctcagcagctccaacctccacggactgcgtggtgaccactgtggtgctctcctcaatctgctgagaccagtacttgtccagctcctcttggttcttctgagccagcttgtcatattgggcttggatatctgccatgatcttggtgaggtcctgagatttgggggcatctacctccacggtcaacccagagctggcaatctgggcttgtaggccttttacttcctcttcgtggttcttcttcgtgaagagcagctcctccttgagagcctcaatctctgtctctcgctgcagctgagtgacattggtgtcatcaatgaccttgcagagcccatggtgtcgttctccacagactggcgcatggccagctctgtctcatacttgactctaaagtcatcagcagcaagatgggcattgttgatctgcagaacgatgcgggcgttgtccacagtatttgtgaagatctgagccctcaggtcctcgatggtcttgaagcaatggctccagtctctgacctggggtcccttcttctccaggtgctcccagattttgctctccagcctccagttctcggtctccaggctcctcactctgtccaggtaggaggccaggtggttgttcaggctttgcacggtctccttcttgttctggatgcctcccattcctgccagacccccagccatccccgaggccaggcccctggaccccatgccaccccggaagctggtggagcgggacacggagatccgggaaccagagcccccagcgactgcagagacgctgaccatgctgctgaccagctgggcgccatagctggcacctggacagagcccagggaccagtagttggtggagaaggtggagcgactggtgaagctcacgctgtccggggaggagggcgagaagacaggactcagctttgccgacaacctattattattttttaacagagatggggttttgtcatgttgcccaggctggtcttgaactcttaagctcaagtgatcctcccgcctctacctcttcccaaagtgctgggactacagacatgagccactgtgcctggcctagagaccacagatttaaataaataattgaaaaataaataaatgggggagaaatgaccatatcttccttccagaagaattttaataaatgtagaaggtgactggatgcaatggtgcactcctataatcccagcattttgggaggttgagatgggaggatcacttgagctcaggcatttgagaccagcttgggcaacacagtgaaaccctatctctacaaaaaatacaaaaattagccaggcatggtggcacaagcctgtagtcccagctacttaggaggctgaggtgggaggatctcttaagcccaggaggtcgaggctacagtgaactgagatcgcattactgcactctagcctgggtaacagagcaagaccctgtctcaaaaaaagagaaacagggaaatagaaaatcaccattcracagtaatactcataaaagaaagatccaccaatggatgctaaaattagtaggtggaattttgaggagaaataggatattttggtcatctcaaaaaatctcctccaagatatttatccggtgcaatttctcaagttaataaaatttaaatgcaaatttacaaaaagtataaaattattaattataagagaaacatagtaactttatagtagagaaactcaaccaagacacagtttagctaagtgatcaacattaacaccagcagtaagaagacttagtgacatcacaaagcccctgctctgatgcactgaagaaagcataacactgcttatgctgtactctagccaaaaaatgcataacttcaatctaatcacgagaaaagccttagacaaacccaaattgagggacattctgtaaaatagccaaccagttcttttaaaaagtgtcaaggacattaaaaacaagagaagatggaggaacagtcacagattggaagagactgaagagacctggaaactaaatgtaatgagtaaccctgaact

SEQ ID NO: 7535 - DNA, 412 bp, Homo sapiens
ccccacacctcatcatcccccccacccccacacccctgaatctcctgcaccgccctcacccgtgctgggcctttacagaggatgtgggccaggccacttcagatccacacaggttagggaagaccacggtacctccaagcagtacagatatgtggagaccgttttgcctccccctcctcctcatccttcttcctctcagcctccaaaagcccctacccacaatggccattagaatccagactaaagacaacttcttgaacatcatccttgaaatccagtggcamctgagcacgccctctatgagtagctggtgccagatgggcacagggtaggaacagctccgctcggccccaggccaggcactcatgggttcttgctcttcccctgcagaaaggtgagatccaggagcaat

SEQ ID NO: 7536 - DNA, 778 bp, Homo sapiens
  misc_feature (1)...(778): n = A,T,C or G
aaacacaaaataccatctctctttaatttccactgagtttagctcacctgagcaagttaaactccaatacagagtcctcctcacttcagtcacacggtgtctctaagtggtttattaaatgaaggacatcgcaacacttaccacagataagtagatgcttcctgtggtttagatataatatctattcattggcttatggattcaaaataccgcagagagttccatgaaacctggtgctcttggaggcctggagtttgtataataaatcagaactgactggaaaaggtctcacaatgcttcctggtcggttctctatgctacaaagaacatttttttttcctctggaaagtgcgcagcagatcttatgatctagtccttttgttttttagcagaagtagaggtggaaaagggttcatagtcagatgccagcatcttgaacccccacttctacagagtgaaacgcattcctgtcacaggagcggagtaggtttggtctttgtaaggcctgggaaaagtagcttgctagggatgtggggtggccanagaaagacaatagttttcaagctatggatgatcccaagagcaggtactggtcacttgctaccagtccatggaactgtggccatagggcagatgaagtgaataattaaactgaaaaaacttggggaaatagcttgraacaaagacaaagaaaaacataagaggcaaccccttgccctcatgtcctaatatccccagtgctgggaacagtacatggaacatagctgctgctaaagcc

SEQ ID NO: 7537 - DNA, 688 bp, Homo sapiens
ctggttggcactgttttctctgtccctaggatgcccgtgtcctttggctgcaggctcccaccacccagcccttgctccctgcacagggtggtactcagtgaatatgtggtagctcttcttgggttgaagaagagagggcagaagaaaacctgcccctccacttgctttcttgcagtggcttgtctcagcttgagtgcttcccttcccaactgaccacatctgaggctttgctttgtgctccatccattcaaaaccaagcgaccaaacgatgcttcccttggggattttctttagaacaaagaccattttcatcagcactcttttctcccgctcctgggttccttccacctttcatgaactgagcccccttctgaagtaaggcgtgggcaccctgaatggaaatggctagattaatgcgcatgcatgtccrcactggtgcagggcacctgcttttctgggacaattgccatctggaatcagacgccttcctcattgtgtgcctatttctggacaaagaagaggagaattggacgagaagcaggcctcctctcccacatcctccagccacctggcaggcccgactaagacacccgctccagctcaggtggtttatgtggctccagtgagtggggcaagtggggcgtttcatcccaaccttctgcataacagcattagcagatcagacact

SEQ ID NO: 7538 - DNA, 710 bp, Homo sapiens
acctgaggtcaggagttcaagaccagcttgaccaaaatggtgaaaccccgcctctactaaaaatgcaaaaattagctgggtggggtggcgggcgcctgtagtcccagctgctcaggaggctgagacaggagaatcgcctgaatccgggaggtggaggttgcggtgagccaagatcgtgccattgtactctagcctgggcaacaagagcraaactccgtctcggtgaggggtggagagaaaagatactggtctggagtgatttattttagaaatatcagattctgttaagttttttataaattgtctttgggagtgattgaagaaatagtgcgatgttttgaataatccaagatctaaatgtaaacacaatttaataaaattagagacaaggaaaactatacatggggagactatattactcttgacaggaaatcactgtgtatgtgcaattatattcatgtatttgtcatttgtatctatcatatatatatatatatatatataacctagggaaagataccatacacctaatcaaatgaaaagtgataaattggaaaaatattttcagcacatgtcagacaaaaatattcatatgcctattgtacaaggagatctcacaaactgataagaaaaaccgatgatcaattagaagacaaggtcaaggggaacagctcatgcttcacttgacttggtgattcttcagtaacgag

SEQ ID NO: 7539 - DNA, 683 bp, Homo sapiens
accaggtgtaaaaggcaccaagctgccctgatctggcccggctggtttcgtttatttgtttggtgacaaggtccatttactgctctcccccctgctgaccatcctaaatcacactgccattccaacctgtgggatgggagacttcaaagggctgggtctgagccctgcttaacatttgtgaatgctgagtcactaagacacttgaaagggaatctcagcaggtcccttgagaaattgccattaattttgtagccagaaaagctttagaaatatttactgcccgtcttcccttttgctgaggtttttagcaaacattagaagcagcactaaygagctccacaatccagcgtctgaaaagctctctgcagtgaatgttcaaccccagaggtggggcagcaactcagaaaagatcaccattgaaaagaatgaatttgagctctcacagagttgcatgtgaaaaatgacttatgaggaagcacttcaggaaacttggacaggcttaaactatgagatcctcggtgtgaaattgttttgtggacaaacaacataagtgacagaggttttctgcaacacaaagaactatttttaaactctgcttaaaacaacaacaacaacaaaaaacacctgagggtgatttttcctttcggaagaaagatacagctccccataattcctcaagtccc

SEQ ID NO: 7540 - DNA, 823 bp, Homo sapiens
aggcagggcctgctgactttgggtttcgggcacagtagtgatgtaacatattttctcaaagagagctccagatgctggccaaggaacaggtatttttacactgtgcatgtacaagtgcaagaccacagctgtgagaaaaacaagcggtttgctcacctctgccttcccacctgtgcctccaggaggtcacatctaactctttccatagtagcttcagaggaacacggtagatttctgaacaatgcagatttctgagggagttacttgcagggactggtggtagtgatggttgatgtccgctgagcctcatctaagcagcactgcgggatgggcrgtgagccaggatcttagagaccacaagagcaggctcaccttagctgaagctcaaaggatgagctccttcatcccaaaggtgggctctggggcagagcaatccctgagggttaactctttatgtgccacccacatgctgcactctcatttccagtcactttccctatgaccggaagtggctcctgccttgcattctatgcacctgccatttcccccacccagcgtccttcctctatctgtcactagactggctccttgtcactcagatcgcatggcctcctcagaacccatcaggcactctctatcaacgtcaccagctgtcatctggaacagagcccctcctctatctgacatttcttatgtgcctgtttatctgtttctctcctgcccccacaccacccccctgagaccaaggcccagcctctttgccactgtctagaacagtgcctggcacacactcagccctcaacaaacaccttccatgtgacac

SEQ ID NO: 7541 - DNA, 694 bp, Homo sapiens
ccaaatgttacaatggatcatttttttgtaatatttcagtgtcaaatttaatttttctagtggaaaatgaactggagctcaaaaacagtgaagtcagaaggtgaacggggaataaaaagttagttacctggtaagtatttctaacataatcctagggatattagagcagaagagattttgtgtttacctccttatagtttcttattttacacataggaaactgatgttttgagagtaaatatgtctagaataacacaggttttaaatcttcaaggtgttttcaacaaaaatgagagcaacaaccaaaagcacatttagcacacaatattcataatacaaccatcaacattattggactttgattaggaatcgaatgtaagcacagttttcgttacatattatttatttttaaaatttaaatacagattaaggctgactcaattttatataatgttatttattatatattatggcaatgcattggtaccaagtcatcagtgcactagtaacagkcctgaggtgggaaaagggaattagttaagaaataaaaagttaaaaatatcataaattaatatagattacctacataacagtatgacattttgctgagctatttcagaaacttccattcccacctgcctattccatagaagaacacctggtttgtctcattttttgaatcttcttaatcttt

SEQ ID NO: 7542 - DNA, 800 bp, Homo sapiens
ttgatatcttgtcatttgatccatcttagtttccaattcagagcactccagagtaatcgtattaaaaattaatgaaaaggacaatcaagttggcacacaaagtgagagttttggggatacatacagacacatccatgttctcaaggcttcctctccacaagggaagaaaaggctacttgaaggattgtctgcttatctgtggcaaggtagtgctgttcattgggctttataaattaaacataagtgcagaaacagagcctaaaatacgtgtgtatattccacacgcacacacaccatgtgcacactgcagactgtgttcacagccatgaaaataattaatttgtcaatgtgagtaaatgactttcactacaccctcttggtgccttgtttcctcaggcatctgaacatcccttcccctttggaaaacacttcgcattaatccaacacccctcatgaagcatggtgaatgttcctttcaacataggaaaactaaagctagtattatctgtgcatgccaatgggtagacctccttgctgaagaggttttccctgctgcatatggaaggtgcttaacttgtgtccagttgccaagagatgatgatcatgcactgtacataaaagcataagtaattttatggagcgtgaaactcactgtgggtctctggagatattaactgaacttttccrtcttctagacttgacatttccatgaactcagggacaatgtagcttccttctccaacataagcattgagtcctccatctgttgtgactgcagaaaataagtataatctatgaaa

SEQ ID NO: 7543 - DNA, 819 bp, Homo sapiens
atataatccacagactgagccctgtgtggtccggtgttaagaagtcagaaaaatgaggaagaacaagcatgagagatggagatgtggcagctagtgaagaagctagaaatgcaggaatgtgtgcatctcaaaagagggtcaaggaagaaatggtgattggggaggtatactagactttttagtttcatcctccacatctcctaatctttttgtattgtccctctatttattactccatgatgaattctatataatttcttcaaaggcaatagagcagagtgtgtgagagcaaagattacagagacagtcaatttatcactaacaaactccaggcagccaggacatatgaatgaacacaataataataacaacaagcaataatttaaaataatgttatcacaagtattatataacacttagttgtatacttagtaagcactcaataaactatagctrttatctatcttccaggtcaccagtttcctattcaccagtttctaatcagcttacttgtcaatcaagtttgtaatttcaatggccattttttatatctaagatgtatatttagttctttttcaaatatccctaatcccttgcagttatgtatttaatttatttgcctcttttttcttataggtttaattttatattatgtttatagtaattttaaatagaaatcttcatgtttaccagtttgctttattgcttaaagttttgaagttctattaatcttgcttgactgtctcttataggacatattcttttgagcattttgcaaactttgattgtgagcttgctttccaagggctttatcaataa

SEQ ID NO: 7544 - DNA, 786 bp, Homo sapiens
aataatttttctattgaaatattattgttagtttgagaaaagtttccaaaaaagttaaactgctccacatgtacgttttaacattttacatacacacacacagcagggttaaacaatttcagaatgtttttcttgtcccattgatagtgtgtgtatttaatctttttttcacctaatgttacagcattgttatgccataggatagttcccttcatgaatttatctgaaataatttttctccctccttgaatcagaaaaaggcagtatcattgccttcttgctgcagtgattattcagacattttgccatttttccagatactgtygtggtaggtaccccttatctttaacatttctttctgagggccatataaggaagggctcaagccaagtgcgaaggagactatcaacctgtggtgcacagctaacatatccagatagaactacaggcttggcagcgggcagaaagctggcagagggaacggagaggacacctgctccctgagtgatgtttgttccctaatgagaacagaagaatggctacatgtcctaattttgacattctgagtgtccatgataagatgatagtcaagcttttggaaagataaaacttaaatattttatcttcaaatatatgtgcaatatgtttctaaatgaaataaataatgcaaatatcaggaattaacttaaaattaagctatttgtaggatttattttaagaaaaaatatacctttgtctgattgatatagactattaattgacttggtttaaaatactactgtccct

SEQ ID NO: 7545 - DNA, 786 bp, Homo sapiens
aataatttttctattgaaatattattgttagtttgagaaaagtttccaaaaaagttaaactgctccacatgtacgttttaacattttacatacacacacacagcagggttaaacaatttcagaatgtttttcttgtcccattgatagtgtgtgtatttaatctttttttcacctaatgttacagcattgttatgccataggatagttcccttcatgaatttatctgaaataatttttctccctccttgaatcagaaaaaggcagtatcattgccttcttgctgcagtgattattcagacattttgccatttttccagatactgtcgtggtaggtaccccttatctttaacatttctttctgagggccatataaggaagggctcwagccaagtgcgaaggagactatcaacctgtggtgcacagctaacatatccagatagaactacaggcttggcagcgggcagaaagctggcagagggaacggagaggacacctgctccctgagtgatgtttgttccctaatgagaacagaagaatggctacatgtcctaattttgacattctgagtgtccatgataagatgatagtcaagcttttggaaagataaaacttaaatattttatcttcaaatatatgtgcaatatgtttctaaatgaaataaataatgcaaatatcaggaattaacttaaaattaagctatttgtaggatttattttaagaaaaaatatacctttgtctgattgatatagactattaattgacttggtttaaaatactactgtccct

SEQ ID NO: 7546 - DNA, 606 bp, Homo sapiens
tggtttaattggctgatgtgtggcccgatcattaaaattttttaaaactcccsaagtatttctcttgtatacctaagggtacacaccactggaaaagctcatctatatatgtctaggctattttaaggactcagttttccagcaggtaggtaatgtgtttgagttgatgtacccaacagaagcgtgcacctcagtaagctccactatgaagactagcctcttcagacctcacctctgggaaatgctctttagagtgacgaacttgtggcatttgtttcataaatgatgacatttagaaacaatattgacaatatattatttaaaattttatattaattaaatcactataatgcactagtctagaatttgctttttcacttgtttctaaatttcattcatgctactacgtatttaattttttgtcatttttaaatagtataatttcataatacaacatattttattttgctttggatatatattttgtaatttttggtttgttattacaaatattgccatgattaacatttttgtatgtatcttgtagctcttgggtgtatatcaaaaagtttaattcctggcttgtaaggcatgtatagaatcacc

SEQ ID NO: 7547 - DNA, 606 bp, Homo sapiens
tggtttaattggctgatgtgtggcccgatcattaaaattttttaaaactcccgaagtatttctcttgtatacctaagggtacacaccactggaaaagctcatctatatatgtctaggctattttaaggactcagttttccagcaggtaggtaatgtgtttgagttgatgtacccaacagaagcgtgcacctcagtaagctccactatgaagactagcctcttcagacctcacctctgggaaatgctctttagagtgacgaacttgtggcatttgtttcataaatgatgacatttagaaacaatattgacaatatattatttaaaattttatattaattaaatcactataatgcactagtctagaatttgctttttcacttgtttctaaatttcattcatgctactaygtatttaattttttgtcatttttaaatagtataatttcataatacaacatattttattttgctttggatatatattttgtaatttttggtttgttattacaaatattgccatgattaacatttttgtatgtatcttgtagctcttgggtgtatatcaaaaagtttaattcctggcttgtaaggcatgtatagaatcacc

SEQ ID NO: 7548 - DNA, 657 bp, Homo sapiens
tcttggcccaaacacttcccaccaggtcccacctccaacactggggattacatttcaacatgagatttggaagggacaracattcaaactgtatcactatgtctagtcaatcaatccaacatcccattcctggaaacatttgggagaaattgcagctgcaaggaggatgttgtacaaatggggatgaagctgaataaatactgtattgtgactattactaatgctagctattctgctttatacaccaggcacccagggctattgaagccttggaagcccctgttccatatttgcgccactcagcctgtcctcagtcattctatgtacagccatttatttccatagagctcctttaagatggaaagatgaaactgttaagtcgaaccatatgatttccaagaatcagcagtacataataggcttttccatttagtattactgcttccctctaacattttcatgttcacaactgtgattggttcatattgaaatttaaggagaatgaagaatcagcaaattcaaatagacaaataaatccagatcatctaaattcaaattgtattttgggtcatctgtgaaatgtctttgacttgtttttgtttctacggctgtaaaatggataatctacaatcaactctgtaattttaaggaatataa

SEQ ID NO: 7549 - DNA, 657 bp, Homo sapiens
tcttggcccaaacacttcccaccaggtcccacctccaacactggggattacatttcaacatgagatttggaagggacagacattcaaactgtatcactatgtctagtcaatcaatccaacatcccattcctggaaacatttgggagaaattgcagctgcaaggaggatgttgtacaaatggggatgaagctgaataaatactgtattgtgactattactaatgctagctattctgctttatacaccaggcacccagggctrttgaagccttggaagcccctgttccatatttgcgccactcagcctgtcctcagtcattctatgtacagccatttatttccatagagctcctttaagatggaaagatgaaactgttaagtcgaaccatatgatttccaagaatcagcagtacataataggcttttccatttagtattactgcttccctctaacattttcatgttcacaactgtgattggttcatattgaaatttaaggagaatgaagaatcagcaaattcaaatagacaaataaatccagatcatctaaattcaaattgtattttgggtcatctgtgaaatgtctttgacttgtttttgtttctacggctgtaaaatggataatctacaatcaactctgtaattttaaggaatataa

SEQ ID NO: 7550 - DNA, 657 bp, Homo sapiens
tcttggcccaaacacttcccaccaggtcccacctccaacactggggattacatttcaacatgagatttggaagggacagacattcaaactgtatcactatgtctagtcaatcaatccaacatcccattcctggaaacatttgggagaaattgcagctgcaaggaggatgttgtacaaatggggatgaagctgaataaatactgtattgtgactattactaatgctagctattctgctttatacaccaggcacccagggctattgaagccttggaagcccctgttccatatttgcgccactcagcctgtcctcagtcattcwatgtacagccatttatttccatagagctcctttaagatggaaagatgaaactgttaagtcgaaccatatgatttccaagaatcagcagtacataataggcttttccatttagtattactgcttccctctaacattttcatgttcacaactgtgattggttcatattgaaatttaaggagaatgaagaatcagcaaattcaaatagacaaataaatccagatcatctaaattcaaattgtattttgggtcatctgtgaaatgtctttgacttgtttttgtttctacggctgtaaaatggataatctacaatcaactctgtaattttaaggaatataa

SEQ ID NO: 7551 - DNA, 657 bp, Homo sapiens
tcttggcccaaacacttcccaccaggtcccacctccaacactggggattacatttcaacatgagatttggaagggacagacattcaaactgtatcactatgtctagtcaatcaatccaacatcccattcctggaaacatttgggagaaattgcagctgcaaggaggatgttgtacaaatggggatgaagctgaataaatactgtattgtgactattactaatgctagctattctgctttatacaccaggcacccagggctattgaagccttggaagcccctgttccatatttgcgccactcagcctgtcctcagtcattctatgtacagccatttatttccatagagctcctttaagatggaaagatgaaactgttaagtygaaccatatgatttccaagaatcagcagtacataataggcttttccatttagtattactgcttccctctaacattttcatgttcacaactgtgattggttcatattgaaatttaaggagaatgaagaatcagcaaattcaaatagacaaataaatccagatcatctaaattcaaattgtattttgggtcatctgtgaaatgtctttgacttgtttttgtttctacggctgtaaaatggataatctacaatcaactctgtaattttaaggaatataa

SEQ ID NO: 7552 - DNA, 667 bp, Homo sapiens
acatgagggtaaatgggttgaaagtgtaagtttaaaagagtttcaaatgagtttgtgaatggatatcatacccttccacaaatgacagagatggactattaaatcagagttggtagtttttgcttttgtttactgtgtttctcattcaccctaaatggtcctatctataacaagctttggaaaagcaccatgcacctgaaattcttgcattctgatgttcatacctagagagatttatggtgacataagcagccaaatagcacaagtgaaattttatatgaagtatatgacatgcatgattcaatatatatgcccacttttaaatataccaatagtatatttggactataataatgaattcatttcaaatattgtcattttgcttgacattcgtatcatcacataagctagattcccgttatataaagatgcacaaaggctcatttcagaaataaaaacaaataactgttattattttttacaaaggtgaaggacaataaaaattgactaaaatcctgaaaaaacaattcagagtgcttcagttgggccctaaactcaatgcgcaatcttgacacatatattgarttataattatttactacattatatttattttgtaactgtcgtcagttttttatgtatggatctattaatttcaatgaaattt

SEQ ID NO: 7553 - DNA, 782 bp, Homo sapiens
aatgagacaacatgaaaaagtactttggaggaattttttcttggcaattactcttgatagcactgaaagcaatgtaaagctttccacccagagaaaatagcaaaactgcggcaaatgctttcattgaagaattgattcagcatttaatgaatatctacggcgactgtaggcaatgcttgattctatgaaaacagggatggataagtaagtgcacacgcctttggagggtggcaccattttgtaacacagtcagactgtgaacgaggaagtagcatcccaagttgaccatatttggtagttgtgcttctttgggcgaactactgaactgcttagaacttcagcttccccggctataaatggagaagatcaggactctccttatagattttgtgagaatccaacgcgatgatacagaaaagtacttagtagagtgcctggcccatagtgagcactcartaaacactaccattctcattcttcacattatgataataaagtggtctcagtgctatcacaggtacacatggagttctgtggaaatgtggggctgcgtgccattggcttctctatgcgagggactggtggggagaacatgggttccccaacctccaatttctttccatctatagggttgttctgtagagcagggcgcccacacccaggctgcacacttgagtcacctggggagccccacccaattaaatcccaatctcttggataggacccaggagttaatatttgcaaaaaccttcacaagtgatctaatgtgctgctgaggtcat

SEQ ID NO: 7554 - DNA, 761 bp, Homo sapiens
cagctccaactggggaggggaagaggagggtcattcctagctgaagtttgaagggtgccaatcacgggcctctcttccagccaggttaagaagcagtgggcagaaatgcaggagagtgggcactaaacagaagccagcatgcaaagacccagggaagaactcacttgtcatgggaaagagcaagtgccaaggtcatgaggtggcatggagctgggcgtaatacaggaagcggaaggccttgggggctgaacttgggtgaagccagggcagagcggacgtgacggaagctggtgtggacacccagcagggccttgcaggctttggagggcttccagaggcccctcagaggttataggcaggggagcaaatggaaactgtaccatcgcccagcaagttctggcagacaggcctccagggctataaggcaggttgggaagcattgtgtggtaggccgatcctctcagccccctgagcgcctggcccaccaatgcttgctcctggtggagtggccccttctaaggaatccttctttgggcaccttgtggtgctgatgggcactggggctcggcggcaacaagccccaactgctaacttgagaatgaagagcaaatatttgactttttttcacccttttctccctcctctgctgtcattttatacagccctgtttagactggatgctggttaatrggcgacctttgccctttggctaaaagctgtgaccaggaaatcccacctcccattaatgcgggttttgttca

SEQ ID NO: 7555 - DNA, 477 bp, Homo sapiens
ctactcaaaaagtgagctccctggttcagtcctgcattcctaatttccttcactcaagtttcttggaagctcctgccaggctaactcagtaactcagtgtgaagaagagccagccaataaaacagaggtgtccatggaatactatgaagccataaaaaggaacaagatcatgtcccttgcagggacatagatagagttggaagtcattatcctcagcatactaatgcaggaacaggaaaccaaataccatatgttctcacttataagtgggagctgactgatgagaacacatggacacaccatggggaacaacactcactgtttgggggatagcagcaggaagaatagctaatggatgctgagcttmatacctgggctatgggatgatctgtacagtaaaccaccatggcatgcttttacttatgtagcaaacctgcacatcctgcacatggtaccactgaacttaaaagttggggg

SEQ ID NO: 7556 - DNA, 783 bp, Homo sapiens
ccactcattaatgaccaaaatcaaagatacttcccagatgtttgagacacattcagaattaatacataaatccaaagtcattatgtgaaggaaacactctactattctgtggaaagctaagtattgttatgatttcaaaacaatgagagtaccagtttggttttcctactgatgggcatcttaccatatttttccaggcatttcccccaagcatatgcttttcatttgcatcagaagttctcccattgacatgatcatgtccagtgttcactccagctggttttaaacaacgaacccactgactaactgcatgaataacgtttcactcaggcagaatgacaatttcctttttcttttccctttgctttgtgacttaaggagggaaacagtgatatacagcttgtgttcccagtgatttgaaattgaagcacataacagagagaagctaggtatgayaacagagacaaagggtctgtaaagcataaagggatcaaaggaaaatgtcagtgaaaaatagattgaaaatgagaagagagaagtgggcagaagaggctataaaggagagaggagcaccctatctatagtagaggagggtggaacgtggggtcagagggtggtacgctgaggatattgagtgatctaagagaggctgagggtaacaggccgttattttattttaatagtccatcgaacaaatcgttcattgaattagacttgccaaatgaacaccatatatcatattgtaaggaggaagaaaatgaatgtatttaaaagaagattgga

SEQ ID NO: 7557 - DNA, 783 bp, Homo sapiens
ccactcattaatgaccaaaatcaaagatacttcccagatgtttgagacacattcagaattaatacataaatccaaagtcattatgtgaaggaaacactctactattctgtggaaagctaagtattgttatgatttcaaaacaatgagagtaccagtttggttttcctactgatgggcatcttaccatatttttccaggcatttcccccaagcatatgcttttcatttgcatcagaagttctcccattgacatgatcatgtccagtgttcactccagctggttttaaacaacgaacccactgactaactgcatgaataacgtttcactcaggcagaatgacaatttcctttttcttttccctttgctttgtgacttaaggagggaaacagtgatatacagcttgtgttcccagtgatttgaaattgaagcacataacagagagaagctaggtatgacaacagagacaaagggtctgtaaagcataaagggatcaaaggaaaatgtcagtgaaaaatagattgaaaatgaraagagagaagtgggcagaagaggctataaaggagagaggagcaccctatctatagtagaggagggtggaacgtggggtcagagggtggtacgctgaggatattgagtgatctaagagaggctgagggtaacaggccgttattttattttaatagtccatcgaacaaatcgttcattgaattagacttgccaaatgaacaccatatatcatattgtaaggaggaagaaaatgaatgtatttaaaagaagattgga

SEQ ID NO: 7558 - DNA, 783 bp, Homo sapiens
ccactcattaatgaccaaaatcaaagatacttcccagatgtttgagacacattcagaattaatacataaatccaaagtcattatgtgaaggaaacactctactattctgtggaaagctaagtattgttatgatttcaaaacaatgagagtaccagtttggttttcctactgatgggcatcttaccatatttttccaggcatttcccccaagcatatgcttttcatttgcatcagaagttctcccattgacatgatcatgtccagtgttcactccagctggttttaaacaacgaacccactgactaactgcatgaataacgtttcactcaggcagaatgacaatttcctttttcttttccctttgctttgtgacttaaggagggaaacagtgatatacagcttgtgttcccagtgatttgaaattgaagcacataacagagagaagctaggtatgacaacagagacaaagggtctgtaaagcataaagggatcaaaggaaaatgtcagtgaaaaatagattgaaaatgagaagagagaagtgggcagaagaggctataaaggagagaggagcaccctatctatagtagaggagggtggaacgtggggtcagagggtggtacgctgaggayattgagtgatctaagagaggctgagggtaacaggccgttattttattttaatagtccatcgaacaaatcgttcattgaattagacttgccaaatgaacaccatatatcatattgtaaggaggaagaaaatgaatgtatttaaaagaagattgga

SEQ ID NO: 7559 - DNA, 783 bp, Homo sapiens
ccactcattaatgaccaaaatcaaagatacttcccagatgtttgagacacattcagaattaatacataaatccaaagtcattatgtgaaggaaacactctactattctgtggaaagctaagtattgttatgatttcaaaacaatgagagtaccagtttggttttcctactgatgggcatcttaccatatttttccaggcatttcccccaagcatatgcttttcatttgcatcagaagttctcccattgacatgatcatgtccagtgttcactccagctggttttaaacaacgaacccactgactaactgcatgaataacgtttcactcaggcagaatgacaatttcctttttcttttccctttgctttgtgacttaaggagggaaacagtgatatacagcttgtgttcccagtgatttgaaattgaagcacataacagagagaagctaggtatgacaacagagacaaagggtctgtaaagcataaagggatcaaaggaaaatgtcagtgaaaaatagattgaaaatgagaagagagaagtgggcagaagaggctataaaggagagaggagcaccctatctatagtagaggagggtggaacgtggggtcagagggtggtacgctgaggatattgagtgatctaagagaggctgagggtaacaggccgttattttattttaatagtccatcgaacaaatcgttcattgaattagacttgccaaatgaacaccatatatcatattgtaakgaggaagaaaatgaatgtatttaaaagaagattgga

SEQ ID NO: 7560 - DNA, 603 bp, Homo sapiens
atggggaccctggctcctgcaagaattaagacttgcggcgtctcacggaacttgggaacaaggacgacccccagaatcccccttgccattcccatccctgtatggtccttcctctagggctrtttgggaatagtacttatggtctaactggttctgcagctgcccttcgtgtggttataaatcagtttgccaggaaaaagaaaacccagctctgcagcgtttgagccacaacttgtacgcgggcccctgttacttctagttcttagcctgaattccccagcttgttttggtttctaaatgtctgtgtttcaggacctgaaagagtgtcttgcaaaggtctctgaaggagaccaatattggaagtcagaattaactgatttttaatgttacaaaaggcaaattgcacctatcgattctttgttgatttttaaaaatacgtggtcaaaattaaagggaataaaaacttcttttccttcatcaaaagtactttctaatgaaacctgtcacgcggtgcccgtgtgaagagaccaccgaacaagctttgtgtgagcaataaagctttttaatcacctgggtgcaggtggactgagtctaaaaacggag

SEQ ID NO: 7561 - DNA, 806 bp, Homo sapiens
tacctccaacaacagtcatgggattcaaggacaccaggacacctcccccgtgaaaaccagggcaatgaattcaaacaaagcacattaactaaatctaaatctaaatcgatggcattttgtcccataaacactcagcctgaaagtctctccctcagcttgctgtttgtttttttgttttgttttgttttttggagatgggatatcgctctgtcgcccaagccgcagtgcagtggcgcaatctcagctcactgcaacctctgcctactgggtttaagtcattctcctgcctcagcctcctgagtagttgggattacaggcacccaccatcatgcccagctaatttttgtattttcagtagagacggggtttcgccatgatggccaggctggtctcaaactcctgacctcaggtgatccacctgcctcagcctcccaaagtgctgggattgcaggtgtgagccaccgcacccggcctcagcttgctgtttaaacatggtctcatgcagagccatctgcctgtgagctggacagccacacggtccagggttccagccctccaggctcatctcccaaaaataccctcgggtgtttgtcccagctagtgagtcaggactgaacctgataccagggarcagtgttgctgctgtcagggcatctctcgccagtttcattattcactgctcccactcgcacgacggacccacgtccgccgtccgttccagacataagccaacgctcgctctggcgttctcagaaaccgttccggtaacagaaaaagctttttaacttcccgtgagatccacgagg

SEQ ID NO: 7562 - DNA, 806 bp, Homo sapiens
tacctccaacaacagtcatgggattcaaggacaccaggacacctcccccgtgaaaaccagggcaatgaattcaaacaaagcacattaactaaatctaaatctaaatcgatggcattttgtcccataaacactcagcctgaaagtctctccctcagcttgctgtttgtttttttgttttgttttgttttttggagatgggatatcgctctgtcgcccaagccgcagtgcagtggcgcaatctcagctcactgcaacctctgcctactgggtttaagtcattctcctgcctcagcctcctgagtagttgggattacaggcacccaccatcatgcccagctaatttttgtattttcagtagagacggggtttcgccatgatggccaggctggtctcaaactcctgacctcaggtgatccacctgcctcagcctcccaaagtgctgggattgcaggtgtgagccaccgcacccggcctcagcttgctgtttaaacatggtctcatgcagagccatctgcctgtgagctggacagccacacggtccagggttccagccctccaggctcatctcccaaaaataccctcgggtgtttgtcccagctagtgagtcaggactgaacctgataccagggaacagtgttgctgctgtcagggcatctctcgccagtttcattattcactgctcccactcgcacgacggacccacgtccgccgtccgttccasacataagccaacgctcgctctggcgttctcagaaaccgttccggtaacagaaaaagctttttaacttcccgtgagatccacgagg

SEQ ID NO: 7563 - DNA, 716 bp, Homo sapiens
ggatccccacagagacttccccagtcccgctwcaagacagcggaaccagctcctgagccgaaatctggagggatctcctttctggaccgtgaccccagccggggctggtaccgatgaccggcacagccagagccgtgacatccacagcacccttcccatccgatgcctggatgccgaggctgtgctcggggaggcctgcggggtccccagcccctcaggctcatgtggcacaaggtgccagagaagacagggcgccaggccggtgggagtcaaggtttcccatttttctcgtctcagtctgctacttaactgctgtgtgcccgcgagtacatccctttgcctctctggttctctggtatcagctcaatgaaggagctgaacaggatgatctcctggaatccagttcatgtgatgatcttggccatgtctcaagattcctagtcctaaaccttaaaccctgagcaccctgggagagtctgtcacagggctgcacctgggccaatgccagccattcagtggacacgggagcagggggtttagtgggaacacagggcttcttgacccctgtcctgaagcagccccggcggggagccattatcacctccttcccccatgccccagttggttcctctggcctgtgagtattgccggagcaccttccacgtgccaggcctgcaggaactagggacacagaggcgcccgagacagacgagacc

SEQ ID NO: 7564 - DNA, 890 bp, Homo sapiens
taaacttttactagaagttttgtactcactgcagcaatcacagataagaaaaaggaaaaaaactttacttaaaatacaaatgctcagaaattacaaattttatattttgtacatatttttgctaaaacaagaccatagtatgtttgtgtatgtataatttaactaattttttctccttgctagctataacaaaatacatctttgcacatcaacgtacttctgtatctactgccaccttcagtggtcacatattattccatcctatggatgcaactgaaatttatttataggatccattctatgggttctctttaaagtaagtactgtgaaaaataaagtgcatgtatctttatttcctaagggtattttagtataatggaattggtgggtaaagggcatacacattttttaaatgtagtacttaccattttcaaatgagtactttgaaaagtaatcagcaactttaagcagcagtataaaacatcctcacaaatattgtggatagaaaactgtttcattcctcttttagtttaaattcttagaccagaaatgcgaaggattttttcctatgtagataagtaacttgtagatctggaaaaaggtactttgcccacttttagagtgtttgatgatttgatttgaaagaattycctgtaaaatgaagaggtacttttcatctaatgtgtatatataactgatatatataacatattatatgtgttatatatgtatacatatcagtaatatatatatatcttatgatatataataaacaacataggccaggcgcggtggctcacacctgtaatcccagcgctttgggaggcggaggcgggcagatgacttgaggtcaggagttcgagaccagcctggccaacgtggtgaaacta

SEQ ID NO: 7565 - DNA, 890 bp, Homo sapiens
taaacttttactagaagttttgtactcactgcagcaatcacagataagaaaaaggaaaaaaactttacttaaaatacaaatgctcagaaattacaaattttatattttgtacatatttttgctaaaacaagaccatagtatgtttgtgtatgtataatttaactaattttttctccttgctagctataacaaaatacatctttgcacatcaacgtacttctgtatctactgccaccttcagtggtcacatattattccatcctatggatgcaactgaaatttatttataggatccattctatgggttctctttaaagtaagtactgtgaaaaataaagtgcatgtatctttatttcctaagggtattttagtataatggaattggtgggtaaagggcatacacattttttaaatgtagtacttaccattttcaaatgagtactttgaaaagtaatcagcaactttaagcagcagtataaaacatcctcacaaatattgtggatagaaaactgtttcattcctcttttagtttaaattcttagaccagaaatgcgaaggattttttcctatgtagataagtaacttgtagatctggaaaaaggtactttgcccacttttagagtgtttgatgatttgatttgaaagaatttcctgtaaaatgaagaggtacttttcatctaatgtgtatatataactgatatatataacatattatatgtrttatatatgtatacatatcagtaatatatatatatcttatgatatataataaacaacataggccaggcgcggtggctcacacctgtaatcccagcgctttgggaggcggaggcgggcagatgacttgaggtcaggagttcgagaccagcctggccaacgtggtgaaacta

SEQ ID NO: 7566 - DNA, 657 bp, Homo sapiens
ctttcaacttggccaagacaggcaaccaagcacactgtcagaaggccagcccacccggaggggtccacagacttgacggctgctctgaaggagccaccggctgctggcatggagtctaacagagaggccccgggcagtctgacccactggacccagggcgagccctagataaggagccttgccagtagaagtgctggctctctccgccattcccaggagctgtctccctgaagaactttcccctgggcggggcagatctgtgggagtcaggagaggctcctagagtgttgtccagattggcaacactcagggcaaagggccctagtgcggaggagctcgagcaccctgacctttgccccctcatctctttccagcccctcccctgcctcgtccatccctgccagccagcccctagcctcgggccccctttgcctcctgaagagaccagcctgtccctcagtcaccacctggtcaagctcccccatctcagccagaatggatggctgctcaggccccacacaggccccactccattggacagggccagcccttgtaccrcgttccacagcactagctccccatggcaccacttcctgtcccctggccacaaactgtccctagaagataccagcggggtcccagagtacagtctcagtg

SEQ ID NO: 7567 - DNA, 809 bp, Homo sapiens
aactgagaaactgagtattgcagcacccagctgtccttggattaccttttccttcctccctttccgaattcacataacatttagatggggtgttatttgttttccaacttcactagcatataactatgtgcatcagcctatattgttaatttccagtgaagaaggaaaagtgacctgcagtccgggcgaggtggctcacacccgaaatctcagcactttgggaggtcaaggcgggtggattgcttgagctcaggagtttgagaccagcttgggcaacatggtgaaactcctacctctattaaaaatacaaaaaattagcatggtggcatgtgcctgtggtctgagctacttgggaggctgagacaggaggatcatttgagcccaggaagtggaggttgcggtgagccaagattgcaccactgcactccagcctgggtaacagagcgagactccctctccaaaaaaaaaaaatagaaagaaagacagaaaaagaaaagtgacctgcagctaccttattaaatccttatgtacacttaggaatatttgtcacttatctgtgctgtccaagatgtgtccactgggcacttgaaatgtggctagtccaaattcagatatgtgaccaggtgcggtggctcacgcctgtaatcccagcactttgggaggccgaggtgggtggatcaccttaagtcaggagttcgagaccatcctggccaacatggtgaaaccccatctctactaaaaatacaaagattarcctggtgtggtggtgggggcttgtaatccctgccacttgggaggctgaggcagga

SEQ ID NO: 7568 - DNA, 1158 bp, Homo sapiens
aggttgtatggaaagtgcccagcagagagcatggcacctagaggtgctcagcaatgtctgtttcttccctcagcccctggtgctctttctgtccctcccctggtcccatcatctgtccctgcatccaatgtcttaccctcccctgacagagcttcagtttcctttgggaatagagcccttggctggcaggtcattcctggattaaacttggagcctccaagctttatgaagtccaagtgtgctattttaaaccaattgtggacttttgtgtggygcttccgctgaatggaaagataattgtaccagagcttgtcgagaagagtacatggacgagtcatggagcttacattctgtcccattgattttttttttccttcttttggaggacttactagctgccatctgctccttgaacatcgtgttcataaatatataaataatcgaagttgatgaggaggtttgcttaaagaagtgttgctgagagtgatttttataaatatttaagataatctgaaatcattaaaggaattgcggggtttattaaaaaactgaagacgtgttttggaaaggatccttttctttacaagctgaataaatgtcaagagtagagaaatgagggaagagagctttctgaacgtggacatgggatccgtgtgggtgagtgggcagccagtctgtctgactctgccaggcctcagcgttctttttttttttaattatttttatttttatttttagttttgagatggagtctcgctctgtcgcccaggctggagtgcagtggtgcgatctcggctcactgcaagctccgcctcccggattcatgccattcttctgcctcagcctcccgagtagctgggactacaggcacccgccaccatgcctggctaattgctttctttcttttttttttgcatttttagtagagatggggttttaccgtgtttgctaggatggtctcaatctgctgaccttgtgatccgcccgcctcggcctcccaacgtgctgggattacaggcgtgagccaccatgcccagcctaatttttattttttgagatggagtcttgctttgttgcccacgttacagtgcaatggcatgatctcagctcaccgcaacctctgcctcccgggttcaagcgattctcctgccccagcct

SEQ ID NO: 7569 - DNA, 839 bp, Homo sapiens
tttgggatatagtactgtaaatttatctaaagatggacactggaaggtagaaggagatatattagtgttggtttgggtacatgtctaggtactgaatttggatcatcataagtccttacagaagatacttgttgacttgtcttttaaaaaatatgtgaaagtgattttttaatatatttacaaagtgatctaagtgatttaaggaattcattcatgaagtggatatgactagttcttgtttagtattcacaatgactgtaaaatagaaatgctgattttccttgcccagattgtagaacacagatcaaaccctcctagtccttcccttaaatgttttttctccatacagcttatgccctgagttctcaaaacattttttatattgaactggactgkatagtatatgcctgaccctgattcatgggattatgctgcaagggaatataaagatgaatattgatagcctgagtgtgaaaattcatcattactctcatcctcattcattaattcatttgttcattaactcataaacacactaattgattcaacagatatttattgaacgtttacactttgcccagtggagcactggactaggtgctagcatagtataataagcaacccagaaatagcctctgccttgctgcatttcatagtctacgacggagaaaggcattaaccaagtataatttaaaattgttttaagtaatgtgaaataaacatatatgagaacttgactcaggttggtatatttgatggttagggaaagcttcaaaaatgggatatttgagatctaagtaagagggaaaagaaagagcataatgggtagagaaaaaata

SEQ ID NO: 7570 - DNA, 1618 bp, Homo sapiens
caagtctcacaggtgacgatgatgatgaatatgaaagtgatggatgacaacaataaatagcattgttcggcactcaaaccctatgtgtgttaactcatggaataacccaacttcccaccccttcagtcctattttcctgtctcaagacccacctcttcctcatgactgacacctggggcggcctcttcctccacgctggctgtctattggaatctcctgggtagcttattaaaaatacgcctgttagggccaggtgcggtgacttatgcctataatcccagcactttggaaggccgaggtgggtggatcacaagttcaggaggtcgagatcatcctggccaacatggtgaaaccctgtctttactaaaaatacaaaaaattagctgggcgtggtggcacgtgcctgtagtcccagctattggggagcctgaggtaggagaatcacttgaaccagagagtcagaggttgcagtgagccgaaattgcaccactgcactctagcctggtgatagagtgagactttgtcttaaaaaaaaaaaaaaaaaagcctgttacggggctcacacctataatcctagcactttgggaggattgcttgaggccagaagtttgagactagcctgggtaacatagggagacccctgtctctataaaataataataataataataataataataataataataatactagctgggcatggtggcaggtacccatagcctacttgggaggctgaggcaagaagattgcttgagcccaggaggtcgaggctgcagtgagctgtgattgtgccactgcactccagcctgggtgacaaaccaagaccccgtctcaaaaaaaaaaaaaaaaaaaaaaagtctgtctaggccccaatcccaatcccagaggctctgaacctattggcgtggggcagggcctgatttttaaaaatccccagatgattctggagtgtagcctgggttaagttctctgcgctcaatggggcctgtgatgtatgttgatgatgccctgcggctggttctcaagccgagcggccagccatgtgcttttctccatggagctcaagatgagcttggatgcagagttgccagaggggccagcatagatgaagccccagctcctggagtgtgtatgtgctgtgtgtgtgctgtgggaggtatgcttggcagaagggaggctggggtgaggacattgactgcagcgcctcatctgggagtagttctggggatggggagtggaaccgcagtcccccatagagcaggacttggcctggctctgccatcaagccggtaaacccggggagagaatagggtctggggtccaagaagccaacaactaggtagaacccaaggactgctctgcatcgtgctgctcggcatagtgtctagaggatgtgggggcagagcctccagctgtgggcaccggtacagaggtggtttcagaagcaggtctagctggcactcccctcaagcattcagagggctttcctcctccaactttcccacccaatccatgtccttctcattcttcaaaccatgtcagatagcaccttttccaggaagtcttcccygatgagccccatctgactccgacaactccacttaacaccaaatat

SEQ ID NO: 7571 - DNA, 733 bp, Homo sapiens
cacaacttggcaaatttctcaaccactgggcctcagtttctccctctgtaaaatgggactatcagtccttgctccagaagatggaagtgaaaartaggagattctgagtgcctggtagatagaaggtattcagccaatagtggtggaaataaaataacttgctgccagaattctgggaagcaggaagcacagatactgaccaccagtatttatttttagggttgcgggagcctacgaaggagaggggctgagccttataaaaacttgggcacataatctgtctaatcactttgaagatgaaaagttgctgtgaaatgccaaccgagctgatgggaccagggctggagcagagatgaagagacacagcagggccaattgtgcaaaaataaaatgcatattttttaattgcttgagttcacatctcataaaagaaaaaataataaagcgcaagcccttgcatttccctacccccctctctcggctgtgagtcaagaaccagttcccaccagtctttctggggttcaaagcgtctccccgccctaatcctcacctcgacctccccgccccccacatctattgtgggtgagagggcctttccctgagctgctcgcaggctgcccctcccaggcccggcctctgcccgctgcagcgggcagcacacagagtgggcaggcctcataggaggcggggagggggctggagagacaggatgccctccctcctcccctgccag

SEQ ID NO: 7572 - DNA, 603 bp, Homo sapiens
agttcatcagtcttttycttcgtggctggtgatttttgtagctagcttaagaaatcttggtcaaatctactgttaggtatattttctcttaccttcttgatgcttttattgtttttcctttcatgttgctatctttaattgcttcactttttttcatatagatgtgttataccagttattgaaatgaccatcaatttctgccttgcttctgtgttacctttgttgtacataaatcaagggtttgtgttcattttagattctctgctctgcctcaatggtcttttatccttgtccacaatactgaaatgtcttcaatactttcagccttataaaaagtcataatttctggagggtaagtgatatttttttaaaaaaatggtcatcaaaattttcttgactattgttggcactttgcattcccatagaagttttaaaatcaatgtgtcgggttcttcccttctccccacccagtaaactggcttgcattttgattggaattattaagtctttcaatcaatttggagagatttgggaagttaataccttgtaatccatgaacttcttagattccttcattttattttagattttccttaatttccc

SEQ ID NO: 7573 - DNA, 780 bp, Homo sapiens
tgggggaggcggccataagctttggagtcagaggagaatctggatactagttctgacagtaacctgctaygtaactttaggcaagtcacctcacttctctaagcctcaattgcctcacctgtgggaaggaaggggtaatgcttaccttttgagattaccaaaaattaaatgagatatatatttaaagtgtcgcctgcctagtaccaggcgagggctcagtatacgctagcttttcttacaattcagagatacccatagttaaaagttgatttcagaagtgtttttgtttatgtataagattggtaaaaggacgtttttctttgccctatatcatgaacctgtcccaagcgtctgcactgcacaggttggtgggtaagagcctgcactgcagagttcatcagcctaagcccaaaccctggctttagcaattactagcagcataatcttaggcaagttctccgagttgggtactttttgcttgtttgtttgtttttgctcacatggggataatgactatagctacatcacataaagtggctatgaagattcaagaaggtaatgcacacagaacacgtagcagatgcacgggactctgcaagttctcactgagcgctactaactagagagcacaggaaggcccgcaggtactgcgcacagagccagtctccaagaagcaacatcatgtggccctcgtcctgatgtggctacagaaacagaaaggaaggggacatcagagcaacgtgcacaggcaaaactgggtaatgaaggaggttgggggat

SEQ ID NO: 7574 - DNA, 619 bp, Homo sapiens
agggcatgaaagtttcaagaaaaacagtaatgtttactgagcctaatcatggcttttatcttttactgcatattcagaagcaaattaggggcaatgtcacaaagatacatggcagccctgaagataagtaacagtttccgtctacagatgccaaattaaggtcagacaaaaaataaaggggaagcaaccaaatatgaacataatctctgttcactccaaaaacataaaagtattctcagaccactaaacctccccaaggataaaactggttaggagtgattttccaactggaagagaaggaaaaatgcatttgctgctgtctgttagagcaaatttctttcttcccatgtaacaaagtccagtgttaagagctaaaaattaaactgtagtgaatacgagaggaagaaacagtggcaaccctggaaatgaccttgtagtactcagcattaaaggaaatcctgtggaaaacgaggtcctgatgatctctgagagccccagggagaggrgtgttgggctaacatggggtgccagcacattgcaaagctcagtgactcacagatgtggaagtgggagcagtaactacatccgctggaaggaagaaaacaaatcagggctttca

SEQ ID NO: 7575 - DNA, 840 bp, Homo sapiens
tggatccacttccatagacagyctaacagaatgggaagagtcccagaatgaggaaagacactcacttaagtcctggctgtgccagctcagtttctgcatctgctaaataaaagcttggaggacacagtcaaggtctcttccagccctaatactacaggactctgcttcctcctcctaagagtctcattcattgaaacactcatgcaaagagccacgagaagatgaacaataagcactcagaccctggataatcacaaagcatgtcatcatcaaatctacatcaaatactaaagaaaaactgtcacaattttgtgactacacctatagatcagctatctaagaataaaccaattggtgaatcttccaaagttcttccagaagaaaatgtcatgctctaccctacacattaggccattcttgcactgctataaagaaatacctgaggctgggcacggtggctcacgcctgtaatcccaacactatgagagcccaaggcaggtggatcacctgaggtcaggagttccagaccagcctagccaacatggtgaaacccagtctctacttaaaaatacaaaaattagccgggcatggtggcaggtgcctgtaatcccagctactcaggaggctgaggcagaagaatcacttgaacccaggaggcagaggttgcagtgagccgagatcacaccattgcactccagcagcctgagcaacagaacaagaccttgtccccccaaaaaagaaatacctgagactgagtaatttattttttaaaaaaagaggtttaattggctcacagttctgcaggctgtataggaagcatagtggcatctgcttctgggg

SEQ ID NO: 7576 - DNA, 840 bp, Homo sapiens
tggatccacttccatagacagtctaacagaatgggaagagtcccagaatgaggaaagacactcacttaagtcctggctgtgccagctcagtttctgyatctgctaaataaaagcttggaggacacagtcaaggtctcttccagccctaatactacaggactctgcttcctcctcctaagagtctcattcattgaaacactcatgcaaagagccacgagaagatgaacaataagcactcagaccctggataatcacaaagcatgtcatcatcaaatctacatcaaatactaaagaaaaactgtcacaattttgtgactacacctatagatcagctatctaagaataaaccaattggtgaatcttccaaagttcttccagaagaaaatgtcatgctctaccctacacattaggccattcttgcactgctataaagaaatacctgaggctgggcacggtggctcacgcctgtaatcccaacactatgagagcccaaggcaggtggatcacctgaggtcaggagttccagaccagcctagccaacatggtgaaacccagtctctacttaaaaatacaaaaattagccgggcatggtggcaggtgcctgtaatcccagctactcaggaggctgaggcagaagaatcacttgaacccaggaggcagaggttgcagtgagccgagatcacaccattgcactccagcagcctgagcaacagaacaagaccttgtccccccaaaaaagaaatacctgagactgagtaatttattttttaaaaaaagaggtttaattggctcacagttctgcaggctgtataggaagcatagtggcatctgcttctgggg

SEQ ID NO: 7577 - DNA, 825 bp, Homo sapiens
catgagaaatctacccccatgatccaatcaccttccaccaggccccacctctaatactggggattaccattcaacatgaaatttgggcagggacaaatatacagactatatcaccttataaaggtaatgctttccttccttctttgcttagttttggtggctaatggctctgccccacaaatcccctgcctcccaagagaactctgccaagcccatcagaccctactccttcgggcactgcccaacatcccctcctcaaagccccctctgccctttacacaaccagcacccagggctcaggagcaacaggtgacaggaaacccctcaagtaatggcagaggcccaaaaaggaaaattctggagtggttaggaactttgtctcattctttagctgtgataggttagtatctggtttagcctaggcaataataataatacactttttcatcacttactgtgtgccaagcactcactagttttatcttacataactgacayaacaatgctatgaggcagctcagccatattctctctataataccgataaggaaagtaatttaaagattttttttctctctgtacaacaggcacttttattagtggctggaatgcagttatccacaagagtgcacaaacaaaatgggagaggaggatcaggtagggctggcagctggcaagggaaatgggagatacctggctggcgggttctctctgtttgagatcctgggacagtgctatcaagtaaagagaagaagccgggggccttggggtattgcaggtgggaatggaaaaccaggtcctctgagttcaacaggtttggcaaaa

SEQ ID NO: 7578 - DNA, 816 bp, Homo sapiens
aacgagcccatctcgatcttttttcctcaacttttattgggccgctgtggcaccagaatctacgaatggcgccctctagagttgtgtaaagaagtggcgtcacctcattataaataaaaggttgcttataattgcatctatgtacatatattacatctacgtgatacattacacatttacattacctacattacatatttatattacttagatatacataatattagtcctgtgtgaacaagatacttagtactttctgtcatattataaatatataaatgtgtcaaaagcttttaaaaatggtttcattattttaatgcattgcatacagaaagatgttcacaatattctatgtatactatgattcctttttaaaaacttaagtgtataaccattggtcagaaaacaaaaagtatgtaagtatgtatgtaaaggacagacatcaaattatcctatgggtggtggatttatggtatttattctcttctctgcccttgctttctctatttttctgcagtaaacatacacagtcctcccttggtatggggggattggttccagaaacctcccctgccccagtagcaaaatccgtggatgctcaagtctcttacataaaatgatgtaatgtttacaagtaaccagcacacatcctccccatacactttaaatcatctcttgattacttataagacctaatacaaatcaatctaaatgctatagagtcgttatattgtattttgatttgcattattttttgttgttgtattgttattttttattagttttttccasaatatttttgatctgtggttggtt

SEQ ID NO: 7579 - DNA, 622 bp, Homo sapiens
gatccaggggagaagccttctttgcctctgtctagtttctagtggttgtctgcaatctttggctttcctcggcttatagctgcgttgtcccattctctgcctccatcttcgtatggctgtttctcttcccagccttctttcaaggacaccagtcattggactgagggcacacactaatctagtaacacctcatcttaaattaattacatctgcaaagaccttgtctccaaataacgtcacgtttacagttattaggggttaggacttcaacatatcctttygggggacatgatgcaacctacaacagcacttatcaaaatatgaggctgaaaaaatatgttaatcagaatgcattagctgtgttcttagcaagttcattttaaaatgtaattttaaaacagttggctaaataagtatttaattgagtcaaatgggaatggagacaattggaataagagatggtagagtcatcaaatttattggacccaccactgacccagattatagtagcactgtgcacagaaactgcattacatgagttggtggcttgggttttcaggagtagtagaaaagtttggggcccccaggagagaaagacgcctgctggaaggggatctgaaac

SEQ ID NO: 7580 - DNA, 2592 bp, Homo sapiens
gtgataagctcaagagacattttctactctaaggatgataaaatttagagggagaacaaagcaccagtatcagattagtagctaccttagcatgggagcaggctcacggaagcttctcatgacatatgtgttaacccatgggagttttaaggggaagagctccagggaaggggtaaagttgcccagggaggatcaacatgtagaaggctattttcaactggtaatgacattttttaacatttaggagcaagcatgataatcttatatgttctcactgaacattaaatctggatttatgtgaaatgactggtaaatcaagtcatgacttaattgctttgacttacattgtagcaattcaacatccccactcccactgtgagtgtatgtgtgtgagagtgtgtgcatatgtccattctggagcatgtacttatgggtgtttctcacaggacttactttgcagctgtccacagataggtcaaatgttcaaacagtgtatgttacctgacaaaattaaatgcacaagaatttagtgactttgacatttaggatttgaatttaggattttgacattttccaagcacttttgcagtatttgatctacagaacaacattaaaaagtaagcagtgtaggaagctaataacttactaattatcttcaggttattttcctcaggtgcaaatattaccactgagcaaaaaggagcaggtatgacaattgcctcttctttaaatattagaaaagtcagaagtagaaagatataataccttgacaaaacttaaaatgagtctcaatacccctgtactgcaaaaaaaaagtttatttgaacataacattttaaaataaaagatctttcatttgttgagttaaaaattcttattgcaatttttatggcaaaaatctgtaaaatattattccctaacagtgggaaagtacacaaataatggaatgaaattctcatcttaaaaaatttatttcagttgactgttttctgtggaattacagataattagattttggctttagactcactgactaaaatatatctatttaattaagcttaaactggaatccacaaagtacgtctggcattagagaaaacaatggcaagccttccaaatgagaaatagagaagaatagaaatagaaataatgcttatgttagcatgatgtacagatccaaaatgcttaaacaacttttaagaattactacctattttgaatgtacagttggccttccttatctgcaggttctatacccatggatccaactagaagaggattaaaaaaatgcattttaaaaaattgcatctgtactgaacacgtatagactttttttcttattattattccctaaacaatgcagtataacaaatatttacactgtattaggtattatgtaatctagggatgatttaaagtatacaagatcatatacatagatatatgcaaatactataggattttatatcagggatttgagcatcctctgatattggtttctgtggaaggtactggaaccaatcacacataaatactgagggataactgtactaactataatttttatactactactttttcctataatgtggtctaaaaagctctagcattcttttcatgagattaaatgtcaggaagcccaaataactgagttatttaaaaaaaatgtgccagtgtctttcaagtatawggcactgggataggtattttaaggataagaaaattctggtctcctttctaaaggatttgggagtctagtacagcagatgctacaaatgtatgtaaaagaaatctgatttaaaatgctaagttggcctctggcagggtgacatacacccataatcccagtattttgggaggctgaggcaggaggattgcgtgaagccaggagtttgagaccagcttggacaacatagcaagatactgtctctacaagaaataaagaaaaataattagccaggcatggcggtgcacatctgtagtctcagctactcaggaagctgaagcagggggatagcctgagcccaggagtttgaggttacagtgagctacgatcatgccattgcactgcaacttgggtaaaaaagcaagacctatctcaaataaataaataaataaataaataaataaataaataaataatgctaagtggttagaattacaaaaataaatacataagaatttttcagtaatatagtgaaaacttctagctgaagcatgatggcaagtttcacagagaaattttcattttataaatgaaaaattgcataaataacccaaggatgctcaataatcagtggtataaaattaggcgtattccgtttccaaaacattggcatagaggtccttgtccctgtttctcccagtaaatacaactaaaagccctggccattatatataaaacaaacacaaaactctgaaaggtgaagggaggaaagcagaccgactgatgaatctagaactcaaggaagtaaatgctgcgtaattgtttaagctttctttttgtctcatgtatctcagacttggaattgaagaagatacaacttagaaacttgtaatatatagacaagtagaagctccaacagaagcatg

SEQ ID NO: 7581 - DNA, 2743 bp, Homo sapiens
agctaccgttgttattttatgcaaatattttaagaaactaattttagtatcagatgcctagatatttgggaatcaggtaccatttagcagactttatatcactcagttcaaatactctgtaatttatagttcaaaccttagatctatattcaggaaaatatattgcccaaggagctattacaaagtttttactttggattcctcttattactcctaaattcttaaatagcagccctctttccctctcccttccttccctccttcccttcccttcccttcctttcccttttcctttccatttccctttccctttcccttttcctttccctttcccttccctcatttcttctttttttcctatgctggtcctttgattttaggttatctgaacagtatattttcacaaaaatcattacatttgtttaaagataattccaatgtgttcatcttaataaacttgaaatgattaatcatagatgttcataaccacatgcaattaacaaaaattaatctggttttcccttactgccaaataaaaattttgcttaaaaaaagtaaaaagtcatattcattgcatcatatttgaaaactggtaatcttgttccaaggttaaaactcccccctccacaaaatacttttaatgaatgcatttgttatgcggctatacaattgtttccttcctctgtagatgatagagtcataattatttctctgatgttaattaaaaataaaccctttcatttgtaaaagaatagtaactatttgaaaatcacacaaatcaattagtagtttcacatagaaaaaatatccagttatttaaataattttaactgccactaaaaagaaacaagcacctggattggaaaaagaaaggctatcattatttttgaaagcattttctcattgtctccttataaagttacaaggtcatatattatttgtagtagtatatggaattacatatttgatgaattcagaaacagaatagggatttaatatatttttaaaatttctatacaggaagcttattttaaaaaaccttagggacttttacatatgcaaatgttcactaacaaaaaaataatcaaccttctaacactttgcatggaaaaggtgagtgtgatgtgcaatatgaaactaaaagaaatctcgaaaacatcttgacctggtagagcgcagacatgatttacaggctgtgaaacacaaattgccactaaacctcctttctctttggggtctgctgacttagaacaaggattctaagccctctgcttggactctacctcctctatgccctcactccctgacttcactagcaccactctcccattccttttgctcatgttacttaaaaagatttagcartatttaagacaagactattggccatccagatttcaaaggtgagagctaacttcagctaggactggggatttggagctatcaccctccctggagagcccaagataatttcactatttccaaagaagcttaatcagtgtatacccaaggtgaatattggctggagtactttgaaaattccaggtctgataagaaataattctatggagatgcctgaacttaggctttctttcagtcaatattttctcataaatatggcagaaacagacttagaaagtttggactccctgaaaaaagaaaacctagtttgtacctcagatgttcagagagaatttgattacaaataagcgagctaatcttctggagacagtatcattgacctaacactttatttctagagatggactctgcagagggtgttgtaaatgctgacctgattcagtcaacgaacatctgataaccatctgttttatgcaaacaatgagctgaactgtagagatgaaaggactcagaaatatcttgcaggaacttaaatagtataagaaagaaaactacacaggttgcacctctttgggccactggggtaatttacagaagccaacatagtagatccactctgaaagtctttgctgaatgaatgcataagtgaatggatacaagaaggcatgatataatggtagcatagaaataaaagtcaatggttgtagaagagaaaattaggatgtaatgaattctttataggatgacaggtcaccagaaaatctctaatggtggcagaagcttttgagatgaactttatagtgtttcaatacataaagaaggaagaagcaagaggtgtttagacaaagagacaaatatgagtaaaggtacagaagaggctgggtgtggtggctcatgcctgtaatctcagcactttgaaaggccaaggcagacggattacttgaggtcaggagttcgagaccagcctggtcaacatggcaaaaccctatctcaattaaaaatacaggaaaaaaaatagctgagtggaatacttgtgcacaccggtaattccagctactcgggaggctgagacatgaaaatcacttgaacctgggaggcaaaggtttcagtgagcggagatcatgccactgcactccagcctgggtgatagagcaaccaagcaagcaagcaagcaagaaagagagacagaagtatattgtttgaattgattagagcatagagctggtggtaaggaataaggctggaaggagagatgggatcctgattgtagaagtcctgggcttaagtgttaatgaattcacgaatttggaaattattaggatggcaatgggagcgaataaatgctattgagatagagggcaaggagactagtgagggctat

SEQ ID NO: 7582 - DNA, 612 bp, Homo sapiens
ccgtgagatatcttgtcttgagtaaggagagacctggagaagatgcacccttcctcttaggggagggctgcagagcagcctagaaaggagtgtcctgaggcacttgggttctcagtcatgacaaaaagtctagtactgtgtgagtggtccagagagaaaacagactgtrgcagggacaatgatagacttggaagaaaagcatttttctctctaaacagagtataagcttctaggattctcttgccccttagaaaggagaatgtgcctcaattatgcttgaaaatgaggtgcacgcctgtaatcccagctacttgagaggctaggcaggagaatcgcttgaatcccggaggctgaggttgcagttgagcagagatcgcgcctgtgcactccaggcagcctgggcaacaagagcgaaaccgaaactcggtgtcaaatttgaatgaagaaagtggagatctgttattttatacgaatctgtgtggcagagattaggagctgaacattaagctgacatacagaaatcaaaagaagtaatatttgtcacacttctgagtttgtgaactgagatacatgaccactatgtaaaatgctaattatagtaagaggagaagg

SEQ ID NO: 7583 - DNA, 755 bp, Homo sapiens
gggaatctgctttcctgtctggtaccctggcatgcttctggcgctgggcctgtcctctgcagcgccccatcaggccgtaagctagagtcttggcccccttctgtggacactgtgggtggaaaggtgcaatgaaggcctatttcatagaactaacctgcagcaaagactctgatgcacctatgaagtgttcagaggttgcggcgaggaggcagcccaaatccatcagctgaaatcattagagccactaattgctgcctgggatgagctaagctctaaccgggacttttatgaaccagcagaattcccagggagccagggctgcggcatctcagcgtcctcctcctgcagaacaccagcagccactgtgctaatcagcctgtmctcagcctgcctgtctctttcctcccagacctcagttttgttcctagcgtcttgcagcctaattattcctggaggttgggggagggggtgcatggagaggttggactcataattatattaagagcttttgacaggaccaacctttctgtcttctatttctgtcttgttgaaattctactgtgccgcgttaatgggtgaaataaatgtgaggggaaggatccatcagccctttctggaaacaggggaggcagcgcagtgcattgttggcccagcactcgtgtccatggcaagatttatggcttgttctcttgactaataggaaactgcccagacttaaatgaggaggaaaaaaaaaatcccatgtttctcactca

SEQ ID NO: 7584 - DNA, 697 bp, Homo sapiens
ctcacaatcttttatggggaaagaacacactcatcattaaacagcaatttgtaataaaaataagacagcatatgacttctaggtaaagtgattgctttcacaaattaaaactgctggaagcttagaagaatattaaatgagcagacacactatttgaaaccaagcctcaattaacttgtacaactcatggctgtcctattagctatatgttaacatgatgtgctttttatrgatgccacatcaaatccaaactagcagatgaatgagagatgaataccatgttgctcatttatttccaggtaagatttagctgtaggtcactctttagagttcttaagtgacatttagtaaataaggaaacctgaactctgtaacaaaaacaaaagtaaatattcttctagcaaatacattatgtggaattaaaataaactcacattttaccttctacgattcagcactatggcatattctacaattacattggtcatatgcctattttcatatatgccccattgactcatcttccttatatatagatattcatgaactattcttaagctagaagatttttttatgggagagctcgtgtggtcgaagagacactagatttagatgattaacatttggagtcctgttaaggaggtaaaaatggagcaacagaagaacagataaagcgaggattaagtatgagggatcc

SEQ ID NO: 7585 - DNA, 697 bp, Homo sapiens
ctcacaatcttttatggggaaagaacacactcatcattaaacagcaatttgtaataaaaataagacagcatatgacttctaggtaaagtgattgctttcacaaattaaaactgctggaagcttagaagaatattaaatgagcagacacactatttgaaaccaagcctcaattaacttgtacaactcatggctgtcctattagctatatgttaacatgatgtgctttttatggatgccacatcaaatccaaactagcasatgaatgagagatgaataccatgttgctcatttatttccaggtaagatttagctgtaggtcactctttagagttcttaagtgacatttagtaaataaggaaacctgaactctgtaacaaaaacaaaagtaaatattcttctagcaaatacattatgtggaattaaaataaactcacattttaccttctacgattcagcactatggcatattctacaattacattggtcatatgcctattttcatatatgccccattgactcatcttccttatatatagatattcatgaactattcttaagctagaagatttttttatgggagagctcgtgtggtcgaagagacactagatttagatgattaacatttggagtcctgttaaggaggtaaaaatggagcaacagaagaacagataaagcgaggattaagtatgagggatcc

SEQ ID NO: 7586 - DNA, 679 bp, Homo sapiens
agggagaccggaatttggcattcagagtataattaatgatcaatgcctgtggaagatagggggtggaagggagaaatcaaactgccttgcaagcccaacaaagactcagtcggccccatcagggttgtcccacatggctgaaatggctggacctctctaaccccacctcagtcattcactggatgtgggctgcccccagaaagtacatggaagctctctgcagctgaggcagactctgaatgagctgacaggtagaggctttctgctgacaacactctcagcagctagggaaataaggcctttctcaagcggaaatatgggtggaatatttccatatgcatgacagggtggctgtgttccacgtatgaaaggaaaagtgaaacagatactgggtgatcagaaagacagactgtaacagagactggctatatgttcagcaatcctgttccttcttccccaagcacagagtaacattatattcttaaccttccttccagttaggctgggaccacagtactgagatttggccagttaaatacgagcaaaaggaatgtatgacatttccaggcctagccataaaatgtcttgcacatgtgtccatgctgcctctctctttcacatatgcagggcttcaactgaaggactctaagatggtgaarccacatgatggaaggagctg

SEQ ID NO: 7587 - DNA, 583 bp, Homo sapiens
agcaaaataaaccaaaaggaagtagaagcaaggaaataataaagatatgaagtaaatgaagtaaaaaagaaacatacaatagagagaataaagaaaaccaaaagttggttccttgaaaattgacaaacttctggcaagagcaatcaagatgaaaagaaggcacaaataatatcagaaactttaaaaaactggacatcaataaagatcccacaaaaatttctgccaatataaaaatataaaaaatgaggatacttattaatattaaatgttctttcttgttgtatttaccagggattaatccattttacctaattttccaaacttagtgttaaaaggttattaatttaaaaaatccagatccagatggctacactaactatattctaccaatttttcaaaggagaaataatattaaccttgcaaaaattctttcagaaaatggaaaaagatggaatgttattcaattatcttatgataatagcataaccttgacaaccaaaccsaacaagaacaatattagaaaggaagataataggcccgttttattcataaacataaatcccaaacaaaatattagcaatat

SEQ ID NO: 7588 - DNA, 469 bp, Homo sapiens
cagaacttaaagtatatttaaattaaaaagatactttcctttttcattattaccaagagacagctatgactaaaactacagctgccaacataagatgattaaaactgggggtcaggccaggcacagcgactcgtgccagcaatcccagcactttgggaagccaaggcaggcagatcacttgaggtcaggagttcaagatcagcctggccaacatggtgaaactctgtctctagtaaaaatacaaaaattggccaggcatggtggtgcatgcctgtaatcccagctacccaggaggctgaggcaggaaaatcgcttgaacccgggaggtggaggttgcagtgagccaagatcacgccactgtactccagcctgggcaacagagcgagtctctgtctcaaaaaaaaaawaaaataaaattgggggtcaaccatttagtaggaggaagaacagaatgagagagatgctaaag

SEQ ID NO: 7589 - DNA, 1218 bp, Homo sapiens
cttgaggttaggagttcgagaccaaccagcctggccaacatggtgaaacccaatttctacaaaaaatacaaaaattagccaggtgtggtgttgtgtgcctgtagtcccagctacttgggaggctgaggtgggagaatctcttgaactcaggaggcagaggttgcagtgagccgaaattgtgccactgcactccagcctgggcaacagagtgaagtcctgtctcaaaaaaaaaaaaaatagttttacagcacttgtcacctatatctcttttgttaggcatatgtaaaaatgacttgaccataggctattaggtagtttaaaaatgtggttgactcacaacaaggaccagacttgaactgataaagttgtaagagattcctaactccatgttgcacaatcttatttttgtgttccttttaaatcattaactaatataaatcattaatacctgccttagaaaagattgtataatgaaagcaaagcacatttatgattcagggaaggaatccttaacatttgtgatagaacatttaaaactctgagtgtttttaaggtacggtgcaaggttactaacctatgtaaactagtgggagtagaatgtggtcctgagtgatacaagtagataagatatgaaaagcaaaggataaatttctagtgtatgtcatagcggatatatttacagtcatgaaggcatgggaatataggcatctctctaaaagctttcattgggccttgagtttttaatctttattttaccacactctatccacacacacatatgcatacacacacaaactgcatatacgttaaacttcataaaatggaaattatcttttttttcccttacctttccacagaagtgttgtttactaaattcgcagatgttaaatatagtaaatgccaaagccttggagtttacgaatccttaggatttgaattccccyatctcaagggaattaaagcctgacatcgaagagtaaaaaattcagggaaggatcattggactgcctttcctgtgctccctctggacgttccttcataaactgccaaggccaacctctgctgattagatgtcagttctctgccgtttggtacaaaggttatcctctggagcaagcatgttatcaatgactcatttcctcccattcttaaacttccctagatattttcttgtttattttagttttccacagaccactctaaaatcaacttattctt

SEQ ID NO: 7590 - DNA, 942 bp, Homo sapiens
tgttttatctggcccaaaaagcccatttgtcagcctttggtcttttggcctaagtttggctcagatgaggactgggtgtgccaagctttaattctctacgtgaatgataaaacccatactcacagaggatgtgggttatgttctttgttggattagtgatttaaccccatgttcccccttaaagaggaagagcacagtaaagagccctcacccagtgaaaagccctgggatccccaacacgcttgcccctcccccaaacatctcacaaggtagaggacagggagatcgggggcaagaggaaggtcgaggaaagaggaatctggggatcatgaaggagctaaacccagtgctcccttaaatccttatccaaacttgaggaaagaattagaacaatgtaagaaggacattgagaatttccctatttcttctgaacagtagacgtctaataagtactctcttagagaagtccctatgggacagggaggagttgggtttgtgaatgcacctctaacaagtactgaggttaggaattttaaaaaggaaatgaggccattcttggaagatcccctcggtttagcagagcaaacctcagcttagcagagatcccctcggtttagcagctakatcaatttttaggacccaatttttatacttaggctgagatgatgtcaatcatgaatattgtgtttactggggaagagaggggaataattataagggcagccataaccatttgggaaagacagcgtcctcccaggcaagaagtcctgccaactgagcagaaattcctaaatgcagatcctggatgggataacaataaagagatcgggcccaaatgcaggacctaagggaactaataattaaagggattaaaaagtccactcctaggacataaaatgtctcaaaagcatttgagattcaacaacaaaaaaggaggagact

SEQ ID NO: 7591 - DNA, 790 bp, Homo sapiens
aaactgctttggtaaagtaaacaccaaagcacacaggaggaagtattttactcaacaaatattatactaagatattaacagtttttgaagtaatgcactttcttattttatagagatgcagatagatctttgagcatacctgatgaacagttacactcatttgcggtaagtggcacttttattgaggttstattttcatcgtacacttgtatctgtttcatgctgaagtcaaagccatctttttttaaatcttccccatttcatgttgcatttagtcatcttaagtgttgtaaaaagaatgtgctggagtaagaactgatctgcagctctgtttagttagtgagctagtatgagtaaatatactatccaaacaacagaaaatgtatctttttttttttttgatggactctctttctgtagcccaggctggagtgcaatcgcgcgatcttggctcactgcaggctctgcctcccaggtccctgttcaagcaattctcctgcctcagcctcccgagtaactggaattacaggcatgtgacaccatgcccagctaatttttttttcttttttcttttctttttttttttttttttgtaaagacagggtttcaccatgttggccaggatggtcttgaactcctgacctcgtgatccacccaccttggcctcccaaagtgctgtgattacaggtgtgagccaccatgcctggcccagaaaatgtatctttttaaaaggtaattgtaagctgtctataggaccctgcaagccactacccaatttttgaagccattc

SEQ ID NO: 7592 - DNA, 620 bp, Homo sapiens
aaaaaggttctttttaattctatgattttctgatctattaatgtgactagcaattttgtgagatgtagtttgtcatgttatcactactttttggttaaaacactgtggaaaaccttgagtggtaactttatcttagtccaggtgattccagttgcagcagtagctaggtgccctgcgataactctctccccttgagggtttccagtgtgggaagttgtcatttaggcgcgccaaaagtggtctggcctctcgtgcttcttgagatcccttccgggctctggtctatcttgtctccttagctgggggcctacagtcatctagagtaaaagggatggttaaaaaaaaaaaaaaaaggcaatcggagrcaagaatgccagaggagagacattaaccatgtaatttgaatttaaaatgctcatggaatatgggaaattcagtgctgagccatgtgagcagggttacttgctagggtcctggaacgcacctgtctggccaggagtttcttaagatatctctggtatcttctgttctagaccttaggtgtagccggctgtgggctggggattatccagctcccctttcccatatggagccttaagggttagtgtatcctgataggg

SEQ ID NO: 7593 - DNA, 856 bp, Homo sapiens
ccccacagaggacccctgcccaccgagggttccgtcccactgctttttgggtaaaagtggccagccttgattatgtttgaataaactrtatctcatggtttagactatttgggtttaattgtaaaatatacacagaacacagcccctccaccccgaccctgccctcaggttcgaaaagtcaagtacattttgttcccctctccccgcaccataaaaacaacaaagaacacctcaagcttttttaagggctattatttctttcgctccccagtgggggaaaaaaatggattccactgtcctgtgtacaaaaacaaggaggatgctcatacaagaatgtggctagcagcattttctgtgtttcctctttctctcacaggtgtagacactgccttttctgagtcttcatcatcccccagcatctcctgggcacctgctgggactcatccccgccccagccactggagagacagagatgagcctggtcgaggaaatcgacttggttaaggctggcgtgggaccacatgccaagtccctgactcccagtcagaaccccaaaacccaatttgaggtgatccgatgagaaaatctcgctcatgctctagccctcttcttcaaggtcaaaactgccttctggtggactgaggatcggtgactttgtttccctctatgtccagccagggctggaggaagcttgttgtcagcaggccccttcccagaagacaccacatccacacctgtcactgcccacagtgactggaccctcagcctcaagttccccggtggtaaaacccctgtagatctcccaaccctccaggctcctgtaagcccagccctttaatttctttatttccctttc

SEQ ID NO: 7594 - DNA, 1278 bp, Homo sapiens
actgtctttctgtctccttagctgctgcttattacatagaaccattttttaaaaatataatatctgcaaagagacctcttctgttcccttacctcccctaatgtctattattttgtggagagggtagggtggtgggagccaggggccagaattgcttagacacacatttgatctcaggtacagagaacacaaattctctggaaggaaccccatgggggtcgggagcattttccaagagtggtccaggtgaccttcaattcacacaattctgtttaatacggcgctgctccatgaggatgagcatatgtatgccccatttccagaaacagcaccacctttcatggaaaacccattactctctcgcttcttccacataacatgckgttatggaccagccatgggcccaatgcaccactggataaaatgagagtcaaaaacacgccaataatcacgtggattccaatgcagtcaggcaccacttgtgcttcattcaggtaaaaatcctcacagaaggtaccccccacctctcagcaatgcgaccacaaggacaagctgtcctcaggtgggacacctctccatcctgagatctgctcttgagctgcaccatggcaataagtgagggagcacccgagcagcagccaattgattcatttttttcaaacagagaaaggcgccatggggacatgcatttcacatccactgagtgagaaggccctccatgggcacccccaccacggtgagttcctctagggcaaggaccccgtcatgcccatttccggatccctcagtccagcccagggtctggcacaaggatgaccagtgcatgaaggaagaccttcaggaccctcccaggtaccatatcagagtttgatttggttttctaccagcagctccttctctgttgtccactacagcccagtgggaagccagacgggagagctccaagtacagctgggaggctggccagacctgagtctgaatctctgttttgagactctctgtccaagttctgctatttgtgtgctgtgtgacccctggtgggttgtgtggcctctctgagccccaatatcctcataagcaaaagggtgggggagtgcctcttcttgggagcgttacaacgatgagatgtcatgcctaggactgagccggccctttagcaaacagtggcaagccccaggaacactgatgatgttggcccttcctctgccttcattcacactaagaaactctcccaggcaagtggctttccaagagctaagtcgtcactggggtgccgat

SEQ ID NO: 7595 - DNA, 587 bp, Homo sapiens
agaatggcgtgaaccccgggggtggagcctgcagtgagccaagatcgagccactgcactccagcctgggtgaaagagcgagactccgtctcaaaaaaaaaaaaaaattattttgggtcttctagcctccagaactgctagcctccaaatttctgttgttttaatccactaaatgggtagtaacttcttacagcagtcataggaaattaatacagtgcccaagatagaacttttcattttccatacaaattagctccttcctattgttaccagggggtctttgttcttagagctcccaagatggtggcaggccacttccaagatggcggcaagccttttgttctctgacctggggttcttggcctcacggattccaaggaatggaaccttgggccatgcagtgagtgttatagctctattagaagccgtgggtcacagaagagaaccgtggaacccagcaactagtgttcagctcgattaggacraaccctgggcacttagccttgcaggaacaatggcgagcctctagcccgattgggagcagcaatgggcgcctcgctggatcaggagcacagtggacaccctgat

SEQ ID NO: 7596 - DNA, 885 bp, Homo sapiens
gatccctcgataacaggagtttgaatctgaaatgagtcatgattgcaccactatactccagcctgagcaacaaagcaggaccctctcttaaaaaaaaaaattaaaagacaaaagcatcttaattgttttaatccttacactgactataggtatatttgctacgtggccttgaactcatcttgccattttgaatgtccatttatacttcctctgtgctatagctaaatgataaaaagcttttaattaattttattattgcagtttcactaagcaaacaagcagttctcctgtggaagaacatctgataccaaaagcttcccttcctgccaataaaagagtgaaggctgacacagctgcacttgaagcaggttgaataaaaaccggactcagcccctttaagtccggctgatgacaaacgggtgctttttatcttttgctgttgctctggctcagtacagccatttaattattcataggaaggctctttggtattttcactgtagaagtcacatctgagacttaaatcttacttccaccaactccagygatgaagtttccagactaatgaaaacgtcagtgctgtgacattcccggaacccattcttttagctctgcaaggaaagctagacttgggctttccattgttggagcataaagttcctcactcaccaaagctgccagcaggaaaatccaccagacactttaagctagtgattacactgatgtaaatataaacttaccacgaatataacaatgaaagtttttttatccttggaaaaatcttggagtgtggagaaagcacctcaattaccttgcaggtcagtgtgcaattatattaggctttctccctctttctctccctctttgtttcccatttctttctaa

SEQ ID NO: 7597 - DNA, 537 bp, Homo sapiens
agcacagaacaaaacagacacagacactgccttcatggaacttatggtctacacggccaaagagatagagatattaaacaagtaaagcatttataaaagttgtgactagagcaaggaaaggaaaatatggaatactatggaggtgacaaggaaagccattctgaagagaacacatgtaagatgagaagatgtaaaacatgaagatttggaagatgtaaaagattgggaagttttacatcttcccagagattgggatcttccccctgaacaagggaaggtggaatgagatgaggtcagagagaagggctagatattacatagctatctatgccatgggaaggagttggattttgttgtgaagtgcacataaaaagtcaacacagagggctgccatgaygatatttctgttatagggcaaacgctgtatacacacctgtgatagagacagttaaacaagtaagtatggtgtggggccatgacagagatctatagaagcacagtgaggaataactaactctgcctggaaggatctggaaa

SEQ ID NO: 7598 - DNA, 724 bp, Homo sapiens
gcacgttcgagtttgagaaccactgatatagctaatacagactgtgtgacttgctgggtgtagaaaaagcagctgaagaaaatcattttggagactggtaaatcttttgcagtcaaccaaaaaactaccccagagattaaattcagagtattaatcaactgttgatgtctgcatttgaaaagtgttgtgcacacagtttcatttgattctttaattcattctggaaggtagataaagcacaaaatcttgtcccaacaagcacaaggattcaacaaaggttactcagtaacagttgagggtggcaatgatgaggcaaatgaactcagtcttactgcaatacctgcccccatactccccttccaacgcagcattgtaggtctttaaatctagaagggacctgataattgatccatcttcctatagaagcttttccttcctacagaagcatcttyctgtagaagcttttctcattgttcccctctcttcagcacactcccattcatgaccatatttcagctcactatcaagaatccatgggtaccaatgggtagttatgttggtgtcctcactatcaagaatccacactgttccttcatccctatgagaatctggagaagtggggaagcaagcggcctttgtccctaacctcaagaggaccataagcccagcaatctagccaacactaaaggtaccattgtctccattttaaagatgagcaagccaa

SEQ ID NO: 7599 - DNA, 835 bp, Homo sapiens
tattttgttatggacagcatgctggttttgttttccaagtgttttaaactcaaaagaaaaaaatgttaacttcttaaataaaactggtcatcaactgctgttctcatctgaatatagtttgtcttaatttaacagactttattatgatgggtttagaatactttttatttaatgattttgtaatgtaggattttcaggacacagatgctatattttcacagcaagggaaaatgatgtattattagcctgtttcttagtaaagtatattattttgataattcagagaagacagaacaatactggaaaattttctgtaaagctggtgatcttggttaaaactgtctttgttgatgctgattatgaagcatggttgtagaaagaccaactagacaacaaccttcatatggttgactttagccaccacctctagctgctgctggcaatttgtgtgctctcccaaagacttcatggttgtggcaaagcagcctttccaagcctacttttaatggagtaacatcctcccttagatttgaggctcagggaaatcacagtacattatgttggttcatggtrtcaggggctgtgtggagctgcctatcataatcccttgaagagctttgttttcttgccagtttcatgtctttgcctcctggagtctgtgcagcctgccaggctccatcattgcaggtgtgttccaagaggaaacgtggcacatctgttcaggtaccagttcacagcttccccatcacttactttgcattgggctgctctacatggaatctcattgcagcttcaactgccagatgtacgatgatgacccatgtgcttgggaccc

SEQ ID NO: 7600 - DNA, 801 bp, Homo sapiens
ttgactcctccctgcctcattctaggcatcctatgggcctttctatcttagttggcttaatccaaccctctgtcatttggcattgaaccagtacaattattttgagtttggtctccttgacttcgaggtcatattcctacaatctgtacccttttctttttaaagaaaagtgagtgacatacactcagattacttttgctggatttttttttaatccaaaaagaaaatcagaatgtgtgattctttgccttaagtttgtgtaatgcctcccattgactgtagtttcctcctttataacatttccttcctagcttccccgaatattggctgtggacattataatatgtagtggatgtagggcctgccaagtaataaaggtgcatttttatcaatgtrgcaaaactgccagcccctttgcatggtgcatgctgcagaatgtgctgttcaaccctgggtctgcccacgctgctcctgcatttgcaacccttgctcctctccagcgcctcccaaggctcagtttcaatatcattcctctgaaatgtctcgtgacaaaaacctccctcattcctgaagatgaactccttgagggccaggaggctgtcttgtgaatttctgaaataatatgtgtgaagtgcctagaattgagcctggtacaaggaagaaacttctttcattgatgaaatgccatatctctgtctctatctatatctgtatctctatctctctgtctctgtctttagctctctctttctctctgtctctatctatacttataccaaaccatccacaccattactagaa

SEQ ID NO: 7601 - DNA, 530 bp, Homo sapiens
tagagactcagatttatccctgcccgaatcattttctttgattctctgcccttccccactacagtgtaaactccatttggactttctctagttcactgtgaatggtttttgaataacatcaattagcataacctcatgcccagcatcgtccttattggttgagagcacagcagtgacaaaggtgcaactcttgctcttgagcgatcacagtttatttggggaacctggtactacctaataaaaccagggagactcgacccaaggcattgtgtttgagctaggctttgaacaatgtatagaccctcaccaagtatggaagtggaagagtaagacattcmaggtagaaggaacagtatgaggaaagtcagagagctaacaaagattatagtgtaatgccagaatcatgagaaatttgctgagaattcatttgaggccataatttaaaaagataggaggagccatgtgtagaactttcacagaacagtgtgtacctcccctccttcttccttattagtcgtgattcttggggg

SEQ ID NO: 7602 - DNA, 802 bp, Homo sapiens
cattagtgcagggttatgctctaatcacctgaaaactcaatacatagatgctattcccatacccagttaggtcagacactttctgaggatgatgcctgcaaatttttatttgaaaagcttccaggtcattagattactcattacttcctaatgtaaaaccagctggtttcagagttcaggtaatttatccaaagtcactgcagcttctcaattctgctcttacctcatatttttaggtctgttttagaggctctcattacagtacattcatcagggtgcctctaccccaggtagtaagcagtctttaggtaaaaggcatcctaaaaccagatcattcttgagtaaagctagactgaccagaagttagattctgagggtgccttcctgcrgcagtgaattcagataacctgagaaataagcctcctcccttttgttcaaagatatgaacctattatcatcacattattgtttctctatctcaaatttttaccccaaatcgggatactcctctcagttttctgctactttcaacatgtgcttcttaaagatacatggtttgtaaacaacagttgaaatattttcgttgttgttgagagggtttcactctgccaccagatggagcgcactggtgcaatctcatttcgctgcagcctcgatcccccaatggctcaaaaaaatcctcccacctcagcttcccgagtggctgggatgcagacacgcaccaggatggaccagcacgcacagataatttttcaattttttttgtagagtcaggatttcactatgttgcccagactgggct

SEQ ID NO: 7603 - DNA, 1519 bp, Homo sapiens
ttttttcatggaatgatcatttcctattttattcacatctgctctttgtttcttcaatttttggggtttaatttgctgatttttctgttacttcttaaaatggatatttaaatgatttattttcaccctttatttttaatctatgtatataaggctataaatttccctcagaacatgtgcttagtgacatccacaagttttcatcatacatttcaaaatgttttcttttttttttctatattgactcatatcttgtttagaagtatattactgaattatataacatttggagatttcccagttatatttttattaatgtactaatttatgtcctccatgttaaaacaacagagtctgtgattttaatctactgaaatgtgttgagaaatgctttatgtcccaggatctggtcaattctggtaaatgtttcaagtacattaaaaagaatacagttcttgggcacagcattctacattcatccatttccagmggtttgctaatattgttcatatcttctgcagccttactgagttttgatatcatgttggtattattgataccagtattacttattcttcttcctgaaacactaaaatgaatcattttgtccaagcacggtggctcatgcctgtaatctcagcactttgggaggctgaggtgggaggatcctgagtccaggagttcaaggtcagcctggacaagagagcaagaacccccatctctacaaaaaaaaatgaaatttttttgatacatggaatatatcatgaagctttatttaaagaaggacatggacagtacattttttgaggccttgaatgtctatggcagagagttcattgtccctcagtatcagtttttccctttctctgaaccaggggtcagcaaacttttttttaatggccagggactaattattttaagttttgatggctacgggtttatgttaccactactcaactctgcattgtagcgcaaaagcagccatagattatacataaataagtgggcatgactacgttccaataaaactttatatacaagttaggcagtgggctggcttgggcctgcaagctgtggttttctaatcccttttctatagaatagaacctttgatttatagtgtgtacatgcatgctgaaattaaaactacatttatcagccacttttttacactgtgtatagcactgtgacagtgctggaaaatggaatataagtaaaaagtgtggatccagcttctaagaagtatttatcaggatttttccctatgttagtaagtctgatggtgtggaggccagctaaaagcagaactttcaccaaaagaactattcaagctagtacattagtctgacgcagtttcgtagatactggtagaagacagaagcttcctaggtcagagattttatccctcacagcaaaagcaatagcctcaaatcgtacatagtgatgcagagagtcaggaaggcctgcatatgcaagtatatcataggcaaacaacccctagtataggaaatttacgact

SEQ ID NO: 7604 - DNA, 793 bp, Homo sapiens
aggctgagagaccctgaccgaggtctagaaagggccttgggcctttggttgcctctgaacaggggtcaggagggaggctggagatgctgacacaataggggagacctgttccgtcctgtcccattcccccattctttcttgattgtcagtgactcatggcccttcccctgtgctcctgagcctgcctaaactcatgctggtggagagaaacggagcatttcttcccaggtgtgaatcacttgccccacgcccctggcrgagacctctccctgcaggagataggctctttggagatttgcccagaggggatgggcctcccaattctcttaccttgcccatctacttttcttcttgctccctcctccctctgcagctgtcgtggagctcaccagaagctcctggccagaaccaggattgttgagcagatgttgagcacctgagggaggaagcccgtgggagccgctagggttttctcagagggaataaaaacttgcctctgaatttcttgcagaaacccgggtctctggggagcagcactgttggtgtttagacaggtccattctataattccttgaccagatttcattgagccctgattataaaccccagctctgtaaggcacactctctgccttcatagcatttatagtctagctaggggtgcaaaacccaaacactcacaacaaataaaaatgggctttaaagaggagtcagtggcagtgaggcttcaaaggaacagacagctagggctcagagtgatgagtggggttgcccagagctggaggaagagcctg

SEQ ID NO: 7605 - DNA, 1246 bp, Homo sapiens
gcaaaaccattagaggacaatatacagtaataagtaattgagtattaggtagggcttatcagacagtatttgcatgaaagctgaaagagaagcacatcccttggggactagagctgtgatactagtaatcataatatgtttaattttatcacacttcatcatcaataaagcaattacacatatctgatctaatttaattctctcactaactagttgaagcaagtgctatcattccctcattacaaaaaacctgaagaccagagagcttcagttacttggtccaagtcttatagctagctaaaagtcaagccacatctcctgattccaaagtcaatgctcctacaatacccagctgagaacaggaaagtaaacgagtggatattaaggatctttagtgagcggagaaagacatgatacctgacatcaggggaggcttcctggaggaaacaagatttgggggagagcctgcaggtgagtgggcgttacagagaaggaagagaacatatcctgagcaaggtcagactctccccccgagatgtcctgaggtgtctctgggtcacacccttgcaaatcaagactaaaacatcagtctaygccagagctggatccagagcctggggtttgtaacattgaagaaaaagaatacaaatcccctcaggctccctggaataggtcttacaaatctttagcatcacataaacccttctttggtcatcactctgatattcataagcccccagatcctattcagaacccatctgctgatcagcttccaaaaccaggaaaggctcctgcccttccctgggacctgatttatagaaaggatctgtattagtttggattagactcagctgccagtgacaacaataacagcaacaccaaaacagtagcatagatgaaagagaaggttatttttcccaatataaatgtagaccgtttagggtttatatggtaactagtgatcaagataaaagagactcaccctccttctatcttgttgctccattattcttaatacacagcttctatctcatggtccaacatggctgctcaagtccagccatcatctgtcttccagccaacataaaaaaagtaatttctggaatgcgtgcatacttttctctttaaggacacttccttggagttacacacacttcttatgcttgcaacctattggttagaatttatgagatggccacaccacactgcaagggagactgagaataaatatggtctttattctgga

SEQ ID NO: 7606 - DNA, 650 bp, Homo sapiens
cactgatgctctgttcatttttattgtcagccatttttctctctgtgtttatttgcagtttctattgcttttctttaagtttactaatcttttcttcttagatgtctaaactgtgattaatcctatccaatatatgttttatttcagaaattgtagattccaaaaagcttaatttacattttaaaaaatattttccccttccttaatatgttcaatatttcttctatcttcttaaatatatggaatacagttataactataatttctgtatagttctcttcattgacttttctctttatgagttatattttcttgtttctttggctatccrgtgattttttgttgggtgccagacattatgaatttttctttttaggtcctggatagattaatattcttatagatattcttgcgttttgttctgggatgcaattaagttgcttagaaacagttttattgtatttaaagtgatagaaaagactgatgcactctttagcttatacagtataggcatacaggctatcagaatcaaaagagcttgaggtaagttaagcctggggtctactttaaagggaaaagctaatttaatactcttccagagtcaatcagtgctgattaatttttctttaattattcaacttttagatgtg

SEQ ID NO: 7607 - DNA, 777 bp, Homo sapiens
caagactagcctgggcaacatagcaagatccccatttatgcaaaaaattttaaaaaattagccgagcctggtggcatacacctgtagtcctggctactcgggaggctgaggcgggaggatggctggagcccaggagtttgaggctgcagtgagctatggttgaatcactgcactccagcctgggcaacagagagagaccctgtctgttaaaaaaaaaaaaaaagaaaaaaaaagaaagaaagaaagacctgaaaagaactaattaacgctcatacatasaatttttgatgagaaccttctggctctaaagaaagtattggtcaactatactgtctaggctaatttcttagaaaataatgagcatagttaaggataactgagaaaatgtaaactatggagactgtatcccatgtcaaaattaaaaaattggtggattgatagggagagaggaggataagggagaaaatgtattttgccattgtagaaatcagaaatttgggccgggcacggtggcttacacctgtaatcccagcactttggcggggggatcacctgaggccaggagttcgagaccagcctggccaacatggtgaaactgtgtctctactaaaaatacaaaaattagctgggtgtcatggcagacacctgtcattccagctactcaggaggctgatgcaggagaatcacttgaacctgggaggcggaggttgcagtgagctgagatcgtgccactgcactccagcctgggtgacagagggatacttggtctaaaaaaaa

SEQ ID NO: 7608 - DNA, 550 bp, Homo sapiens
agcagaggcactggcagtctagctcccagaggtatctctagcctctggggccgcactctgcacacaatagccacccagcacagcagtctgtagaatgaagaaaggaagaaacgaaccactaatcccaaagtggctgtggagtcatctggccatctgaagaggcatgaggatgctgttattagatttcaataacagacagctagttagctttagttttgggttaacaaaaataaatgtacccattgactttaacaggcttatctaaaagaagaataggatgaaaagcagtgacatctgctccttcccaaggtcawaacatggaataactggggcctatttaggaagacagtgcccacagaatagcaatgtggttaagcatcagcttgacagctcggtaaaagctaacagtgtgacttggatacacatgactataaactgtggatttttctcacccactgagctgacctcagtaccctgtgcctactcaagtactgaaaacggtaatacacattttttaagtgttttctcacataattccccaagactaccc

SEQ ID NO: 7609 - DNA, 772 bp, Homo sapiens
ttgacttcttcagtctsgtgaatgtgtactaagggcaaattgctgatgtttttcccttttgtcacctagctgtgaggctgaactgaaccaagtgacaattgttctggtagtgaatgagcatggcattgtggtgaattgtgccactgaaattgggctttttatgaaagactacagaacttgagtttgataagtgactgataactttatcatgatgtattttctatatatacattgctggactccattggttaataataagtcttttgcatttactttcatgagtgccttttaccaataattgtagcttctcattttaccattggtctaattttggcatcaaggtatacacgcatatcagttgaagcagcaaatattttctttgtctattctctggaacagattatataaattgagattatctattccttgaatatttggtagaacctatctctaagctctctgggcctggaaggaattttgccagtagctttttaactatttgattcaattttgttaatgagtgtatgcaggttttctacttcctcttaagtcagttttggcaatttgtatttttctaggaaattggcaattttgttatacattttcatggttatccacaagtagcatctttttaaaaaacatgcctatgtctttgttgtttttaattcctgtctttgcatttgtttattcactgcttacctctctcgtcattgaaaaatgtaggcagaaaattgtttgtactgctaatcttttccagaatcagctcttggtt

SEQ ID NO: 7610 - DNA, 761 bp, Homo sapiens
tctaatagtggagagttacttgcaagcagtgagcctggaaaaaggtggcaatatacaggaagagcaaaataaggctcggaaaaargggcaaaagacaattcttttggcaaccgtctcggagcttggatgtaagctggaggaagttcagagcaggtggaaaccaactcaacttgaaaaagctacactgcagaagagacacttgagctaggtcttcaagcacactaatcctcacatgtccttatattcctctccccatctacaccaccatctcaactttgggactatttgtcaaaacacttttcaagttcccctgctttcagaacatcctccctgataacataagtcaatatttattttctattttcttaacagatgatactccttactctttatagcataaatgattgcacctgactctgctcagttcatgtcttctttgccatcttcctcatttcatggtttgtctccttattaagatcacaaggtcctggtggatagaaaatatatattatttctgtactcatcacagtgacttggcagtcttgaaagtaaaaaaatttaagaaggtgtagcattaaactagttgtaagttattatgtttttcctttgcactaaagttgctagatatttaggcttctaggaatgaggagaatgttgtaatttgaaaggtacacatatcatttatgcaaattaaactgtatcagagtcccaactgaaaaagatgacacactcaacaaagggggcttctctccaaagggatt

SEQ ID NO: 7611 - DNA, 719 bp, Homo sapiens
atcctctgcctttgcctggagtttgcagtattcacgtgcactttcctgcctctccctgcagccggggtcccctggctcaaataccagtctggacccttttctcccttgtcaaagtcctcctagcctcctactaccccaggacagacgccagcccactggccctctccactgctcccctcggtgtgtacagagcacctgcatgcgctgggcactgcttcagggactgggcagagcaacgagcatgaaacagacacttctcggcagtatccaagcgttgctgtggtggcctctgcacacacagtgctattcctgcagcctcgcctctggcagtgctgttcccgctgctgagcctgtcttgccctctgtgcctttgtacccccagaaaatgcctcttcccctttcatggttgattttctgtgttctcctcttacctgaatcccctgctgggtcaggggtcctgcttctccatttccagggcaatctctgcttccctctctccactgaacactcattttctgcactgtgagctttttgtggcrggaaggtctgtagttttattttattcttctgtgttcttagccattatcataggaccaagcatatagcaggtgctcaataaacatctcaaaagaaatggggaaaccacggctcaggaggttaagggacttccgaggtcacagggctagtgagagcaggggttggatttggaagtgtttgca

SEQ ID NO: 7612 - DNA, 822 bp, Homo sapiens
acttaaaagagtatactcatgttcaaagtgtgagggcagctgtcccagacacatggacattaaaaaatggaccagcgctcctcatgtagggaaaatgaagatcgtttatatagacaaaaattgaggtgctgacagaattacaacattttccatacaaaggctaacatatagatacaggatgtgattggctacaattgattacactctaagggagttgcttaactttctgttataaagagataccagtcacaagggtctctatcgccaacatcattaagtctaggtttgaatgaagaacagagagcctggttcatctgtaacaagcttgtccaaccctgtggcccaggacggcctttgaatgcaccccaaaacaaatttgtaaactttcttaaaacgttatgagattttttttttttgtgctgyatttttttttttttttttagctcatcaactatcgttagtattagtgtattttatgtgtggcccaagacaattcttcttccaacgtggcccagggaagccaaaagattggccacccctgctgtaaaatatctcactcaacacaaaggtcaggaagccacggtcactcatgccccaaagaagaaaaaccgccatattatgtgactcagtttccagggtttaacttttccccttggcataataaatctagaaagtcctaaaattttactttctttttactttctttttactctttccatgagaggaaacatggaacattttgatgggtggaaagtttgagaaaggcctagggtttggctgggaaagctgtgagtggtcagacaaagggtgtggtgcaatcgg

SEQ ID NO: 7613 - DNA, 811 bp, Homo sapiens
ttctcaccaccaagctcagctattttttttttttattttttgtagagatgggatcttgctgtgttgcccaggctggtctcaaactcccagcctcaagtcatcttcctgccttggtctcccaaagtgctgggattacaggcatgagccaccctactgggcctaaggaataagttctactattcaattacagagtagagtgactgyagttaacaataatatgttgtatatttcaaaacagctagaagagaggacttgaaatatttccaacacagagaaatgatagatactcaaggtgataaacgttccaaatgcccccacttcatcattcacggtccatgcatgtaacaaaatatcacatctacacataagcacgtacagatatttgtatcaataaaattttttaaaaattaaaaatggataagctttcctgcatttacagacagtagtggggcaagctttgagagaagcctgaccagtattcaaatacaatctctctcactagaaaattgtaaaatttgggagcttttgttgttaacgttctttgagtttctttcaactgttaaactggcatatcttcctcagaatgttgttctagggttcaacgcaatcctaggtattaaatacgaccatctgtataatgcctgacactgatcaatgctcttttgctttccttttcaccccaagctgcctctcctagtaacaaagaggagaacacacggaggctgagggagaataccagtgatgtcacttttctctgtccttctcctgctgaagatcctctccttggctgctttgtttgtgtgtttctgga

SEQ ID NO: 7614 - DNA, 811 bp, Homo sapiens
ttctcaccaccaagctcagctattttttttttttattttttgtagagatgggatcttgctgtgttgcccaggctggtctcaaactcccagcctcaagtcatcttcctgccttggtctcccaaagtgctgggattacaggcatgagccaccctactgggcctaaggaataagttctactattcaattacagagtagagtgactgtagttaacaataatatgttgtatatttcaaaacagctagaagagaggacttgaaatatttccaacacagagaaatgatagatactcaaggtgataaacgttccaaatgcccccacttcatcattcacrgtccatgcatgtaacaaaatatcacatctacacataagcacgtacagatatttgtatcaataaaattttttaaaaattaaaaatggataagctttcctgcatttacagacagtagtggggcaagctttgagagaagcctgaccagtattcaaatacaatctctctcactagaaaattgtaaaatttgggagcttttgttgttaacgttctttgagtttctttcaactgttaaactggcatatcttcctcagaatgttgttctagggttcaacgcaatcctaggtattaaatacgaccatctgtataatgcctgacactgatcaatgctcttttgctttccttttcaccccaagctgcctctcctagtaacaaagaggagaacacacggaggctgagggagaataccagtgatgtcacttttctctgtccttctcctgctgaagatcctctccttggctgctttgtttgtgtgtttctgga

SEQ ID NO: 7615 - DNA, 788 bp, Homo sapiens
taaccacaaaagctaagactcatgtttgtttgttttttttttttttttttgagacagagtctcgctctgtcgcccaggctggagtgcagtggcactatctcggctcactgcaatctctgccttccgggttcatgccattctcctgcctcagcctcccaagtagctgggactacaggcacccgccaccacgccctgctaatttttttwaattttttttttatttttagtagagatggggtttcaccgtgttagccaggatggtctcgatctcctgatctcgtgatccgcccgtctcggccgcccaaagtgctgggattacaggcgtgagccaccgtgcccagccaagactcatgtctttaaatagtttgtttactctgccttcctggatcaaatctataccatcatgtgctgcattagggcttttctcccagaaggttgaaacctcccatgattgtagaggcagcaccttggctgtattaccctagcctgagatttcctttggagtgcattcggtctggccgtcaggttgtcctgctcactgtgcagcatgatccccctgacattccatcctttggagccccagtaaccacagcaggagggccagcagctgaggctgagccagaagagacctgttctagctggatctgcacagcctggtctctgggtctaaaataaaactcttaacttctctgccaatgagctctgccaggcctgatgacgtaacaggtcccttcagttctatttgcaggcaaggtccatttacatcaggatttcatccaggtaagggg

SEQ ID NO: 7616 - DNA, 829 bp, Homo sapiens
atcccttgaccccaagacacacacccaacacggggtccaggctcacctctctgtgccctcctggataccaaacatccaggagaaagaggaaaatatccaaggttaagatcaaagaggaacaggcaaagcagagaattcgttctctaaaagcagaggggtcagtgagggagamaacagaacctgctaagggctgagcatccctaatccagaaacctgaactccaaaatgctccaaaatctgaaactgttagagcgttgccatgagagagtgatgcctttgctttctgatggttcaatgtacacaaacttggcttcatggacaaaattattgaaaataattgtacaaaattaccttcaggctacgtgcataaggtgtatatgaaaccaatgaattttgtgtttagacttgggtcccatccccaagatgtctcagtatgtatacacaaatattctaaaatctgaaaaaaatacaaaatccaaaacacttctggtctcaagtactttccataagggacacacaacctgtaacaggtttactaatcaaagcatcaacctctcccccatctcttattgcatctaaagaggacactccacctcagccacagtaagaagcataaaactgtcaggctccaccaaagtcatttccaagaacaaatgcgtttgtgatgtcaggattagagtgactgcaattctggatacacatttaatttgcattactgcttttctttggggggtgaggaggtattcacaaagaaagttcattcctccctgaaggctatttcaaagacagttgctaattaaaccctgatgtagcatgaggaaaatgaaaa

SEQ ID NO: 7617 - DNA, 829 bp, Homo sapiens
atcccttgaccccaagacacacacccaacacggggtccaggctcacctctctgtgccctcctggataccaaacatccaggagaaagaggaaaatatccaaggttaagatcaaagaggaacaggcaaagcagagaattcgttctctaaaagcagaggggtcagtgagggagacaacagaacctgctawgggctgagcatccctaatccagaaacctgaactccaaaatgctccaaaatctgaaactgttagagcgttgccatgagagagtgatgcctttgctttctgatggttcaatgtacacaaacttggcttcatggacaaaattattgaaaataattgtacaaaattaccttcaggctacgtgcataaggtgtatatgaaaccaatgaattttgtgtttagacttgggtcccatccccaagatgtctcagtatgtatacacaaatattctaaaatctgaaaaaaatacaaaatccaaaacacttctggtctcaagtactttccataagggacacacaacctgtaacaggtttactaatcaaagcatcaacctctcccccatctcttattgcatctaaagaggacactccacctcagccacagtaagaagcataaaactgtcaggctccaccaaagtcatttccaagaacaaatgcgtttgtgatgtcaggattagagtgactgcaattctggatacacatttaatttgcattactgcttttctttggggggtgaggaggtattcacaaagaaagttcattcctccctgaaggctatttcaaagacagttgctaattaaaccctgatgtagcatgaggaaaatgaaaa

SEQ ID NO: 7618 - DNA, 635 bp, Homo sapiens
tgcaacctctgcctcctgggttcaagcgattctcctgcctcagcctcctgagtagctgagattacaggcgcacgccaccacgcccggccagtttttgtatttttagtagagacggggtttcaccatgttggtcaggctggtctggaactcctgacttcatgtgatgygcccgccttggcctcccaaagtgctgggattacaggcgtgagccaccgctcctggcccagaatgtttttaaatgcataaagtacgatacaaagttccaagtcactgtagaaataaaaattaagtaaattacaaaggatagaaaatgaaaacagccgtattgaaataggccgtgaaggtgtttttcaaagttcgtgatactgcagtatatgtacttctttattaatgcataaagtaccaagatctagtgacaggtctaataactagcataattttgaattagtcacgagcatatatgatttttcaagatatctgcagtaaccatactatgatataaaaatccctgttttattggtgacagtatcacaggcgctagtagtgcaattgcggtttattggctacagtcgtaattaaagtgagtgctgaatgtcagaaaatagagatgtaacttttttcttgttcaagttcgt

SEQ ID NO: 7619 - DNA, 671 bp, Homo sapiens
tggctttcttacttacaaatagtgtggcatggggcaatttacttaagcccccagggccccggtttcttgtctgtgtaatgggatcaatagcgcctcctccaagaygccatggggacttgctgggataccgtgtgagggcctcaggccgatggcatgcagggagtcctcagtgcccgggacgcgttgactgttccagcagccagtgcggggtgtttgggtgggaaggaaaggagccaagtttgtcaatggaaagggaaccagcttttgtcaactccgcaagaattcctagagcaccctgtgggcaggcaatgatcaaggctgtgccaaaaatggcccctggcctcagagctcatgctccagcgtggaaattggaaactggaggccaagaagggggctggctgcaatgaatataaaatcacactccggggcagtgcgctctgtggggcagagcagggttctgaacgacgtaggctccatgaggcggtggagcaggctgggcttgcctctcctttcctagacaccacaccaggcatttctatgctcgtcacttcactgagtcacctcagcagtcctctgggatgggtctctttgataaagattttttttttattgattctatagataaagaaacagtggctcagagaggttgaacgacttgcccagggtcacac

SEQ ID NO: 7620 - DNA, 671 bp, Homo sapiens
tggctttcttacttacaaatagtgtggcatggggcaatttacttaagcccccagggccccggtttcttgtctgtgtaatgggatcaatagcgcctcctccaagacgccatggggacttgctgggataccgtgtgagggcctcaggccgatggcatgcagggagtcctcagtgcccgggacgcgttgactgttccagcagccagtgcggggtgtttgggtgggaaggaaaggagccaagtttgtcaatggaaagggaaccagcttttgtcaactccgcaagaattcctagagcacccygtgggcaggcaatgatcaaggctgtgccaaaaatggcccctggcctcagagctcatgctccagcgtggaaattggaaactggaggccaagaagggggctggctgcaatgaatataaaatcacactccggggcagtgcgctctgtggggcagagcagggttctgaacgacgtaggctccatgaggcggtggagcaggctgggcttgcctctcctttcctagacaccacaccaggcatttctatgctcgtcacttcactgagtcacctcagcagtcctctgggatgggtctctttgataaagattttttttttattgattctatagataaagaaacagtggctcagagaggttgaacgacttgcccagggtcacac

SEQ ID NO: 7621 - DNA, 671 bp, Homo sapiens
tggctttcttacttacaaatagtgtggcatggggcaatttacttaagcccccagggccccggtttcttgtctgtgtaatgggatcaatagcgcctcctccaagacgccatggggacttgctgggataccgtgtgagggcctcaggccgatggcatgcagggagtcctcagtgcccgggacgcgttgactgttccagcagccagtgcggggtgtttgggtgggaaggaaaggagccaagtttgtcaatggaaagggaaccagcttttgtcaactccgcaagaattcctagagcaccctgtgggcaggcaatgatcaaggctgtgccaaaaatggcccctggcctcagagctcatgctccagcgtggaaattggaaactggaggccaagaagggggctggctgcaatgaatataaaatcacactccggggcrgtgcgctctgtggggcagagcagggttctgaacgacgtaggctccatgaggcggtggagcaggctgggcttgcctctcctttcctagacaccacaccaggcatttctatgctcgtcacttcactgagtcacctcagcagtcctctgggatgggtctctttgataaagattttttttttattgattctatagataaagaaacagtggctcagagaggttgaacgacttgcccagggtcacac

SEQ ID NO: 7622 - DNA, 731 bp, Homo sapiens
cttaggaaaaacagaaaggtgccaaagactctgttgtttggaggaacgtgtttttcctcagggaatcccaagcactgtaagcagacaaattccccttaggtctaaggctctgcggtcttttggtctttgttattatgttacttgattgctttggcttttcagagctatgagaaaatgcttggtattgtgggaggactggactctggtgtatagtggcttttagtcatgwgagctacagtgttagtcatagcagacagcagtgttgtttgtaagtggttattactatagggaactacttggctctttgcatgttttggccctaaaactttcctgatgttgttccttaaagggctctaccctaaagctagtaatctaattaaggaacaagccaagttaaaagactacctatcaaactaaatcactcttttaaattgtttgtaaaagaaatttacatctttaaagaaaatctcccatttgtaagggcatttctgtctctgcactgaaaccactaggaactctacggggaagacaatggcttaaagtttatgtaacaaaccatgcttttgtttagatctaagttctgtaactttgagatgtaaattttccccttcataggtggcctttaaaagggaggtttggcctttaaaaatcaaactgccatggaggctgctttacctgtaattttggttcacagcctcattggattatctattggcacaaacaaggtaaaa

SEQ ID NO: 7623 - DNA, 659 bp, Homo sapiens
tcctgcttcaacctcctgagtagctgcgattacaggtgtgagccatcatgccctcataatcacgttctgaaacagcacttcacaaaatgcttctgcttatttctttcttaagatcctctaacaaatctggctgtgactcctttaacgcacatgaggaaaccatggctgatggtgcgtagttatttgctcaaggtcacatagctggttaagtgtcagctgagactcaaacccaaattgctgtcacataatccagggctgattccatgttcccaagctgcccctcttgaagtatctatgcccacctctagaaattgctagtgagagactgctttgtggaatgaagtgagtactgacctayggagtcactgcgtccagacagagcaagtgctcttgggaaagtcacaccacctctcttggtttcagcttcctgatttagaaaatgaaggatcagctgggctggtggcttacacctgtaatcccagcactttgggaggccgaggcaggtggatcatgaggtcaggagatcgagaccatcctggctaacatggtgaaaaaccccgtctctactgaaaatacaaaaaattagccaggcatggtggcacgtgccagtagtcccagcaactcaggaggctgaggtaagagaattgcttgaacccagg

SEQ ID NO: 7624 - DNA, 659 bp, Homo sapiens
tcctgcttcaacctcctgagtagctgcgattacaggtgtgagccatcatgccctcataatcacgttctgaaacagcacttcacaaaatgcttctgcttatttctttcttaagatcctctaacaaatctggctgtgactcctttaacgcacatgaggaaaccatggctgatggtgcgtagttatttgctcaaggtcacatagctggttaagtgtcagctgagactcaaacccaaattgctgtcacataatccagggctgattccatgttcccaagctgcccctcttgaagtatctatgcccacctctagaaattgctagtgagagactgctttgtggaatgaagtgagtactgacctatggagtcactgcgtccagacagagcaagtgctcttgggaaagtcacaccacctctcttggtttcagcttcctgatttagaaaatgaaggatcagctgggctggtggcttacrcctgtaatcccagcactttgggaggccgaggcaggtggatcatgaggtcaggagatcgagaccatcctggctaacatggtgaaaaaccccgtctctactgaaaatacaaaaaattagccaggcatggtggcacgtgccagtagtcccagcaactcaggaggctgaggtaagagaattgcttgaacccagg

SEQ ID NO: 7625 - DNA, 797 bp, Homo sapiens
gaggattcttctgaattttaaattctgatgcagtgtcctccccccacgccttaatcccggaaaataagtgttcagaatcacgtcttagaaatatgaaccataaaggacagcatttaagagcgacatcctgcattgcgtagattcaatttcaaattactgtacttagcttctatgagcctgttaactttttaataaaatgaggataatactttcctcaaagaattgttaagaacgacaccggataaagaatgcatgacaaacacagcacctagtatctatgtcctaaatttacgtttaattaagtagattggtacgtgcagtttaaaagaggtttcaccaggcagcacagttcccctggctgtaggcgatagaccacgccttcctaatcagcgggcgcattccctgacttttgcggaaatagcggtccaaaaccgcgtctagcattagcaaaagcacgtggtctccgtctccccgcaacaacaaaaaagaacagtaaactccggygcaggcacctccagtagagggcttgtttttaaaatccatccgaaagggccaatcagacgcggcagtctgagtgcgcaggcgcggattggtccgcagctacttagagtgaccaataggcgtggaggtaagtttggttgagaccagaagcgggcgaattgggcaccggtggcggctgcgggcagtttgaattagactctgggctccagcccgccgaagccgcgccagaactgtactctccgagaggtcgttttccggtccccgagagcaaggtgagcgtcctgactgggtccgga

SEQ ID NO: 7626 - DNA, 797 bp, Homo sapiens
gaggattcttctgaattttaaattctgatgcagtgtcctccccccacgccttaatcccggaaaataagtgttcagaatcacgtcttagaaatatgaaccataaaggacagcatttaagagcgacatcctgcattgcgtagattcaatttcaaattactgtacttagcttctatgagcctgttaactttttaataaaatgaggataatactttcctcaaagaattgttaagaacgacaccggataaagaatgcatgacaaacacagcacctagtatctatgtcctaaatttacgtttaattaagtagattggtacgtgcagtttaaaagaggtttcaccaggcagcacagttcccctggctgtaggcgatagaccacgccttcctaatcagcgggcgcattccctgacttttgcggaaatagcggtccaaaaccgcgtctagcattagcaaaagcacgtggtctccgtctccccgcaacaacaaaaaagaacagtaaactccggtgcaggcacctccagtagagggcttgtttttaaaatccatccgaaagggccaatcagacgcggcagtctgagtgcgcaggcgcggattggtccgcagctacttagagtgaccaataggcgtggaggtaagtttggttgagaccagaagcgggcgaattgggcaccggtggcggctgcgggcagtttgaattagactctgggctccagcccgccgaagccgcgccagaactgtactctccgagaggtcgtttyccggtccccgagagcaaggtgagcgtcctgactgggtccgga

SEQ ID NO: 7627 - DNA, 797 bp, Homo sapiens
gaggattcttctgaattttaaattctgatgcagtgtcctccccccacgccttaatcccggaaaataagtgttcagaatcacgtcttagaaatatgaaccataaaggacagcatttaagagcgacatcctgcattgcgtagattcaatttcaaattactgtacttagcttctatgagcctgttaactttttaataaaatgaggataatactttcctcaaagaattgttaagaacgacaccggataaagaatgcatgacaaacacagcacctagtatctatgtcctaaatttacgtttaattaagtagattggtacgtgcagtttaaaagaggtttcaccaggcagcacagttcccctggctgtaggcgatagaccacgccttcctaatcagcgggcgcattccctgacttttgcggaaatagcggtccaaaaccgcgtctagcattagcaaaagcacgtggtctccgtctccccgcaacaacaaaaaagaacagtaaactccggtgcaggcacctccagtagagggcttgtttttaaaatccatccgaaagggccaatcagacgcggcagtctgagtgcgcaggcgcggattggtccgcagctacttagagtgaccaataggcgtggaggtaagtttggttgagaccagaagcgggcgaattgggcaccggtggcggctgcgggcagtttgaattagactctgggctccagcccgccgaagccgcgccagaactgtactctccgagaggtcgttttccsgtccccgagagcaaggtgagcgtcctgactgggtccgga

SEQ ID NO: 7628 - DNA, 797 bp, Homo sapiens
atgaatcatgactcaactggtccyatggcccccagccagagtctgactcagcaaccaggaaatttttccacacctctgtgatttcatccaccaatcagcagcatcaattctctagctccctgaccaccaacttattcataaacctcctagcctctgagttactggggacactgatttgagtaatagtctcccatccttccacttggctagccctgaatttactacagtctttctctactgtgataccacagtcttggttaattggttttatctgtgcattgggcaaaaataatccatcagatgattagaaacttatcctataataaatttaaaagaatgttaaatttattagagatcatattggtaactattattaaacttactgagattatagtattatttattcctgttcttctctggtgtagattctatacaccactaggattctgttacagttaccacgcccaaaataaatgaaaatatcttttcaggccagccatggttgccagatgtgagttatcaatgaaatatttttgctagaaaaatgggacctgcttgtgcaggaaaagcacaagcattaataacaaattttacttatggtgtcatagaatctctcatgactttctactcttatcccccagaatttgatgttttacagactttgtgtttttcttgaagctcagatgttcaagtttatatgaactggcattacataagatattacaatggcattatgataacgtacctagtctgttcacagcatttaaacatgtcttttttccattataaggacctat

SEQ ID NO: 7629 - DNA, 797 bp, Homo sapiens
atgaatcatgactcaactggtcccatggcccccagccagagkctgactcagcaaccaggaaatttttccacacctctgtgatttcatccaccaatcagcagcatcaattctctagctccctgaccaccaacttattcataaacctcctagcctctgagttactggggacactgatttgagtaatagtctcccatccttccacttggctagccctgaatttactacagtctttctctactgtgataccacagtcttggttaattggttttatctgtgcattgggcaaaaataatccatcagatgattagaaacttatcctataataaatttaaaagaatgttaaatttattagagatcatattggtaactattattaaacttactgagattatagtattatttattcctgttcttctctggtgtagattctatacaccactaggattctgttacagttaccacgcccaaaataaatgaaaatatcttttcaggccagccatggttgccagatgtgagttatcaatgaaatatttttgctagaaaaatgggacctgcttgtgcaggaaaagcacaagcattaataacaaattttacttatggtgtcatagaatctctcatgactttctactcttatcccccagaatttgatgttttacagactttgtgtttttcttgaagctcagatgttcaagtttatatgaactggcattacataagatattacaatggcattatgataacgtacctagtctgttcacagcatttaaacatgtcttttttccattataaggacctat

SEQ ID NO: 7630 - DNA, 1588 bp, Homo sapiens
acctcggcctggatatcctttgaatatgggataaaatctaaaattctaaccaccaaaatatcctatgtgatctgacccgggtctctttccaacctctctcaaacgctcccctataatttctaacagtccgatccctttgacctttcttccagttcctccaacctgtcaagccctttcctgcctctgggcctttgcattggcttttctctcagctccagccacatttctcttctccccaactccagccaagccctttttcctcactagctgctgcttctcatcctttgctttctcagagaggtcaagttgatctcaaatctaaaatacaaaatgtggccccgttagtcttgcaccatcctgttcattttcaccagtgcccagcaaactgatgctcttaacatttacctgtgtggtgatttaatgtttgtctctcctgttagatcataagatgtatgagggccaaaaccatgtcttgtgtttacaaatgcctacccaatgcctggaatagaataagcacttaaataatggtgaaattcaaaaacaattgagaatattttaaaaaccaagatccatatacttgttcaaccagaactcactggaactctacaagtaaaatttgggaggttttactgtatgtgacgaaatgtgatcacacaactaaatactgattttttacgggtggaagcagaggatggcaggagcacatctaaggtggaagtgggcacacgaaggcatttccctgaaaaccttaaatgattacagggaccaggagagagggatccagcaaataatgagtttggagtcatcaataagcaagctgtattacttttatatagtaaggtcttcttggggccacatgtctaaagcagaaatagtgtctggcttcacagatactcaagtaattatggcacaaagaagaaatagatggaagatccctggayctcccaatgagctcacatggatgctgccaaggacctcagaacccctaaccaacgccactctttcatatacctaatatgacttagcaggtgagcctccattccctatttttatgcagatatctggacttttcatctacatttttaccttcttggaagcgccatttctgaccctcaggacccacaattattaatatctttccttgcgtggattcctagctcttacatgtattgctcatgtacatagttaaatttcatcatgtgatgcatttgtacatggacaatcacaaaatcccatactgtggaaaggacctgagaacacccttcaaaatcacctggcccaaaatccttatttgcaagtgaaaaacccaaggcccaaggaggtgacatattttttccaaagtcagagtccattgttgaggacactaaaatgagaatgccagttccctggctcccaatccagaacatgccccattatggtctccctaaggagccggtgttctctgaggcaggagctacagttatcaacctcctggcacattgtggaaagctgttgagcatctgatgatggggtaagaatgataatgtgtatggattaccatgaagtcctctagattaaacatgaatctacgcctgtgctaccctacacc

SEQ ID NO: 7631 - DNA, 584 bp, Homo sapiens
tggttatttacttactctgtgactgcgggatggcctgggtgccaggcttcatggccagtgggagggtggctgtcctcaagggtgggggtggggaggatggagaccaggttgtatctgaaaagccaaggacctctcatctggtcctgtgtccctggcacagtggactggacagaccagacaggcagctgcaggaggatggggcttcctggactttcttctgcacttcgatggatcactatacagggaccaacctatctcaagaataaccaactggaccgggtgcggaggctcccagyactttgggaggctgaggtgggcagatcacttgaagtcagaagttcgagaccagcctggccaaaatggtgaaaccccgtctctactaaaaatacaaaaattagccagatgtggtggcgtatgcttgtaatcccagctactcgggaggctgaggcaggagaattgcttgaacccgggaggtggaggttgcagtgagccaagattgagcctgggcgacagagcaagactgcctcaaataaataaataataataacataataaccaattgattgatggctttctttttcttt

SEQ ID NO: 7632 - DNA, 842 bp, Homo sapiens
ttggttgacatttgcttttagtacaggcagaggtcacttggagcaaagtttacaagccttttcttgattacattgtgcttaaagtgttaaccctgttagcagtcacagcacagatttcctcaatgagactcttgtgcgcctgacaatgtaactatttatttgcagagtcactaccattgacatttgtgctgctcaatgcaaagtgttaccagtgctttctttatgtcactgtttctcttcagtaaccaagaaaagcaaaacaaagtacaaataactgcttattcagaaagaaatctcagattgttccttaaacctgctccaggcagcggatacagacttttgagtgatctggaaaatatgaaaagcacttggctgggatacaaaacccgaactgatctgtggtgatggcaaaagcagaaataggagctcagtaataaaaataaatttctatatggctgatcatggtccggctggcttgaggagggaggagcaggtcttggaagttaggctattatctgagcagtcrttgctttggtggtgtgtgtgggggttggggaatagggctttgcttcataggccatccctcaattgttgtctgattgattgaaaaaggcaaatggtgccgccctgttcctgccaagtgttttcttctgcgtctgctctccctgggtgcctggagcgttgatctctgtggctctctcacctgctgctttgttccaacaaagctggcgtcttacagccgccgccactcactcttccaagccgttgtcctggctgtcctgactgtgtaaaccctgccatccccatctgcccagccacctgcctccttgtctctagatatc

SEQ ID NO: 7633 - DNA, 769 bp, Homo sapiens
ttaagaaaagcctgctgagcgtccaggcctcgcatgaagaacacagcagcagcagcccaccccctggagaagcttacagcaacaacaaaccccaaacctagcttagccattgaccaaactgactcaagccctcaatcacattaacggcctagcagaagaagtatacctatttccaggcataagcagtatttactttagtctcctagacttagagacttagtttcttttacacacacacacacacacacacacacacacaygcgcacacaaaacagacattcaatcaaaaattatgttacacttgaaaagcaaactcctgcaaccttcccactcattatcaagagatagaatagtcaaaacaatgagattcacagatggccctgatggtggaaataccaaagaaagaatttaaaataattacaattaatatgtcaaagaatctagtgaaaaaggtgggccacacagatgaaaaaatgggcaatttcaacagaaatacagaaactatttattttcttatctatctatttatttatttttaaatgcaaatttgaaactgaaatgtgttatggcccaagtgtaatagtatctgttttgaactgagtcttacagggtcttaccctgtcatttaggctgaagtgcagtggcacagtcatagctcactgcagccttgaactcctggcctcaagcaatcctcgcacctcagcctcccaaagtgctggaaatacaggaatgagccactgtgccaggccttatggaaactatttttaaa

SEQ ID NO: 7634 - DNA, 590 bp, Homo sapiens
tagcgtcggacacccaagacactgcctctgtctaccgctgccaagccacgatcacctgtgctgctgatggccagacacctcgaacaattgcagcaaaaccacagtttgagcttttaggtactttctaaaatatggctttcccatcctgaagcrcagcctggttctgtaggcacttggcttggggagactcaagcagaaatgcatgctgtgctcagagccagcacttagctctgctcttatcactgccctaacccatatcggcaggttctttcttttgttttccttagactcagatgtcctagaaatctctttgttaacacatgtggaagggtcaccagaggagcaatgtcaccagcaccccaggttcttgaggcgtgatggtcgcattagtatctcctgggggcttggagaaaaacaggctggcaccatacactcctctgggaacatggaaacatcaaagtccctcatccgtacacctgccactcaaccatctttcctctggctttcttccccaattctaatccccagctgctaacagcagtttctctgaagccctctgcttttccagttccagaggacatgctgttttg

SEQ ID NO: 7635 - DNA, 774 bp, Homo sapiens
aagkccctttggacagccaggttgggcccagatggagccacatcacctttgctcaggcttctcacctgcccttgcataggacagctttcttctaccctaccactctgcctcagctggcattctgccgccaggactttccatcctctggtgagatcctggccaaccttgagagttaagatcctctttgttgtcccctctgactgctcagctcatgaggatttcccacctctgaccttctgcttactgaccttccccagtgacctacccttgccttcttagtagagggccctcgggagggagcagacacctaatcctagccagaacaggctcctgcttttcatcatgaaccatgcacaggtgctttttccttcaggctgttccccctggccagggatgttcctccctttctctccttctttctagcccatcctcataagtccaactcagttcccctccctggcatttcctgacctctgcagaccactgtgacatctatggctgaattgtatccccctcctaagtttgtatgttgagcccctaacccccaatgtgatggtatttagagagagggactttgcgaaataatcaggtttagatgaggtcatgagtgtagggccattatgataggattcgtgccctcataagaagagatagtagagagcttgcatgctctctctcccagctacgtgaggacatagtgaaagggcagctgtctacaagccagaaagagtaccctcatcagaaaccaaccatgttggcaccttgatctcgaac

SEQ ID NO: 7636 - DNA, 764 bp, Homo sapiens
catttcccttaagatgctctctaatcataaaaacaaattttttaaagatcacatgtttttaagctgtcaagtgatgcttaaaaacatttgatatataataactatcatttttttagtagcctcctcctttacaataaaaaaaagaacctgaattgtcaaaaatatcacttttattctgcagtagggaaaacaaactgtgcccgaactgaccatgctcacaacattccactcggttcctgatgcgcacgtggacagccctatccctgcatatgaaggcaggttgaaggctttgtgtatgaacactcacctaactttgacaatgttctcaaaaagtaaatcaagaatataaaggcaggttttacatgtgaaccacccaaggttaacagcgggggcacgggagtggcagtggctgtgacatgtgggctcasgggcaagaggccttcatgaagtgtcaaggctgagcggggagagcgagccatccacacggaggtgttactcaaggtcctgacactggtctccaagacagtgacttgggagaaagtgtagagccaagggcagggcaagaagagaaaggggaggaagagatgccaagggaatctagaaagggcccagaggcccacagtcagcatcagtcaatactcacaacccagagtggctgaggaaggcaattcatgagaaacatacacctgtggctcctcagccaagtcctccaaatgtctgctctagggagaccctcatggtgagcgatcggatctacacggatc

SEQ ID NO: 7637 - DNA, 638 bp, Homo sapiens
tctagtactgcaagagaaaggaagcactcgaaaggtagattctttgtttgagtttatgccacatcccttaaagcagtttgggtttcagataacagttctcctcctcatattacatagccaacaaggtagagaaagcatcaatttatggaccaaaatactcagtttccattcccagggttgmcaaatgaccttggataagtcactttacttccctgagactcggtttccctgttggtaaagggccacagttatgtctcacagagctgttgtgaggcgtgagaaatcacacagaaatctttcagaatggtaaaagactatataaataggtgattgttagtcatcattagctagaaaactactatttatgcaatcgatgatcaatcaatggggtaagctgttggttggttaatgggttttcccacactgtgcctcagagagctgagtgacaaggaaaacccaaataagttgactcaatggccagttccactggcctgagagtcaggctgtcctgctgccaggggcagacaggccgcacacctaaatgcagaggataatggggcaactaggggtgatgctgagaggaaactggcatttttcacagtcttaggaaaaaagaagagagggacaatgtcaccagt

SEQ ID NO: 7638 - DNA, 638 bp, Homo sapiens
tctagtactgcaagagaaaggaagcactcgaaaggtagattctttgtttgagtttatgccacatcccttaaagcagtttgggtttcagataacagttctcctcctcatattacatagccaacaaggtagagaaagcatcaatttatggaccaaaatactcagtttccattcccagggttgccaaatgaccttggataagtcactttacttccctgagactcggtttccctgttggtaaagggccacagttatgtctcacagagctgttgtgaggcgtgagaaatcacacagaaatctttcagaatggtaaaagactatataaataggtgattgttagtcatcattagctagaaaactactatttatgcaatcgatgatcaatcaatggggtaagctgttggttggttaatgggttttcccacactgtgcctcagagagctgagtgacaaggaaaacccaaataagytgactcaatggccagttccactggcctgagagtcaggctgtcctgctgccaggggcagacaggccgcacacctaaatgcagaggataatggggcaactaggggtgatgctgagaggaaactggcatttttcacagtcttaggaaaaaagaagagagggacaatgtcaccagt

SEQ ID NO: 7639 - DNA, 638 bp, Homo sapiens
tctagtactgcaagagaaaggaagcactcgaaaggtagattctttgtttgagtttatgccacatcccttaaagcagtttgggtttcagataacagttctcctcctcatattacatagccaacaaggtagagaaagcatcaatttatggaccaaaatactcagtttccattcccagggttgccaaatgaccttggataagtcactttacttccctgagactcggtttccctgttggtaaagggccacagttatgtctcacagagctgttgtgaggcgtgagaaatcacacagaaatctttcagaatggtaaaagactatataaataggtgattgttagtcatcattagctagaaaactactatttatgcaatcgatgatcaatcaatggggtaagctgttggttggttaatgggttttcccacactgtgcctcagagagctgagtgacaaggaaaacccaaataagttgactcaatggccagttccactggcctgagagtcaggctgtcctgctgccaggggcagacaggccgcacacctaaatgcagaggataatggggcaactaggggtgatgctgagaggaaactggcatttttcacagtcttaggaaaaaagaagagagggacartgtcaccagt

SEQ ID NO: 7640 - DNA, 665 bp, Homo sapiens
tgataactcatccataataagagctaacacttacaaagtgcttattatgtgccaaacaagtattaacttgytcatcactttattttcacaacagccctatgaggtagagatggttattattctctgttttacagatgaggaaactgaggcaaggagaggcttaaggatttgcacaagggcacacaggtagtgcatggcacagccaggaataagtgggtcttcagagtctatgctcttaacctctataccacagaacattctatagttttactgttttcctgcagagggaacattaagccctccagggtctagttttggacattaagaagcagatattaactcatttccgtttctttaacactccaggcctttgcacatgctgttcccttagctgaaaacactgttctctgccattgcacagtggcttcctttcattcttcagtttgggtttaagtgctacctcctgagccagatccatcctgcccatcctgatgaatccaacccctctcccccatcgtgttgttctcgagcactgaaccctgttgatgtatgtatttgtttgtttgcttacgtagtttctgcttccccagctagaccaaaaagtccaagaaggcagagcacacatctgttttactcatcactgtttgcttagggcattcagggct

SEQ ID NO: 7641 - DNA, 608 bp, Homo sapiens
ccacttgttttcccatcttttttaaaagatgggaaaatctgagcattaataagcattttttactgcattaataagcattaattttactgcaatgaactagattcatgagttcataaaaataatgacttttgaaaatttattattcctgttgacaaatactaggaaaccagctcatttaaaaataattggtaaataaagatacagaatcaagcatttatcttgcattttccttttcttcattttaccatgtaagataacatagtcacaggttctgaggatgagggcatggacatctcggaggagggcatttgtcagcttctgcaggtagatcattccataatctactctgtgctcatgtgtcgcagggcrctgtatgttcctgggtgatattttctagatacagtagctaaaacctctgaaacaaggtcttaaccaaatgggaaaagtgaatagtgggaaaagtacactttgtagaagggcagaagacagaagattagccagcaagcatcccagagaagtgtggagtcctgggaggtcccatccagtgtacagagtcggtgcttcctgggaagcagtgagaataaggccgtggataggcacagaattca

SEQ ID NO: 7642 - DNA, 488 bp, Homo sapiens
ggcatttggcctaatatctacagagtagataacctttgtgtcataggttagctccaggtatccatgtaatctctggaataaagaaatatgttttcctttcaacttcttctccctgaatataaatatatatttattttatatatattataatatatatataataatatatatattataatatataataaatawatattataatatattatatacattattatataataatatataatatataatctatataatctataattatatataatatatataatatataattatatatataattatataataaatacatattattatatataatatatatatctactaaatgtaagaaaaaatcctaccttcatttccactctacagtagaatttcctgatctggtacctcaggttttcctcttgtggttgaactatgctcttaacctagttctgacatactctagcaatttccaggcattcatccaagttatt

SEQ ID NO: 7643 - DNA, 488 bp, Homo sapiens
ggcatttggcctaatatctacagagtagataacctttgtgtcataggttagctccaggtatccatgtaatctctggaataaagaaatatgttttcctttcaacttcttctccctgaatataaatatatatttattttatatatattataatatatatataataatatatatattataatatataataaatatatattatawtatattatatacattattatataataatatataatatataatctatataatctataattatatataatatatataatatataattatatatataattatataataaatacatattattatatataatatatatatctactaaatgtaagaaaaaatcctaccttcatttccactctacagtagaatttcctgatctggtacctcaggttttcctcttgtggttgaactatgctcttaacctagttctgacatactctagcaatttccaggcattcatccaagttatt

SEQ ID NO: 7644 - DNA, 808 bp, Homo sapiens
agacccccacccccactacacacacccaaacacacacattcacagcccaagtagccccacacatatttgttttaaaggaatatcacatagggatttcatagaaaagaggctgtaaaatgtaatggttacaagaatgtgctttagaatcaaatcaacagagttgaaatgtccattcaacaactccagctrtgtgagttatataagcctcagtttccatatctgcaaacttattattaatgatatattattgattattttttattattaactgtagtcatagggatgtcttcgggggttaaaagaggtaatacaaagggcttgcaacagtgtctaccacactgtattagtccgttttcatgctgctgataaagacatacccaagactgggcaatttacaaaagaaagaaatttattggacttccagttccacgtggctggggaggcctgacaatcatagtggaagttgaaaggcatggaggaacaagtcatgtcttacacggatggtggtaggtgaaaaaagagtttgcacaggggaactcctctttttaaaaccatcaaatcttgtgagactcattcattatcacaaaaccattttttcttcttaggcctctgggcctgtgatgggagggtcttgcctgaagacctctgacatgccctagagacattttccccattgtcttagggattaacatttggctacttgttacttatgcaaatttctgcagccagcttgaatttctcctcagaaaatgggatttttcttttttgtcacattgtcaggctgcaaattttccaaacttttatgctg

SEQ ID NO: 7645 - DNA, 795 bp, Homo sapiens
cagtatcctagaaagagaaggagcttccaaaaccttggccatgatgaatagcatgtcagtcactgcttcacaaatctccaactcttaaaaaaaaggctttcattattgttcaacattgacaaggaaacccatctttatctaagctctgggcatcatgattaccattacctagtgcctcctatatgccagccctatgcattttctgtatattttctcaaatcctcagaacaacctggtgaagtaggtgctttgtttatctaatgccatgtaaccagcccaaaacttaataggttaaaacaacaaccttatattctcatgattctgttggttaattgtgcagttcagctgcctgtggctgtgttcagctgaaagctcagttggggcgcctcagctcttctccaagtggcttctttcccatcctccagggcttctccttgtgccctttctctttggcagaatatcctggactgccttaacatatagcagctgggtttcaagaggggaagattccaagaggacaagcccccagcatacaagtgtttataaaggcactacttccatcaygcttgttcatgtctcactagccagagctagtcacgtggccaaaccaagccgatgtaggaagagacttcacaggggtttgaatatcatgagactcgggagtcaccagtggaagagtctaccacagtaggtatcgtttagccttcttttgcagttgagggcacagagactcagagaggttaatccagttgcccaatgtcatccaacatagtcaggaacagaggacccagctct

SEQ ID NO: 7646 - DNA, 1758 bp, Homo sapiens
atccgtagttttggcagattctataaacttacggtagatatcctgcgcaattagtgaaactggcaaatccctgaagtgcagtttcggagttccagtgataatgttggtatcttcatatgtgttcacagaaatagctgctttctcaccatctgtcaaaagctgtcttgacatcagttaagtcactaaatcctgatacatggtatagtccttcagaactggractttcagactcaatctccctgttgcacatgtctgccacccttggctgcttagcagtgtgtgcttttgacaagcattgtaaggtcacagctggacacgttggcatgcctcaagcctggcttccagtcatttgggaccatgttgggtcactgcttgtgaacactgaaatcaatccacacagttcactccctgagcaatgagaccatacatgaggatggcacggtattcatgccagcgtgggcctctcgatgcatggaccttgaaattgtgaaccttttcatattttggaatttgcttgttttctttcagagttgctctcctaacgagtgatgtcacccttttctccgacacctcatcctggcctatagaatctcaccacgtgtctttttcaggactggcatatattttttgcaaacagactctctgtttaaggttgtgcatcctatgtgctcataaactgggtttatcatcatcttggcaatgtattctgctgccttgtttcaatatagagagtaatcaagccatcagttaccagattgtggatggacacacagtgtttcttcccagcaaagtgatttccatcgcactagaacctgaagtttcttgtttgacttcccaatctgaaagctaaagtgtagggccctgccttttgctgcctctccccatgatgtatctccctcagccacactcaagagctggtcagctgcttctccagagatcatgccgtgaaactctcttccatgatactttgggctgttttctcccttgaaagtacagataatccttcgaggattagggtcttcctgttgtagttgatataagtaagatttccaaataggaaatcgattttcatctgtatcaaacagggtcagggccgatctttttttttttccccatagactcaagaacatggatagcatcacagcattatttgcaaaaagactctactagaaaacaagactattgccccaaattttttccgtttttgttttttaaatattgagttggtcttgaactcctggcctcaagcaatcctcctcctttagccttccaaagtgctaggattataggcctgagccactgcacccagccatagccaggtatttttttttaaatgattgcccaacttattttgttatttacttatttatttaggatgtaagcaacaaacatttattttgcgcagttttggaggctgggcaccagcagactggtgtctggtgagagtatcctcctggtttgcagatggccatcttctcaccacatcctcacacagcctccgtgaagcctatttgctccttctggaagcttcccaggggtctgatgagaaaatcactagcatgtgtgctatcgtcatcttctcttcctctacctttttgagcaattcaacaaattccttgaaggattcagtgatgttaatatcatcatcaagtcagagtatctccaatgaaatcaaactgaaatgaccgcagcatctgggaacatttctgacctgcagaagagtaatgctcaccagctcattataaaggatattacaaa

SEQ ID NO: 7647 - DNA, 1663 bp, Homo sapiens
ctctcaaaagccaactcaagttcatctttcttcttgacaccttccctgaatattccagccctgctgagcctagtccctttgtgagatttgtcaccatttcttggacaccatatgagagacttcagaggctgaagtgggaggatcgcttgagcctgggaggtcgaggatgcagtgagctgtggtcgtaccactgcactctagcctgggcaacacagctaggccctgtcttaaaaacagccaccaccaaaaactatcttgggatttgaataggattacgttaaatttgtagattaatttgagaatttacatctgtacgacattctaggaacgtgctatctcatgtcatgtattcatttcttgttaatgtctttcagaagagctttagtgtttccatatatagatcttatacatcttttgttagataaaagatctttgtatttttgttcctaaattcttcatacatttgtattgccattgtaaatgggatctttcttccattttctaattagttattggtggtacatgggaaaagtatttgaggtttgtgtgctgatttcttgattttgtagatagccactgtattgaattctcattacttccagtaaaatcttagttgattctcttaggcttctttggctaacatttatcatttaatatgcaaataatgatagttttgtctcttcctttccaatacttctactctttccttcctttcccttttcctttttcctttcctttcctttccttttttttcccttctcagggccttgttgtcacccaggctggagagcaatggtgtgacctagctcactgtaacatcaaactcctgggcttaagggatcctcctgcctcagcttcctgagtggctgggactacaggcaggcagctaatttaaaaaatgtgttygtagagacaaggtcttgctatgttgcccaggctggttttcctgccacttcagaggaaggactcaggtttcctttttctcctacttttaagagtttttattaggaattatctgttgaatgttatctaaaacagtcaataaaatgtattaagtgccagctgcatgcaagaccctaagttagatacagtcagccctcttcatcagcaggtccacatcttcagattcaactagatcaggctgaatatttgaagaaaaaaaaaaccaataaaaatacaaacagaaagtacaatataacaactgtcaacaatgtacaatatgtatacattttattagtgatgacttaaattacatggggccaggcatggtggctcacacttgtaatcccaacacattgggaggccaacctgggcagcatagtgagaccttgtctttattaaaaattaaaaaaaaaaatagccaggtgtggtagtatgcacctgtagtctcagctactcaagaggctgaggtgggcggatcactggagcccaggaggttgaggctacagtgagctgtgatcgtgacaccgcactccatcctgagtaacagaggatgacactgcactccagcgtaagcaacagagggcaatcctgtcgctaagtaaataaagtataggggggatgcgtgttggttataagcaaatattacaccattatatgtaagggattgagcatccacagattctggtatggtgtgggggcggtatcctagaaccaatccccc

SEQ ID NO: 7648 - DNA, 1663 bp, Homo sapiens
ctctcaaaagccaactcaagttcatctttcttcttgacaccttccctgaatattccagccctgctgagcctagtccctttgtgagatttgtcaccatttcttggacaccatatgagagacttcagaggctgaagtgggaggatcgcttgagcctgggaggtcgaggatgcagtgagctgtggtcgtaccactgcactctagcctgggcaacacagctaggccctgtcttaaaaacagccaccaccaaaaactatcttgggatttgaataggattacgttaaatttgtagattaatttgagaatttacatctgtacgacattctaggaacgtgctatctcatgtcatgtattcatttcttgttaatgtctttcagaagagctttagtgtttccatatatagatcttatacatcttttgttagataaaagatctttgtatttttgttcctaaattcttcatacatttgtattgccattgtaaatgggatctttcttccattttctaattagttattggtggtacatgggaaaagtatttgaggtttgtgtgctgatttcttgattttgtagatagccactgtattgaattctcattacttccagtaaaatcttagttgattctcttaggcttctttggctaacatttatcatttaatatgcaaataatgatagttttgtctcttcctttccaatacttctactctttccttcctttcccttttcctttttcctttcctttcctttccttttttttcccttctcagggccttgttgtcacccaggctggagagcaatggtgtgacctagctcactgtaacatcaaactcctgggcttaagggatcctcctgcctcagcttcctgagtggctgggactacaggcaggcagctaatttaaaaaatgtgttcgtagagacaaggtcttgctatgttgcccaggctrgttttcctgccacttcagaggaaggactcaggtttcctttttctcctacttttaagagtttttattaggaattatctgttgaatgttatctaaaacagtcaataaaatgtattaagtgccagctgcatgcaagaccctaagttagatacagtcagccctcttcatcagcaggtccacatcttcagattcaactagatcaggctgaatatttgaagaaaaaaaaaaccaataaaaatacaaacagaaagtacaatataacaactgtcaacaatgtacaatatgtatacattttattagtgatgacttaaattacatggggccaggcatggtggctcacacttgtaatcccaacacattgggaggccaacctgggcagcatagtgagaccttgtctttattaaaaattaaaaaaaaaaatagccaggtgtggtagtatgcacctgtagtctcagctactcaagaggctgaggtgggcggatcactggagcccaggaggttgaggctacagtgagctgtgatcgtgacaccgcactccatcctgagtaacagaggatgacactgcactccagcgtaagcaacagagggcaatcctgtcgctaagtaaataaagtataggggggatgcgtgttggttataagcaaatattacaccattatatgtaagggattgagcatccacagattctggtatggtgtgggggcggtatcctagaaccaatccccc

SEQ ID NO: 7649 - DNA, 1663 bp, Homo sapiens
ctctcaaaagccaactcaagttcatctttcttcttgacaccttccctgaatattccagccctgctgagcctagtccctttgtgagatttgtcaccatttcttggacaccatatgagagacttcagaggctgaagtgggaggatcgcttgagcctgggaggtcgaggatgcagtgagctgtggtcgtaccactgcactctagcctgggcaacacagctaggccctgtcttaaaaacagccaccaccaaaaactatcttgggatttgaataggattacgttaaatttgtagattaatttgagaatttacatctgtacgacattctaggaacgtgctatctcatgtcatgtattcatttcttgttaatgtctttcagaagagctttagtgtttccatatatagatcttatacatcttttgttagataaaagatctttgtatttttgttcctaaattcttcatacatttgtattgccattgtaaatgggatctttcttccattttctaattagttattggtggtacatgggaaaagtatttgaggtttgtgtgctgatttcttgattttgtagatagccactgtattgaattctcattacttccagtaaaatcttagttgattctcttaggcttctttggctaacatttatcatttaatatgcaaataatgatagttttgtctcttcctttccaatacttctactctttccttcctttcccttttcctttttcctttcctttcctttccttttttttcccttctcagggccttgttgtcacccaggctggagagcaatggtgtgacctagctcactgtaacatcaaactcctgggcttaagggatcctcctgcctcagcttcctgagtggctgggactacaggcaggcagctaatttaaaaaatgtgttcgtagagacaaggtcttgctatgttgcccaggctggttttcctgccacttcagaggaaggactcaggtttcctttttctcctacttttaagagtttttattaggaattatctgttgaatgttatctaaaacagtcaataaaatgtattaagtgccagctgcatgcaagaccctaagttagatacagtcagccctcttcatcagcaggtccacatcttcagattcaactagatcaggctgaatatttgaagaaaaaaaaaaccaataaaaatacaaacagaaagtacaatataacaactgtcamcaatgtacaatatgtatacattttattagtgatgacttaaattacatggggccaggcatggtggctcacacttgtaatcccaacacattgggaggccaacctgggcagcatagtgagaccttgtctttattaaaaattaaaaaaaaaaatagccaggtgtggtagtatgcacctgtagtctcagctactcaagaggctgaggtgggcggatcactggagcccaggaggttgaggctacagtgagctgtgatcgtgacaccgcactccatcctgagtaacagaggatgacactgcactccagcgtaagcaacagagggcaatcctgtcgctaagtaaataaagtataggggggatgcgtgttggttataagcaaatattacaccattatatgtaagggattgagcatccacagattctggtatggtgtgggggcggtatcctagaaccaatccccc

SEQ ID NO: 7650 - DNA, 755 bp, Homo sapiens
tgccacatgacccagagtaagtgcaagaggcttyaggcaagcactgagagtctaccacagaatagggcacttcattcaatcttgtttataataggtgaaatatacctataatttcttactgtattactggagaaaaatcagtttatttatgtattcagttcattaaacaaatgcttttgtgaacacctactcggcactgtcctaagttctgtctctgtcataaaaagcaggggtaaagcattgctcacattacttccctgcacatcaactcttcattggctctccagtcacatggtgacatgtgcaaggggacagcattagagtaagaggggtgagaagcgtaacataggccagatcatgtggagttttgtaggactttgaatttaacttaaatgaagggccttaaaacattctatgcagaagagtgatataatctgacttccttttttaaaaaataattctggctgctctgttgagaacagacataagatgatggggtagacacattgagctctcttaggaagttatgtagtaatccaagtgaacaatgattatggttttgagccagggtagaagcatggatctggtgaaaagtggtctgattctggatatattttgaaatgaaggtatttaattttgaactaaataattagaatttgaagacaggtgagacgtatgctataagacaaaaaggtcttaacttgagctcttaggagcatggagttgcagccaactgaggggagataagccttaat

SEQ ID NO: 7651 - DNA, 791 bp, Homo sapiens
gtttagggtaccaatgtgggtcttgatgcaagtaataatacctctggtctctgctccacagacttcagatacaatgaataaatatagatattaaatacttcttatattactagttacagtggcttttgaagcaatgctatgatgtaaacatgagtgtggtcgctttttatttcccccagtgaatctacccacctcccagcatctgccaccataccatagataaagacatgtgacctgcctgctggagctggcttgctctttatttcatagactaactctgactatagaaagagactgaagaggagctctttcatatatatatatatgttaagtatcttttaaaatgtataccctagttctgataactggacwtgttgactgcttaaatgctataaatgaccaatttctaagtagtcttaggatctaatatgctgtaatgatgcctaattttttcttcagaaaatttactgaattttaatatttgcttcagtaacaaattaaacaggatgtatctgtatctctctctctctctctctctctctctctctctctttctctttctcccaccttcatttctctctttctttcttaactgttctactatacaaagcctttattttggtccaggttttttcaccgttaaagtgataagttgtcctggataataatacatgaataacagaaacacttctattctatccatgagacacaaaggaaaagcgttctagaatcccatcataataatttctgtagaaagaagagtatttgaaatttattctcattaggatccc

SEQ ID NO: 7652 - DNA, 1604 bp, Homo sapiens
agggagaaatagtaatattcagaatgcaaaagctgtcagaaatatcgactggtcttgaatcaaatgggttttgctttgtgaataaaggtggtaatgagacacggaagtcatccagactatgcagagctccagcagaggctccaaaaagaggggcagcaaagatgccaaccagatatgcataataaagtagaatgaggaaaataaatctgtgcctgttccctggttagtagtcactcttatgcaagacatcacactgttatacctgtctagaccttgcatgtgatctggcctgaaggagagaatttcagaaataccagggtgaggcaggagaaaatgtttactgaaatagataattgaaagctccacttctagcctgtcagtttggccagctgaataattgcatctgaagccccgagtaaactccatctctagatgagttgttccgattaaatggtgtcacctgtagtcattgacaagtccctggattgtctctgtcaagcaccatctgtgcacaccagagacatatccaaaggctactggcaaacatctttagataatgagcgtaaattaataactacttttgtacgtcacgagagatcatgccattttaatgttatgccctttgggtgaacaaatgggacaaagatcttttagatactaatgaatagtgtcttacaaggattaatttgcccaactttttgctgagttggcatcacatgcaatgtggtctgatttgttggatctgtggcgggggtcggtttgcggaattaaaagagggagagttttaattttgagcatgaagactgttatgtagagaggatgtcattctggatccttaatgactcagcttttcatggggtcacccagtagagttgtccaggctgtattcacattcacatagattttggtctagatgcatggcgccccctagagttgtgtctgcagctgtttgcagtgcttccataagcttctgagggctctgtccatcatttctttccaggtgacagcgtggaataccaatggtaagtgtaatattccactggattaacaagaatttggttcacagcaaggatttatagtcattctgataacaaatacggtacctctttttcttgtatatatatatrtaggagttacctgtgtatgtatgcattttctaataagaacttagatataaatttttagctgtcatacttccatatatttaaagtataggtaattgtcagcattgtctagaggacagagaaataggcattctcttaaattcttatctggtagcatatattgttagagccttttgacttttaggaaaatttggaaatagctattacatgaaaatgctcatatcctttgaccaaacagaaatgcttccataagcgttcaaatatatgtataagtattgtgtattgtaatttgcgatgacaaagacagtcagatatttacacacatcccaaagtgggaatttgatgaaatcaactgtggaatgtctgtctgtgctgtagaatgctgtgaaatgatcaaagagtgaagcagattgcctggctggtacacagttggtcgtatttgcaagcaagagtagcaaagctatctgtttataagaacca

SEQ ID NO: 7653 - DNA, 705 bp, Homo sapiens
aaaatgatgcaatttggaatatttgccctggactaatattaatagaagaccagcacccatccagttatcttctaaatgctgctggtggtggaagaagtcttggccattttggatggtcaacacttatgagaatgtagtggaaactatggaaacaatagccaatctattaatacccacacaccctcttcaaacacattttgtaagtaacttgcaggctctctatccttttagaggtattcctatgaagacactatttttgtaggtgtttaaaatgggtgaactagacaaaggcatgatagaaagtaatgtgtttgtgttcagagacatgttcaaaaacggctgtaacttcagtgtaaagatggtcttagaaaagtataaatagctttcttcaaatatttcaatgaggaaatgtcattgtaggtttatgctttggaaatttgaggtggttatgagttgatgaccrctgtattgatgatatgcacccttgaaatgtggatctccagaagaaatttctgcttaatgtcactaggagcaatagctggacttctggtttattcttatggtgtgaatactggggactttgtaaatgattaaggtttctctttttggctttgttgctagaaagacttagaataaaatcagcggtcccttcaaacaaatgtgtaagactacattctgttttgcattcaaccatttctggatcca

SEQ ID NO: 7654 - DNA, 823 bp, Homo sapiens
aaaaatgataaaaggattagaggatatgacctacagagaaagattattaaaagaactcatacatccagcctggagcaaygatgacagtgggtggggaatgtgataactgaacataaatactaggaataggtaagaaataaggaaaaaaactattttgagttattagagggtggacaaacaagaatcaatggccttaaaccagaaaagcaagcacttgtgtgaagtattccaagaagaattattttcaacagagaggtcaattaacaccttgattatttcatctgagaggtgatcctatgcagttctttagatagtacctccaaaggctgattatgcagaaggaatatgtatcctggctgccaacactgcatctgtgcccaagtccttaggcaatatatacattttgaaatggagacaaatatcatgtattttttttctctatgtttttctcctttgcctagtgtggttaagtgcactggtgaccttcaaaacaatatgtccttttctacaaccacagaatctttgaatatgactttatttcaaaaaggcatctttgaagagataatttaaggaccttgagataagggcaccatcctggactattcggtaggtccttaattcaacaacaaatgtccttataagatactgaagagaatacagagacacatgaagaggaagaggcaatgtgaccacagagacagaaattggagaaaggtatccaaggaagccaggatggcttggaaccaccagaagctagaaggagcaagaaaggctctttgcttggagtcttcagaaggtgattggctctgccaacaccttgatt

SEQ ID NO: 7655 - DNA, 823 bp, Homo sapiens
aaaaatgataaaaggattagaggatatgacctacagagaaagattattaaaagaactcatacatccagcctggagcaacgatgacagtgggtggggaatgtgataactgaacataaatactaggaataggtaagaaataaggaaaaaaactattttgagttattagagggtggacaaacaagaatcaatggccttaaaccagaaaagcaagcacttgtgtgaagtattccaagaagaawtattttcaacagagaggtcaattaacaccttgattatttcatctgagaggtgatcctatgcagttctttagatagtacctccaaaggctgattatgcagaaggaatatgtatcctggctgccaacactgcatctgtgcccaagtccttaggcaatatatacattttgaaatggagacaaatatcatgtattttttttctctatgtttttctcctttgcctagtgtggttaagtgcactggtgaccttcaaaacaatatgtccttttctacaaccacagaatctttgaatatgactttatttcaaaaaggcatctttgaagagataatttaaggaccttgagataagggcaccatcctggactattcggtaggtccttaattcaacaacaaatgtccttataagatactgaagagaatacagagacacatgaagaggaagaggcaatgtgaccacagagacagaaattggagaaaggtatccaaggaagccaggatggcttggaaccaccagaagctagaaggagcaagaaaggctctttgcttggagtcttcagaaggtgattggctctgccaacaccttgatt

SEQ ID NO: 7656 - DNA, 808 bp, Homo sapiens
attcggctgagagctaggatatgaagaacaagtttatctaaatgaataaatggaccaggaacctaagattgatggtggctgaatctcttgtgaaggagactctaagagctctgaggtaagttctataggctcagctggtattcagaatcagggctccagcccatgcaagggggactgcaaatgcaagaatgggttctactatgaggaagagcccagaatacttggcatctcagaactaggacatttcaaagggtagaatagcaacaacagtagcttaatgagagccttccaagtagagagcaatgagcagcactcaactttatatgtactttttccttagcaggaatcttccctgacaaactgatctagagttcagacttcaggttgtaattcaatgaaatctaagaaatgggagtgaaaagtaggctggacctaaaaagctctctccacatgtagcaacaggtacaggaccttagaccagaaactctagcactataggagccagtatactgatattcattcaacatttaactagcatatataaagacagaaaaaaaaagttactaagctatttaacaaatataaatatcaaggcaatattacaaatatttgacaaatacatatgcaagtagaaatttttaataataccagtgatgatagtgccttcatgttgccaaaaaatagatkatctaacaacagtcatttattctgatatgctaagatgtttcctatcacttccaaggtatttgattcaaagtggctttggaagaaggtatgattacttcaaagggatacttaacacatggta

SEQ ID NO: 7657 - DNA, 730 bp, Homo sapiens
cccgagggagtgtccagtgggttttaatggccgtgtctagagaggcactcctgctctgtacaagggctggcttcttccctggatctaggggttgcccctgccttttagaagacagatgcacagccccagagcctagttgcctcccctgaccccctccaagccttccatagaggaaaggggcctcccatagcactggctgatgctcagagccaagagtttgctgcccagggagtaccttgagctagtgctgggtgtcagacttgactttccaactacttccagtgcaattcaaggtgttgattttgactgctggaactgtctcttccttctcagccctttctcaaggctgcctgtgtgcttgttcttattaaccaagcccagaagccagggatctggaagcctggcagtatttccaggaaagtagcttatttctctcasttgcttctccctgctgagcttagaacggcccagctttggacctcttgaaacatcagggcaaatttttccccctctttcaatttgcatctacctgctggtgaaaaaagcagaacagcatcttcatggatttatgaacgctcagagtttttaaaatgttttatagcttgtaagatattttcaagtgaagaatgcagttctaataaatccaatgaacctgtcacagattttctgaaaccaagtgtctatgaaaaactatggtgatgacatgttgaaggtgcttattgaaaaatat

SEQ ID NO: 7658 - DNA, 419 bp, Homo sapiens
acacacacactccaaagaaagccaatgcctaaaccactggagtggttcccttcttatgactccctgtgraggcatgggaagagtgcctgagctgggctagtgtctaaaggccacaagaaatagggaagtcaactattaaggctgatgtaaccttaataaagtgaggttcatcaggtttagagacagatattccttactcccagggctggccctaatttcccagctttatctagcttccctgtaagctcccaggtccaggacagaaagagacactgcttcttcagtcctcccgctagtgatcccaccagtggggagggccgactcctccagatgttagacaaagccagcatggcttcagaagtcacaaaggagggagaagtaccaaggggccatgcaattgtgctacccattcttgccca

SEQ ID NO: 7659 - DNA, 567 bp, Homo sapiens
atcaagaggaaggtgctacctattttgtagatgttgaaattaagacccagaaaagtgaggtgtcttacatgaggttatataataaactaattgaaaagccaaaaagaatccaagtctcttgacccttcttctacactcttggtgccaaaggggtgaggaagaggcaacaaggcacagccttacagtcctggtgggtgaaggtgtctgggtaagtctatacatatattttattttttaaagttttgstagagttgggggtcttgcctaggttggtcttgaactcctggcctaaagtgattaccacctgcctcagcttcccaaagtgttaggattacaggcgtgagccactgaacccagcccaaaggtaaaagtctgtctttggagggcaggttggtgtcccccgcacagtgctcagcgactcaggctgcctagagtaaggtgaggatgggcagcaccctacccccagctagacttcagcatcgaagagcagagtgggcctcttgtcagtgcaatcaggaggtgttctggagttcaaccccgccctcccccctggggtggggttggagg

SEQ ID NO: 7660 - DNA, 578 bp, Homo sapiens
cattggaggaagacagggacctagagagctactgaagggactgtctttcccaccccagggcaggccaggctggagccaggaatctggggttagggcagcaggcgcagctcagcagcactcttggggagggggactcttggtcacctcccactgttcccctgcccagctgagatgtcaggccagccctgcattggctataggaaagctgctctgctgaaggggcagacaagttgtggatgagggcccagtgccrggcaggaccgatcaagcccaactcacctgccctggctctccaggacttggcaaggctgccaggtgcaggcagggggagagtctgctttcagtcagccaagatgaggggctcttgggggtctctgaccctgcggagccagtggaggaaaggagtggaggcaagagattacagcatcccagagggaggccggggagggggacagagaccccagcccaagcccccacaatcctcaggcagctggaaaaggcaggcgaccaacagatgggcctgctgggcgggtttcctctctggcaggcagagggcaagggccgcagacgagtcccac

SEQ ID NO: 7661 - DNA, 593 bp, Homo sapiens
ctttcctgtaccaatccattgtaaaattcaatctgattaatgctaagcatacatatgcccagtagcagagacgtgactatgcagtttctgttaacgattttttctaaaacacagtggcttacaaataattgtattcttaatttcaaggtctttattactattcttttaattaatatatgtgtgtgtttatatatgtgtacatactatataggtatatattctttattatgtatatactctttgacaactaatttgtatttttcttttttcatattaatgatcttcaaaacyaattttaaaaagaattatagttaaaatatcattaagctaaaatgataaattatcagttattatctaactcatgagatatttaaaaaaatacatttctggaatcaaaagagaaaccaaaatgtatcttgagacaaacaaaaatggaaacacaatatatcaaagtttatgggatgcagcaaaagaagttgtaaggttaaaatttatagagataaatgcctacattaaaaaaaaatctcaaatacacaacctaactttaacctaaggggattataaaaagaaaaacaaactaagcctaaagttag

SEQ ID NO: 7662 - DNA, 761 bp, Homo sapiens
tatctgggtccagcctgacctctgctcatctcatggtcccagcttggcctctgctcatctcgtggtcccaacctcccctcaggctgtaaaagccatgagaaccatcatcattttctttttaattgggagatatctacaaaacagccttttgtggcaggtgtcattactgaacgctgactctatataagcaaatattattctccatattttcagatgtggaaactgaggctgaaaagatctatgtcttgctccaggcacagctctcagagctgggattagtccttaatgggtctggccacacggaatccttttctagaccatattacatacaaatttgttacttttcattcaatagagttaacaatctcttccttcagcctaacctcgacatctttctctctattttaaagttgcttgggtagtaagactggaaagtagatccaggaggtgctgcagaaattgctcttctgatctcattacaccaaaacagraacttctgtgacctctcctgccttttttttttccactcacccctcatgacctaacttggctgctcatagtcatcaagggctcttttagaagcttggttatactgcagggtaatttacattctccaccgcccattggcaattagtgcatctctcacgtgcacacacagcatttgctttgacatttgatgggacatgtatagacttgtagaggagaaactgcctcttacctggagcttctgtccttaattggggttgtcttgcttatgttaa

SEQ ID NO: 7663 - DNA, 616 bp, Homo sapiens
tttggcccagactgacttggagacagggaccccttccagttggccattgtgtcctgaacagaaagcttaatttttctcctaaaccctcaactacctcagacttggggctrgagctgaggggtcagaggcaaagtttattctatactcaggcaattgactgttgctaagggagggtatagagcttgaacccaaggtccctacagtgcctcagcccgaaatcaggacgtggcttcctgccctggctctgtcaccccagctttcaagatgttttcagatatactcttgttgaatgtcattgtcacagtcacccatacagctggaaacaggagatgaggtacagtctaagggctaggattccaagactcagaaagtactcaaaggaggagatgaagcactccaccccatctctgtccccttgccaccctgccctctctgctctctgtggtcagagccacaagacagcgctggagtgctagctggggttccgggccagaaacaggaggcttctagaagttattctggcatctctaatctcaataacacattttttcaaagttctttctctttgaccagggcataggaatcacctaagggtcttatagaaagtcaggttctg

SEQ ID NO: 7664 - DNA, 709 bp, Homo sapiens
agggcgagaggcgtgagaaccatcctcttgaaggtctgcgggcaccctcctgcgggtggacaatgagcgcctgggaggccgttgtccttgcttggggagcggtcgtctggatctagcctagcaaagaggctgctccggatggggaggggacgaaaacccctgcggttccgaagcagatgccggcattgcccaggccctcacagacccccaaaccggaaccgccgggaaaccgactgctaaccggctacacgaccgaggcagagacgcggggagaggctgaccagaagaaaggccgacctgcaagaaacccaccctccggcacacggggcacatgtgtcccgaggcacaagcacacacagacggacagagatagaaagagagggcgacggaaagagcgagggcggggaragagagagagagacgtaagagatagacagaagtgggcacacggacgccacgcacgcacgcacacagacacacacacacacacacacacacacacacacaaccaagacgcacacagacatacagcaggtaacacccacccccaggctgcccctgaagctgccgggttctgctctccgcgactacgaggccaccggtgagacagcagcccacggacaccctggcagacctgtcctccacatcacaagggcgctacttttggggagactcacccgcacaccgtccgtgcacgcctgaggctggg

SEQ ID NO: 7665 - DNA, 709 bp, Homo sapiens
agggcgagaggcgtgagaaccatcctcttgaaggtctgcgggcaccctcctgcgggtggacaatgagcgcctgggaggccgttgtccttgcttggggagcggtcgtctggatctagcctagcaaagaggctgctccggatggggaggggacgaaaacccctgcggttccgaagcagatgccggcattgcccaggccctcacagacccccaaaccggaaccgccgggaaaccgactgctaaccggctacacgaccgaggcagagacgcggggagaggctgaccagaagaaaggccgacctgcaagaaacccaccctccggcacacggggcacatgtgtcccgaggcacaagcacacacagacggacagagatagaaagagagggcgacggaaagagcgagggcggggagagagagagagagacgtaagagatagacagaagtgggcacacggacgccacgcacgcacgcacacagacacacacacacacacacacacacacacacacaaccaagacgcacacagrcatacagcaggtaacacccacccccaggctgcccctgaagctgccgggttctgctctccgcgactacgaggccaccggtgagacagcagcccacggacaccctggcagacctgtcctccacatcacaagggcgctacttttggggagactcacccgcacaccgtccgtgcacgcctgaggctggg

SEQ ID NO: 7666 - DNA, 709 bp, Homo sapiens
agggcgagaggcgtgagaaccatcctcttgaaggtctgcgggcaccctcctgcgggtggacaatgagcgcctgggaggccgttgtccttgcttggggagcggtcgtctggatctagcctagcaaagaggctgctccggatggggaggggacgaaaacccctgcggttccgaagcagatgccggcattgcccaggccctcacagacccccaaaccggaaccgccgggaaaccgactgctaaccggctacacgaccgaggcagagacgcggggagaggctgaccagaagaaaggccgacctgcaagaaacccaccctccggcacacggggcacatgtgtcccgaggcacaagcacacacagacggacagagatagaaagagagggcgacggaaagagcgagggcggggagagagagagagagacgtaagagatagacagaagtgggcacacggacgccacgcacgcacgcacacagacacacacacacacacacacacacacacacacaaccaagacgcacacagacatacarcaggtaacacccacccccaggctgcccctgaagctgccgggttctgctctccgcgactacgaggccaccggtgagacagcagcccacggacaccctggcagacctgtcctccacatcacaagggcgctacttttggggagactcacccgcacaccgtccgtgcacgcctgaggctggg

SEQ ID NO: 7667 - DNA, 709 bp, Homo sapiens
agggcgagaggcgtgagaaccatcctcttgaaggtctgcgggcaccctcctgcgggtggacaatgagcgcctgggaggccgttgtccttgcttggggagcggtcgtctggatctagcctagcaaagaggctgctccggatggggaggggacgaaaacccctgcggttccgaagcagatgccggcattgcccaggccctcacagacccccaaaccggaaccgccgggaaaccgactgctaaccggctacacgaccgaggcagagacgcggggagaggctgaccagaagaaaggccgacctgcaagaaacccaccctccggcacacggggcacatgtgtcccgaggcacaagcacacacagacggacagagatagaaagagagggcgacggaaagagcgagggcggggagagagagagagagacgtaagagatagacagaagtgggcacacggacgccacgcacgcacgcacacagacacacacacacacacacacacacacacacacaaccaagacgcacacagacatacagcaggtaacacccacccccaggctgcccctgaagctgccgggttctgctctccgcgactacgaggccaccggtgagacagcagcccacggacaccctggcagacctgtcctccacatcrcaagggcgctacttttggggagactcacccgcacaccgtccgtgcacgcctgaggctggg

SEQ ID NO: 7668 - DNA, 709 bp, Homo sapiens
agggcgagaggcgtgagaaccatcctcttgaaggtctgcgggcaccctcctgcgggtggacaatgagcgcctgggaggccgttgtccttgcttggggagcggtcgtctggatctagcctagcaaagaggctgctccggatggggaggggacgaaaacccctgcggttccgaagcagatgccggcattgcccaggccctcacagacccccaaaccggaaccgccgggaaaccgactgctaaccggctacacgaccgaggcagagacgcggggagaggctgaccagaagaaaggccgacctgcaagaaacccaccctccggcacacggggcacatgtgtcccgaggcacaagcacacacagacggacagagatagaaagagagggcgacggaaagagcgagggcggggagagagagagagagacgtaagagatagacagaagtgggcacacggacgccacgcacgcacgcacacagacacacacacacacacacacacacacacacacaaccaagacgcacacagacatacagcaggtaacacccacccccaggctgcccctgaagctgccgggttctgctctccgcgactacgaggccaccggtgagacagcagcccacggacaccctggcagacctgtcctccacatcacaagggcgctactwttggggagactcacccgcacaccgtccgtgcacgcctgaggctggg

SEQ ID NO: 7669 - DNA, 709 bp, Homo sapiens
agggcgagaggcgtgagaaccatcctcttgaaggtctgcgggcaccctcctgcgggtggacaatgagcgcctgggaggccgttgtccttgcttggggagcggtcgtctggatctagcctagcaaagaggctgctccggatggggaggggacgaaaacccctgcggttccgaagcagatgccggcattgcccaggccctcacagacccccaaaccggaaccgccgggaaaccgactgctaaccggctacacgaccgaggcagagacgcggggagaggctgaccagaagaaaggccgacctgcaagaaacccaccctccggcacacggggcacatgtgtcccgaggcacaagcacacacagacggacagagatagaaagagagggcgacggaaagagcgagggcggggagagagagagagagacgtaagagatagacagaagtgggcacacggacgccacgcacgcacgcacacagacacacacacacacacacacacacacacacacaaccaagacgcacacagacatacagcaggtaacacccacccccaggctgcccctgaagctgccgggttctgctctccgcgactacgaggccaccggtgagacagcagcccacggacaccctggcagacctgtcctccacatcacaagggcgctacttttggggagactcacccgcacaccgtccstgcacgcctgaggctggg

SEQ ID NO: 7670 - DNA, 811 bp, Homo sapiens
aaggccagcttttgagtgacagagatgcttgccccatccccttgccggcttccttctccgtccctgcgtcgagctgtggctccatttctccatgagggagagggcgagaggcgtgagaaccatcttcttgaaggtctgcgggcaccctcctgcggttgaacaatgagcgcctgggaggccgttgtccttgcttgtggagcggtcgtctggatctagcctagcaaagaggctgctccggatggggaggggacgaaaacccctgcggttccgacgcagatgcccgcgttgcgcaggccttcacagacccccaaaccggaaccgccgggaaaccgactgccatccggccacacgacccaggcagtgacgcggggagaggctgaccagaagaaaggccgacctgcaagaaacccaccctccggcgcacggggcacatgtgtcccgaggcacaagcacacacagacggacagagatasaaagagagggcgacggaaagagcgggggggggggagagagagagagagacgtaagagatagaagtgggcacacagacgcgcgcacgcacgcacacagacacacacacacacacacacacacacacacaaacacacacaaccaagacgcacacagacatacagcaggtaacacccacccccaggctgcccctgaagctgccgggttctgctctccgagactacgaagccaccggtgagacagcagcccacggacaccctggtagacctgtcctccacatcacaagggcgccactattggggagactcacccgcacaccgtccccgcacgcctcaggctg

SEQ ID NO: 7671 - DNA, 811 bp, Homo sapiens
aaggccagcttttgagtgacagagatgcttgccccatccccttgccggcttccttctccgtccctgcgtcgagctgtggctccatttctccatgagggagagggcgagaggcgtgagaaccatcttcttgaaggtctgcgggcaccctcctgcggttgaacaatgagcgcctgggaggccgttgtccttgcttgtggagcggtcgtctggatctagcctagcaaagaggctgctccggatggggaggggacgaaaacccctgcggttccgacgcagatgcccgcgttgcgcaggccttcacagacccccaaaccggaaccgccgggaaaccgactgccatccggccacacgacccaggcagtgacgcggggagaggctgaccagaagaaaggccgacctgcaagaaacccaccctccggcgcacggggcacatgtgtcccgaggcacaagcacacacagacggacagagatacaaagagagggcgacggaaagagcgggggggggggagagagagagagagacgtaagagatagaagtgggcacacagacgcgcgcacgcacgcacacagacacacacacacacacacacacacacacacaaacacacacaaccaagacgcacacagacatacagcaggtaacacccacccccaggctgcccctgaagctgccgggttctgctctccgagactacgaagccaccggtgagacagcagcccacggacaccctggtagacctgtcctccacatcacaagggcgccactattggggagactcacccgcacaccgtccccgcasgcctcaggctg

SEQ ID NO: 7672 - DNA, 653 bp, Homo sapiens
ggttggacaatgagcgcctgggaggccgttgtccttgcttggggagcggtcgtctggatctagcctagcaaagaggctgctccggatggggaggggacgaaaacccctgcggttcctacgcagatgcccacgttgctcaggtcttcacagacccccaaaccggaaccgccgggaaaccgactgccaaccggccacacgacccaggcagtgacgcggggagaggctgaccagaagaaaggccgacctgcaagaaacccaccctccggcgcacggggcacatgtgtcccgaggcacaagcacacacagacggacagagatagaaagagagggcgacggaaagagcgaggggggcggagagagagagagagacgtaagagatagaagtgggcacacagacgcgcgcacgaacgcacacagacacacacagaaacacacacacacacacacacatacaaccaagacgcacacagacatacagcaggtaacacccacccccaggctgcccctgaagctgccgggttctgctctccgcgactacgargccaccggtgagacagcagcccacggacaccctggcagacctgtcctccacatcacaagggcgccactttggggagactcacccgcacaccgtccgcacacgcctgaggctg

SEQ ID NO: 7673 - DNA, 653 bp, Homo sapiens
ggttggacaatgagcgcctgggaggccgttgtccttgcttggggagcggtcgtctggatctagcctagcaaagaggctgctccggatggggaggggacgaaaacccctgcggttcctacgcagatgcccacgttgctcaggtcttcacagacccccaaaccggaaccgccgggaaaccgactgccaaccggccacacgacccaggcagtgacgcggggagaggctgaccagaagaaaggccgacctgcaagaaacccaccctccggcgcacggggcacatgtgtcccgaggcacaagcacacacagacggacagagatagaaagagagggcgacggaaagagcgaggggggcggagagagagagagagacgtaagagatagaagtgggcacacagacgcgcgcacgaacgcacacagacacacacagaaacacacacacacacacacacatacaaccaagacgcacacagacatacagcaggtaacacccacccccaggctgcccctgaagctgccgggttctgctctccgcgactacgaagccaccggtgagacagcagcccacggacaccctggcagacctgtcctccacatcacaagggcgccactttggggagactcaccckcacaccgtccgcacacgcctgaggctg

SEQ ID NO: 7674 - DNA, 589 bp, Homo sapiens
ctccggatggggaggggacgaaaacccctgcggttccgaaggagatgccggcattgcccaggccctcacagaccgccaaaccggaaccgccgggaaaccgactgctaaccggctacacgaccgaggcagagacgcggggagaggctgaccagaagaaaggccgacctgcaagaaacccaccctccggcacacggggcacatgtgtcccgaggcacaagcacacacagacggacagagatagaaagagagggcgacggaaagascgagggcggggagagagagagagagacgtaagagatagacagaagtgggcacacggacgccacgcacgcacgcacacagacacacacacacacacacacacacacacacacacacacacacacacaaccaagacgcacacagacatacagcaggtaacacccacccccaggctgcccctgaagctgccgggttctgctctccgcgactacgaggccaccggtgagacagcagcccacggacaccctggcagacctgtcctccacatcacaagggcgctacttttggggagactcacctgcacaccgtccgtgcacgcctgaggctg

SEQ ID NO: 7675 - DNA, 589 bp, Homo sapiens
ctccggatggggaggggacgaaaacccctgcggttccgaaggagatgccggcattgcccaggccctcacagaccgccaaaccggaaccgccgggaaaccgactgctaaccggctacacgaccgaggcagagacgcggggagaggctgaccagaagaaaggccgacctgcaagaaacccaccctccggcacacggggcacatgtgtcccgaggcacaagcacacacagacggacagagatagaaagagagggcgacggaaagagcgagggcrgggagagagagagagagacgtaagagatagacagaagtgggcacacggacgccacgcacgcacgcacacagacacacacacacacacacacacacacacacacacacacacacacacaaccaagacgcacacagacatacagcaggtaacacccacccccaggctgcccctgaagctgccgggttctgctctccgcgactacgaggccaccggtgagacagcagcccacggacaccctggcagacctgtcctccacatcacaagggcgctacttttggggagactcacctgcacaccgtccgtgcacgcctgaggctg

SEQ ID NO: 7676 - DNA, 589 bp, Homo sapiens
ctccggatggggaggggacgaaaacccctgcggttccgaaggagatgccggcattgcccaggccctcacagaccgccaaaccggaaccgccgggaaaccgactgctaaccggctacacgaccgaggcagagacgcggggagaggctgaccagaagaaaggccgacctgcaagaaacccaccctccggcacacggggcacatgtgtcccgaggcacaagcacacacagacggacagagatagaaagagagggcgacggaaagagcgagggcggggagagagagagagagacgtaagagatagacagaagtgggcacacggacgccacgcacgcacgcacacagacacacasacacacacacacacacacacacacacacacacacacacaaccaagacgcacacagacatacagcaggtaacacccacccccaggctgcccctgaagctgccgggttctgctctccgcgactacgaggccaccggtgagacagcagcccacggacaccctggcagacctgtcctccacatcacaagggcgctacttttggggagactcacctgcacaccgtccgtgcacgcctgaggctg

SEQ ID NO: 7677 - DNA, 589 bp, Homo sapiens
ctccggatggggaggggacgaaaacccctgcggttccgaaggagatgccggcattgcccaggccctcacagaccgccaaaccggaaccgccgggaaaccgactgctaaccggctacacgaccgaggcagagacgcggggagaggctgaccagaagaaaggccgacctgcaagaaacccaccctccggcacacggggcacatgtgtcccgaggcacaagcacacacagacggacagagatagaaagagagggcgacggaaagagcgagggcggggagagagagagagagacgtaagagatagacagaagtgggcacacggacgccacgcacgcacgcacacagacacacacacacacacacacacacacacacacacacacacacacacaaccaagacgcacacagacatacagcaggtaacacccacccccaggctgcccctgaagctgccgggttctgctctccgcgactacgaggccaccggtgagacagcagcccacggacaccctggcagacctgtcctccacatcacaagggcgctacttttggggagactcaccygcacaccgtccgtgcacgcctgaggctg

SEQ ID NO: 7678 - DNA, 672 bp, Homo sapiens
caatttgttatagtgacctttaataaaggctatttcatgtaatgtgagaagaagtaatttgttttcttctttatggtatttggtattttctgaattttctataactatgagatattctgattgataaatggattttttaaaaaatactcaataaaataataaattcaatatgatcaagcaatttaattaacaattcatccaatgagtaccataaaagcttgakaacagaggaggtttgatttgtttcaaggtgaaatgagaggttatgtcactatttttcagataaagggaccagattcctcaagctgtggaaactctctgttagctaagaggatcaatgtgtggagtatggtgcctaattacatgcactgtatcctatacactgtattgagagtgctcaatggaaaatcatcacaatttagattataaaaattattgcatcactcattaaaattattgtcacattatttcatctttctttaagaatttcaaactgtcaccattgatgcttatcagctgtaactggttactattttgattaatataactatattgacaagtaaagtcaaaggtactatgatgcccattaggcagtttttactttccccagtttggatgaagttaagtgttagattcgttgagtaattcatctaaacatctttctagtttcta

SEQ ID NO: 7679 - DNA, 672 bp, Homo sapiens
caatttgttatagtgacctttaataaaggctatttcatgtaatgtgagaagaagtaatttgttttcttctttatggtatttggtattttctgaattttctataactatgagatattctgattgataaatggattttttaaaaaatactcaataaaataataaattcaatatgatcaagcaatttaattaacaattcatccaatgagtaccataaaagcttgataacagaggaggtttgatttgtttcaaggtgaaatgagaggttatgtcactatttttcagataaagggaccagattcctcaagctgtggaaactctctgttagctaagaggatcaatgtgtggagtatggtgcctaattacatgcactgtatcctatacactgtattgagagtgctcaatggaaaatcatcacaatttarattataaaaattattgcatcactcattaaaattattgtcacattatttcatctttctttaagaatttcaaactgtcaccattgatgcttatcagctgtaactggttactattttgattaatataactatattgacaagtaaagtcaaaggtactatgatgcccattaggcagtttttactttccccagtttggatgaagttaagtgttagattcgttgagtaattcatctaaacatctttctagtttcta

SEQ ID NO: 7680 - DNA, 585 bp, Homo sapiens
ggtactaattggcttttagtgcatggctacatgattttcagtgagccatccaaggaagaaaatttgtgtgcatagttgatgacataatagctttggttgatgagctcacgcaggtgaagtttctgagggagacttggtaagtacattattatacttcatgcaaattcgtatcttctaggagcaagtatttcctataagaagcaactaagattttttttttctgtctgctcccagcattgttttcacatagaaaaaaatayatgcctgctctcactatggcataacacgttaattaaaatagaaaattttgctgggttctgttctctgctggtggaataggtagacagatggggtgaagataatcaaagttttaaagtaagctagttttctccaaaggggcagtttcatgggcaattcctacacacttcaaagttccccaagggagcatcatggtaccggctcatcctccgaaaggcctgcagtaggctgaatattgattcccaaagacatcaagatcctaactccgggaacctgtgaatgttaccttatatgtgaaaagagactttgcaaatgtaatgaagttga

SEQ ID NO: 7681 - DNA, 665 bp, Homo sapiens
aaggatgacccacaatacctgcagttagggccacaccctgtgggccagccctccctctagcaggtatttgacctctcagtgccatctcgggtctgtcatgtgtgaagtgactgggctgggcaggtatttcggctggcagttttcctaggtggttgtatgtatcaggtggaaagtgcttgaaagaacagaaagacttttgtgttatatcctgtgggacaaattccactcctcccggaggtcggtctcagttgccccatctgagaaaggagtgttcgctggggaaaacagatcagcacgtgtggccttctccacstgtcaagcctcctatcccccaactcctcctgcgctttggcaaggtctgactgagcccagcagaaaagaaagactcgggattaagtctacgtaaaccagcttttcctgacggtgtgcccagggcccatttttcaagtcacaccaatcaattctcaatgagctgcctttgggagggacatgcccagcaaccctggatgagactctccagccttggaggccccagccctgcccgaaggactcttgggtgttccctccttctgcctggttagagagccccttaccctactctgtccttgcccgccttgcgcgggtggaggtggccctcggaacccagggtgcggaacccacagtgc

SEQ ID NO: 7682 - DNA, 548 bp, Homo sapiens
tgtttgctgattccagaacacgggytctttctactacaccttgactttagagggtagccaggtcaggggacacagagggtccctgctggcctcaggacacctggccccagctcacactctggggctgacatggggagagatgagtctgaagggcttggcccctgggagagaaaccagccactggccttctggacagcaccaaaactttgttgctgaagctgaaaaaattaactgctatatttaaaagcattgttcagttgctatggtaacagaggggctaagaataatataaaaagaagatgatatgccaggttgtcactggcaacccaattttaagggtgtgtgtgtgtatgtgttttaaaaggagttttctggggggaggtgttgaggttcagactgtcttccccactccctccggcaccatctgccccagcgacatgtccaaggtgcagccaggcctggcatctcactggtctgctggcatcgggggagctggcacaccctggccctgagcctaaagataacgaaggctctcagctccctaactg

SEQ ID NO: 7683 - DNA, 804 bp, Homo sapiens
ttaggagaccgaggtgggtggatcacctggggtcaggagtttgagaccagcctggccaacgtggtgaaaccccatctctactaaaaatacaaaaaagtagccagctgtggtggcgtgtgcctgtaatccagctactcgggaggctgagtcaggagaatcccttgaacccgggaggcggaggttgcagtgagctgaggttgcgccattgttctccagcctgggcaacaagagcgagactccgtctcaaaaaaaaaaaaaaagtgaaggttagtgttatagctctgggtgaacatgtgtatacatttaaaataaaatcttctaagagaagttttacattgagtaatttttttcttttcttcccccccattctagttgggtatccctggtcagtaagaattatgagattgaacggactattgttcagctagaaaatgaaatctatcaaattaagcagcaacatggagaggcaaacaaagaaaacatccggcaagacttctgaaaagacaatttagcaggtagaagaaaagttgggctttcacaaaaggcatctgaacttttaatgaactktgaaggacaacagcatcttcccaaaaccattgatgtttaagtgtttagaaatcatagaaggtgtaggctgctgtggtaattctatttgtatatctcaacagaattaaaatgtctagcttggtggtatttttatagccataaaagaaaatctttaggctttcaaaataaggatgactttagaataatattgtgtcatagaattaattttcagccatgtggaccatattttgtatccaa

SEQ ID NO: 7684 - DNA, 667 bp, Homo sapiens
tttctgaaataaattcagacatggacagacacaataagctgattcccctacacacataacaatccactgtctaatcctcaaacagggacctcaggctcctcagtataagaataggacactgtgggagatatatttcaggaggcctgaaggctgctcatgatagagattccttggtttttgtcccagaaactaagggtaaaatgtccctattctggtagattgttatcccaatatcatttgtcccaagtttgtgyaaatgattatgccatatttttccgatcaatttaaagcaaatgccctcaaatgatttctaggagaaaaactgcaataatcagccctgtttcatcaaatactcaggttgttcatggttgtgaggattttgactgaaaaaggaaaactacaaacccttgagtcgaaatcatagttctctgaatttgtcacatctgcccaggtccaatgtcttgagagtagaatctgagtgccacagcatggcctgagatgaggaagagagccacgctcactgacccatctcatgtctgggcttccaggtagaactagagtttcattcaacctatgtgcctataggtcctcactgcagcaatgacatctctcagctcagcaaaggccaattggagcaggaatatgatctctatatggaagactcagt

SEQ ID NO: 7685 - DNA, 667 bp, Homo sapiens
tttctgaaataaattcagacatggacagacacaataagctgattcccctacacacataacaatccactgtctaatcctcaaacagggacctcaggctcctcagtataagaataggacactgtgggagatatatttcaggaggcctgaaggctgctcatgatagagattccttggtttttgtcccagaaactaagggtaaaatgtccctattctggtagattgttatcccaatatcatttgtcccaagtttgtgtaaatgrttatgccatatttttccgatcaatttaaagcaaatgccctcaaatgatttctaggagaaaaactgcaataatcagccctgtttcatcaaatactcaggttgttcatggttgtgaggattttgactgaaaaaggaaaactacaaacccttgagtcgaaatcatagttctctgaatttgtcacatctgcccaggtccaatgtcttgagagtagaatctgagtgccacagcatggcctgagatgaggaagagagccacgctcactgacccatctcatgtctgggcttccaggtagaactagagtttcattcaacctatgtgcctataggtcctcactgcagcaatgacatctctcagctcagcaaaggccaattggagcaggaatatgatctctatatggaagactcagt

SEQ ID NO: 7686 - DNA, 662 bp, Homo sapiens
attcagccctgtctcctcaaatgcccagctcgttcatggttgcaagatactgaaactagaatgaaggaggaaatctacaaacccttgagtccaaataatagttctgtgaatttttcacatctgcctgggtccaatgtgctgagagtgggctgaggtggtcacaggcatggctggagactaggaatagagccatgctcactgacccatttcatgtctgggcttccaactgaaactacagtctcattacaagctatatgcacccacaggtcctgcctgtggcaatgacacctctcgggtcagtaagggccacttggaacaggaatatcacccctatctggaagaccaggtggaggcttatcactttcatagtaaggtactcactatccacatcaagagccaagccaaggtgctgttcctccaatgagtaaaaggcacttatgtagagctggcatgagtcagacagttcaagataaccagaaggagttgaataacatctatccagtgagtcccgcaagacttcaggctccttcttgyccagcagctccctgctgagcctggaaaagtaggaaaaagtaaagaataaggcaggggaaatcagaaaccacacagccccagctagatttcatgggtaacataaggaagtgttttaaaagaaaaagaac

SEQ ID NO: 7687 - DNA, 798 bp, Homo sapiens
tctttgagcgaaaccagccttctgcctggctggccctggtcaacaaactcggaagaggccgatttggcggacagaacggaagaaaagacctaaaggtagaatctcatgatgtcgagatgttaaaaccctccaattttaaggtccgactgtgcggggggagcgagggggtctcgagctggatcgacccctgagccttcatctggagagtcctctgcacaagctcagagggcaggactatgagcaccagtggttctcaataggcggcaacttcaccctcagactactcccccatccccgctgggacactaggccagactaggggaagccggaggagraatgttaacccctggcatctatctagtcagcggaggcatgggatgctgctaaacaccttacaatccaccggaggcccctcccccacccctaagtggccattccgccgaggtggagaaattcgcgtgtagatcaatgcccacgcacttggccgacgggaaatcacgaattggtgaccaattggattttggatttgaggaaaaaactccagcgtcagagggaactctaggagttttgcctggagcataaggaagggtagcgttgccgtcgcctaagatgggaaaatggcaggtgtcgcaggttgcaggggaaggtcagagagcagttgaggccccggagcccccctggaaagttttccatccagctcgtctcggtttccacatccgtgtgagtcctttatgatgtcggggttgccaaggtctgagtcctttatgatgtgcggggtgccccgttctcaccccggga

SEQ ID NO: 7688 - DNA, 680 bp, Homo sapiens
acacctactcgatgcaccaggctttgtgagtacacataatctgtgttcccagagagcaagtggatgcttaatgagtatgggaatggggagatcaattatctgtcccatttctctacttcctgatttggtgtttaaaagaatatatatctatcagcatttcaacccattttaagttagtgtcagaatcataatagaaaggacattttgctgaaagctcaattttggaacaaagtgtacttggagcttaggtcattgagatatggttatgagttagtcgtaaaactctccatcattttccattacctagaaattgattgttcagccagaagaatttaaaatcccccttatctcctccacaagttccctgacacaatctctgtaagcacttggaacttyacttcctagccttaaacccagtttaagtatcatttcctccagcccataaatccttaagttccaattctaagtaattctgtctttaattattaaatgcctagtactgttgatattttatggacacacatattgttttcataatgggattatgagttctatgaaattagagactttctcttatgttatgttgcctttttgttttaacctcccattacctatagtataaaagtacatgttcaacaagatcttttacaatcaaaatcaataaacttctttcctcatct

SEQ ID NO: 7689 - DNA, 800 bp, Homo sapiens
ctaatccttgatcttcactcacccagcaggctgaaagcaagtgagggaagctttggtgctgcctaggatagcaagatactggttcttctcccacatcccctccacccattgctgctcaagtgccccttgggtggagtggttggaagcagactcaacaggactgactgctgtcaaaccctcttccctttcagactcagtgacactgatggctctacctcaggaaggccacgagccaagaatatcccataaggctaagatgcttgatagcctgctttggtttggttctggttttggtaagaagggagttatggggtgtkgggggacatggggaaagaggtatgatgatgaaagacaaattgaagtaaaagctggctgcgatgaccagtgaaagagaggaaaggagaagaaaggaagtcacagaaagtgcccacatttaccgaagattcttatgatgccaccaatccagggactatggaagcagtaaaaagagggtttggggcttcatcccacttttgtgtccctcacaaatgtttggggtggcagattattctgcctaactaccattccaacccctttcctccctttatatctcccttcatttttttctttctctctccctcccttccttccttccaacctgagaggcttttgatctgtcatgtagctgatttcaggatagtcattttctttttacgtgtataaggcactttcctactaaatcggagcttcccaagaacagcaattgaatcttataattgtacctcctgaggtgcttggtacatgctacatagatgattgat

SEQ ID NO: 7690 - DNA, 800 bp, Homo sapiens
ctaatccttgatcttcactcacccagcaggctgaaagcaagtgagggaagctttggtgctgcctaggatagcaagatactggttcttctcccacatcccctccacccattgctgctcaagtgccccttgggtggagtggttggaagcagactcaacaggactgactgctgtcaaaccctcttccctttcagactcagtgacactgatggctctacctcaggaaggccacgagccaagaatatcccataaggctaagatgcttgatagcctgctttggtttggttctggttttggtaagaagggagttatggggtgttgggggacatggggaaagagrtatgatgatgaaagacaaattgaagtaaaagctggctgcgatgaccagtgaaagagaggaaaggagaagaaaggaagtcacagaaagtgcccacatttaccgaagattcttatgatgccaccaatccagggactatggaagcagtaaaaagagggtttggggcttcatcccacttttgtgtccctcacaaatgtttggggtggcagattattctgcctaactaccattccaacccctttcctccctttatatctcccttcatttttttctttctctctccctcccttccttccttccaacctgagaggcttttgatctgtcatgtagctgatttcaggatagtcattttctttttacgtgtataaggcactttcctactaaatcggagcttcccaagaacagcaattgaatcttataattgtacctcctgaggtgcttggtacatgctacatagatgattgat

SEQ ID NO: 7691 - DNA, 969 bp, Homo sapiens
tttttacaaatagtagaccatctgatataacatttgagcaaaacaagatctttataaccctttttactacagggagttaactacagtactcttgactagaatttcattcaacaaatgttaggcttgactctaagcttggtatggtgcccagtgctggagaccgtggtgagacagacagacatggcttctgcccctgctgatgagtaaattacagtgtgggatgtagaagcatggagatgacccctgaacctggacctgggggtcagggaagatgttccggtgaaagtaacatctaagctaatgcttaaagattaggtagatgttaackgctcactgccaggaggaagaggtgcatgagagcagtcaaagtgactgctggggtcagtgctagtccccatggctactatcccccttcctgtcatgcctgcccccagtgctgaccatcactggccccacctcattgcttctgtattctgcatcatcattgtcatcaccatcacctgcttccgtttggcacctacacatacgctgctcccacaacagacttcttccctgtccctggggaatcctatttcctttacagcaggggttctcaactccccaaggaacagtaccagtttgtggcctgttaggaactgagccacacggcagaaggtgagtggcgggtgagcaagcgaagcttcatctgtatttacagccactccccaccactcgcattactacctgagctcttcctcctgtcaggtatccagcggcattagattctcacaggagcacaaaccctattgtgaactgcacatgtaagggatcccggttgcatgctccttatgaggatctaatgtctgatatctgtcactgtctcccatcaccccctgatgggaccatctagttgcaggaaaacaagctcagggctcccactgattctacatgatggtgagttgtataattgtttcatcatatattacaatg

SEQ ID NO: 7692 - DNA, 767 bp, Homo sapiens
ccactgggcgcaacctcacagggcatcaagcaccttgcaggctctctctgcaatttgggagcggcttagaggatggagctctgtcacagcgaaacccccaggctctgagatatggctctcctaccagatggaaagcccaacctagtttacatctgggccttgcccttagttaagtctgtgggattcagattcaatcaattaacctctctgatcctccatttttcatctrtaaaatggcagtaacaacaggcgcccttcaaaggtgttatgaggaaagacagaatgtacgtaaatcatagcaaccactaatatttacttagtgcttacctctgtgccaggcacagttctaagcactttatatagattaaccccttaaccctcacaaaactcctatatggcagtagtcctatcgttttcattttacagacagggtaacggaggtacagagaggataaggaagctgacaggggaccaggcagtctggccctggagtccacccatagccactgtgtgacatacacttggcacacagtacctacaaatagtaggcgctcaagaactggtgaatgttcaaacaacacttactttgtccaacactattcattgagcctgtgctcaacagtgtcaggcactgtgtcgttggtgctggacatgcaacagagaacaaaacagacagcctctgccctcaaggagcttgctgtctggctgcagagacattcattcattcaaagtacttatgggctaggcacggtggctcacacttgtaa

SEQ ID NO: 7693 - DNA, 695 bp, Homo sapiens
caagcatcgcacagtgcaccttactatctaaacctttgctcatagggctgcctcttctccagctccaaccactggaaattccatccctcaaagcccagatcaactgctaactgcttcataaccacctagtccaaaatgaatatgatcattatgttccagaactcctctatgcttcaaattagagtactccctgatctaccactacctgctggactagtcacttaacttctcttcgcctcagtttcctaatctgtaaaatggagctaaaaggacctaccataccacatattattgttggataatagagaacacttagcatggtaataacatgttcaattaaaacattatttctrtgctacatatattttccatgctccttgaaggctccgaaagagcattttccatttctgaatctcccaagtttgacgccatttacctctcaatgttttgactttttgtatccataaaatgaaagaaatggactagaccaactaccattccctccaaaaatgttatctattcccttgcaaaaatagcctaacgcaaagatactgcaggtgaccttccacaaggacgggaattcgagggtaagttaactattgctgcaaacggaagtggctggaagcaaagagattaaaacaacattcaagattttgaagatcctttccaaagaaactgactcctgccatagtgat

SEQ ID NO: 7694 - DNA, 770 bp, Homo sapiens
ttcttaataaacttgctttcatttaaaatatgtgcatatatatatataactgaaggggaaattaaggcctaggtactgaaaggaaatgtaactgtacttaagtcattttgcccattgataccttcttctaattctctgggggtaatttctgcaacttggaatgaaatgaaagaataaatgccatggcaatgtcaggaagttaacccatcatacccgttacctataggtatgacatattgtttgaaccaaatatgaggtataatttcaggagcactgagagacctcacttcatctgtctccaccctccaagtcctgccagggtgctaaaaattgccacattttttcactcttttgagataagtctttaaactactatgaaatgcatatttcatctgggaggggcagcactctgagtcattaataataacaattactcgaatgacttcatcgagttatctggcctgtttctgggcagtctccagggtagtagtgagggtgcttttgatcctggagaaaaagccagaggacrtctgaaagacagactctgggtgtggacccaggaagacagtgaaaggaccttgctacttccccatttttctaagactggcctggtctcattgtttgagaggtgtaggatgagatcatgagaattattctggctacagctaattgctttattgtaaacttcaggctgtatgaagaggctggattaagtgttgtggttacacactcaccaactatgtgaatttgtatgtcttacttaaattctt

SEQ ID NO: 7695 - DNA, 770 bp, Homo sapiens
ttcttaataaacttgctttcatttaaaatatgtgcatatatatatataactgaaggggaaattaaggcctaggtactgaaaggaaatgtaactgtacttaagtcattttgcccattgataccttcttctaattctctgggggtaatttctgcaacttggaatgaaatgaaagaataaatgccatggcaatgtcaggaagttaacccatcatacccgttacctataggtatgacatattgtttgaaccaaatatgaggtataatttcaggagcactgagagacctcacttcatctgtctccaccctccaagtcctgccagggtgctaaaaattgccacattttttcactcttttgagataagtctttaaactactatgaaatgcatatttcatctgggaggggcagcactctgagtcattaataataacaattactcgaatgacttcatcgagttatctggcctgtttctgggcagtctccagggtagtagtgagggtgcttttgatcctggagaaaaagccagaggacgtctgaaagacagactctgggtgtggacccaggaagacagtgaaaggaccttgctacttccccatttttytaagactggcctggtctcattgtttgagaggtgtaggatgagatcatgagaattattctggctacagctaattgctttattgtaaacttcaggctgtatgaagaggctggattaagtgttgtggttacacactcaccaactatgtgaatttgtatgtcttacttaaattctt

SEQ ID NO: 7696 - DNA, 622 bp, Homo sapiens
aaagaaacctacacccatttgcagtcactctctgggctcatttcaccacagaagttaaagcttgcaggggcagctgggcgcggtggctcacgcctgtaatcccagcactttgggaggccgaggcgggcagatcaccaggtcaggagatcgagaccatcctggctaacatagtgaaaccccgtctctactaaaaaatacaaaaattagccgggcgtggtggcgggtgcctgtagtcccagctactcgggaggttgaggcaggagaatggcgtgaacccgggacgcggagcttgcagtgagccgagatcgcaccactgcactccagcctgggcgacagagcgagactccatctcaaacaaaacaaaacaaaaaagaaaccttgcaggagctcacggcctttttttattttatgagctccaggaggagcaggtgcatcaatggccagacgtagggacagcatgtcccaatatctggaaattgcaagrgtagacttctcccttcaggacacattaacatggctgtgagtgtgcaggagatatgtgcaccagccactgtgaaccccaggccactcctggctctgtgccttgggccatctagacagtggggaatggcttctccactga

SEQ ID NO: 7697 - DNA, 736 bp, Homo sapiens
catgctttgggctaagccctgctcatttccctgggagaagtaaaatcctaagtcacaaacttatctggggatgaaatttctctgatccttttctctgtagcccacagtgcatggccagagagcgctgggaaggcagctctgatggggacaaggggcccttggagaaaaggagggcctgggaagctaaggctcccccgctcctcgaggagacatctcagtcccagggcagcaaagtgttcctcttcactggagtgtgcaaactctgggacttggtgctgactggctcgctggtgccacccaatggcagccagaagctctccacgtacctgaaaggccgcccacgtccatcttcttgaggttcttagcctccaggatgcagacagtgagcttcccggccgtgggcacatagcgcagggaggtgcagatgtcgcccagcttctccggctgtccaggggaagagcaggacttgggtcatctcacccatcctagtgcctctctcatggctgacctctttcttgccaaaattagcaaggcagtgatgtgtccctgcctccctcatcaccagtccccatatatgtgatggccgagaaggtcttccagcatctgaccttgggtccccctgatgcagtgcaacaaagtccctgaaagtgacaggttgggacctcaggagccgtgggctgaggatgctgacagatgaggggggtagaggacagctgcgrtggcaggactgagggag

SEQ ID NO: 7698 - DNA, 840 bp, Homo sapiens
ggccaccccaccaagccctggctccatttgatccttggctaactcttgtagggtgcagggatagtagcagtggtgagggggcagagggatgcccccgccaggcaagcccctcagcacaccctccgctctgccaccccagccaggatcacaacttgaaacaggacagagaagcccgccatccccatgggagaggagctggagtccaggctccctggagagggagttaatactgcagcacggcgcactctagccaagacggagaagctgctgagtcacagtccagccgcctrgccagccctgagctgcctgctggggcccccagctgctcccagcccagggggctgcctctggcccccagacaggctgccttcccacctccttctccagagactcagaatcttgggcctccagggttccccactccccagcaccccacaacatctcccaaacccacaggcagctgtcctggggcggaggagagggtcttccattggttgggtgtcaagatgcttgggagcaggccgggaagggtgggcgacccggaatgagtgattgagtggggacagatggaggcttggggaccagcgggccctgggctgcctggtgtaggatacggaaagtgtgtagggggggtgcacccgtgggccccaggaggtctgttgtgcgcatgctctgagtgtgagggaggacgggtaggactgtgggggtctgccctggtcgtgctcccaagagaggcactgctttctgcagagtgcgtgggcaactgccagctgggggagcgctcaccaggggaaaggggagctctctgtggcttagcagtgattaacccacacaatcaat

SEQ ID NO: 7699 - DNA, 804 bp, Homo sapiens
ttttcatattcttgcttgaggtgatwataaaggcgacatttaatctgtaccacagaggcacatcaggtaaaagacacaatgtgatatgatagtgtaagttggtaatttggtttaatttattaatacatcaagtgaaaaattttagatgttgaaaatcatgcttcagggaacttgagaacttaacactgaggcggggcatttaatttttcaaaagtaactccaagaaaatggtgcgataaacaaattttattctttcaccttttggaggcaaatttgcttaaataaatgccaggagtgctattagattaaagtcttgtcaaaataagttgcagaaggtagacaaaaaggaaaagattcccaagaactgtgccttcatagtcaaaacgggacttctagatctcagcatcaactgtcgccaaaaatttcaatgccttgtaactttatatgtagagcaaaataatcttcagtataagcagggtaaaacatcataaggtgttcttgattaaagacaacaaagttctgtgaaaaaaaacattttaatgtagatggaaaatatttttggtagtggtaaatgcattatatgcaaatatattgtacaaatttataatgcaatccttttaaaaagacttcttttatatatatattttttattatactttaagttctagggtacatgtgcacaacgtgcaggtttgttacatatgtatacatgtgccatgttggtgtgctgcacccattatctcgtcatttacattaggtatatctcctaatgctatccctccccgctcccaccaccccaaaaca

SEQ ID NO: 7700 - DNA, 804 bp, Homo sapiens
ttttcatattcttgcttgaggtgataataaaggcgacatttaatctgtaccacagaggcacatcaggtaaaagacacaatgtgatatgatagtgtaagttggtaatttggtttaatttattaatacatcaagtgaaaaattttagatgttgaaaatcatgcttcagggaacttgagaacttaacactgaggcggggcatttaatttttcaaaagtaactccaagaaaatggtgcgataaacaaattttattctttcaccttttggaggcaaatttgcttaaataaatgccaggagtgctattagattaaagtcttgtcaaaataagttgcagaaggtagacaaaaaggaaaagattcccaagaactgtgccttcatagtcaaaacgggacttctagatctcagcatcaactgtcgccaaaaatttcaatgccttgtaactttatatgtagagcaaaataatcttcagtataagcagggtaaaacatcataaggtgttcttgattaaagacaacaaagttctgtgaaaaaaaacattttaatgtagatggaaaatatttttggtagtggtaaatgcattatatgcaaatatattgtacaaatttataatgcaatccttttaaaaagacttcttttatatatatattttttattatactttaagttctagggtacatgtgcacaacgtgcaggtttgttacatatgtatacatgtgccatgttggtgtgctgcacccattawctcgtcatttacattaggtatatctcctaatgctatccctccccgctcccaccaccccaaaaca

SEQ ID NO: 7701 - DNA, 795 bp, Homo sapiens
atttgtaggccggcttctgaaagatttctcagtaccaagtgacatttggcacctggtcaccaaagaataagtgtttattaagagcctgattgagctgagtggcagaaatgagagaaaatgaaccaacaacagcaacaaaatagtagtgctacaatgaccctaacagcaacaacaacaataaaaataatagtgctccaatgaccctagcaactatgtttgatactgtttcatactgtttagtgcaatatgtagataaacataatagggatctaacaattgggtgttgttgattcttgttctaggagaactctctcccttctcccctccatcttactgccttcgtttgttcttaataagtacccatatgtgaggagacattttgggtaggaaattcagtgtatcatacactggaaaccagtagaaaacctkaaattctaattaaactatactattatatcaatccatagaaaagtacataaagtgacatagctaaaaagaaatgtattgcataaatgaatgctaacatgttgtaggcaataagacaaaacaaatttactcgtaaataaagtttacaagtaatatcacacatgtggaactataaacacacatacttgcattatattctgagtcacactgaaagctaaaatagtaatcttgatataacatgaatttgagtgaattcctaaatagaatatgcagacaaagcacatgtatcaataaaagtggtacaaaaccagcagagaagtatagtgattggaaatgagtatctgtagagggaggcccaatgtgtatgtg

SEQ ID NO: 7702 - DNA, 830 bp, Homo sapiens
gaagaagttatgccctgaactcaaaagagagggttggaggagctctagatgagtatgcctaatgtcccaatatccaagcgattctgctggtcttctctgtggatgaagccagatactatccatcagttttgaaaagtctcacttaactgtcttaggacaggtattccccagtacctaagggtcagctcaggagcttcctcccagtggtgccgagcaaactctcccttttacccacaccccttgaaccacaaagaggctctgaagactgaagagcaggagaagaggaagaagagttggaattttctagaaaaggtcttgggatactccagaatcaaatgccagcctgtgctgaagcaaaaaaaaaaaaaaaaaagacccrtaatctgactcactttcttaaactgagccagtggagggaaaaggggagatgacaatttctccctcagaacaatgaacctctgagagctgagtgggaggaattagtgacaataacatgatgtctgtcaacttttgaaaaattggaatcaggaaatccaaaagtaaagttgaaagaagacaaattaggtatatcaagatttgacacattactgaacacctgctaatgaaaaaagaagtatttacttttaattttttattgtctttatgcataatacttttaaaaatcacataacatttgcataaaagcataaagagtattttttaaaactttgcttctaacatggaaaagaataaaatagccgtatgaagctcatcctctaaaagagacagtagcttgctcttgagtcttagttttttcgttttctacagctttcctaaataattcagataga

SEQ ID NO: 7703 - DNA, 830 bp, Homo sapiens
gaagaagttatgccctgaactcaaaagagagggttggaggagctctagatgagtatgcctaatgtcccaatatccaagcgattctgctggtcttctctgtggatgaagccagatactatccatcagttttgaaaagtctcacttaactgtcttaggacaggtattccccagtacctaagggtcagctcaggagcttcctcccagtggtgccgagcaaactctcccttttacccacaccccttgaaccacaaagaggctctgaagactgaagagcaggagaagaggaagaagagttggaattttctagaaaaggtcttgggatactccagaatcaaatgccagcctgtgctgaagcaaaaaaaaaaaaaaaaaagacccgtaatctgmctcactttcttaaactgagccagtggagggaaaaggggagatgacaatttctccctcagaacaatgaacctctgagagctgagtgggaggaattagtgacaataacatgatgtctgtcaacttttgaaaaattggaatcaggaaatccaaaagtaaagttgaaagaagacaaattaggtatatcaagatttgacacattactgaacacctgctaatgaaaaaagaagtatttacttttaattttttattgtctttatgcataatacttttaaaaatcacataacatttgcataaaagcataaagagtattttttaaaactttgcttctaacatggaaaagaataaaatagccgtatgaagctcatcctctaaaagagacagtagcttgctcttgagtcttagttttttcgttttctacagctttcctaaataattcagataga

SEQ ID NO: 7704 - DNA, 830 bp, Homo sapiens
gaagaagttatgccctgaactcaaaagagagggttggaggagctctagatgagtatgcctaatgtcccaatatccaagcgattctgctggtcttctctgtggatgaagccagatactatccatcagttttgaaaagtctcacttaactgtcttaggacaggtattccccagtacctaagggtcagctcaggagcttcctcccagtggtgccgagcaaactctcccttttacccacaccccttgaaccacaaagaggctctgaagactgaagagcaggagaagaggaagaagagttggaattttctagaaaaggtcttgggatactccagaatcaaatgccagcctgtgctgaagcaaaaaaaaaaaaaaaaaagacccgtaatctgactcactttcttaaactgagccagtggagggaaaaggggagatgacaatttctccctcagaacaatgaacctctgagagctgagtgggaggaattagtgacaataacatgatgtctgtcaacttttgaaaaattggaatcaggaaatccaaaagtaaagttgaaagaagacaaattaggtatatcaagatttgacacattactgaacacctgctaatgaaaaaaraagtatttacttttaattttttattgtctttatgcataatacttttaaaaatcacataacatttgcataaaagcataaagagtattttttaaaactttgcttctaacatggaaaagaataaaatagccgtatgaagctcatcctctaaaagagacagtagcttgctcttgagtcttagttttttcgttttctacagctttcctaaataattcagataga

SEQ ID NO: 7705 - DNA, 830 bp, Homo sapiens
gaagaagttatgccctgaactcaaaagagagggttggaggagctctagatgagtatgcctaatgtcccaatatccaagcgattctgctggtcttctctgtggatgaagccagatactatccatcagttttgaaaagtctcacttaactgtcttaggacaggtattccccagtacctaagggtcagctcaggagcttcctcccagtggtgccgagcaaactctcccttttacccacaccccttgaaccacaaagaggctctgaagactgaagagcaggagaagaggaagaagagttggaattttctagaaaaggtcttgggatactccagaatcaaatgccagcctgtgctgaagcaaaaaaaaaaaaaaaaaagacccgtaatctgactcactttcttaaactgagccagtggagggaaaaggggagatgacaatttctccctcagaacaatgaacctctgagagctgagtgggaggaattagtgacaataacatgatgtctgtcaacttttgaaaaattggaatcaggaaatccaaaagtaaagttgaaagaagacaaattaggtatatcaagatttgacacattactgaacacctgctaatgaaaaaagaagtatttacttttaattttttattgtctttatgcataatacttttaaaaatcacataacatttgcataaaagcataaagagtattttttaaaactttgcttctaacatggaaaagaataaaatagccgtatgaagctcatcctctaaaagagacagtagcttgctcttgagtcttagttttttcrttttctacagctttcctaaataattcagataga

SEQ ID NO: 7706 - DNA, 714 bp, Homo sapiens
taaattgagttctttcaaataacatatgaaacccaatcatggttttataccacttgatcaagttgagatgtcttgyccagatatcccctttatatccctagacaatgtctttaccagcacagccagagcattttcagaagtccccacaactgccaatggatctacgaaaactaatcacgtccatatcactggtaagtcatttatcctattttgggggattttatgctttattcactcaataaatatttattattttacctgccatttgccaggcattatgccagttgttggatatacagtgaacacactggctttttgaagattataatctattagtgatcgatcatgtgtatagtaaataaataatcacaactaaatttattttgacaagtactatgataaggtgttgtcagggtcaaacaggaagttctgattttaattggaggataggagaggactctgtgaggatatacttaaattaatatctgagaaaaataaataagaatttattcttgttgaataaattgaaaagtagcaaaaagcatttcaagcctatgaaaacatagtctgagaaagaaatcattggaacaaagagtactcctataattcaactaatataatattgtcatgcaaaatgtaatccctcttttatatcataagagagcaaaagattcaataaagttaggaccctcctaatgaaggtcatgattgtaa

SEQ ID NO: 7707 - DNA, 653 bp, Homo sapiens
tttcatcaaaataaataaacaaacatgaatttacccatcagaaaacttcagttgtcaggacctgtgtctgatatttagctggggaaatttcccctgtccactggggtggtggatgttgtctcagagctgaacactgggctggtggggtcatcggaggatgatgaggatgaatcaaggctgttctcccactttctccagggctgtgcctgggaccatatgtgtatgtgtggctgagaggaggcatgggtcccaagacatgggtcatcagagactgaagctctccagggcagcctgagagatctggcagggctctgggggcgcctcagttttgtgaatcaccgccatgtggtgcctttggagtcagccagctctgcctcctaaccccatcccctcactcaccagatgtgtacctgggtctcaatttcccccatctgtcattgaggacagtcataccgacctcagggagggatcaggtgagataaatgtgatgatgaccaaaatgcaagacaattactgatcatgagcakatgaagtctagaaagggggaaattggtccacagaacacagtgggtcaatgagggacttagaacgaaaactcgagtcttgggttcccaggccagacctcctttcactgcaccagggatttcaaagtg

SEQ ID NO: 7708 - DNA, 533 bp, Homo sapiens
aagggtagatgcatgcacacacacacaaacacaacccacgtgcatacacatgtgtgcacacatatgttctaagagtgcccatacaggtgcatgcgtgtgcacacactctcacacacacatcatccagctgtgctgaagtctctgggtagagaaaagggtactgacctgtgtttacactgtgccttttgtctggggtacgcaaagttccttccaaggaaggcaggctttgtcactcctcaccaccccactgggaggcagctgccccaatcaagtcctgggggatatcccgctagagccctgtgtgtcccctctaaactctcctttacccccagcgcaaccctcctcctgaacaccggcttcctgttcctgggcattttgtccttaatccccctccactgtcctgcccactgtcttgtaaggtgggtcggggggtggggggacatacaaaaaaatccaaaatactaagtaagccgggrcatctttatctttcctgtgactcttctggtttggtgtgtctgtacttccagggaact

SEQ ID NO: 7709 - DNA, 840 bp, Homo sapiens
ccaaccccggctggtctgattccaaagctcatgttcctaaccactggataggctcccagccctaagtctcatgctgtgcctgcttcgcaaactaaatgtcaggacaaatagtctcacaggtggacacagagttgaaattgggcacagcgttgaaactgggtctttgagcttcagatgaaaaaawtggccaggtcccccagtcttggctcttgcaacaatctcctcccctccccaaggccaggctcctgaagggaggtacccaggggagggacagcaagccccgggtggcactgcctgcttccctccacatcctcactgtgcaggactttccatccatcctcatccatcctccctcttccccacccttgaggaaaaaaaaattaccaacaccccaagaggaaaaagaaggaaggccgcgcattagttacatccaccacctcatgacaccatccacacagggagcccaaagctcactgcagatcgggaggaagcaacttgagcacggccttacaacggccgggagagcccagccctgctttctttcccaccctgagtgtgactcagcagcataacacccagtgtctcagtttccttctccacccattcccagaacccacggaaagatggaagctgcttgccccacacctcacagagcaggttctcccgtgtctagctccgggcgggagagctaactttctgagaagactaggggaaagaacaggcatttctatttccatattatagacaatcaaaccaaagcctagaggaaagtctggaatccacaacctcaaccgcgcggccactggctataccatgagctggagaacaaactggaaacac

SEQ ID NO: 7710 - DNA, 1722 bp, Homo sapiens
tgctggactctgcaggtctcaggcgagcctgagagtagtcggccttgctgctcactggcaggctgaccaaggcaagtcatttaacccctctgagccttactttctcattcatcagatgggaacactggtactcagtaggttgtgtgaggtgagtgagacagctatgatgaggaccgggaatgccctgccgggtttccagagcacttcactgtttgcagagctcttcgcagaggtcatttcatgtgaccctttaaacccctctggaacaggcaggttcaaaggccagaggttatgtgacctgcacaggtgccacagggcttctagccctggtatctggctctaagtctaaggctctttctagcttgtcccgtctgccttccaagttcaaggtctgtgtaaggcactgttactatcctgagagtcagcccaggtttctcaatggtccctgtgggcccaggagccctgggcagaggcggcaaagtcataagaggagcggcaaggctgaggtcccattcccctgccagccacagtcctcaaggcctctcctgcatcctcatcacttagtgctgtttgtttgggctgtaagtagctcagttcctgttattcccccctggacaatcaggcaggaaattcttcactttggtttccttaagaggtcacatacttttctctcttgcagaagtaaataaagcccgtgtgctgagttggcagttttgcacacgagcccgcccgctggggtgagccagcagcccccttccctccagccttagctagccctacccagggggcccaagggcaccaggaaattcgggcagcctactgcccgggcactgactccccaggtggcatcctgggcacgtcctgcaaagacaggaagatttttaaagcacgcccagggttagagcctgggataatgtgccttgaggagactgtgcctgttcacagaagcagcagtcacattcccctcccgcacccagaatcccgacagaagagagggagggcgccatgtgacagtgtgcttatggagaactcaggtaagcgccatcccagctcccagagcacgctgagcaccaggaaggccaggagggttgcctgggaacaggcagacccagagtcacaacgccaagcacctttgcacacatggcaccccttgctcaggctggggaaacgtgcttccacagctgcaatgagcccagtcctcttgctaagcccacagcagttgagagatgtgttgggagaggctgctttgagcacccatgcagacgggacagctgtcagctccatagcaaaggaagagagcgaggacaaggctacagaacttggccaagactcaagctccaccatttggaccactgggcagaggcataaaatgtcttctgctagccttggtggcattttttattatggaacatttttgttacatacagaagtgaatagaataatgaaattaatcccatttacctattacctgaccccaaacattcatcaacccatggccaattctgtctcaccctccgctcgttcctccccataatattttgaagcaaatccaagatgcatcatgtcatctacaaatattgtaatatgtatctataaaagataaggactctttttaagaaacataacctccaaactatcatctcacttgaaaaaatgatcagatactgttattactcaaatttcctattgactcataaattytgtaccttgttggaatcagga

SEQ ID NO: 7711 - DNA, 752 bp, Homo sapiens
caaaagaaagaaggacagggctgagaggagctcaagagggaacaaggtccagagttcaggcagtaggtagtgtgtgagaagaggctcagcattctgggtaaggagtggattccagcaagaaagcctgacctgtcaaacagactacatcctccccaggtaattttaacaaaatacacagtccgcacatccaggagagacaaaggaacagaatgtagcagtaagaatggagatctttcaaatatgatttattcacctctaatgcacagagcagcccaaatgcaggtgaagtggctaagagctgaaaccactgatgaagaatttattggagtggtttgcaagacaggcccaggatgtgcaaacccatttattttccaatttgtaaatcaaaatgttctgagtcaggtaggagagytaagtctgatgctaagaactgcatggtataaatcaaaacaaaatttactatcaggagtttagagattcaagtgtgaactcagtttatctcctgtttcctccaatagcaaggcgcttgctcttgtggctcccggcctccagtgttactctctctgtttccctgtggatggccactgtggtgcttcacacatccctacccagacccagtagggtctctgagctctgagctcaaggatgtgttttgagggtgcaaatgtcttagcttctgttctgggcttagagctagttacaggctacaaggtgttgtcattacagaccccaaggaggctcagtctgtggga

SEQ ID NO: 7712 - DNA, 835 bp, Homo sapiens
atcctgcccactgtgtaccatggcatgtacaatgccaccacccggcaggtggaaatggagctcttcccctgccttgggcactttggactgaggttctatgcctacaaccctctggctgggggtctgytgaccggcaagtacaagtatgaggacaagggcaggaaacagtctgggggccacttctttgggaatagctgggctgagatccacaggaatcgcttctggaaggagcaccactttgaggccatttccctgatgcagaaggccacacaggccgtgtatggtgtcagtgcccccagcatgaccttggccacccaccctctggtggatgtaccaccactcacagctgcagggtgcccacagagacgtggtcatcctgggcatgtccagcctggagaagctggagcagaacttggcagtgatggaggaagggcccatggacccggctgtcatggacacttttaatcaaacctggcattttgttgcccacgaatgtcccaactacttccgctaggcccatcatggcccaggctgcccaaggcttttccgtcacctcttttattctctcacgctgaccagtcttggccttgagctgacttaacagggtctttctggatcgtctagatccatgtgttatttttctagcttcctgccttgctccctgctcatttacactgtgaaaggtgggggtgagtcccacttgggcatttcctgttgaataaagcaggcacttgacccagccatagcccaggtcaaccccactcccgccccaccaaaaagagagagagagaaaaaaaaaaccagggtgatatgatgagatactgatcagagtagg

SEQ ID NO: 7713 - DNA, 835 bp, Homo sapiens
atcctgcccactgtgtaccatggcatgtacaatgccaccacccggcaggtggaaatggagctcttcccctgccttgggcactttggactgaggttctatgcctacaaccctctggctgggggtctgctgaccggcaagtacaagtatgaggacaagggcaggaaacagtctgggggccacttctttgggaatagctgggctgagatccacaggaatcgcttctggaaggagcaccactttgaggccatttccctgatgcagaaggccacacaggccgtgtatggtgtsagtgcccccagcatgaccttggccacccaccctctggtggatgtaccaccactcacagctgcagggtgcccacagagacgtggtcatcctgggcatgtccagcctggagaagctggagcagaacttggcagtgatggaggaagggcccatggacccggctgtcatggacacttttaatcaaacctggcattttgttgcccacgaatgtcccaactacttccgctaggcccatcatggcccaggctgcccaaggcttttccgtcacctcttttattctctcacgctgaccagtcttggccttgagctgacttaacagggtctttctggatcgtctagatccatgtgttatttttctagcttcctgccttgctccctgctcatttacactgtgaaaggtgggggtgagtcccacttgggcatttcctgttgaataaagcaggcacttgacccagccatagcccaggtcaaccccactcccgccccaccaaaaagagagagagagaaaaaaaaaaccagggtgatatgatgagatactgatcagagtagg

SEQ ID NO: 7714 - DNA, 835 bp, Homo sapiens
atcctgcccactgtgtaccatggcatgtacaatgccaccacccggcaggtggaaatggagctcttcccctgccttgggcactttggactgaggttctatgcctacaaccctctggctgggggtctgctgaccggcaagtacaagtatgaggacaagggcaggaaacagtctgggggccacttctttgggaatagctgggctgagatccacaggaatcgcttctggaaggagcaccactttgaggccatttccctgatgcagaaggccacacaggccgtgtatggtgtcagtgcccccagcatgaccttggccacccaccctctggtggatgtaccaccactcacagctgcagggtgccmacagagacgtggtcatcctgggcatgtccagcctggagaagctggagcagaacttggcagtgatggaggaagggcccatggacccggctgtcatggacacttttaatcaaacctggcattttgttgcccacgaatgtcccaactacttccgctaggcccatcatggcccaggctgcccaaggcttttccgtcacctcttttattctctcacgctgaccagtcttggccttgagctgacttaacagggtctttctggatcgtctagatccatgtgttatttttctagcttcctgccttgctccctgctcatttacactgtgaaaggtgggggtgagtcccacttgggcatttcctgttgaataaagcaggcacttgacccagccatagcccaggtcaaccccactcccgccccaccaaaaagagagagagagaaaaaaaaaaccagggtgatatgatgagatactgatcagagtagg

SEQ ID NO: 7715 - DNA, 835 bp, Homo sapiens
atcctgcccactgtgtaccatggcatgtacaatgccaccacccggcaggtggaaatggagctcttcccctgccttgggcactttggactgaggttctatgcctacaaccctctggctgggggtctgctgaccggcaagtacaagtatgaggacaagggcaggaaacagtctgggggccacttctttgggaatagctgggctgagatccacaggaatcgcttctggaaggagcaccactttgaggccatttccctgatgcagaaggccacacaggccgtgtatggtgtcagtgcccccagcatgaccttggccacccaccctctggtggatgtaccaccactcacagctgcagggtgcccacagagacgtggtcatcctgggcatgtccagcctggagaagctggagcagaacttggcagtgatggakgaagggcccatggacccggctgtcatggacacttttaatcaaacctggcattttgttgcccacgaatgtcccaactacttccgctaggcccatcatggcccaggctgcccaaggcttttccgtcacctcttttattctctcacgctgaccagtcttggccttgagctgacttaacagggtctttctggatcgtctagatccatgtgttatttttctagcttcctgccttgctccctgctcatttacactgtgaaaggtgggggtgagtcccacttgggcatttcctgttgaataaagcaggcacttgacccagccatagcccaggtcaaccccactcccgccccaccaaaaagagagagagagaaaaaaaaaaccagggtgatatgatgagatactgatcagagtagg

SEQ ID NO: 7716 - DNA, 771 bp, Homo sapiens
tagattgtgaaggcctggccaggggatttggtttcacttggtgggccataggaattgagaagagtcaggacattttctgggttttcgaaaaatccctcctatatggaaaaaggtatgaaagtattcaagatagtatagttagtcgagaaggagagcattctctaacaacctggatgcctttctgttgttctccctgtctacaaatggggagggggttgaagggaggacatggcagctgctgttctaggggagggatcaatctccttctctgtggcccttggggatagaaccagacactgtggaggagggagacttcacctcaagagatgggacctctgggcaggtatggtggcttatgcctgtaatcccagtaatttgggaggctgagatgagcagatcacctgaggtcaggaattcaagaccagcctggccaacatggtgaaaccctatctctactaaaaatacaaaaatgagstgggcatggtggcacatgcctgtagtcccagctactatggaggcatgctaatcgcttgaacctgggaagcagaggttgccgtgagccaagatcatgccactgtactccagcctggatgacagtgaggctctgtctcaaaaaaaaaaaaaaaaaagaagaagaagaagaagaagggacctgtgaggtttagcactgaagactgaagctggaataggctgctttgaaatgttgctgcaaggaggaattcctattgtctgggttgagccctggtacactaaggagatatcaggtcgata

SEQ ID NO: 7717 - DNA, 771 bp, Homo sapiens
tagattgtgaaggcctggccaggggatttggtttcacttggtgggccataggaattgagaagagtcaggacattttctgggttttcgaaaaatccctcctatatggaaaaaggtatgaaagtattcaagatagtatagttagtcgagaaggagagcattctctaacaacctggatgcctttctgttgttctccctgtctacaaatggggagggggttgaagggaggacatggcagctgctgttctaggggagggatcaatctccttctctgtggcccttggggatagaaccagacactgtggaggagggagacttcacctcaagagatgggacctctgggcaggtatggtggcttatgcctgtaatcccagtaatttgggaggctgagatgagcagatcacctgaggtcaggaattcaagaccagcctggccaacatggtgaaaccctatctctactaaaaatacaaaaatgagctgggcatggtggcacatgcctgtagtcccagctactatggaggcatgctaatcgcttgaacctgggaagcagaggttgccgtgagccaagatcatgccactgtactccagcctggatgacagtgaggctctgtctcaaaaaaaaaaaaaaaraagaagaagaagaagaagaagggacctgtgaggtttagcactgaagactgaagctggaataggctgctttgaaatgttgctgcaaggaggaattcctattgtctgggttgagccctggtacactaaggagatatcaggtcgata

SEQ ID NO: 7718 - DNA, 763 bp, Homo sapiens
gtcacccagaatgtaccacagttgggccaccacgctgtggactgtaactgggcaggaaatcaccaccctcccctcacagccctgcagcccaccccgcgcgccttcctgcaggtgaccaccctttatctgtaayagcataaccttggcaaagatcgacaacaccccttcatgacacccccaaaccatggcagcatttcatacacagtaactgtagcagtcctccttttgtggagacctttctactctctaaccttaactcttcctactacagttttgatccaactcacaaggtctgggcctctctggtttggacacaggtgagaggaaatgtccaaatgaacagcgactaccatatacatggaactaagccagcttttgtgacccagggtagggaatgggatagattatcagcaattaagactgcccagggctgcatgggcattgtacctagggaagccatggggacgggtcctgggtgagcttcctagccctcagtaattcccaagatgggaattattccctgaacatggggaatacctggctgaaccaattactccctgggctggttcctctggctacttccagccttgggactgagctcagaagcagcttggaggagaggtctctaagcaggggtgggagctgcccctaaggagggcaggaggcctgctgtggctctgggcctatcctctcatcctcagtagagattgatcaggaagccctgcctggccctgggtccccagggaatctgggaggaggacca

SEQ ID NO: 7719 - DNA, 763 bp, Homo sapiens
gtcacccagaatgtaccacagttgggccaccacgctgtggactgtaactgggcaggaaatcaccaccctcccctcacagccctgcagcccaccccgcgcgccttcctgcaggtgaccaccctttatctgtaacagcataaccttggcaaagatcgacaacaccccttcatgacacccccaaaccatggcagcatttcatacacagtaactgtagcagtcctccttttgtggagacctttctactctctaaccttaactcttcctactacagttttgatccaactcacaaggtctgggcctctctggtttggacacaggtgagaggaaatgtccaaatgaacagygactaccatatacatggaactaagccagcttttgtgacccagggtagggaatgggatagattatcagcaattaagactgcccagggctgcatgggcattgtacctagggaagccatggggacgggtcctgggtgagcttcctagccctcagtaattcccaagatgggaattattccctgaacatggggaatacctggctgaaccaattactccctgggctggttcctctggctacttccagccttgggactgagctcagaagcagcttggaggagaggtctctaagcaggggtgggagctgcccctaaggagggcaggaggcctgctgtggctctgggcctatcctctcatcctcagtagagattgatcaggaagccctgcctggccctgggtccccagggaatctgggaggaggacca

SEQ ID NO: 7720 - DNA, 652 bp, Homo sapiens
aaagcttcttgaacccaatatagttttgatagcactgatgatgttctacctgacaattttaaaaagtatattaattctattatatttttttctatttccccagtagaatgtaagctttgtaagagaatggatttttatctgtttgcttactagtacaattccagcaaccatgacactgcctggcttacagtaggttctccacaaccttaatcttgaaagctgaatggaggttgctgcataattaactacatatttaatgtcatgcctgagccttttgatcctaaagatgtcaaatttagttataagctatgtgtgggttttacctccttcccattctcaatgagtctttatcaaatggtacaacttgatctcagctgatattgtggtgaattagccaaatatctatccaagcttgaaaataatatataaaataaaaatgcattgagggcaatttaggaacayccagaggtaatcatacaaagccaactaaagacttccaaagaatcccaagagaaaaacagatcagtctccagaatgagatggatggtcaaggtgtaagcagtacttagatttcatttgtagccatcttcagcatgtacccagaaatacctggtgttgtggaaaactggatttccagcagtcaagaagaatg

SEQ ID NO: 7721 - DNA, 771 bp, Homo sapiens
gtggtgggcgcctgtaatcccagttactcgggaagctgaggcaggagaatctcttaaacccaggaggtagaggttgcagtgagctgagatcgcgccactgcactccagcctgggtgaaagagcaaggctccgtttcaaaaaaaaataaataaagataaattaaaaaaaaaaaaaaaaaaagagggcgcggtggctcacacctgtaatcccagcactttgggaggccaaggcrggtggatcacgaggtcaggagatcgagatcatcctggctaacacggtgaaaccccgtctctactaaaaatacaaaacattagccagacgtggtggcgggcgcctgtagtcccagctacttgggaggctgaggcaggagaatggcgtgaacccgggaggcggagtttgcagtgagctgagatcgccccatcgcactccagcctgggcgacagagcgaaactccgtcaccggaaaaaaaaaaagaggaggaggagtaggaaaaaagggtgaaacagaagcaatggagtggggccccaggtccttgtctcatgtcctctttctcacagggacatcctcagagcttgctctggtggtgaacaagcaaaggggcagggtggcagaattaggcaggatcagaatgagggactgaagtggctgagcctggcatccttcctaaatattttccaaatacatttcttaatagaaaaggaatcacagaagtttttaggacccaagtctccaaagactggctcaaactaaagtcttctcattaaaatattg

SEQ ID NO: 7722 - DNA, 771 bp, Homo sapiens
gtggtgggcgcctgtaatcccagttactcgggaagctgaggcaggagaatctcttaaacccaggaggtagaggttgcagtgagctgagatcgcgccactgcactccagcctgggtgaaagagcaaggctccgtttcaaaaaaaaataaataaagataaattaaaaaaaaaaaaaaaaaaagagggcgcggtggctcacacctgtaatcccagcactttgggaggccaaggcaggtggatcacgaggtcaggagatcgagatcatcctggctaacacggtgaaaccccgtctctactaaaaatacaaaacattagccagacgtggtggcgggcgcctgtagtcccagctacttgggaggctgaggcaggagaatggcgtgaacccgggaggcggagtttgcagtgagctgagatcgccccatcgcactccagcctgggcgacagagcgaractccgtcaccggaaaaaaaaaaagaggaggaggagtaggaaaaaagggtgaaacagaagcaatggagtggggccccaggtccttgtctcatgtcctctttctcacagggacatcctcagagcttgctctggtggtgaacaagcaaaggggcagggtggcagaattaggcaggatcagaatgagggactgaagtggctgagcctggcatccttcctaaatattttccaaatacatttcttaatagaaaaggaatcacagaagtttttaggacccaagtctccaaagactggctcaaactaaagtcttctcattaaaatattg

SEQ ID NO: 7723 - DNA, 804 bp, Homo sapiens
tggcctccaggaattggtgagaacgaagagctatcgtgagaagccacccagtcygtggcattctgtgatggcagtcacgggacaccgacccagatgatctgaatttccagccccactggccaggctgactgtcctgggggctgcacctgacaccctgtgctctgggggccactgacaccctgaggaccaggccctgctggctcctctccttggattatttccatctggggagcagcggcagggccctcccttcccgctccagcgctggaactacatctggaagctcttctcacccttaattgttcttaatgctttaacacacggagtgactaatgggctctaattgggagcggtgtcctggggaactcgcccacagcgccctctgcgacccgcccagtctcctccgctgctcactcacagagctctaaagtcaccaaggaaaaatattggcccgtttttctatttttttaaaaaatgtcacaccagtgccaaaaagcagttttatccttcagccaacaagtatagggcaaagaaaaggatagaggcaaagccaaaagcagatgggacaaaatatcacaaatgccactgaggtctgtgacatctgtctagagacaaagagttcttggaggcaaaccccacgccagtcagttcagggcgtgtgaaggattccagccacatgtttccccttgaaggggaaaggaaagaggggataaggcatctctgatgtcttctcatctcctctccgacccctgtgaggggtaagtggtgactgccaagtcaccagaactgcagagaaggaaccag

SEQ ID NO: 7724 - DNA, 552 bp, Homo sapiens
ctcaaggaaactcaactagaaggtccttgaaccaggcctagaggccacgactgatcttgaatcaaggaggtcctttcccttctcctcgcctgtagctctggcttgagaacaaagtagccactaagtatgggtttctagaatgtagctcatgtttaaaacttttttttttctttttgagacggagtctccctctgtcgcccaggctggagtgcagtggcacgatctcggctcactgcaacctccgcctccggggttcacgccattctcctgcctcagcctcctgaatagctgggactacaggcaccggccaccacgcctggctaattttttgtatttttagtatrgacggggtttcaccgtgttagccaggatggtctcgatctcctgacctcgtcatccgcccgcctcagcctcccaaagtgctgggattacaggcatgagtgaccgtgcccagcccttttttctttttctttttctttttctttttttttttttttttttttttttgagatggagtcttgctctatcccccaggctggagtgcagtggcgt

SEQ ID NO: 7725 - DNA, 811 bp, Homo sapiens
aagatcatgtttatggaatgccaagttcaaggcaaagcgggggtgtgagagagcatggtcccatttacagataagaaggaaggaaggcaggaagcccatttacagataagaaaaccaaggcctgaagaggtgaaggagcttgcagactcttccaaatccaaacctcctgctttttctatcatactccaccaaaaccagctgcataatgaggaaggcctcatgcaaaaaggaaatgccgggtcccttgttcaaacagaaaaaaaaaatgttgctaaaggtactaaaatataacatttttccttttccctgaggatgctctaaaacctgttatggtgttttctttctttctctccttccttccttcctttctattcttttcttttcctttctctctttttttttttttgacagagtctcattctgtcaccaggctggagtgcaatggtgcgatttcggctcactgtaacctccgcctcccaggttcaagcgattctcctgcctcagcctcccaagtagctgggactacaggcacccgccaccacacccggctaatttttgtatttttagtaaagatggggttttaccatgttggccaagatggtctcagtctcttgacctggtgatctgcccacctcggcctcccaaagggctgggattacaggcgtgagccaccgckcccggccagtgttttctatttgctactgtatttcctcatgcccagggagacttgagggatgagtgcaggccctcccaggccccagggtccctgctccttagcttggcacgtacacacaggctccaccagcaccca

SEQ ID NO: 7726 - DNA, 501 bp, Homo sapiens
ccaggcagtaccttgggcctctgccgtcacgcagggagggaagctgggtagccagttccccacgagcgcagagagctgcacctctagctcacccagaatctgccccagcaggtagtgcttcgagtacgtcctctgcagagccacctggctaagaggggagaaaagaaatccggccggaagtcaggctggtgggaatttccaaacgagagcccatgtgttgggaaggacgcgatggacagaacttctcaggggtttgttctgaatagtacygagtggcatgccaaagtcaagatttttatttcttatttttcaaaagccgcattgatgggaacaagctcacaatacaaacagtggtgattgcaatcacttgccgttcccatggcaacagacaagattaaaagagcaaacaacgaagctggaactctcttcagactaaatgctcccgattttaattgccaggcagcacgctgacacatggagtccccggctcgcggtttaaca

SEQ ID NO: 7727 - DNA, 501 bp, Homo sapiens
ccaggcagtaccttgggcctctgccgtcacgcagggagggaagctgggtagccagttccccacgagcgcagagagctgcacctctagctcacccagaatctgccccagcaggtagtgcttcgagtacgtcctctgcagagccacctggctaagaggggagaaaagaaatccggccggaagtcaggctggtgggaatttccaaacgagagcccatgtgttgggaaggacgcgatggacagaacttctcaggggtttgttctgaatagtactgagtggcatgccaaagtcaagatttttatttcttatttttcaaaagccgcattgatgggaacaagctcacaatacaaacagtggtgattgcaatcacttgccgttcccatggcaacagacaagattaaaagagcaaacaacgaagctggaactctcttcagactaaatgctcccgattttaattgccaggcagcacrctgacacatggagtccccggctcgcggtttaaca

SEQ ID NO: 7728 - DNA, 719 bp, Homo sapiens
taagtgctctatgcaaatcccatcacctcctcccacaccacccctctccaggcttctcttatcctgaccaagcccccgccttctgctccgctctcccacactcgcccctccctctctgaactcagccagttttcgcacatcccctttccctctcactgcagagtcccagcaaatgttccccgggcctgggctcttctctccactgccccgtgmccagataattcccacaggaacctcagtgttccttccttccgggggccttccactcttcctgtcctctccacaaaagcgccacggtcctctctttcctggggttaatcctcacgcttttcattttatgactatttgattattatcttcccctcctccgtctcccagatgacaagatccttaagggctgggactgggtttgattttgctctattttatccccaaagactatcatgatgttggcatataaaggtgctcattaaatattttttaaacagatgggtgaatgaactaatcatttgttcccattttgcacccctataagtgtcggaagctgcacgtgccccagcaaagcccagatgctatgtagatagacttgtatatgcgcacagagacgcacactcatcctcatgaaagtgaatgcaccaatgcattggcatagaggctaatgcacatcctcatgaaagtgaatgcaccaatgcgttggcatagaggctaatgcacacata

SEQ ID NO: 7729 - DNA, 719 bp, Homo sapiens
taagtgctctatgcaaatcccatcacctcctcccacaccacccctctccaggcttctcttatcctgaccaagcccccgccttctgctccgctctcccacactcgcccctccctctctgaactcagccagttttcgcacatcccctttccctctcactgcagagtcccagcaaatgttccccgggcctgggctcttctctccactgccccgtgaccagataattcccacaggaacctcagtgttccttccttccgggggccttccactcttcctgtcctctccacaaaagcgccacggtcctctctttcctgggrttaatcctcacgcttttcattttatgactatttgattattatcttcccctcctccgtctcccagatgacaagatccttaagggctgggactgggtttgattttgctctattttatccccaaagactatcatgatgttggcatataaaggtgctcattaaatattttttaaacagatgggtgaatgaactaatcatttgttcccattttgcacccctataagtgtcggaagctgcacgtgccccagcaaagcccagatgctatgtagatagacttgtatatgcgcacagagacgcacactcatcctcatgaaagtgaatgcaccaatgcattggcatagaggctaatgcacatcctcatgaaagtgaatgcaccaatgcgttggcatagaggctaatgcacacata

SEQ ID NO: 7730 - DNA, 462 bp, Homo sapiens
ggtgtcttaagcccacgagttcaagaccagccttgacaacatagcgagaccccgtctctatttatttaatataaaataagccaggcatggtagcrtgtgcctgtagtagtagctacgtcgggggactgagatgggaggatcacctgagtctagggaagtagaggctgcaatgagctggtgttcacaccatggcactccagcctgggtgacaaagcaagaccctgactcaaaaaaaaaaaaaaaggagcgaaaaggcccctcatccttctcacagtctggattcgtataattatttctcagtaactggattcagagaaatcctcatggggacagcgctgctgggcacagctgtgccctgcattcacgctccatcatgagatactgacggccggtttgttccagaactgtggatgtgaggttggtcacttggctatagtgtctgccagatcacaccactgtaaa

SEQ ID NO: 7731 - DNA, 462 bp, Homo sapiens
ggtgtcttaagcccacgagttcaagaccagccttgacaacatagcgagaccccgtctctatttatttaatataaaataagccaggcatggtagcgtgtgcctgtagtagtagctacgtcgggggactgagatgggaggatcacctgagtctagggaagtagaggctgcaatgagctggtgttcacaccatggcactccagcctgggtgacaaagcaagaccctgactcaaaaaaaaaaaaaaaggarcgaaaaggcccctcatccttctcacagtctggattcgtataattatttctcagtaactggattcagagaaatcctcatggggacagcgctgctgggcacagctgtgccctgcattcacgctccatcatgagatactgacggccggtttgttccagaactgtggatgtgaggttggtcacttggctatagtgtctgccagatcacaccactgtaaa

SEQ ID NO: 7732 - DNA, 462 bp, Homo sapiens
ggtgtcttaagcccacgagttcaagaccagccttgacaacatagcgagaccccgtctctatttatttaatataaaataagccaggcatggtagcgtgtgcctgtagtagtagctacgtcgggggactgagatgggaggatcacctgagtctagggaagtagaggctgcaatgagctggtgttcacaccatggcactccagcctgggtgacaaagcaagaccctgactcaaaaaaaaaaaaaaaggagcgaaaaggcccctcatccttctcacagtctggattcgtataattatttctcagtaactggattcagagaaatcctcatggggacagcgctgctgggcacagctgtgccctgcattcacgctccatcatgagatactgacggccggtttgttccagaactgtggatgtgaggttggtcacttggctatagtgtctgccagatcacrccactgtaaa

SEQ ID NO: 7733 - DNA, 2009 bp, Homo sapiens
atgcatgagagccccaactccacccgcagagagtgtcccagtcaaaaagtcaaaatatcacagtggtgctgattcttggtgcaaaaatcaccatgttacctgtgtttagaatccatatataaaagtaaaaatgccaacttttgactgcctctaggtgtgagattcagaacctttacagtgcactgtgttcatttggaaagtaaccatactgttggctggttgtgcatatgagagtaacaatttcaccggttttgggcccttttataatgctctctgtagtacctgatggcattataaggtatgcaccagagtcacaataatctgtgagatttgcatgcttgtgtggacacacaatcttacctattactttaagcccagagtcaacatctctcctattttctgtgtccaggaatgagatttatcactgtgcctgtgagtggggtccagaaatgagtcaccatcccatctgtggccagatccacatacgacagtcacaatatcaaccgtgagctgcatccatgagagatttaggacctcagcagtgggcactgtctgtgtgtgaggctgacaatcttaacttttgactagatgtctatatgagagtcacaatctcaactgtgtgctgggccctgttttgacatactctgtaccacctgagggaattctaccatatgttagagtttcataggcccctgtgacctctgtagaggtaggaaacagacgaccttacccatggacctatgtctatctatgagtcagtatctgtcctattgacttggtctgagcatgagattcaccaccatgcttgtaagctggatctagaaattagtcaccatccagcctgaggccagatccacatatgacagtcagaattccaactctggactgcatccatgtgtgagattcagaatctcatcaatgggttctgtccatttgtgaaggtgacggttccacttgttggctactgagagccacgatctcacctgtgtgctcggccctgttttatttataaagcccaagggctttataaaatacatgtgtgtgtcataatcttttgtgacctttttataattagtagaccaaggtttttagttgttgccctaagcatagctattaaagtccaaatttctcctattggctaggtccatgtaagaaagccatcaaatgactgttgcctgggcctaggtataggtcataatcccacatgtgggcagaaccagggaggaaagtcacatcacctgaatgctgggctggggaaatatcaatatccctccatgggcaggacccacgcaggaaagccatatcacctttatgctaggtttagtaatatgtcacaaagcccactttaggaagaacctagtcaagagccagatcaccttggtgcttggcccagcaatatgtcacaatcccttgtgtacgtagggcccatgcaggaaaggggagtcacatcatctaggtgctgggcccagtaatatgtcacaatccaccctgttaacagggcccagtcatgagaggagagtcatatcacctagataacatgcccagattatatgtcacaaattttactggagaaagggatagtcaggaaagtagagtctcatcacctaggtgagggtctcagagataacattacaatgctccttgtgggcagggcccaggcaggacagtcatatcacctaggtgtttgggccaggtatatgtcacaatcccaactgttagctgagctcaggcaagagagtaaagtcaatcaggtgctgagaaaaaattatgtcagagtcacacctgcagaaggtccagggatgagagtcacagtcccacacatttcctggctcaagttataagagaaaacwccttttgtgaattgtgtttaagtacacaaattacaatctcaattgtggacagaattcatgcataacagctccaaactcacctgcaaacactgtctaattagggcagtctcagcctcacaggtgtgctgagtataaaagtcaccattctacctgtgaact

SEQ ID NO: 7734 - DNA, 731 bp, Homo sapiens
cactgggtccaggggaaatgcaaatgactcataacctcatgaaaaatgctcagtctcactaggaactaaatgaggctcaaacagcaacaaaataactcagaagtgttttaaacaggggagggatatagtggactcttcaaacaagtgcaacatttttcgattggattttttttttttttttaatgagacagggtcttgctctgtcacccaggctggagtgcagtggtgcatacacagctcactgcagcctcaaccttctgagttcaggtgatcctccaacctcagtttccagagtagctgggaccagagctgtgcgccattatgcccagataatttttaaaattttttgtagatatggagtcttgccacgttgcccaggctggtcttggacccctgagctcaagtgatctgcctgcttcggcctcctaaagtgctgggattacaggtgtgagccactgcacccaggctgattggaaattytaatgcagcctgtaattttctgggtatagctcaagacacaaatgatttggatttcagatttttaaaaaatgtcaggattttggtacttagttaacagcatattgaagtaccaaaaactgatatttcaattactagatagggtgaggattagatccagtcagagccagggagagtgtttgccttaaggagggactcccttgtccaggatggggctggcactagggatggggtgaatcttaggacaggagtgg

SEQ ID NO: 7735 - DNA, 805 bp, Homo sapiens
ccccgtctctaaaaaaaaaaaaaaagttaaaaaaacaggaagtttgactatagcatacaaataaagtcaagaatccataaggattgggatgctcaaacagagcagtagggtgggaagctccttcttctaaaagcacacctcctctaaatgtgtaagaaggataagagtggcaagtcagcatgctgcgcccccagggtaacagctggtgcaagtatgcagcattcatggaggttaacaagggatatcagtttggggaatggagtatttctactgttcaaaagcagcacccatagggtactgacagattacagcaggatgatgggcgcttgtgttaatcaattctcacactgctatgaagaaatacccaagactggatgatttataaaggaaagagttttaattgagtcacagttccacatggctagggaggcttcaggaaatttacaatcatggtggaaagcacctcttcacgggggagagaacgagtrcacggcgaagggggaagccccttataaaaccatcagctctcgtgagaactcactcactatcactagaacagcatgggggaaaccatccccacgcttcagttgtttccactgggtcccttccaccacatggggggattatgggaacaaaattcaagatgagatttgtgtggggacacaaccaaaccctatcactgggtaccgacagattacaaaggaatggtgggtgccagactctggaggaacctagcagacagtgccatgcacaccaccatgaaacagagagacactgggtgcatcccattgccacaaactcagaa

SEQ ID NO: 7736 - DNA, 582 bp, Homo sapiens
tcatactgaaaacccacctctgctagggccataaatcccatcaacagcaattcattcctttgagaggtaatacagtgatgtgggaagaggattgggctggaaaaaagacttggctcatgtcccagctctgccattaatgtgtcccctctctggacctcatctgtaaaatgaggttaggctcagcgatctgcaggccttcttgcagctctgctatgtgatgattctgtggcaaagtctgaagggatttcaggaaaggaatgtgtaggagggaaacagtaagttttgaagggactcagtgggccctgtagcctctgctgggtccagtgaagacacttcaactagagtgaaggccctggccacagggtaggggaggcaaaatcttaagagttcaagrgccctgagtcaaggcaggagggtcactgcccagcccagctggccccctgggctgcctgtgtgtggttcttgacccagacctagtggcttaggagcagagtctccaaggggctgtgggataaggtggggattgcaggagggagaaggcaccccagcagttcccccgttaggggaccaaagcgttgccaa

SEQ ID NO: 7737 - DNA, 772 bp, Homo sapiens
ccccctgggaaaaagccccaatcctggcacagagtctaggaagccttgctgctttggttcctgcctgagtctggccctcatcctgcacttcccacatgctcagccacattcagctgtgcccagctcagagagcaagcgcctggatagctcttgttccagagcctcgcctggctgacccctgcacaccctttaggcccagctctgacatcactttctccatggcctgccctcctggactcctggctgtgcctccccagcacggactgttctcttttctcctttttccattaaactgagctctgtgccaagggcagtgactggcagatgggaggggtcaatgagtattttattaaagagtgagtgaatgaatgaacaaatgaatgaatgaagcgggatctctaggcacactggagtggagccactgtttgctttctgcccgtgggacttgatttgaagccatctcagggtgggccattgggagttctaccttgccaaggaggggttgctggtcagaggggtgctggaagcgggggggttgctgggggaaagggtgcagatttgcaagggaggttctggctgagctccctgcatgccacagcccgtctgagcagtcttgggaaaccccaagctgccaggcccatgactcacaggccccagagagcattcttaaccctccctgaccccccatgtgccttctgattgggccctcagggtracccctcatgggtttctctcctgcttcagccagcccctccctgtggtctgaagtttg

SEQ ID NO: 7738 - DNA, 746 bp, Homo sapiens
cctggatgacatcgttagtgcacctggagctgcacctacagcaaatcccatgacttcagttgggggagccaacagacacccatggcctaagctggtttgatggaatttctgtcacttgcgaccaaaagaatcacaatcaacagagttcagggaagaacgacaaacttgatgttggctatcactcctctcttaatgctagcgtgagctaggtactcatttgtacttaagagacactctctgagtctttaaaagatcctcaaagtggacatcatttaccccaagttacacacaaacttgaggcccagaaaggggaatgtgctaacactctagttagcagcagaaccatgactcaagtgcagattgtmctctccaagccctccctgtcccctctgccccaaaggaacagagtccggttgtttctaagcagtcaagtccaccaggaaatgtatcttagtgaaaacaagcccactgacccatgactgatttggtgagctccactttattgcaaagtttgggggaatcaaagactgaagcagaggccactacctcaacatcaattctcattcttggtacctgtagtgggatgaataatgtcccccaaaatgtcacatctaccccgaaaatcagaatgtcaccttacttcgaaatagggcctttgcagatgaaatgaagatgcaaattaagatgaggttataccacgttagggtggaccctaaacccactgactggcatccttaaaagaagag

SEQ ID NO: 7739 - DNA, 746 bp, Homo sapiens
cctggatgacatcgttagtgcacctggagctgcacctacagcaaatcccatgacttcagttgggggagccaacagacacccatggcctaagctggtttgatggaatttctgtcacttgcgaccaaaagaatcacaatcaacagagttcagggaagaacgacaaacttgatgttggctatcactcctctcttaatgctagcgtgagctaggtactcatttgtacttaagagacactctctgagtctttaaaagatcctcaaagtggacatcatttaccccaagttacacacaaacttgaggcccagaaaggggaatgtgctaacactctagttagcagcagaaccatgactcaagtgcagattgtactctccaagycctccctgtcccctctgccccaaaggaacagagtccggttgtttctaagcagtcaagtccaccaggaaatgtatcttagtgaaaacaagcccactgacccatgactgatttggtgagctccactttattgcaaagtttgggggaatcaaagactgaagcagaggccactacctcaacatcaattctcattcttggtacctgtagtgggatgaataatgtcccccaaaatgtcacatctaccccgaaaatcagaatgtcaccttacttcgaaatagggcctttgcagatgaaatgaagatgcaaattaagatgaggttataccacgttagggtggaccctaaacccactgactggcatccttaaaagaagag

SEQ ID NO: 7740 - DNA, 735 bp, Homo sapiens
agtatcacaaaggctccgtttccatttcagkgccaaacaaaaatctccccccattcaggtatctcattgtgtggatggttttcacccaaaatggtccacttaggagaaggagtgaaaaaatcaaacgttcatttctcctattcacccacaccctgtctgataaatgtcactccttaagcaaacctgttgcccatggcaacacattcagaagatgggctgctggtttcatttctttgtcagctggcttggattagaaatgcaagaaggcttttggacttgtgtctacacattaggatgcatcttagtaaaagtcaagaagaaaaggtggttatggtcaacctggggtggcgatgctctagtttaaggcagtcatggtcaacgtggggttttgacactctaaggacgtcatggtcaacgtggggttttgacactctaagggcatcatggttaacatgggacagtgatgttctagtttaaggtggttatggtcaacatggggagtgacactctagtttaaggtggttatggtcaacctggggcagcgatgctctagtttaaggcagtcacggtcaacatggcgttttgacattctaaggcggtcatggtcaacgtggggcagtgacgctctagtttaaggtggttacggtcaacatgaggcggtgacactctagtttaaggtgatcatggtcaacatgggacagtgatgttctagtttaaagtgatcctggagcccat

SEQ ID NO: 7741 - DNA, 735 bp, Homo sapiens
agtatcacaaaggctccgtttccatttcagtgccaaacaaaaatctccccccattcaggtatctcattgtgtggatggttttcacccaaaatggtccacttaggagaaggagtgaaaaaatcaaacgttcatttctcctattcacccacaccctgtctgataaatgtcactccttaagcaaacctgttgcccatggcaacacattcagaagatgggctgctggtttcatttctttgtcagctggmttggattagaaatgcaagaaggcttttggacttgtgtctacacattaggatgcatcttagtaaaagtcaagaagaaaaggtggttatggtcaacctggggtggcgatgctctagtttaaggcagtcatggtcaacgtggggttttgacactctaaggacgtcatggtcaacgtggggttttgacactctaagggcatcatggttaacatgggacagtgatgttctagtttaaggtggttatggtcaacatggggagtgacactctagtttaaggtggttatggtcaacctggggcagcgatgctctagtttaaggcagtcacggtcaacatggcgttttgacattctaaggcggtcatggtcaacgtggggcagtgacgctctagtttaaggtggttacggtcaacatgaggcggtgacactctagtttaaggtgatcatggtcaacatgggacagtgatgttctagtttaaagtgatcctggagcccat

SEQ ID NO: 7742 - DNA, 735 bp, Homo sapiens
agtatcacaaaggctccgtttccatttcagtgccaaacaaaaatctccccccattcaggtatctcattgtgtggatggttttcacccaaaatggtccacttaggagaaggagtgaaaaaatcaaacgttcatttctcctattcacccacaccctgtctgataaatgtcactccttaagcaaacctgttgcccatggcaacacattcagaagatgggctgctggtttcatttctttgtcagctggcttggattagaaatgcaagaaggcttttggacttgtgtctacacattaggatgcatcttagtaaaagtcaagaagaaaaggtggttatggtcaacctggggtggcgatgctctagtttaaggcagtcatggtcaacgtggggttttgacactctaaggacgtcatggtcaacgtggggttttgacactctaagggcrtcatggttaacatgggacagtgatgttctagtttaaggtggttatggtcaacatggggagtgacactctagtttaaggtggttatggtcaacctggggcagcgatgctctagtttaaggcagtcacggtcaacatggcgttttgacattctaaggcggtcatggtcaacgtggggcagtgacgctctagtttaaggtggttacggtcaacatgaggcggtgacactctagtttaaggtgatcatggtcaacatgggacagtgatgttctagtttaaagtgatcctggagcccat

SEQ ID NO: 7743 - DNA, 735 bp, Homo sapiens
agtatcacaaaggctccgtttccatttcagtgccaaacaaaaatctccccccattcaggtatctcattgtgtggatggttttcacccaaaatggtccacttaggagaaggagtgaaaaaatcaaacgttcatttctcctattcacccacaccctgtctgataaatgtcactccttaagcaaacctgttgcccatggcaacacattcagaagatgggctgctggtttcatttctttgtcagctggcttggattagaaatgcaagaaggcttttggacttgtgtctacacattaggatgcatcttagtaaaagtcaagaagaaaaggtggttatggtcaacctggggtggcgatgctctagtttaaggcagtcatggtcaacgtggggttttgacactctaaggacgtcatggtcaacgtggggttttgacactctaagggcatcatggtyaacatgggacagtgatgttctagtttaaggtggttatggtcaacatggggagtgacactctagtttaaggtggttatggtcaacctggggcagcgatgctctagtttaaggcagtcacggtcaacatggcgttttgacattctaaggcggtcatggtcaacgtggggcagtgacgctctagtttaaggtggttacggtcaacatgaggcggtgacactctagtttaaggtgatcatggtcaacatgggacagtgatgttctagtttaaagtgatcctggagcccat

SEQ ID NO: 7744 - DNA, 735 bp, Homo sapiens
agtatcacaaaggctccgtttccatttcagtgccaaacaaaaatctccccccattcaggtatctcattgtgtggatggttttcacccaaaatggtccacttaggagaaggagtgaaaaaatcaaacgttcatttctcctattcacccacaccctgtctgataaatgtcactccttaagcaaacctgttgcccatggcaacacattcagaagatgggctgctggtttcatttctttgtcagctggcttggattagaaatgcaagaaggcttttggacttgtgtctacacattaggatgcatcttagtaaaagtcaagaagaaaaggtggttatggtcaacctggggtggcgatgctctagtttaaggcagtcatggtcaacgtggggttttgacactctaaggacgtcatggtcaacgtggggttttgacactctaagggcatcatggttaacatgggacagtgatgttctagtttaaggtggttatggtcaacatggggagtgacactctagtttaaggtggttatggtcaacctggggcrgcgatgctctagtttaaggcagtcacggtcaacatggcgttttgacattctaaggcggtcatggtcaacgtggggcagtgacgctctagtttaaggtggttacggtcaacatgaggcggtgacactctagtttaaggtgatcatggtcaacatgggacagtgatgttctagtttaaagtgatcctggagcccat

SEQ ID NO: 7745 - DNA, 612 bp, Homo sapiens
catcagctgggtgggggtacgcacacagctggaggcacagtggggccaacagtaattttgatgatctgatttcaatgcagaaaaagggaatgaacgtgacaggatgatttttttaagcttaaggaagcaaaaaagaaagcttamgaggctaacactcaattcctaaaactttctttttaacagaaagtcccagaaacaaatgatgtcaacacacggagaagcttacgaagctccaggtggactaaagctggccctgcctattccacagcatgcgaagggcaaggaagggctgagcgtatttctaaaggtggggtgagtgaggactcggggagcaggagttttgctcccaggcagaccgctcagccaggcactcggccagcatgctagtaacagcgaggtgcacacgcagctccaagactgcgctctttctgtgaaggatacacagactttgtatccgcagctctgagggatgagctggggcccccgcagctgtccttgctggctcgcggggtgcagcaacttcctgaaacaagcaaggccacagtgaggctctgacaacaggcaaagggagggaggagcagagacatgcccagtgatttgacaagggtccga

SEQ ID NO: 7746 - DNA, 612 bp, Homo sapiens
catcagctgggtgggggtacgcacacagctggaggcacagtggggccaacagtaattttgatgatctgatttcaatgcagaaaaagggaatgaacgtgacaggatgatttttttaagcttaaggaagcaaaaaagaaagcttacgaggctaacactcaattcctaaaactttctttttaacagaaagtcccagaaacaaatgatgtcaacacacggagaagcttacgaagctccaggtggactaaagctggccctgcctattccacagcatgcgaagggcaaggaagggctgagcgtatttctaaaggtggggtgagtgaggactcggggagcaggagttttgctcccaggcagaccgctcagccaggcactcggccagcatgctagtaacagcgaggtgcacacgcagctccaagactgcgctctttctgtgaaggatacacagactttgtatccgcagctctgagggatgagctggggcccccgcagctgtccttgctggctcgcggggtgcagcaacttcctgaaacaagcaaggccacagtgaggctctgacaacaggcaaagggagggaggagcaragacatgcccagtgatttgacaagggtccga

SEQ ID NO: 7747 - DNA, 713 bp, Homo sapiens
cacacaccgccagttcatgcctactacgagcctcaaagatgacttccaagtcctatagcctcaaggcacaccctcacggaaaaccattttcctgcatgactgtattgtgtggtgacaacactgtcttgtggattaggtaactgtggtcccctccacttgtcgtctttttttattaacttataaacaaatccatttcaaattaattatgtcatctgcttaggctatctcgacctttgcttctaagttattctgaaaggactttgttttgcttacttgaagagctccttgaccctgggttccaatgcggtctagggcaaagagccttggacccagagtcaggccgcagtgctagatgagcctccgctgctcagagctaaatgtgcgctagttattttataggtttgttgcgaaaaagagttaatttttgtgaaagtgctctgtagcggaaaacattttgaaagcattctagaattggccaaataaaagtagttttctggattctgacatagatgaaggaacaatacattttttttttgtaatctcagaaagaaactattggacagaaaatctagagaatctttwtttttttccctaagaaactacataaaagatgttgcaaactaaaacagatttggaaacctgaatgccacgtgcggccctgaagcgttcacaaaggcactgtgaagtctaggccgggagtccgcagcggggac

SEQ ID NO: 7748 - DNA, 814 bp, Homo sapiens
gccattactgaagctcatatcaccccttgactctcccagctaactgaacaattttttgttgtttaagtcagtttaccctggatttctgccacttgccactagaaragtccttcctaatgtatcctccagctatcacttttgagtcggcataaaattccacaaatgtttgccgaatacctgttggggaccaggcactattcagagaactttaatccatgtgactccattaaagtaatactttaataatacaacaagctctcataaatccactatgaagcccaagaactaaaacattaccaggaacttacatcaattgcttcccttaccctgaatttcatttttatttttaacttatatgtatatgcatttgtctgaatattgtactatttagtttgtttttgaactttatagaaagggtactatactatatgtagtttgctggggcttgctttttttactattatgtcactaagattcattcacattattgcatgtggtttatttttattgctgtataatagactctagtgtgactatattatggttgttttatatagcatataagtatacacttacaggctggtcattcctatattttcttttcttttatgttgagacagaatctcgctctgtcacccaggctggagtgcagtggtgcgatcttggctcactgcaatctctgcctcccagactcaagtgatactcctacctcccaagtagctgggactacaggtgtgcacaaaaatgcctggctaatttttttgtatttttggtagagacagggttttaccatgttgcccaggctggtctcaaa

SEQ ID NO: 7749 - DNA, 814 bp, Homo sapiens
gccattactgaagctcatatcaccccttgactctcccagctaactgaacaattttttgttgtttaagtcagtttaccctggatttctgccacttgccactagaagagtccttcctaatgtatcctccagctatcacttttgagtcggcataaaattccacaaatgtttgccgaatacctgttggggrccaggcactattcagagaactttaatccatgtgactccattaaagtaatactttaataatacaacaagctctcataaatccactatgaagcccaagaactaaaacattaccaggaacttacatcaattgcttcccttaccctgaatttcatttttatttttaacttatatgtatatgcatttgtctgaatattgtactatttagtttgtttttgaactttatagaaagggtactatactatatgtagtttgctggggcttgctttttttactattatgtcactaagattcattcacattattgcatgtggtttatttttattgctgtataatagactctagtgtgactatattatggttgttttatatagcatataagtatacacttacaggctggtcattcctatattttcttttcttttatgttgagacagaatctcgctctgtcacccaggctggagtgcagtggtgcgatcttggctcactgcaatctctgcctcccagactcaagtgatactcctacctcccaagtagctgggactacaggtgtgcacaaaaatgcctggctaatttttttgtatttttggtagagacagggttttaccatgttgcccaggctggtctcaaa

SEQ ID NO: 7750 - DNA, 1330 bp, Homo sapiens
ttttcaactcttttttctccattttgctttcttggcttttaacttttattttaggttcaggggtacatgtgcaggtttgttatataggtaaactcatgtcacaggggtttgttgtacagatgagttcagtacccaggtactaagcctagtactcattagttatatttgctgatcctcttcctccttccatcctccaccctcaagtaggccctggtgtctgttgtcaccctcattgtgtccatgagttctcatcattttagttcccacttataagtgagaacatgaagtatttggttttctgttcctgagtcagtttgctaaggataatgtcctccagatccatccgtattcccacaaaagacatgatcttgttcttctttatgactgcatcgtattccatgatgtatatgtaccacattttctttatctagtctaccattgatgggcatttaggttgattctgtatctttgctattgtaaatagtgctgcatgttttcctggcttatttgcatctttccttcaatgctcactgtgttttcaatattatttctgttcctttgcagccactttcattgctgtggtgtgtttatttttctcttccacttttgtgttctgttccattggctcatttcttctgttgtctcatcttccttgaagtcttatctctgcattgagctcttgttcatagagcagttgcttcagaaatattttacattcatagtaatatggttggttatcaattttcttttcttttcttttctttttttacctcactaaccaactttatttagttttaagaaatcaccttccgtatttcatagtcaaggcctgagagtcacaaaaaaatttgaaaatcactccagaaggtgcattaaaaacttctttctacttggccagcatttaactcagaaactagcaaactcagttattctcttcttactggtagggttatttcaccttagccttttccagctttacaacacagcacaatataacaactctctggaacactcatttctctcattgccattagcatctcttttatcagccttccccctgcttggcctctatatctgctttcatacacctttggcggctttcacgttcatcaattatattgcaaagagtcctttacttccccattgttttttgttttttttttttttkttgttgttgttgttgttgttgaataaatcattgttcaaataaatgatttaatacagaaaatcaaaatttgtacctttttcaaataaaaataaaataaaaatttccagtattttcaggcatgttgtaagatttcacttcccacttttttgttttttattatta

SEQ ID NO: 7751 - DNA, 798 bp, Homo sapiens
tcctgcctcaacctcccaagttagctgggactactgaacttgtttcttcttttttttgaaacagagtcttgctctcttacccaggctggagtgcagtggctggatctcggctcactgcagtctccacctcctgggttcaagcaattctcctgcctcagcctctctagtagctgtgactacaggcatgcaccaccatgtccagctaatttttgtatttttagtagagacagggtttcaccgtgttgaccaggctggtctcaaactcctgacctcaagtgatccacccgcctcrgcctcctaaagtgctgggattacaggcatgagccaccatgcccggccctgaatttgtttcttaccctctcttcacctccatttctgaatctataaaagagaaataataaaatgccagtctcagaaggttgttgtttaaggattccatggggttcctgtgtaaagccatcgcttggcacatagtaagtgctcaataaatgacagccagtattgtcaatgtcagtgctggttatagcaaatttgtattcagagtacatcacgctcagctcagcactccaccaggagagggttttgtttgtttggttagttttctaaaacaattgctcatttttattttattttgagccagcgttctctctctgagtggacctagacgtgcattccgggggctgtttctatttgcagtctgaagtcaggcctggggcttgtggctgtttttgccatctggtctggggcgaaagggcaaatctgaaagtctctctgttgtggccagcgagggagtcccat

SEQ ID NO: 7752 - DNA, 798 bp, Homo sapiens
tcctgcctcaacctcccaagttagctgggactactgaacttgtttcttcttttttttgaaacagagtcttgctctcttacccaggctggagtgcagtggctggatctcggctcactgcagtctccacctcctgggttcaagcaattctcctgcctcagcctctctagtagctgtgactacaggcatgcaccaccatgtccagctaatttttgtatttttagtagagacagggtttcaccgtgttgaccaggctggtctcaaactcctgacctcaagtgatccacccgcctcggcctcctaaagtgctgggattacaggcatgagccaccatgcccggccctgaatttgtttcttaccctctcttcacctccatttctgaatctataaaagagaaataataaaatgccagtctcasaaggttgttgtttaaggattccatggggttcctgtgtaaagccatcgcttggcacatagtaagtgctcaataaatgacagccagtattgtcaatgtcagtgctggttatagcaaatttgtattcagagtacatcacgctcagctcagcactccaccaggagagggttttgtttgtttggttagttttctaaaacaattgctcatttttattttattttgagccagcgttctctctctgagtggacctagacgtgcattccgggggctgtttctatttgcagtctgaagtcaggcctggggcttgtggctgtttttgccatctggtctggggcgaaagggcaaatctgaaagtctctctgttgtggccagcgagggagtcccat

SEQ ID NO: 7753 - DNA, 826 bp, Homo sapiens
ccaccctaacctcaccctggacatgctcccattccacagcctgcagaagcaaactgcctgtacttatattatgcttgctttctcttcacaagcatacgtgactgagtccgtgtacattaaaggcttatgacaattttctgtgtttaattttttttcttttttcttttttttttttttggagacagagtcttactctgtcccccaggctggagtgcagtggtgccatcttggcttactgcaacctctgccttccgggttcaagcaattcttgtgcctcagcctgggattacaggcatgcaccacgcctggctaattttttgtattttagtagagacagtgttccaccagcttgcccaggctggtctcaaactcctgagctcaggcaatccacccacctcggcctcccaaagtgctaggattacagkcatgagccaccgaacccggcccaattccctatatttaattctgcttcatattaagacagtttggaaatggtagacatcgggccacatttggcatctggggttcccaacccacttttacctggtaaaaatgttaaaaagtatgagagctggagttccaagcatgagacttgagtccaaagcctggaaccacagtttaccagggggtgacccagggctggtcacttcatctccttcagcgttagtctcttcctatgaaaaagaggatcttgaaaatattcaccaccgacagttgctgagagatgaagattaagtgcacatagttgttagattttaagtgcattcatagccaggtgtggtgtctcacacctgtaatcccagcactttgggtgtctgaggtggga

SEQ ID NO: 7754 - DNA, 826 bp, Homo sapiens
ccaccctaacctcaccctggacatgctcccattccacagcctgcagaagcaaactgcctgtacttatattatgcttgctttctcttcacaagcatacgtgactgagtccgtgtacattaaaggcttatgacaattttctgtgtttaattttttttcttttttcttttttttttttttggagacagagtcttactctgtcccccaggctggagtgcagtggtgccatcttggcttactgcaacctctgccttccgggttcaagcaattcttgtgcctcagcctgggattacaggcatgcaccacgcctggctaattttttgtattttagtagagacagtgttccaccagcttgcccaggctggtctcaaactcctgagctcaggcaatccacccacctcggcctcccaaagtgctaggattacagtcatgagccaccgaacccggcccaattccctatatttaattctgcttcatattaagacagtttggaaatggtagacatcgggccacatttggcatctggggttcccaacccacttttacctggtaaaaatgttaaaaagtatgagagctggagttccaagcatgagacttgagtccaaagcctggaaccacagtttaccagggggtgacccagggctggtcacttcatctccttcagcgttagtctcttcctatgaaaaagaggatcttgaaaatattcaccaccgacagttgctgagagatgaagattaagtgcacatarttgttagattttaagtgcattcatagccaggtgtggtgtctcacacctgtaatcccagcactttgggtgtctgaggtggga

SEQ ID NO: 7755 - DNA, 826 bp, Homo sapiens
ccaccctaacctcaccctggacatgctcccattccacagcctgcagaagcaaactgcctgtacttatattatgcttgctttctcttcacaagcatacgtgactgagtccgtgtacattaaaggcttatgacaattttctgtgtttaattttttttcttttttcttttttttttttttggagacagagtcttactctgtcccccaggctggagtgcagtggtgccatcttggcttactgcaacctctgccttccgggttcaagcaattcttgtgcctcagcctgggattacaggcatgcaccacgcctggctaattttttgtattttagtagagacagtgttccaccagcttgcccaggctggtctcaaactcctgagctcaggcaatccacccacctcggcctcccaaagtgctaggattacagtcatgagccaccgaacccggcccaattccctatatttaattctgcttcatattaagacagtttggaaatggtagacatcgggccacatttggcatctggggttcccaacccacttttacctggtaaaaatgttaaaaagtatgagagctggagttccaagcatgagacttgagtccaaagcctggaaccacagtttaccagggggtgacccagggctggtcacttcatctccttcagcgttagtctcttcctatgaaaaagaggatcttgaaaatattcaccaccgacagttgctgagagatgaagattaagtgcacatagttgttagattttaartgcattcatagccaggtgtggtgtctcacacctgtaatcccagcactttgggtgtctgaggtggga

SEQ ID NO: 7756 - DNA, 871 bp, Homo sapiens
ggccctgttctatcccaacatataggcaataaattttttttttacctcattaatggatctatcctttttcttttctaaccacttccttatgtgacttctgaaatctagtggggctctgtggtttctgattttccctggctgcttctttagttttgtctccttttccaggctcaacggcgtgctgatggaagtggaagagcctgaagtcttacaggactcactggatggatgttattctactccgtcaatgtactttgaactacctgactcattccagcactacagaagtgtgttttactcatttgaggaacagcacatcagcttcgccctttacgtggacaataggttttttactttgacggtgacaagtctccacctggtgttccagatgggagtcatattcccacaataaacagcccttactaagccgagagatgtcattcctgcaggcaggacctataggcacgtgaagatttgaatgaaagtacagttccatttggaagcccagacataggatgggtcagtgggcatggctgtattcctattctcaaaccatgccagtggcaacctgtgctcagtctgaagacaatggacccacgttaggtgtgacacgttcacataactgtgcagcacatgccgggagtgatcagtcagacattttaatttgaaccacgtatctctgggtagctacaaaattcctcagggatttcattttgcaggcatgtctctgagcttctatacctgctcaaggtcaktgtcatctttgtgtttagctcatccaaaggtgttaccctggtttcaatgaacctaacctcattctttgtgtcttcagtgttggcttgttttagctgatccatctgtaacacaggag

SEQ ID NO: 7757 - DNA, 859 bp, Homo sapiens
tggtttccctgaatctgttgcctccaggtgttaacacagaattaagcatccacaattgctgaaagtcacctggggcatggtgggttttgatcttcttccccttcttttcttccccttcttctttccttctttgatcttcttccccttcttttcttccccttccccttcttttcaatttctgcaataaattcagacatggacagacacattaagctgattcccctacacacataacaatccactgtctaatcctcacacagggacctcaggctcctcagcataagaataggacaccgtgagagatatatttcaggaggcctgaaggctggtcatgatagaaattcctcggtttttctcccagaaactgtgggtaaaatgtccctattctagtagatcgttatcccaatatcatttgtcccaagtttgtgcaaacagttatgccatatttttccaatcaacttaaagcaaataccctcaaatgatttctaggagaaaaactgcaatatttagccctgtctcatcaaatactcagattgttcatggttgtgaggactttagacactgaaattagagtgaaaaaggaaatctacaaacccttgagtcaaaatcatagttctctgaatttgtcacatctgcccaggtccaatgtcatgaggataggatcagggcgccacaggtatggcctgagactaggaagagagtcttgctcactgacccatcccttgcctgggcttccaggtrgaactagagtttcattcaacctacatgtgcctataggtcctccctgtggcaatgacatctctcagctcagtaatggccacttggagcaggaatatgatctttatatggaagactcagt

SEQ ID NO: 7758 - DNA, 755 bp, Homo sapiens
actgagtcttccatataaagatcatattcctgctccaagtggccattactgagctgagagatgtcattgccacagggaggacctataggcacatgtaggttgaatgaaactctagttcyacctggaagcccaggcaagggatgggtcagtgagcaagactctcttcctagtctcaggccatacctgtggcgccctgatcctatcctcatgacattggacctgggcagatgtgacaaattcagagaactatgattttgactcaagggtttgtagatttcctttttcactctaatttcagtgtctaaagtcctcacaaccatgaacaatctgagtatttgatgagacagggctaaatattgcagtttttctcctagaaatcatttgagggtatttgctttaagttgattggaaaaatatggcataactgtttgcacaaacttgggacaaatgatattgggataacgatctactagaatagggacattttacccacagtttctgggagaaaaaccgaggaatttctatcatgaccagccttcaggcctcctgaaatatatctctcacggtgtcctattcttatgctgaggagcctgaggtccctgtgtgaggattagacagtggattgttatgtgtgtaggggaatcagcttaatgtgtctgtccatgtctgaatttattgcagaaattgaaaagaaggggaaggggaagaaaagaaggggaagaagatcaaagaaggaaagaagaaggggaagaaaa

SEQ ID NO: 7759 - DNA, 779 bp, Homo sapiens
aaggagaaggctttcacagagccgagttgttaatgactataatagtacaaatatggatatttattactaagaataattacagcaaatgtgtttgtggcatttactatttgccaggcactctgcaaagtgctctacatacaataacttctttatcactgcaaggccatgaagtaggtaaattagtatacagttaatgaactgtaggcacagagaggttaagtaatttgctcaaagtcacacagctccattgatgacttgtaagttaaacctaggaaatttggctgcaaagtttatgtgcttaactataaaaccacactgcccttctagttaagttaataatagtaaaagtagtaataattacaattattacyatcctgttttgagtactttctttgtgccaggtatcaaccacgtcatgtgaatcgcctctacttatagcaactgtgaagggtagatattaatatgccccttttttaagtaaaaaaaattttaaacatgctcattttacaaatgaggaaactggagttcaaagaggggaaatgccttatctgaggtgacacgacacctaagggacaaagccatccttttttctggtatggaactgcttctacgctgagctcctgtcatgttgggctttgatacacattatctcatttaatcctccaaatagccctgcggaataggtactatgatgctcagcctgtggctgagataaccaacctcagaataaagttatttgcccaagtctttatttgttccttaccgatgtccccacacac

SEQ ID NO: 7760 - DNA, 669 bp, Homo sapiens
aggatccttgaagggagtccatttcctggaaattaacgcaggaaatgggagtttcaaggatggagattctttaggcatgagtatagtctagaggaagatgtgacaaatcacataattgggcttcaagcagtgatggcccaggaaggcctaactggactcctaaggactcagcagaactgaaggcatttgagagcactcactccttctgtcagactctctccaaagttaaatcaargagaaatattgttttttccattatgctgatgcagcctgaccactgtgaggactgtgggactttacaaggatggtgttaaaagtagaggtaaacagcaagatttcacaatcatgcaaaggaaagaaaagggcgctataaaaatatattaactaaccagccaaggaaagggaaaggggagaaaaacaagaaaattcagtgttgcaaaagtgataatttgcaactgacaatgtttgctctgattctgtttttctaccctgcccctgcctctgcctctcttggcctctccaagacctgacacaatgcccgccccgcccgtcccatccttcatatccacactcaatcacagtgtgaatgtcaagactgagaagaacctgccctagggtttcacatggcagctttttgctcactgaggcctccctgacttcccagtctaa

SEQ ID NO: 7761 - DNA, 793 bp, Homo sapiens
ccttgcaatcacaaagttttgaaatcagcagggggacttcctckccttaacccccagaggctgtccttgccctgttctcagtaccccgtagctactttacctacgatggctgaactttccactttctgaggaactgcaaacttttgtggtcagcctggcccactctatacctgagacatgaattcaacacatctagaaactcttatcatgctgtcaatgccaaggagaaaggaattttttcttatgatttccattttaacctaaaagttgttttctctattggatttgccaaagggctctttgcttgtggcccccacactccttattgcccttttccattttgtgactcaatattacagtgtttctacaaatattgttaatatttgcctcctgttttgaagtgtttgaaacatcagggaataagaaacaagtattagtactttgactgagcctggttactttcaggtcggctttggatttaaagattaggggccagtcttatatacaagcaaaagtgccttcactgtgaagaacaccccaggggacaaaattagaccagttagttgataaaataaataatgataataataataactaaaatttcagcacttactctgcattaagcatatgctagctgttttacatgtacaatccatctgattgttctttgtcttcttaagaaatattgattcttgcactttgggaggctgaggctggcagatcacttaagatcaggagtttgagaccagcctggccaagatagcaaaaccccatctctaccaaaaatataaaa

SEQ ID NO: 7762 - DNA, 793 bp, Homo sapiens
ccttgcaatcacaaagttttgaaatcagcagggggacttcctctccttaacccccagaggctgtccttgccctgttctcagtaccccgtagctactttacctacgatggctgaactttccactttctgaggaactgcaaacttttgtggtcagcctggcccactctatacctgagacatgaattcaacacatctagaaactcttatcatgctgtcaatgccaaggagaaaggaattttttcttatgatttccattttaacctaaaagttgttttctctattggatttgccaaagggctctttgcttgtggcccccacactccttattgcccttttccattttgtgactcaatattacagtktttctacaaatattgttaatatttgcctcctgttttgaagtgtttgaaacatcagggaataagaaacaagtattagtactttgactgagcctggttactttcaggtcggctttggatttaaagattaggggccagtcttatatacaagcaaaagtgccttcactgtgaagaacaccccaggggacaaaattagaccagttagttgataaaataaataatgataataataataactaaaatttcagcacttactctgcattaagcatatgctagctgttttacatgtacaatccatctgattgttctttgtcttcttaagaaatattgattcttgcactttgggaggctgaggctggcagatcacttaagatcaggagtttgagaccagcctggccaagatagcaaaaccccatctctaccaaaaatataaaa

SEQ ID NO: 7763 - DNA, 869 bp, Homo sapiens
ccttcaacttggtttctgtgtcccttgatgtgtccccatcatttgttgagtacttcctgactttgtcacataagctgtctctgactaatcttctacttcccttgctctagtcctggaatcagatattttccaacaagcgatggttactttccattgaaaatggacctttagaagccaaaagctgagtgctaggtgtgcttattgttattgagcaggccttccaggggaaatgctaaggttcccaggccctctcagtggatggaactaaggaatgtatttgtgtgttaccacacacacattaacatctactttctatctatatttaaaatcataagttcaatacaaaaattccttttctaatacagcaccgcaaggttcactttagcctttctttccttgyttaaagttccttctctaataggaagctgtctcccattatccttaataaatttacttatttaatcaatcttctcatgagaactgatattatggccacagcccttaccaggcacagggcttatctcatcatcaaaacttcatagagtaccttctgtgtcccattcagtgtactaggcatttgaagatcaatagcaaataaatgcagcccatatgtttctaggaaagactgccacctatcccccagaaagcaaacatattaaggtctagttcaattcagaaagtacactctaaatgtgtaaggcatatggggccaccagagcttataataagggaatgtgacctgggctctgaggccagatgtccttaaaaagtgaggattttagtaaaatcgaacaaagtcctggtggacctcatagagaaaggggcagacagagtgagagaagtctgtaagaaaagcagtagccagatag

SEQ ID NO: 7764 - DNA, 747 bp, Homo sapiens
acacgctcatgtggaagtagtgtgagtacagttctaaggtaattgcagcctttgtgaaaaatgtaaaatataaaaattaccaggctacccccaagggagacagcagactctttttaaaccatacaaaaatttaaggcagttatacaaggtggaaaattatgtatttatttacacaaatatgcacagaacacttgtatctttcaaaagtcacacttaagacatagtaaaagcatgttgtatgaaccatgtattcttaaggattgagcaaactgcaggctgcttgctgccttttaggtttgctagtccctgatctacttgaaacagatgttgcttgccccaacactagtttaattataagggcagcctgtgagaaagtttcaatagacatttttctcacctatattgcacgtttttctgaagcccttgtgcaagtgtgtgtgccatgtgtagttctatttacatataaacgctactttaaaagtttatcaaaatcatgagtttttacaaaagtttttaatgctcttctgcattatatgyagcattgcaaatctgcaaagtagtaaaactataaagcacctttaggtttgcaccagttattacagaaatggggatttgtgaaaaggatgtaatttgatgtagaagggcaaagtcctttaatgactggcattcaagaggattacttaaaacaatttgtaagttcatgctaacctcttccctatatttatactactgggacctggggaagga

SEQ ID NO: 7765 - DNA, 809 bp, Homo sapiens
cttgcacaagtccagctgcattgctgacctatgtggcctttccaaactgtgccatacgtagagcctgttgcttcatctttcagcaaatagttattgagagccctctgtgtctcaggcctggtgctggatgctgccacagaggcccctgccctggtggaataaaggaaactggtaattgcacattgatcttctatgcagacatcttactgacacttatcagtgctaatagattttttttattttgatcttttgcattatgatgtgaaaatattatctgcaaataataataataataatacttctcctctcaatgcctgagagacagcatttttaaggtakaaaaatgtatatcctggaaccagatcacttggattcaaattccagcattgccacttagaagctgtgtgacttttaacaagttacttaacctctctgtgctccagtttcctcatctcatgtaatgaacttaggacagtgcctgacgctatataaatattggtagggctatactagctgaacagatgataatctcttgccttattccattgtctaaaatttccagaatgcatgtaaaaaagggtttccctgtcttattcctagttttcataggaatgcatttataattttaacattgcatatgatacttcctgctggcttctgataaatattcttttttgttatgaataggaaggttacttctattccaatttcacctagaatttttataaagaaaaattaattaaatgctccttaaaaatctattgaaataatcatatggtttttctcctttaatttactaatgtaatgaa

SEQ ID NO: 7766 - DNA, 747 bp, Homo sapiens
taagttaagcaacacagtcatcacttttgacattttcctctaatattttgtgcagttatgcagcaaattstatttcaaaggtaaaccttatttaaaaccccatagcatcatatgactcctatttttaaaagtctgcaaaataattacatccctttctttagttatccttatcatattactacagctgatggaattcagttaagcagcattggttgtctattcaaaactaaattaatatagtgaggatttattttaagttttcattatttttttttacatcatagcccttgaaacatgacagtttgtcattccatgtatttgcaggatttttttttaagaaaaccatcctgattctctattttcttactttcaaataccatcacagtataatttattttaatcccttatcctgtgggtcacttttatctgatgattgctttcatttaaattttaattggggtttgaaaactctttttatggactggaggacaataagtaaacttttgtagtatggcagggtgatctatagtccaggaaatcaatatctaggcttctatatgcaggagctgttcaaggcaggaactattttcttatttatttttgaagtcacattagagttccaaatgtataattatacaggattccataagttaatagtataggcttattggttttaaagaagtcttcttcttcacagtgatattttttcaggtattattgagatgtgtccttatttatctggagaat

SEQ ID NO: 7767 - DNA, 747 bp, Homo sapiens
taagttaagcaacacagtcatcacttttgacattttcctctaatattttgtgcagttatgcagcaaattgtatttcaaaggtaaaccttatttaaaaccccatagcatcatatgactcctatttttaaaagtctgcaaaataattacatccctttctttagttatccttatcatattactacagctgatggaattcagttaagcagcattggttgtctattcaaaactaaattaatatagtgaggatttattttaagttttcattatttttttttacatcatagcccttgaaacatgacagtttgtcattccatgtatttgcaggatttttttttaagaaaaccatcctgattctctattttcttactttcaaataccatcacagtataatttattttaatcccttatcctgtgggtcacttttatctgatgattgctttcatttaaattttaattggggtttgmaaactctttttatggactggaggacaataagtaaacttttgtagtatggcagggtgatctatagtccaggaaatcaatatctaggcttctatatgcaggagctgttcaaggcaggaactattttcttatttatttttgaagtcacattagagttccaaatgtataattatacaggattccataagttaatagtataggcttattggttttaaagaagtcttcttcttcacagtgatattttttcaggtattattgagatgtgtccttatttatctggagaat

SEQ ID NO: 7768 - DNA, 848 bp, Homo sapiens
ctcaaaccagaaggcaaacaggagaaaatgggcgacaggcacacgcaatcatgacaagagagggcaaactcagaaaaccaggatggcgatatttcctctagtgaagggtttctctcatgttaatgagaaaggatcgyatcattgtagctattatttataatgtgttttgtcagtgtacttagtcctgttaaggaaaataaacattgatcatcccaaggtctctttcaatctcaattgaaatagagctgatgttctcttcataaaatcccaacttttttttttgacaggatcttgctgtgtcatccaggctggaatgcagtggcacaatctcagttcactgcaacttccatctcccaggctcaagcaattatcctgcctcagcctcctgagtagctgggactacaggtgcgtgccacggcacctggttaatttttgttttttttttaagtagagacggggtttcaccatgttcaccaagtgggtctcaaactcctgccctcaagtgatcctcctgcttcatcctcccaaagtgctgggattacagctgtgagccacacacccagcctaaaatcccaatttttaaaagaatttaagaacaaagctggaggcatcacgctacctgacttcaaactatattacaaggctacagtaaccaaaacagcatggtactggtaccaaaacagagatatagatcaatggaacagaacagagccctcagaaatcatgccacatatctacaactatccaatctttgacaaacctgagaaaaacaagcaatggggaaaggattccctatttaataaatggtgctgggaaaactggctagccatatgtagaaagctgaaact

SEQ ID NO: 7769 - DNA, 848 bp, Homo sapiens
ctcaaaccagaaggcaaacaggagaaaatgggcgacaggcacacgcaatcatgacaagagagggcaaactcagaaaaccaggatggcgatatttcctctagtgaagggtttctctcatgttaatgagaaaggatcgtatcattgtagctattatttataatgtgttttgtcagtgtacttagtcctgttaaggaaaataaacattgatcatcccaaggtctctttcaatctcaattgaaatagagctgatgttctcttcataaaatcccaacttttttttttgacaggatcttgctgtgtcatccaggctggaatgcagtggcacaatctcagttcactgcaacttccatctcccaggctcaagcaattatcctgcctcagcctcctgagtagctgggactacaggtgcgtgccacggcacctggttaatttttgttttttttttaagtagagacggggtttcaccatgttyaccaagtgggtctcaaactcctgccctcaagtgatcctcctgcttcatcctcccaaagtgctgggattacagctgtgagccacacacccagcctaaaatcccaatttttaaaagaatttaagaacaaagctggaggcatcacgctacctgacttcaaactatattacaaggctacagtaaccaaaacagcatggtactggtaccaaaacagagatatagatcaatggaacagaacagagccctcagaaatcatgccacatatctacaactatccaatctttgacaaacctgagaaaaacaagcaatggggaaaggattccctatttaataaatggtgctgggaaaactggctagccatatgtagaaagctgaaact

SEQ ID NO: 7770 - DNA, 848 bp, Homo sapiens
ctcaaaccagaaggcaaacaggagaaaatgggcgacaggcacacgcaatcatgacaagagagggcaaactcagaaaaccaggatggcgatatttcctctagtgaagggtttctctcatgttaatgagaaaggatcgtatcattgtagctattatttataatgtgttttgtcagtgtacttagtcctgttaaggaaaataaacattgatcatcccaaggtctctttcaatctcaattgaaatagagctgatgttctcttcataaaatcccaacttttttttttgacaggatcttgctgtgtcatccaggctggaatgcagtggcacaatctcagttcactgcaacttccatctcccaggctcaagcaattatcctgcctcagcctcctgagtagctgggactacaggtgcgtgccacggcacctggttaatttttgttttttttttaagtagagacggggtttcaccatgttcrccaagtgggtctcaaactcctgccctcaagtgatcctcctgcttcatcctcccaaagtgctgggattacagctgtgagccacacacccagcctaaaatcccaatttttaaaagaatttaagaacaaagctggaggcatcacgctacctgacttcaaactatattacaaggctacagtaaccaaaacagcatggtactggtaccaaaacagagatatagatcaatggaacagaacagagccctcagaaatcatgccacatatctacaactatccaatctttgacaaacctgagaaaaacaagcaatggggaaaggattccctatttaataaatggtgctgggaaaactggctagccatatgtagaaagctgaaact

SEQ ID NO: 7771 - DNA, 848 bp, Homo sapiens
ctcaaaccagaaggcaaacaggagaaaatgggcgacaggcacacgcaatcatgacaagagagggcaaactcagaaaaccaggatggcgatatttcctctagtgaagggtttctctcatgttaatgagaaaggatcgtatcattgtagctattatttataatgtgttttgtcagtgtacttagtcctgttaaggaaaataaacattgatcatcccaaggtctctttcaatctcaattgaaatagagctgatgttctcttcataaaatcccaacttttttttttgacaggatcttgctgtgtcatccaggctggaatgcagtggcacaatctcagttcactgcaacttccatctcccaggctcaagcaattatcctgcctcagcctcctgagtagctgggactacaggtgcgtgccacggcacctggttaatttttgttttttttttaagtagagacggggtttcaccatgttcaccaagtgggtctcaaactcctgccctcaagtgatcctcctgcttcatcctcccaaagtgctgggattacagctgtgagccacacacccagcctaaaatcccaatttttaaaagaatttaagaacaaagctggaggcatcaygctacctgacttcaaactatattacaaggctacagtaaccaaaacagcatggtactggtaccaaaacagagatatagatcaatggaacagaacagagccctcagaaatcatgccacatatctacaactatccaatctttgacaaacctgagaaaaacaagcaatggggaaaggattccctatttaataaatggtgctgggaaaactggctagccatatgtagaaagctgaaact

SEQ ID NO: 7772 - DNA, 848 bp, Homo sapiens
ctcaaaccagaaggcaaacaggagaaaatgggcgacaggcacacgcaatcatgacaagagagggcaaactcagaaaaccaggatggcgatatttcctctagtgaagggtttctctcatgttaatgagaaaggatcgtatcattgtagctattatttataatgtgttttgtcagtgtacttagtcctgttaaggaaaataaacattgatcatcccaaggtctctttcaatctcaattgaaatagagctgatgttctcttcataaaatcccaacttttttttttgacaggatcttgctgtgtcatccaggctggaatgcagtggcacaatctcagttcactgcaacttccatctcccaggctcaagcaattatcctgcctcagcctcctgagtagctgggactacaggtgcgtgccacggcacctggttaatttttgttttttttttaagtagagacggggtttcaccatgttcaccaagtgggtctcaaactcctgccctcaagtgatcctcctgcttcatcctcccaaagtgctgggattacagctgtgagccacacacccagcctaaaatcccaatttttaaaagaatttaagaacaaagctggaggcatcacgctacctgacttcaaactatattacaaggctacagtaaccaaaacagcatggtactggtaccaaaacagagatatagatcaatggaacagaacagagccctcagaaatcaygccacatatctacaactatccaatctttgacaaacctgagaaaaacaagcaatggggaaaggattccctatttaataaatggtgctgggaaaactggctagccatatgtagaaagctgaaact

SEQ ID NO: 7773 - DNA, 848 bp, Homo sapiens
ctcaaaccagaaggcaaacaggagaaaatgggcgacaggcacacgcaatcatgacaagagagggcaaactcagaaaaccaggatggcgatatttcctctagtgaagggtttctctcatgttaatgagaaaggatcgtatcattgtagctattatttataatgtgttttgtcagtgtacttagtcctgttaaggaaaataaacattgatcatcccaaggtctctttcaatctcaattgaaatagagctgatgttctcttcataaaatcccaacttttttttttgacaggatcttgctgtgtcatccaggctggaatgcagtggcacaatctcagttcactgcaacttccatctcccaggctcaagcaattatcctgcctcagcctcctgagtagctgggactacaggtgcgtgccacggcacctggttaatttttgttttttttttaagtagagacggggtttcaccatgttcaccaagtgggtctcaaactcctgccctcaagtgatcctcctgcttcatcctcccaaagtgctgggattacagctgtgagccacacacccagcctaaaatcccaatttttaaaagaatttaagaacaaagctggaggcatcacgctacctgacttcaaactatattacaaggctacagtaaccaaaacagcatggtactggtaccaaaacagagatatagatcaatggaacagaacagagccctcagaaatcatgccacatatctacaactatccratctttgacaaacctgagaaaaacaagcaatggggaaaggattccctatttaataaatggtgctgggaaaactggctagccatatgtagaaagctgaaact

SEQ ID NO: 7774 - DNA, 780 bp, Homo sapiens
taagccagacatttcaccccatgtctctggatactaagaagctaaaatggtcacagcagtgcccatcctgactgaggacactgctttccagataaagagaggtctctcagggcctccgtctaccccttagtaaaaggtttattttgcctgtgggaggggagcattgagatcgctggctgaagtaaaaactaaggagttgggtcgggggtgataaacccctttacctatgggagggctttgccgtggctcacttgggccggaggataggtaggcgtggtcgtaggcagcggagggtagtgggggccacccatcccttcagaagccaccactcacgctggattactgaccagggttttggcgcgtaactcattccatcctccaaggtactgttgtgctttcagtctccaggtcacccgcagggtaggtgaccagagccagagaagcggtttattcccggggctccgcactgcacccacgcgcccgcgcctgtgtttgactgcacgaggattctccggaggtgtcccttcctgccagccaggcctcacccctgggtaygcataggtcagaggcccacgatgagagtgagagagaacgtgccgctctctccaaagcagccacttttctgcaacagtgggagttgctgagggaggaggaagaggatagtgaaacttttttttaaaaggccgactcctcagaggctggcctttgccccatctttcaagtccccgaagtctccaggctgtttccctgatgtttgcagggccctcccgagcacacact

SEQ ID NO: 7775 - DNA, 591 bp, Homo sapiens
gaggctcccagcctacagagcttcttttacttatatgtagtatagatatttaggttcagcaaaacttggttttctgataaaattagatctgttaaggaatgtacccccaaaacttaacatgaaaaaccttttcaaacgacaagtaaacctggcacagtggctcgtgcctttaatcccagctatgggagattgaggcaagaagatcacttgaggccaagaattcaagactagcctgggcaacatagtgagatccttatatcttaaaaraaaaaaaaattaaatttagctgggcacagtggctcacttccaagtagctgtagtcgtagctatttggaaggctgaggtaggaggatcacttgagccaaaaaaaacttctctttttatgtagttagagtgagctataatcatgccactgcactccagcctgggcagcaaagcaagacccctgtctctaaaaaaaaaaaaaaatatgtaaaagataagtagacagtgacagttttcaaggtggtacttgaaaattcaaacatatagaaattatcatgtgataagatataataattataaaaccataattaacacccttctccatgc

SEQ ID NO: 7776 - DNA, 591 bp, Homo sapiens
gaggctcccagcctacagagcttcttttacttatatgtagtatagatatttaggttcagcaaaacttggttttctgataaaattagatctgttaaggaatgtacccccaaaacttaacatgaaaaaccttttcaaacgacaagtaaacctggcacagtggctcgtgcctttaatcccagctatgggagattgaggcaagaagatcacttgaggccaagaattcaagactagcctgggcaacatagtgagatccttatatcttaaaaaaaaaaaaaawtaaatttagctgggcacagtggctcacttccaagtagctgtagtcgtagctatttggaaggctgaggtaggaggatcacttgagccaaaaaaaacttctctttttatgtagttagagtgagctataatcatgccactgcactccagcctgggcagcaaagcaagacccctgtctctaaaaaaaaaaaaaaatatgtaaaagataagtagacagtgacagttttcaaggtggtacttgaaaattcaaacatatagaaattatcatgtgataagatataataattataaaaccataattaacacccttctccatgc

SEQ ID NO: 7777 - DNA, 844 bp, Homo sapiens
ggggaatatatggggaaatggattctgagagcactagacaagttcaaaaggaaatataatacaggaaataaattgtaaaaattgatacacctggaagctgacagttttaatttttggtataattggttgaatgaaactgtattcaaagtgaactatactaagtaaaattttgatgaaaaaaaaatccatcttaaaacacagaaaatagaagccaaaaacttaaggaaataaaaatgattgagataagatagcatatacaatttattcatccatcctctaattttatcttacggaagagacctcaacgctctctttcctgaagcattaaaaatgcatcagcgagaagagtgtcaacatctttgaaaactgctccagtgactattctctatataccagaaataagatggaagattctgccttggaaatgagctggtgagtccagtgagaatggtgactgaagccaaatgacagcacttaagaacaaagggaagattgggaattgctactataacatgtacgaagaaaagaagtgatgtagaagagagtgacttaaagggatctttgatagtggctaagtgtagggtttctagaatmaaagtggaggagtagcctattaaagtcttgtttttttctatataagccaaatacttatgtctagtgctactaattctgacttgagtcataataatagagaataatggatgctcctcttgtagttgcattatctgggtacattcagagtcctagaatccttgataagaagaggaggctgattctcttcacaaaagatacagcaaaaggatcacaaatgcaaacttaaacagttccagtggcctttctcaaa

SEQ ID NO: 7778 - DNA, 780 bp, Homo sapiens
tttctcttgccccagggaaggatggaggcatgggggaagaactgcttcttggttcttgctttgtgagaggcttgaagcattgtatctgtggcctgtcctgtaggaggatggcagctctaccgccaaggtcttgctccccagccatgggccagtcttgttcactgtccctgcaccagtagtttgaccaagcaagcccatgccgcactaggaattgtgtctgttgctttcatagatcctgtcactgtctgaggcataatcaggccccctgcctaggtcttagattccctgaccaataagctcagctcagagagtgaatggggagaattaaagtgagatccaattcatgaaaaaagagatttctaaggcaagggtcctaggaaggtgggtcttcaggttcagttactgggtcctgtgaagccaaggaggagggggtggggagagggagggagagagggagaggaagagaggagagagagacagagagagagagagagagaaagagagagagagagtcggtcctcaaagtttttagttgcagacatgtagagccatgttgcctggatctgggtggcgtacccctggctgccttggtcccccagccctggcctgctgaccctctctgaaatgagaagaaggggaaggcaaacaggwttcaagagtttttaaacaaaaaaggagatctcccagggcatcagtgacaggcttctgagaaggttcctgggtccctgatcctgttacattctatgaactaactacgcaactgaaagtatcaatccacat

SEQ ID NO: 7779 - DNA, 780 bp, Homo sapiens
tttctcttgccccagggaaggatggaggcatgggggaagaactgcttcttggttcttgctttgtgagaggcttgaagcattgtatctgtggcctgtcctgtaggaggatggcagctctaccgccaaggtcttgctccccagccatgggccagtcttgttcactgtccctgcaccagtagtttgaccaagcaagcccatgccgcactaggaattgtgtctgttgctttcatagatcctgtcactgtctgaggcataatcaggccccctgcctaggtcttagattccctgaccaataagctcagctcagagagtgaatggggagaattaaagtgagatccaattcatgaaaaaagagatttctaaggcaagggtcctaggaaggtgggtcttcaggttcagttactgggtcctgtgaagccaaggaggagggggtggggagagggagggagagagggagaggaagagaggagagagagacagagagagagagagagagaaagagagagagagagtcggtcctcaaagtttttagttgcagacatgtagagccatgttgcctggatctgggtggcgtacccctggctgccttggtcccccagccctggcctgctgaccctctctgaaatgagaagaaggggaaggcaaacaggtttcaagagtttttaaacaaaaaaggagatctcccagggcatsagtgacaggcttctgagaaggttcctgggtccctgatcctgttacattctatgaactaactacgcaactgaaagtatcaatccacat

SEQ ID NO: 7780 - DNA, 696 bp, Homo sapiens
tcttcttgttggaaactagaggctcgttggtaatgaccaagcaatgcacagcgtgtccatttttattagtatccttactcgtatgggcaccacccaatctcctcagtggccacaaaatccatccccctgatgctacacctaaacttagttgcaagaacacgaggtggagcaaatcattacccatcatactttttgtgcttctaactttttgtgtgattctcagtggaggaataaaaaacgagtagaggaagctttcatttcatattgcatttgtattatatgtgtgtgtgtctctctctgtctctctctctctctctgtgtgtgtgtgtgtgtgtgtgtgtgtgtgtatgagtatatgagagaattcctcttatttttgttctctataccaaatccagttcatttttatccatgcgcatctggataggtctacatgttttcttttcaacaawcaaatgcaaaacatatttattagctcttgattctaaaagaacgccaaagccacatgtggtgggctcatgcctgtaatcccagcactttcggaagctgaggtgggaggattatttgagcccaggagtttaagaccagcctgggcaatacagtgaaaccccatctctacaaaatatttttaaaaattagctgggcatgggggcaccaccttttgtcccagctacttgggaggctgaggctgaggat

SEQ ID NO: 7781 - DNA, 848 bp, Homo sapiens
cacataggggtcccaggttcatctcctttggggacacttctctgctgatcatttcttctttggaagggctggtcagggcagagagaggaacgaatataccagtccttactagaaaggctgcaggacaggtctccagccctgtgtctatgagtgtatagggctgcaataggggtgggaatagtggagttaggaggaaggtgcagagagagagctacatggaaactggagcttgatctgaagtgttgaggttgtctgaacattttgctcatctcttcttgcatgaccatgtaaacctaagctcccagtgagtcaatgaagtctccaatgcccaatggcagagtcagcactagaacccttccctcccctagattccagctgatatgagtcttccttcatgcaaagccttcaaaagtggtggagcaaagtggctaaaaatatagactacagagcctgactgcctgggttcaaatccaggcttggccacttactagctgtgtgaccttatcaaattacttaactattatatatctcagtcttctcatctaaaaagtgggagaggagttgattataataatacctacctgataggttttgtaaggattaagtgaattagatctcatcagcagtttccaaatatactggtgccaggctgtctgcatgtgaatcactggggccctttagtaaaatgcagatccccaggccattctgattcagcaaatgcagagttgggcaagacctattaggacttctgactgtaacctggtttagaaacattccccttggcagtgtttccaggaagcacayacatcaggatctccaggaaagcccacttaaaatgctgattttta

SEQ ID NO: 7782 - DNA, 660 bp, Homo sapiens
tcctccccccatctccagacccttaacttaatcacatccacgaaggaagtccctgctgccttgtaaagtaacatcttcccaggttctggggattcatatgtggacagctttgaggagccactcaattgtgaaggtccaccatagtaccttcataacttcaaatcataggtttaaacctctgtatcttatcccatccatttcagtgtagctcttgcctgcccacgccatttgcttgataaatatttgttctgggagctaggtttgcacaactgatcaagccaggcaaagccttattttcccaaagcctatattccagtggggaaagacaggcaatacatgggataaatgaataaatgatattctcagcacaattgctttttggaggataacttggtaaaatttatgaaaatttaaattgtgcctgttctctgactctgcaagcctgctgtyaaaaattcatatataatgatatgtgtacaagcctgttctttttttttttttaatgaaataatttttatttgctgtgattatacatattgacatttgcacactttttaaaactttttatttggaaaaaatttaaattttatagataagttgcaaatataaaaagagtgtaaagaatacccatacacccttttcccagaaagacttattgtt

SEQ ID NO: 7783 - DNA, 837 bp, Homo sapiens
  misc_feature (1)...(837): n = A,T,C or G
ggatccctgagccagatatgctcctttccctgtgncaagaatcctagtcaaggggtatgggcccaaaggcgggagaggaaggaaggaagaggagggtacatgtgtggtgaaacatttctccatgtttctcttgacacacttacacgatgtgaaaacaactgctgacttataaggcttttctctatctatttttggggggtgggtatagttttggatagaaaggataactgatatatcttttttttttcttcgagatggagtttcgctcttgttgcctaggctggagtgcaatggtgcgatctcggctcactgcaacctccgcctycaggttcaagcaattctcctgcctcagcctcctgagtagctgggattacaggcatgcaccaaatgtctggctaattttgtattttcagtagagatggggtttctccatgttggtcaggctggtctcgaactcccgacctcaggtgatctgaccaccttggcctcccaaagtgctgggattaccagtgtgaaccacagcacctggctgatatatctttgataaattaggactttgtataaaaaagttaagaaaactggcacctacacaaagagaagcagcaccagtcactctctaatttggctaacactcagcattctcagttttcaaacaagaaaacatagggggagaaatttgaaggcaaagttcatatcactgtaattttcaacaatgagcttacttgaagtgaaagtataaaccacggatagtataattcatcctttaaaatatttcatgtgaacaaatttcatttcatatgaatttctcaattccagtttaggaaatagctgctaaaa

SEQ ID NO: 7784 - DNA, 837 bp, Homo sapiens
  misc_feature (1)...(837): n = A,T,C or G
ggatccctgagccagatatgctcctttccctgtgncaagaatcctagtcaaggggtatgggcccaaaggcgggagaggaaggaaggaagaggagggtacatgtgtggtgaaacatttctccatgtttctcttgacacacttacacgatgtgaaaacaactgctgacttataaggcttttctctatctatttttggggggtgggtatagttttggatagaaaggataactgatatatcttttttttttcttcgagatggagtttcgctcttgttgcctaggctggagtgcaatggtgcgatctcggctcactgcaacctccgcctccaggttcaagcaattctcctgcctcagcctcctgagtagctgggattacaggcatgcaccaaatgtctggctaattttgtattttcagtagagatggggtttctccatgttggtcaggctggtctcgaactcccgacctcaggtgatctgaccaccttggcctcccaaagtgctgggattaccagtgtgaaccacagcacctggctgatatatctttgataaattaggactttgtataaaaaagttaagaaaactggcacctacacaaagagaagcagcaccagtcactctytaatttggctaacactcagcattctcagttttcaaacaagaaaacatagggggagaaatttgaaggcaaagttcatatcactgtaattttcaacaatgagcttacttgaagtgaaagtataaaccacggatagtataattcatcctttaaaatatttcatgtgaacaaatttcatttcatatgaatttctcaattccagtttaggaaatagctgctaaaa

SEQ ID NO: 7785 - DNA, 627 bp, Homo sapiens
aaatcctagcgtctgccaagtgctatcacccagccttgcagcatgaacatatccaaggggcctgatgagcagcacctggtctcccactggctcagacacttgaagctactgaatttacatgtaattaaagactgagtgcagaccgcatttcaaaacagacacttggttagagataggaggccttccccatcagatggttttgttttgcttttcctctgcatatgggccttacaatttgccaaggaaaggttacaggggccacygttgtttagtttgaagatgagaaagctcaagaatgacctaactactgtcttcaaatatgcagaggcatttattacaaggagggaacggctggctgtttttttcttaaactgcaagaaaaggcagctcagctaaaatcctaaagacctgcacacatggcctccacactcagcccttccccacagcaccttgcacataggaagcacacttcttgccgtaaaacccaggactgcctgcctttgataaggaagcttagaccttgactatgattgaggaaggaggccacggtatctattttagagaagtctagtaggttctgcctggtggctggcagtcaggtcactgagtttatggcagaggggtaca

SEQ ID NO: 7786 - DNA, 580 bp, Homo sapiens
tagttcttgagactccatcgggctttgtctgccactggcgggcactctcgggaggatttgaatggtgaatgggccaaggggatggaggcctcaaacggacttgacttccgcccacctgcagaaggaggctgatggctctgatggctctataataacaagcctttctcctgtccaaaaacctgcaggaatgactgtggggaaatgacagcatttcccccagctccttaccycatcctctaccttccgtccggcttgtgtactgtcatctggaaggaggaaaagatgtgatgtgatgtctttattaacatcacctttgggagaagcgggggaagcccggggtgctgggaggaactaacttggccacacagaacccgagtggaggggctctaagggcaccggaaggcaaggtggtcttacagcagtgtcagacctagggagcggacggatgtgctgccggtgtgagtgtctgtggagaaaggactctgttccctcatttgctgaggttcacccacctgggtcatggtactcgaccccctcttcccatctccaggaagtctctgtcccagacaccatctttatt

SEQ ID NO: 7787 - DNA, 580 bp, Homo sapiens
tagttcttgagactccatcgggctttgtctgccactggcgggcactctcgggaggatttgaatggtgaatgggccaaggggatggaggcctcaaacggacttgacttccgcccacctgcagaaggaggctgatggctctgatggctctataataacaagcctttctcctgtccaaaaacctgcaggaatgactgtggggaaatgacagcatttcccccagctccttaccccatcctctaccttccgtccggcttgtgtrctgtcatctggaaggaggaaaagatgtgatgtgatgtctttattaacatcacctttgggagaagcgggggaagcccggggtgctgggaggaactaacttggccacacagaacccgagtggaggggctctaagggcaccggaaggcaaggtggtcttacagcagtgtcagacctagggagcggacggatgtgctgccggtgtgagtgtctgtggagaaaggactctgttccctcatttgctgaggttcacccacctgggtcatggtactcgaccccctcttcccatctccaggaagtctctgtcccagacaccatctttatt

SEQ ID NO: 7788 - DNA, 580 bp, Homo sapiens
tagttcttgagactccatcgggctttgtctgccactggcgggcactctcgggaggatttgaatggtgaatgggccaaggggatggaggcctcaaacggacttgacttccgcccacctgcagaaggaggctgatggctctgatggctctataataacaagcctttctcctgtccaaaaacctgcaggaatgactgtggggaaatgacagcatttcccccagctccttaccccatcctctaccttccgtccggcttgtgtacygtcatctggaaggaggaaaagatgtgatgtgatgtctttattaacatcacctttgggagaagcgggggaagcccggggtgctgggaggaactaacttggccacacagaacccgagtggaggggctctaagggcaccggaaggcaaggtggtcttacagcagtgtcagacctagggagcggacggatgtgctgccggtgtgagtgtctgtggagaaaggactctgttccctcatttgctgaggttcacccacctgggtcatggtactcgaccccctcttcccatctccaggaagtctctgtcccagacaccatctttatt

SEQ ID NO: 7789 - DNA, 620 bp, Homo sapiens
ggtgggccccagaccagatgggaacgcaggctctcccaagcaccagccttctgtggtgatgagcatgctggcccagccacctgcggctatccctgggagtcatgtggacgctgcactgtccaagagaagtgtgcccccaacctgctcagtgtggggggccggggaaagagcaactcattgaaaatggattgaagagaggatgcagagggtgggagagaagtgaacacaacctgtccttccgcagtcgacagcacccagactcactgtcctggtctgaggtttctgcacccccgtcctttctgatatagttgctgaaacccctgaaggcctttctccatctccctcagycccgagggagcgctcagtgaactctgcctgattaacatctgctcttccttttgttgccctgaccttgcccacgaagggacgtgacaacgccattgaaggaacagtaaacaagtacccaggctgctgccctgttgtccgaggggttaatttgcttctcaaagactccctagtaggagacgcaccattcataggtccgtgcaactatgctttgctgagaaagatcctccatggaaataaccctgatgttattaaggtgtaagctgcatgatcta

SEQ ID NO: 7790 - DNA, 755 bp, Homo sapiens
aaggtttgaaggctatgtagcctggaaataatgttcaaaatcactttgcaggaccaggggagataccctgagacctctgatgggtactgacacccttatgtgctgctgactccaccagtgtaaggactggccatcactgcttcaacccatttctggaagcctctagaactgacagtgggtatctctgctaccccaacacccccaacctggcatccacacagtgacagactttttgttactggctctcacatgcatctaattggcagaacccttatcaaatgtctgtttccctggctgcaagggaggctgtgaaggtaggtttctggcattttcaggctttataatgggttggggtttctcccttcctcygatacatgaagtggggaaggggtatatcaggatgctgggtggccaaagagaatgacatgtgtcactcaagtctcagttggaggagaagaaccattagagtgtgtgcgtgttaatatgtatatggagtattaatttcctaggggtgctgcacaaactgggtggctttgagtaacaagcccagggccatgctctccccggcttctggtacttgctggcagtgctcagcatttgtggtcttgcagctatgccactctcatctctgtctctgtcttcccactgtgactgtgccttcatggggcatgctcctctgtgtatgtgtctgtgtcttttctcctcttcaaatcaggacaccagtcatattggatttagggctcatcccaatcaca

SEQ ID NO: 7791 - DNA, 796 bp, Homo sapiens
tatcaggctttcaaaattactgaaacactttattcatgtaatataaccttatagagggctaaagtaatttgactaatgttaatcatacaacatggcatattaaaaaacattacaaaatgaaactgacagccaacacagaaaaattacttcttcctttaaaagaggaagtgtcgataactatactttcaacaagagcatagagagcagcttccaaaagagccctggagaactgaggtcaagctgaagaagaacttctaagtacgatttaatttwgcaataataataatcatagcagcatttaacatttcctgaatgcttaatttcttggtgcaatatgatacacttaactggcttttcccctgaatcctcacaatgaccctttgaggcacctgttatttattattagtattagtgccagtagtaatgccattcccattttacagaggagaaaactaaggttcacagcgtttaagaaacttgatcaaggcctcactgacaggcagctagggctggatttctatctatccatttccttatttcagtttcatactccacgagggaaattttctgtgacagtgatcattaatttgtaaataatataaaatgaacttaaatgtcctcccttttcaactctcagtaaagtcagatcagtaagggtagaaaaagtgacagggaattctaagtcttgggttctggtctaaattatttctaaaggttacaaactgcaaatcactttacctctttgcttgactttaaatctctatctgtaaaatggaacaaaaatcctttttcactt

SEQ ID NO: 7792 - DNA, 824 bp, Homo sapiens
tagaatccagaaagttgtctagagactatttaaaacggttactgcaagaaagctcaaaaagagagtaatcattcagaataggaagagatagaaatccttaaacaattaaartaacaataccaggtgtgtatagtcagagggagagattttgcctatattattctggggagagaaataaaatatttctgtataacatcatagaaatgtaaatggagatgttaaacttctctgatgggtagtttgagaaaaattttaaaaattgaaaagttttttttttttttttttgagacggagtctcgctgtgtcatccaggctggagtgcagtggcgccatctcggctcactgcgagctcagcctcctggcttcgtgccattctcctgcctcagcctctctagtagcgggactacaggcacccgccaccacgccaggctattttttttttatttttattagagacggggtttcaccttgttagtcaggatggtctcaatcttctgacctcgtgatccgcctgcctccaccttccaaagtgctgggaatacaggcgcaagccaccgcgcagggccaagactattgttttaaagtgtgaaaattgatattgaattcttgtgtttatataataagatgtcctataatttctgtttggaatataaaatcagcaactaatatgtattttcaaagcattataaatacagagtgctaagttacttcactgtgaaatgtagtcatataaagaacataataattatactggattatttttaaatgggctgtctaacattatattaaaaggtttcatcagtaattcattatatcaaaatgct

SEQ ID NO: 7793 - DNA, 824 bp, Homo sapiens
tagaatccagaaagttgtctagagactatttaaaacggttactgcaagaaagctcaaaaagagagtaatcattcagaataggaagagatagaaatccttaaacaattaaagtaacaataccaggtgtgtatagtcagagggagagattttgcctatattattctggggagagaaataaaatatttctgtataacatcatagaaatgtaaatggagatgttaaacttctctgatgggtagtttgagaaaaattttaaaaattgaaaagktttttttttttttttttgagacggagtctcgctgtgtcatccaggctggagtgcagtggcgccatctcggctcactgcgagctcagcctcctggcttcgtgccattctcctgcctcagcctctctagtagcgggactacaggcacccgccaccacgccaggctattttttttttatttttattagagacggggtttcaccttgttagtcaggatggtctcaatcttctgacctcgtgatccgcctgcctccaccttccaaagtgctgggaatacaggcgcaagccaccgcgcagggccaagactattgttttaaagtgtgaaaattgatattgaattcttgtgtttatataataagatgtcctataatttctgtttggaatataaaatcagcaactaatatgtattttcaaagcattataaatacagagtgctaagttacttcactgtgaaatgtagtcatataaagaacataataattatactggattatttttaaatgggctgtctaacattatattaaaaggtttcatcagtaattcattatatcaaaatgct

SEQ ID NO: 7794 - DNA, 824 bp, Homo sapiens
tagaatccagaaagttgtctagagactatttaaaacggttactgcaagaaagctcaaaaagagagtaatcattcagaataggaagagatagaaatccttaaacaattaaagtaacaataccaggtgtgtatagtcagagggagagattttgcctatattattctggggagagaaataaaatatttctgtataacatcatagaaatgtaaatggagatgttaaacttctctgatgggtagtttgagaaaaattttaaaaattgaaaagttttttttttttttttttgagacggagtctcgctgtgtcatccaggctggagtgcagtggcgccatctcggctcactgcgagctcagcctcctggcttcrtgccattctcctgcctcagcctctctagtagcgggactacaggcacccgccaccacgccaggctattttttttttatttttattagagacggggtttcaccttgttagtcaggatggtctcaatcttctgacctcgtgatccgcctgcctccaccttccaaagtgctgggaatacaggcgcaagccaccgcgcagggccaagactattgttttaaagtgtgaaaattgatattgaattcttgtgtttatataataagatgtcctataatttctgtttggaatataaaatcagcaactaatatgtattttcaaagcattataaatacagagtgctaagttacttcactgtgaaatgtagtcatataaagaacataataattatactggattatttttaaatgggctgtctaacattatattaaaaggtttcatcagtaattcattatatcaaaatgct

SEQ ID NO: 7795 - DNA, 824 bp, Homo sapiens
tagaatccagaaagttgtctagagactatttaaaacggttactgcaagaaagctcaaaaagagagtaatcattcagaataggaagagatagaaatccttaaacaattaaagtaacaataccaggtgtgtatagtcagagggagagattttgcctatattattctggggagagaaataaaatatttctgtataacatcatagaaatgtaaatggagatgttaaacttctctgatgggtagtttgagaaaaattttaaaaattgaaaagttttttttttttttttttgagacggagtctcgctgtgtcatccaggctggagtgcagtggcgccatctcggctcactgcgagctcagcctcctggcttcgtgcyattctcctgcctcagcctctctagtagcgggactacaggcacccgccaccacgccaggctattttttttttatttttattagagacggggtttcaccttgttagtcaggatggtctcaatcttctgacctcgtgatccgcctgcctccaccttccaaagtgctgggaatacaggcgcaagccaccgcgcagggccaagactattgttttaaagtgtgaaaattgatattgaattcttgtgtttatataataagatgtcctataatttctgtttggaatataaaatcagcaactaatatgtattttcaaagcattataaatacagagtgctaagttacttcactgtgaaatgtagtcatataaagaacataataattatactggattatttttaaatgggctgtctaacattatattaaaaggtttcatcagtaattcattatatcaaaatgct

SEQ ID NO: 7796 - DNA, 1137 bp, Homo sapiens
cttgaggtcaggagatggagactagcctggccaacatgatgaaaccccgtgtctaataataaaaaaaaaaaaattagctgggtgtggtggtgggcaactgtaatctcagctaatcaggaggctgaggcagaagaattgcttgaacgtggaaggcagagtttacagtgtgccaagatcacaccaccctactccaacttgggtgacagagcaagacgcagtctcaaggaaaaaaaaaaagctcgaaaaatgtttgcttattttggtaaaattattcattgactatgctcagaaatcaagcaaactgtccatatttcattttttgaaattacatattaaggatctaaaacaaaggataaaatatctgcaaaaatatttgcatttctggataaattagtttcctgatttaactccttgttgacactgaatctattttaaattaaacaaggtgctgataagacaaaagacaaagaaagaaattcaaaataaaattgaaagatgaaatcagagcttaccagagataaaatttcctctgacagtgtaaaagagatcttcatacaaaaatcagaatttatatagtctctttccaaaagaccataaaaccaatcagttaatagttgatttttatgtgaaaaaagagactgtaaaagaaaaaataatgacaccaaaatcccttttaaattcaaagagtcataaagtttcaaaaaatgtaattcagataagaaattaatgtcagctacattcttccacagtaaaggtttgcatcaacttttcaactaatagctttagcattcattagaaaacttgtttcaaccattattttactaggtgttataacagggtactacattctttcatttttttcttcatttattagctggaataatttctaaaagaacatttcytcccaaatgtgtattgattacaccaaaacacagtttggacaggaaaaacaagataagtagacaaatgcttgatttttatacccctccccacttttcacagtaatgaattagtgcttcagcaaactttaatagtgattaaaaacttatttcccataataaaaattttaagtttttgtaagtaaatgataaataataatttatccagtatttcatgagtacctataaccagccagga

SEQ ID NO: 7797 - DNA, 1137 bp, Homo sapiens
cttgaggtcaggagatggagactagcctggccaacatgatgaaaccccgtgtctaataataaaaaaaaaaaaattagctgggtgtggtggtgggcaactgtaatctcagctaatcaggaggctgaggcagaagaattgcttgaacgtggaaggcagagtttacagtgtgccaagatcacaccaccctactccaacttgggtgacagagcaagacgcagtctcaaggaaaaaaaaaaagctcgaaaaatgtttgcttattttggtaaaattattcattgactatgctcagaaatcaagcaaactgtccatatttcattttttgaaattacatattaaggatctaaaacaaaggataaaatatctgcaaaaatatttgcatttctggataaattagtttcctgatttaactccttgttgacactgaatctattttaaattaaacaaggtgctgataagacaaaagacaaagaaagaaattcaaaataaaattgaaagatgaaatcagagcttaccagagataaaatttcctctgacagtgtaaaagagatcttcatacaaaaatcagaatttatatagtctctttccaaaagaccataaaaccaatcagttaatagttgatttttatgtgaaaaaagagactgtaaaagaaaaaataatgacaccaaaatcccttttaaattcaaagagtcataaagtttcaaaaaatgtaattcagataagaaattaatgtcagctacattcttccacagtaaaggtttgcatcaacttttcaactaatagctttagcattcattagaaaacttgtttcaaccattattttactaggtgttataacagggtactacattctttcatttttttcttcatttattagctggaataatttctaaaagaacatttcctcccaaatgtgtattgattacaccaaaacacagtttggacaggaaaaacaagataagtagacaaatgcttgatttttatacccctccccacttttcacagtaatgaattagtgcttcarcaaactttaatagtgattaaaaacttatttcccataataaaaattttaagtttttgtaagtaaatgataaataataatttatccagtatttcatgagtacctataaccagccagga

SEQ ID NO: 7798 - DNA, 699 bp, Homo sapiens
ctttcaggtaacatcatgatgctcattctgcagatacagacaatgaagcaaggggcggctaacctctgttgagtcagtaaatacatgttgagtacagaagtggcctccatattcagatactgtcaatattcaaatccycacagctgcatataaggccacaaatcatcataacctctactcctagttaaaacttagtccctactccaacatctctaactaattagtactcttgctattagacctacatctttggtcaatatctttctgtttgcctaatactgtaaatattgagcaatgcaatacaggtacaaggcaaatagattataaagtcaattgaaaatcttgacaaagaggcaagatttcatgaagtccatgaaagtaacgttaaacagctccaatcgcacaggaagccattggcacattagaatctgtcagaggcagaaagatgaaaaaatacctgctacaaataaaacatgagctgtacttccaaagagaataatttcaacagcaaaggactaagaaaagtaccctaggaaaattgatcaaactctttactatattttaccctttttgtggtcattctgagaaaaatcaaaatataaagtgaaggatttcatattgtgctattttatcatcttatcagaaacactaaactcctggccccttaccccatttgtttctttggaaaattagagtaca

SEQ ID NO: 7799 - DNA, 699 bp, Homo sapiens
ctttcaggtaacatcatgatgctcattctgcagatacagacaatgaagcaaggggcggctaacctctgttgagtcagtaaatacatgttgagtacagaagtggcctccatattcagatactgtcaatattcaaatccccacagctgcatataaggccacaaatcatcataacctctactcctagttaaaacttagtccctactccaacatctctaactaattagtactcttgctattagacctacatctttggtcaatatctttctgtttgcctaatactgtaaatattgagcaatgcaatacaggtacaaggcaaatagattataaagtcaattgaaaatcttgacaaagaggcaagatttcatgaagtccatgaaagtaacgttaaacagctccaatcrcacaggaagccattggcacattagaatctgtcagaggcagaaagatgaaaaaatacctgctacaaataaaacatgagctgtacttccaaagagaataatttcaacagcaaaggactaagaaaagtaccctaggaaaattgatcaaactctttactatattttaccctttttgtggtcattctgagaaaaatcaaaatataaagtgaaggatttcatattgtgctattttatcatcttatcagaaacactaaactcctggccccttaccccatttgtttctttggaaaattagagtaca

SEQ ID NO: 7800 - DNA, 765 bp, Homo sapiens
atccaggtggcactgggtttgtgatagggcttccttctccacccagggtgagacactgggagcgtgttaagtatcctaaaacactgttgagtggttacatttaattttttcttttgctttagtctcggtggggctgggagtggtaagggggctttcctttgtgcgtgtatatcagtggggcaggatgggagctgggggttggtaaggacaggcaggggctcaggcattcttccgttcttggttacacccgtgccctggggtgttctcagccacctctacagccctgggcatgctggggtggtgctgggatggtgggagtgtctcttctcccgcactcagccgggactccccatgcctccttgctgagcccttactcacactctttacgacgtgcctctgccagacatttctgagagcctttccctgcacacacttgcaggcactggggcccggagacaagaacagcacagttcttgccccaggagctcagggaggagatacaccagtgccagctatggctgcagccggtgcagggcacartaagagcaaaagtggccagttccatgtgaaattgcactggatcacacccagtggccagctcgcaggggagctctgtgcttctgtgatctaataaatacggatttggtccccactcctggcacctggcacacagctcctaaacccttggaatctcaggaatgagcagagtgtcttttgtatggtaatgagacggctggtggctgagagtccctagatagcttcagg

SEQ ID NO: 7801 - DNA, 828 bp, Homo sapiens
ggatccacacccacctcctcctccatggttaaccgaagaagaggaggactgactggattccagcacttttttgcacagtatggtaggaagtgccttcttggagtgaaggggtcggagaaggcatccaacatctgaagaaaggggagaagataggaagtagtcattgtaggaagagggcaggccagctgatgggagaaggggagaacctggaggagggcaggcagctccctctgctgccatctgtggtggtgatgacagatcccagccccctctttattctcctgcctccacaccgttgcctcctcattttcccactgttgctctcccttcttttgttataatttcrtggagatatgaccaaaacagaagggggagaaaaagagacagctaagtttcaattggggtgattggggattgatgacatttgaactgtgtctttgaggaatgcttgggacgtccctgctggaagagggccctttaaattaaggcacagccacaagggaggtgggggaggaggcaagttcaagttatggtgatgcggctggcatgtttcttgtgtgaaagcaaagggtctgtgtcagaggagcaacctggtgcctgccctgcatttgctcccttactcccaagtgtcctttgctttgttggtttcgttcctgtcctttggtgaatcttgcccccttcattgttcttgtctctgtcttatttctaagagtgtggtacagtgttgaacacgtggtacctgcactgtagatattaacttctactagtagtcatgatgttaattacaaacttgcccttctcatgtagccttgggctactctagagcct

SEQ ID NO: 7802 - DNA, 749 bp, Homo sapiens
ggcctcccaaagtgttaggattacaggcatgagccaccgcacctggcctgaagctggattgttgagggcattttaatgccatactagtgagtctgaattgttgagtaggaaagaaatgttgaacattagaatatagagcagcacaagatagcttttaaaatrcagaagcacaaaaatttcataaaattgtgttaacatcattataccatatactgaccatgtataaggatttatacttcatgaggtcatagttaataatagggactattttaaagtagtttgtttcctcaaggaccaaaatctttccaagtctctgctctggcagtcttcaaagtgtgatctaaggacctctggaggccctgagcttattaagatactcctcctttttccaactgcatatctgtgtcaggctggatttttactccagccaaaacactgtaggataatagattcatcaaagaaggagaatgagaatccagctgtctttgatcaagacagacattaaagagattggcaaaaatataaaataatggccactgtactcattaattcttttttattttggaaaatggagttttttttccaaaatgtattatgtatgtgatcatgtaatgggcttatattatttaaaaatgaattaataaactttttaaaagtctcagtgttaatttagaatgcaataagtatctatagatttaagccatataacaaggacaatttggagttctcaatactttttaggagcatag

SEQ ID NO: 7803 - DNA, 749 bp, Homo sapiens
ggcctcccaaagtgttaggattacaggcatgagccaccgcacctggcctgaagctggattgttgagggcattttaatgccatactagtgagtctgaattgttgagtaggaaagaaatgttgaacattagaatatagagcagcacaagatagcttttaaaatacagaagcacaaaaatttcataaaattgtgttaacatcattataccatatactgaccatgtataaggatttatacttcatgaggtcatagttaataatagggactattttaaagtagtttgtttcctcaaggaccaaaatctttccaagtctctgctctggcagtcttcaaagtgtgatctaaggacctctggaggccctgagcttattaagatactcctcctttttccaactgcatatctgtgtcaggctggatttttactccagccaaaacactgtaggataatagattcatcaaagaaggagaatgagaatccagctgtctttgatcaagacagacattaaagagattggcaaaaatataaaataatggccactgtactcattaattcttttttattttggaaaatggagttttttttccaaaatgtattatgtatgtgatcatgtaatgggcttatattatttwaaaatgaattaataaactttttaaaagtctcagtgttaatttagaatgcaataagtatctatagatttaagccatataacaaggacaatttggagttctcaatactttttaggagcatag

SEQ ID NO: 7804 - DNA, 787 bp, Homo sapiens
ttttccaaactttgaaaattaattcacttaagcctatgggtactatataatgtgttattaaaataatgctataattcagttaattaactcaaatgctcagagcatgagagattctagttaacttgaattttctagataattgaagcttttccttaaaatctctgcttttgcccatctcttaaagtactttgaaatcataattgaaaaaaaatcataattgaatatcaactcaaattgtacagaaatatagatttataaaaagatttgaatttaccatgagaaatagtccaggtatttttccatagtccctatgtatgtttaaatatatctacattatatcctatagaattgtaactggaagcttgaagttgggggtaacctgcaacttagtccttgtaaactgctggatattctgaaaggtgctttcatacatcaactcatttattatcccagataaccttcaagagaaattatccccattttatatatgagaaaatcaaggccacacaggttaataagtgttccaaaaattacacagtcagcagttggcaaaacagaaactctaactcagatctgtctcattccaaactcatgctctttccataaaaccacagtgacctaggatctaagcttagttccactataattgggctgtaaagcttgggatatattttacctctactggctcagttcctgaatctmtaaaattagagtgttgatctcggtagcagaaactgctagttgccctcctgatatttacaatcttgtttctttttttcattgtaaa

SEQ ID NO: 7805 - DNA, 787 bp, Homo sapiens
ttttccaaactttgaaaattaattcacttaagcctatgggtactatataatgtgttattaaaataatgctataattcagttaattaactcaaatgctcagagcatgagagattctagttaacttgaattttctagataattgaagcttttccttaaaatctctgcttttgcccatctcttaaagtactttgaaatcataattgaaaaaaaatcataattgaatatcaactcaaattgtacagaaatatagatttataaaaagatttgaatttaccatgagaaatagtccaggtatttttccatagtccctatgtatgtttaaatatatctacattatatcctatagaattgtaactggaagcttgaagttgggggtaacctgcaacttagtccttgtaaactgctggatattctgaaaggtgctttcatacatcaactcatttattatcccagataaccttcaagagaaattatccccattttatatatgagaaaatcaaggccacacaggttaataagtgttccaaaaattacacagtcagcagttggcaaaacagaaactctaactcagatctgtctcattccaaactcatgctctttccataaaaccacagtgacctaggatctaagcttagttccactataattgggctgtaaagcttgggatatattttacctctactggctcagttcctgaatctataaaattagagtgttgatctcggtagcagaaactgctagttgccctcctgatatttacaatcttgttwctttttttcattgtaaa

SEQ ID NO: 7806 - DNA, 1894 bp, Homo sapiens
aaatcaagatcccatatttcacttaattgtcgtggttccttagtcttttccaatcggggaccattcattactctgtctttcatgaccttgacactttaaagagtactgttattttgtggagcattgccccagtttggatttttctgatgtttctttacggttaagttgaggttatgcattgttggcaagaacaaccacagaactgatgttgtgctcttctcggcatgtcacatgcttgaagtcgagagataagacattagtttttaagatatgtttagtgtttttaagttttagttgtaaaatacagtttgctgtttatacttcgcagccattcattttttagtgtgaagtttaatgtctttcatttttatcagttctttttttcttatggttaagccatgtgaaaatgaattacagtattacaggtatgcccttgtattctttatttttcttcctgaaacttaatatattttgatccatcagttattcctatcaatttgagagggtataatacttttgaaatagaagtgtttttctgtattgtccttgtacagttttttaatataattactatttttttttccagtttcaatagtcatgggcattcccacagtgaagagagaagttaaatcttacctcatagaaactcttcattcccttattgataacctgtatcctgaagagaagttggactgtgttatagtagtcttcataggagaggtaattatttaattgttgttatgtttttaccaaatatagcctataagagttgaaactctaattgaatatttgaatatgcttttaaaaacgctttttaaaaaatgtgatgagtaaagcttaggtaatatattctatctggtagtttaatgtaaattgaactcacttctgtcctgcaattacaaaccaggaatagtaatatttgttgtcaataggatgttacacccgtagatctttaagaacgtgtgcctatttctagctctaagacttaaatttggagatttgcactgatgatctttgggagtcctgaaacctgaaaaaggtttaggctcagctggggttttatcattcttttattctctccatcccttctctgtactcctaagaaatcatgtgaatgagaaataccacacttcttgtattttagtctcctcaaaagatttagagaaagaataaatcttgagcaagttctttttaaatcatgaggaataagaccctagagtaaatattttcttaattattgtatagaatttcagaatgggaaaggatttaggacatggtctagttctggcccactaattcctaactttttagagttccccatgtctttttaaatgaaaatggtcttgatgatttccttattagagaagtaaacaaatgcatactgttcaaaacaattacataaatatataatgaaaaattacctgttactcctctacataaatataactatttcaaattatatgttaagactttttgttctgaaataattttagatttacagaaagttgcagaaattatagagggtatctccttcactcagcttgctctgatgttaacaacatatgtagccatattatagttatcaaaaccaggaaattaacactgatataatactcaaccaaactacagactttatttgagtttcctgtttttccgcctgggttcgcctttctgttccagcatgcactatggaacaccacattgcagttagcggttctcatgccttagcttcctcctgtccatgtttgtgtctttcatgaacttggacatttttgatgggcactggtcagttattttgtaaaatgtctcagtttggatttatctgatattwtctcatgattatattttgactatgcatttttggcaagaataatatgacttgcctttttaaaaa

SEQ ID NO: 7807 - DNA, 1894 bp, Homo sapiens
aaatcaagatcccatatttcacttaattgtcgtggttccttagtcttttccaatcggggaccattcattactctgtctttcatgaccttgacactttaaagagtactgttattttgtggagcattgccccagtttggatttttctgatgtttctttacggttaagttgaggttatgcattgttggcaagaacaaccacagaactgatgttgtgctcttctcggcatgtcacatgcttgaagtcgagagataagacattagtttttaagatatgtttagtgtttttaagttttagttgtaaaatacagtttgctgtttatacttcgcagccattcattttttagtgtgaagtttaatgtctttcatttttatcagttctttttttcttatggttaagccatgtgaaaatgaattacagtattacaggtatgcccttgtattctttatttttcttcctgaaacttaatatattttgatccatcagttattcctatcaatttgagagggtataatacttttgaaatagaagtgtttttctgtattgtccttgtacagttttttaatataattactatttttttttccagtttcaatagtcatgggcattcccacagtgaagagagaagttaaatcttacctcatagaaactcttcattcccttattgataacctgtatcctgaagagaagttggactgtgttatagtagtcttcataggagaggtaattatttaattgttgttatgtttttaccaaatatagcctataagagttgaaactctaattgaatatttgaatatgcttttaaaaacgctttttaaaaaatgtgatgagtaaagcttaggtaatatattctatctggtagtttaatgtaaattgaactcacttctgtcctgcaattacaaaccaggaatagtaatatttgttgtcaataggatgttacacccgtagatctttaagaacgtgtgcctatttctagctctaagacttaaatttggagatttgcactgatgatctttgggagtcctgaaacctgaaaaaggtttaggctcagctggggttttatcattcttttattctctccatcccttctctgtactcctaagaaatcatgtgaatgagaaataccacacttcttgtattttagtctcctcaaaagatttagagaaagaataaatcttgagcaagttctttttaaatcatgaggaataagaccctagagtaaatattttcttaattattgtatagaatttcagaatgggaaaggatttaggacatggtctagttctggcccactaattcctaactttttagagttccccatgtctttttaaatgaaaatggtcttgatgatttccttattagagaagtaaacaaatgcatactgttcaaaacaattacataaatatataatgaaaaattacctgttactcctctacataaatataactatttcaaattatatgttaagactttttgttctgaaataattttagatttacagaaagttgcagaaattatagagggtatctccttcactcagcttgctctgatgttaacaacatatgtagccatattatagttatcaaaaccaggaaattaacactgatataatactcaaccaaactacagactttatttgagtttcctgtttttccgcctgggttcgcctttctgttccagcatgcactatggaacaccacattgcagttagcggttctcatgccttagcttcctcctgtccatgtttgtgtctttcatgaacttggacatttttgatgggcactggtcagttattttgtaaaatgtctcagtttggatttatctgatattttctsatgattatattttgactatgcatttttggcaagaataatatgacttgcctttttaaaaa

SEQ ID NO: 7808 - DNA, 794 bp, Homo sapiens
atgtatgtatccagtatggatacagtgtatatatccatccgtttcttttctccacattcttcctaatacttgttatcttttgtctttttgacagttagccatcctgacagatgtgatgatatctgattgtggttttaatttgcatttccctaatgattagcagtgttgaggatttttcrtatatctgttggccatttgtatgtcatcttttgggaaatgtctgttcaggtcctttgcctattttttcagtgttttttcttactcttgagctgtttgagttccttatatattttggatattaactgtttatcagatgtgcagcatgcagatattttctcctaacccataggttgtcaggcatgctgttaattatttcctttgccatgtagaagagttttagttagatgtgatcctatttgtctatttttgttcttgttgcctgagcttttggggtcatatccaaaaaaccattgcccaggccaatgtcgtgtagtttttcccttatgttttcttctggtagttttagagtcttcttttgttttcaatccattttgagtttatttgtatatttcacgtgagttgaagttccactttcattcatctgtatgtggatatccagttttctcagcaccatttactaaagaaacttttttcattgagtgttcttggcacctttgctgaaaatcaattgaccatacatacatgagttcatttctaggctctatattctgttccattggccagtgtgtctgttttttaaaaatcaataccatactgtttacattattatagct

SEQ ID NO: 7809 - DNA, 794 bp, Homo sapiens
atgtatgtatccagtatggatacagtgtatatatccatccgtttcttttctccacattcttcctaatacttgttatcttttgtctttttgacagttagccatcctgacagatgtgatgatatctgattgtggttttaatttgcatttccctaatgattagcagtgttgaggatttttcgtatatctgttggccatttgtatgtcatcttttgggaaatgtctgttcaggtcctttgcctattttttcagtgttttttcttactcttgagctgtttgagttccttatatattttggatattaactgtttatcagatgtgcagcatgcaratattttctcctaacccataggttgtcaggcatgctgttaattatttcctttgccatgtagaagagttttagttagatgtgatcctatttgtctatttttgttcttgttgcctgagcttttggggtcatatccaaaaaaccattgcccaggccaatgtcgtgtagtttttcccttatgttttcttctggtagttttagagtcttcttttgttttcaatccattttgagtttatttgtatatttcacgtgagttgaagttccactttcattcatctgtatgtggatatccagttttctcagcaccatttactaaagaaacttttttcattgagtgttcttggcacctttgctgaaaatcaattgaccatacatacatgagttcatttctaggctctatattctgttccattggccagtgtgtctgttttttaaaaatcaataccatactgtttacattattatagct

SEQ ID NO: 7810 - DNA, 570 bp, Homo sapiens
ttttctctcaatgtttcacacagataatataatctatgttttcatactaaagttgagggtgtcaaactgaatagagagttagtgatatgtgaatatagagatctgtaagtatatctccagtgtaactcacttcaccagcttgaggaataattaaagactcatttcttttcaatatttaaataaattttccaagtaactggaaaggcacccattacattttagtgtgtttcctctcttaaaaagttcatgaacacctagagcttatttagtctgaagaaacctgtcctgctttcatatgtgaaggagaaagacaactggagaaactgatctgccacccatgggcccagttttctgtgttctgctrtgtctattttgatcataacatacacatccctaatgaaaactggtccaacacaatttgaagtgcccttgttcaccgctatagtgatgctttaccagatgtagggaggttgattccaccacctcatgatttctgcactttggattaatcaagaaatatccagatttgggattccaagcttatagaagtttacagatgttagctgactt

SEQ ID NO: 7811 - DNA, 1093 bp, Homo sapiens
cttaaagtataataatgaaaaaaaaataaagtgaaaaaaaacctcaagttgatagtcttagttaacctttttattatgcatgtttatctagaggatttttagatggaagtaagtcaaagtcagaaaattttactgaactaaataatttataaataaggacaaggttaaaaaccatgatattgtacaaatactaggaatgtcaaataattttaaatacaaaattttacaaaattcacaaaataaaattattgcttataaatatatttaagtagaatattacagcttgcattcctttagacctgcattgatatcgttcagaaaacattaatgtcaaatattatcttgtttataaagttactatagrcttttacttctgtcacgcttctctcttcattataaagctgtatgtatcatggtacatatataatgatttgcacttgattctgtgaaaactatttgaaatatgagttacctaaaatataaattcttactgctgtagctgtaaggttccctcaaacctcaagttgaaatttgatttccagtgttgcagttggggcctcataggagttgtttaggtcgtgggaatggatcccttatgggtagattaatgcgctccctggaatgggtatgagtcagttcttgctctgttagttcccattagagctggttgttaaaaacaggctggaacctttactctaacttttgtttcctctcttgccatgtaatctgtgcacacacatgctcctttttgccttctgccatgagtggaagtagcctgtgtcactcagcacaagcagatatcagtgccatgcttttttgtacagccagtagaaatatgagccaaataaacctctcttctttataaattacgcagcctcaagtattattcctttatagcaacacaaacaaagaaagatgcctaccatataatctcagcaaacactataataaaaagattacttatgctataaggaaataatgtgtttacctcaattacaaataataaaaattttactcaagtaataaacttaaatgaatataatgttaaagtaagaaaaccagaaattttgacagttcagaaacctaacacttt

SEQ ID NO: 7812 - DNA, 1093 bp, Homo sapiens
cttaaagtataataatgaaaaaaaaataaagtgaaaaaaaacctcaagttgatagtcttagttaacctttttattatgcatgtttatctagaggatttttagatggaagtaagtcaaagtcagaaaattttactgaactaaataatttataaataaggacaaggttaaaaaccatgatattgtacaaatactaggaatgtcaaataattttaaatacaaaattttacaaaattcacaaaataaaattattgcttataaatatatttaagtagaatattacagcttgcattcctttagacctgcattgatatcgttcagaaaacattaatgtcaaatattatcttgtttataaagttactatagacttttacttctgtcacgcttctctcttcattataaagctgtatgtatcatggtacatatataatgatttgcacttgattctgtgaaaactatttgaaatatgagttacctaaaatataaattcttactgctgtagctgtaaggttccctcaaacctcaagttgaaatttgatttccastgttgcagttggggcctcataggagttgtttaggtcgtgggaatggatcccttatgggtagattaatgcgctccctggaatgggtatgagtcagttcttgctctgttagttcccattagagctggttgttaaaaacaggctggaacctttactctaacttttgtttcctctcttgccatgtaatctgtgcacacacatgctcctttttgccttctgccatgagtggaagtagcctgtgtcactcagcacaagcagatatcagtgccatgcttttttgtacagccagtagaaatatgagccaaataaacctctcttctttataaattacgcagcctcaagtattattcctttatagcaacacaaacaaagaaagatgcctaccatataatctcagcaaacactataataaaaagattacttatgctataaggaaataatgtgtttacctcaattacaaataataaaaattttactcaagtaataaacttaaatgaatataatgttaaagtaagaaaaccagaaattttgacagttcagaaacctaacacttt

SEQ ID NO: 7813 - DNA, 805 bp, Homo sapiens
gggraaaaagatatattttttaaaatttatgctcatatatgtagattgacaagagcttaaaatttatttattttctgactttcagcctacattttcatttcatacagtaaatatacatcctaaataagaattgcagcaagtccatccatacgaagaattaagaaaatcaattgtgtaagcatccaaatttgtaaaacagataaataaattatagaacgatgattctgattaccaaaaaaaagttttgcaaaagaaatcacaagattcctttaaagagaaatttttcaaacccctattaaagtaaatgtaattttaaatgaatttcaacacaatgtataaacacatatataaaatgaagaagttgcacttatgaaaacttttcttccaataccacatattaaaatttgtgttgttgttgaaactttctgacataaaaaaattcaactgttatggattgactatttctgtcccttcaaaatgcatatgttaaagctttaaacctcaaggtgatggtatttaaatgggacttttgggatgtaatttaggattagactaagaccctagggtagggtcctcatgatgggtttagtggcttcaggagaactgaaagaaatctgcctgctcccctatatggaccaaggaaagacagtatgaggacataaggagaagctggctgtctgcaagccaggaagagagctttcagcaggaactgaataggccagcaccttgatcttggacttctcagcctccagaactgtaagaaaatatatttcggttgtttaagcaacaaagtttatggcatttt

SEQ ID NO: 7814 - DNA, 806 bp, Homo sapiens
gcataaatatcatgattccatcttgacaagtgaaggagctgagactcaaagaggtccacatttgtttaaggtcactccaagtaagcaccaatagatagaataaaatgaattgatgaaaagtcagtattcaaatccattgttatttccactgtgctactgtctttaatccatgaatatgcctgagtacacactccaatgagaggttgcacactgcagtggtcctttccaccactatctttagaaagagatgaaatattgatataaactgaacacaaaccacaatgtcaccaatgccccaagggaagttttgtaaaagtgccatggacacagagagcacatcccttggggaaatctggagctctgcaagtggagtgggaccagggcctggcattccatgggaaaagaagtgcctgagcaaatgcctggaacctgaagcctggcaygtggttgtggctcttgagcataacataggtctgtagaaaagcaggaagaaagagcattggcaaactctggatgcaaactgtggatgccagcccaatgtcaggctggacaggaaggtcagtcccattcagatgttaacttcaggacctgcagcatccagtcattctggggataggtcccttctagtctctccaccttggcccaccagcagttctctatttttaaagcttttacaaatctgattcttcatgggattcttgtagaaccctgggagttgtaggaatgacacagagataagaattctgaaaccctacaggagatgttcattgcataagaacatgtggcaaaccagggcctggaactca

SEQ ID NO: 7815 - DNA, 591 bp, Homo sapiens
agcactttgtgaggccgagggctggatcacctgaggtcaggagttcgagaacagcctgaccaacatggtgaaaccccatctctactaaaaatacaaaaaattagccgagcgtggtggcacatgcctgtaatcccagctacttgggagactgaggctggagaatcacttgaacccgggagacggaggttgcagtgagcttgcgtcatgacactccagcctgggcaacaagagcaaaactctgttgtcacacacacaaaaaaaacccccaaaaaacaaacaaacaaaaaaaccattatagagtaagccctttcccatgttcattaaatggatggatgaatgcaaaagtgaatgaatgagtggacaaacctctccaggtagatcctactccaggtactgggcaacaagctgaatatggcctgaactttcatagtttcaccccccatcctccaacctttgctccttctgcctggaatgtccttcctcttcaytttctgttaaataaattctaaaattgatgtgggctaccaggggccatcgaccacaggtggcctcatgaatggctcttctccttgagttcttgggggaccagtg

SEQ ID NO: 7816 - DNA, 770 bp, Homo sapiens
atcccccattcccttcagatgccttattctatgacatttttctatgcttacctgcatgtatttatttgtttgtttgtgttggagatgctgagatgcatttcaaatatttacaagaatgctcaagattctcccattacaaaaacaaacaagaccaataaccaacattgcacctgtgccccattctgccctcttgctacatgctctctttctcctttccttcaagctgttcttccttaaagtactttttgtgcattatttttctacttcttcaccttccattccctmcacaactgttggaatctgtcttcgatctcagatgaatctctctctttttttttttcctgagacagggtcttatcctgtcactcaggctggattgcagtagcacaatcatagttcatggcagccttgaactcctgggctcaagcgatcctcctacgtcagcctcctgagtggctgggaccccaggttcaggccatcatacctgattgatttttactttttttatagagatggagccttgccatgtggcccaggctggtcttgaactcctgggcttgagcgattctccctccttagcctcccaaagtgctgggattacaggtgtgagcctggcccaactctgctcttgttatgattatgagtgtcctcttgactgacaaatcaatgagattttattacttaaaatttccatgattctgctcattctcttttctgtgaaactgagttttcactaggctactgtgacatcttctcttggattactcctt

SEQ ID NO: 7817 - DNA, 770 bp, Homo sapiens
atcccccattcccttcagatgccttattctatgacatttttctatgcttacctgcatgtatttatttgtttgtttgtgttggagatgctgagatgcatttcaaatatttacaagaatgctcaagattctcccattacaaaaacaaacaagaccaataaccaacattgcacctgtgccccattctgccctcttgctacatgctctctttctcctttccttcaagctgttcttccttaaagtactttttgtgcattatttttctacttcttcaccttccattccctccacaactgttggaatctgtcttcgatctcagatgaatctctctctttttttttttcctgagacagggtcttatcctgtcactcaggctggattgcagtagcacaatcatagttcatggcagccttgaactcctgggctcaagcgatcctcctacgtcagcctyctgagtggctgggaccccaggttcaggccatcatacctgattgatttttactttttttatagagatggagccttgccatgtggcccaggctggtcttgaactcctgggcttgagcgattctccctccttagcctcccaaagtgctgggattacaggtgtgagcctggcccaactctgctcttgttatgattatgagtgtcctcttgactgacaaatcaatgagattttattacttaaaatttccatgattctgctcattctcttttctgtgaaactgagttttcactaggctactgtgacatcttctcttggattactcctt

SEQ ID NO: 7818 - DNA, 601 bp, Homo sapiens
atcctggagactccaggtagaagagatgaagcccatctttccatctttataagaatgaagaagccatcaaaaaccagagccgctttatccttttcttgggggccatgaggccccctcctccctgtttctctctgyggactgctctgttgtcctgcttctctgcttttcagcttgcacttgacataaatggcagtcattgccacagtgaccattcatctcagctggccacacagccactggggactcttttttgtgtctcttagagaaaaggaatttctaaggaaataatctggttgggagcccaaggcgggcagatcacgaggtcaggagatcgagaccatcctggctatcatggtgaaaccccgtctttactaaaaaaaaatacaaaaaattagctgggcgtggtggcgggcacctgtagtcccagctactcgggaggctgaggcaggagaatggcatgaactcaggaggtggagcttgcagtgagcagagatcgcgccactgcactccagcctgggcgacagagctagactccatctcaaaaaataaaaaataaaaaataaaataatctggttgaccatccttgggtcaggtgtttatc

SEQ ID NO: 7819 - DNA, 552 bp, Homo sapiens
aattgtaagaatatcagaaactcaacttacttagccacacatttttcttttcaaacagatattcttacctttcttacaggttttatgtaytgattagtgttgatgcatgcaaattgcacaaaacgttctatggcatgtaatgttatactcaagaaagatggtattaactgtaagagaattgtgaaagtttaagaatgaggaaaatgttgaagaatgcttcagctgaaaggagggatttgaagtgaaacttcaagtcaaataaattttttattcaattgaaaaagttcaaatatatgaaaatataaggaataccctaatgtacatctatgtactaaatatagagtataattgcattttagtaagtggccatatttgctttcaattttgttgagagaagaaaatattacaagtatgtttcaagacatttgtgtaccttttggaataaatatgtctgcttccctccacttctgaagtaagtaatattattaaacggtatttattttttccatgcattgacaggcggaattctaggatggctcctaagattccccc

SEQ ID NO: 7820 - DNA, 625 bp, Homo sapiens
agagtgctagaatttcttcagactggtggtgttaacacaatcctcaataagaactatattggataacattccaataaacacctacacacacaaacagaagtgttctgtatgctaaattgtacatgatggtactgtgcacatgtacttaaatttgctattcataaaacaatactcccattattttgtactgtattcttaaaatttctgggttaaccaccgaataaatttaaaactttgaaaataatttgctaaagaatatgctttgaagggatattgttgggctaaagaatatgctcatattaaattttactatatggcataaaattactcatgaaattctccccaacaattagtaaatgtttgcttctctacaatctttttataatttttactttcaatattgagataattgtaggcttacaggaaagttgcataaatattaaaagacagttcccatactccccctgatctagcttcatttaatgttaacgtcttacatagtttaattattgaaaccaggaaaccaacactgttaaaatttggtacttaaaaaactacagactttaattcaaatttcaccagttttccttcrtgtgtgtgtgtgtgtgtgtgtgtgtttgtgttt

SEQ ID NO: 7821 - DNA, 625 bp, Homo sapiens
agagtgctagaatttcttcagactggtggtgttaacacaatcctcaataagaactatattggataacattccaataaacacctacacacacaaacagaagtgttctgtatgctaaattgtacatgatggtactgtgcacatgtacttaaatttgctattcataaaacaatactcccattattttgtactgtattcttaaaatttctgggttaaccaccgaataaatttaaaactttgaaaataatttgctaaagaatatgctttgaagggatattgttgggctaaagaatatgctcatattaaattttactatatggcataaaattactcatgaaattctccccaacaattagtaaatgtttgcttctctacaatctttttataatttttactttcaatattgagataattgtaggcttacaggaaagttgcataaatattaaaagacagttcccatactccccctgatctagcttcatttaatgttaacgtcttacatagtttaattattgaaaccaggaaaccaacactgttaaaatttggtacttaaaaaactacagactttaattcaaatttcaccagttttccttcgtgtgtgtgtgtgtgtgtgtgtgtgtktgtgttt

SEQ ID NO: 7822 - DNA, 825 bp, Homo sapiens
tcaggtgtgaaaaaagactgtttgctttagagcattttgctttcaatgaggaagaaaagggggacgatgggcaaaacacacacacacacacacacacacacacacacacacacacacacacacatttcccttgaaataaatacatcaatgtcttttttttccccgttcatggagggttttgccactcatctgtaagtttcaggcaccagaacaaactgaagagcatctcctctggaagcaaggaacctggatttgaagcccagctctgccgtttactggctttgacccctgggcaagttacttaacttctcaatgcctctgttaggaaaagtcagtgagttaacatttgtgaagtgttgagattcctgtcgaacgtgaagtaggtgctacgtaaatgttttttaaatttaaaaattagatgatcattttcagtatgaaaagcaacacaattccatccagctccaagcaaatccgactggaactgagggtttccagcatgagcaatgaggtaaatttctcagatttcagggtatggttcatattaaactcataaaactctactccccgtggggctgcctgagtcactccatcacagagccacaagtatttcctgagcactactgtwttggatgctgggaggcaaagagaagcagaaggccttgggtggcaagagaatacaggtgtctctagaaggctgaagcaggcttgtgccctgggaatggcacagagagtaagtgctgtcaacttttagaaggacaagatatagccaggggcagtggctcacgacctgtaatcccagcactttggaaaaccaaggcaggagga

SEQ ID NO: 7823 - DNA, 922 bp, Homo sapiens
ctatggccccgggtggcttcctgtcccccgctgcctatgctgcttcccttgcctgctgtcagagcccaacatggaggaggaggttgccgtcctgggagcctgagggagctcttcccttgcctgctggcagagcccaacgtggaggaggaggttgccgccctgggagcctgagggagctcttcccttgcctgctggcagagcccaacatggaggaggaagttgccgccctgagagcctgagggagctgtgtctgactggggcttctgcctggggktttgcaaagagctacttatgaatatagtctctccagattccttgtttcaaaggaagtgagcatgagctagcaagtgtagcaaccccacagctgataaacaactttgtcttggttttaaaccatcacatcttcatttcacattggaataaagtaagtgaaacctgctaccccagccttgcccgtgtgttctgtaacccagtctcctttggttgtgagggctgttgtcagaaatgttataagaaaagattatgcataaatgaaatcaaatgtaaaattatgcttataatgtcacttgagtgaaaggtaagagggtagagtcacaggcactcagctggggtttacccacccatcacttaccacgctcatgagagtgtggcacaggtgaatgtcacctgacattggtgacagaagagaaaaggccggcatgaaggccaggtaggggagaggtgccaggctgtggggccaggccctgggcatgctggacctgtgaggtcactgaacatctaactgcccaggcactggcccttttcacatcagttgaggtaagaggatgggggagcactctctggaagtcacactgcgctgggagaatggaggagagtctacaactcaccatcctagtgtagcttttagagtgagatggactgt

SEQ ID NO: 7824 - DNA, 775 bp, Homo sapiens
ttcattttaaatgtatatatatgtatctacataacatctttcatttgtctcttcactggcaaagcctaaagtatctgctgtttggctccttaagcaaaactttgctgatccctgctccagaaggctatgagggggtatcacatggtttagtacaaagtatgttttggagtcaggcaggactgcatttgaatcctaactaatctgcttgcttgctgtggggctttgggcaaccccaaccttagatcttctttcwtggaacgtgaataatattatctacagtgtaagattaatatcagcaccacatgtttaatccacctgatgctttgtctgtgcttaatacatgtttgctataactgtgcctgagtttgttcatagaagatgatttctatttattttcttcttttgactcttagatcttcaaaagggccatgtcttgctgatttccatattcatagtgcctactaagtgaatgattaataaggaatgaatgacttgcgtgatctgcagagtctctaatgggatacaagtaatttctaccttattaatttatgttccttaaaacagcccctaaagcatgctgagagcatatcccacactgagcacgtcccacctgtccttcccctacacccaagcacaccctcttctggccatgcttggaaatgtttcttgaagggcaaaaaaaaaaaaaaaaaagccaatctacaggcctaaagaaaacaaaggtgatttcttttttaattccctcaccaaggtggaagtgggaagttgaaataaa

SEQ ID NO: 7825 - DNA, 775 bp, Homo sapiens
ttcattttaaatgtatatatatgtatctacataacatctttcatttgtctcttcactggcaaagcctaaagtatctgctgtttggctccttaagcaaaactttgctgatccctgctccagaaggctatgagggggtatcacatggtttagtacaaagtatgttttggagtcaggcaggactgcatttgaatcctaactaatctgcttgcttgctgtggggctttgggcaaccccaaccttagatcttctttcatggaacgtgaataatattatctacartgtaagattaatatcagcaccacatgtttaatccacctgatgctttgtctgtgcttaatacatgtttgctataactgtgcctgagtttgttcatagaagatgatttctatttattttcttcttttgactcttagatcttcaaaagggccatgtcttgctgatttccatattcatagtgcctactaagtgaatgattaataaggaatgaatgacttgcgtgatctgcagagtctctaatgggatacaagtaatttctaccttattaatttatgttccttaaaacagcccctaaagcatgctgagagcatatcccacactgagcacgtcccacctgtccttcccctacacccaagcacaccctcttctggccatgcttggaaatgtttcttgaagggcaaaaaaaaaaaaaaaaaagccaatctacaggcctaaagaaaacaaaggtgatttcttttttaattccctcaccaaggtggaagtgggaagttgaaataaa

SEQ ID NO: 7826 - DNA, 775 bp, Homo sapiens
ttcattttaaatgtatatatatgtatctacataacatctttcatttgtctcttcactggcaaagcctaaagtatctgctgtttggctccttaagcaaaactttgctgatccctgctccagaaggctatgagggggtatcacatggtttagtacaaagtatgttttggagtcaggcaggactgcatttgaatcctaactaatctgcttgcttgctgtggggctttgggcaaccccaaccttagatcttctttcatggaacgtgaataatattatctacagtgtaagattaatatcagcaccacatgtttaatccacctgatgctttgtctgtgcttaatacatgtttgctataactgtgcctgagtttgttcayagaagatgatttctatttattttcttcttttgactcttagatcttcaaaagggccatgtcttgctgatttccatattcatagtgcctactaagtgaatgattaataaggaatgaatgacttgcgtgatctgcagagtctctaatgggatacaagtaatttctaccttattaatttatgttccttaaaacagcccctaaagcatgctgagagcatatcccacactgagcacgtcccacctgtccttcccctacacccaagcacaccctcttctggccatgcttggaaatgtttcttgaagggcaaaaaaaaaaaaaaaaaagccaatctacaggcctaaagaaaacaaaggtgatttcttttttaattccctcaccaaggtggaagtgggaagttgaaataaa

SEQ ID NO: 7827 - DNA, 772 bp, Homo sapiens
tccttagcttaatcaaacctgcaaagttctttttgccttgtaaggcaatatattcacaggatctggggattaggttgtgaacatctttggggagcactgtttggggacctagctgtaggtcctagggatacaaaaatgaacagcacagttttctgcatttcaaggggttgtaggcttgaagggagtgggaactcatgaaaggatgtgcagtgttggaagatctgcattcatagtggctgagcctcgggtataaggtgggaggcagccaaaaatgaaagtggagggaaaattggagccataccaacacgtgccaatgcgagctcatgaaacgggactatatcttgtggatcaggacttcttgtcctggggttagtagaaggctgccaggtgttcctctaccacctggccttgtatgtaaaactttaggcatgtgtgcatttttctgtggagagggtccatgatgatattcatcagataacaatggggtttatgagccaaaagttcaatgytgcagctgtgggtgatgggatgcctttggaggactttaaatgacctaattaaagttgcgccttggaaaactagccatgagtggaacttgcaggtataggagtagaggcagggacatccttaggaagccccccagtactgggccaaagatgatgggcagggcaggcagtgggagcagagcattgggactgagtccagggtagatggggaggtagaattgatggaacttggatgatttaatggatgagcagggcaaagggtaatt

SEQ ID NO: 7828 - DNA, 772 bp, Homo sapiens
tccttagcttaatcaaacctgcaaagttctttttgccttgtaaggcaatatattcacaggatctggggattaggttgtgaacatctttggggagcactgtttggggacctagctgtaggtcctagggatacaaaaatgaacagcacagttttctgcatttcaaggggttgtaggcttgaagggagtgggaactcatgaaaggatgtgcagtgttggaagatctgcattcatagtggctgagcctcgggtataaggtgggaggcagccaaaaatgaaagtggagggaaaattggagccataccaacacgtgccaatgcgagctcatgaaacgggactatatcttgtggatcaggacttcttgtcctggggttagtagaaggctgccaggtgttcctctaccacctggccttgtatgtaaaactttaggcatgtgtgcatttttctgtggagagggtccatgatgatattcatcagataacaatggggtttatgagccaaaagttcaatgttgcagctgtgggtratgggatgcctttggaggactttaaatgacctaattaaagttgcgccttggaaaactagccatgagtggaacttgcaggtataggagtagaggcagggacatccttaggaagccccccagtactgggccaaagatgatgggcagggcaggcagtgggagcagagcattgggactgagtccagggtagatggggaggtagaattgatggaacttggatgatttaatggatgagcagggcaaagggtaatt

SEQ ID NO: 7829 - DNA, 705 bp, Homo sapiens
atagacacatacaaggataaatgtgaaagtttaagaaagaagcacagataagggggctgacaggaagggagaaatggcagagtgggatggctgagtgggggaatggggaacgtggacccagatgcagccacttttgtaagatgtactgcgttggctcttagtgtgcttttgctcttggaacctacaatatgtttcgaatttagaaacttttgtattataaaagtaattaggatatgttcctgtagaaaattgtaaaaatcagcaaagtagaaaaaaaaagagaatgactcatattccacatacccttatacatatgttacttactcccagcagggcgcggtggctcacatctgtaatcccagcacttttggaggccraggcggtagatcacttgaggtcaggagttcgagaccagcctggccaacatggtgaaactccatttctactaaaaatacaaaaattagccaggtgtggtggcacaggcctgtaatcccagctgctcgggaggctggggcaggagaatcacttgaacccaggaggcagaggttgcagtgagccgagatcatgccagtgcactctagcctgggtgacagaaagagactccatctcaaaaaaaaaaaaaaagtaacttactcccaagagttatagagttgttagttttcttataaagtttttagttttcttttatttggcttatatagataa

SEQ ID NO: 7830 - DNA, 780 bp, Homo sapiens
ggatccagggatcagacttgaaaggtatttgcaaatctcctgaaactgctaaattttatgtacgtgtgttcccaggtatttcgtttctaggtgattctgtagcttttgtcagtttcttagtggatttgtctgtgatccctcaaaaggtaaagaccactgcttgaagggaaagcagccttgggatgggtgccccaatggggaatgtatacctagaaatcatattgttttgcctttgacatgtgtttatagattactgatatctataattacggaaatccagatagttgcgtttgtctcctagcttttctagttgcctcttttttgatttcttgattttaaccagaatcttctttttttcttgagaaggggtctcattccgtcacccaggctggagtgcagtggcacgatcgtaggtcactgcagactcamaactcctggctcaagtggtcctttgcctcagcctcccgagaagctgggactacaggcacacaccaccacgcctgacaaatttcttcttcttcttcttctttttgttgttgttcttgttggccaggctggtctggtcttgaactcccggcctcaagtggtctgctcaccttggcttcccgaagtggcgagattacaggcatgagccaccatgcccagcccttaaccagaattttgttttgttttgttttttgagacagggtctcactctgtcacccagactggagtgcagtgatgagatcacggctcactgcacagatgcacgccaccatgcttggctaattttttatgttt

SEQ ID NO: 7831 - DNA, 663 bp, Homo sapiens
acattctaataggagaaaaggtatttaagaaacaaaaagcaacacagtacaacataatagctgagagaaaagaggtatgtacatagtacaagggaaacaccaggtaaaatgtggtcaatttccctggaatggcgatggggagatgggaagggcatctgcaagcggatgtctacctgaacttaacttgattgcccaggtccaagcactgaggtgacctgaacatctacccaggcatgattggtttgaaatgtgcagacatgaggtttgggargggccaggggtggaatgatatggtttggctctgtgtctccagccaaatctcaccttgtagctcccataattcccacttgttgtgggagggaccagtgggagataattgaatcatggggatgggtctttcccatgctcttcttgtgatagtgaatacgtctcacaagatcttatggttttaaaaattggagtttccctgcacaagctctctttttttgcctgccaccatccatttaagatgtgactttttcctccttgccttccatcatgattgtgagacctccccagccatatggaactgtaaccccattaaacctctttcttttgtaaattgcccagtctggggtatgtctttttcagcagcatgaaaacagactaatacaccatactagg

SEQ ID NO: 7832 - DNA, 638 bp, Homo sapiens
aaaacggccctaaggggcccgcgggcatctcaagacgccagcctcgggactctggtccccaagcccaggtcagagccgaggacgagccgaggacgggccgaggacgcggcgccccggcctccctcgggcccccgacctccccggccccaggcaccccggctcccgacctccaggcttcgctgggcccctttcgactccccgacctcccaagtcctccgcccccggcccgtccttcccccaacctgccccgcagcgcctcagtttcctggcccccgacctgyccgcccttaagtccccctgcccccgactcttcggctgccgtccccctggccctctggcctccaagcgcatcccagtcgcccgcccggccctagcacgcgggactcgcacaccccacgaccccgagcccccactggcggcggcgttacctgtggcgcgggcagcggcgcgcaggccaggcgctaggactcggcggggtccgcagcagccagacgccgctaccaccacaataacaacacggacgccaccgccgagtggagaggcggggcccggacccgcgactggagcagccagagcctcccggactccggagccgccggggtccgggcatgcgcagagagccacgggcacaggggcag

SEQ ID NO: 7833 - DNA, 764 bp, Homo sapiens
ccgatctctttgtccaaccccataatgtgccactctgctttgcttacttcagcatttagttcttcaaataaaccacactctccaaactcagggacttctcaccctgagtttggaaaaccccttgagccaacatctgcttcacccaactcttcgctggctaactcatcttttagatcttagtttaaaaatctcagcttaaatgtcacttctccaggtaggcattgctgaagccagacaaactaaatctttttggactatatgctcataaaatcaattagttccttcaagtagacgggatttgagtcaagccttgaataattaggcactttggggtaggagaaggatctgaataatttcccatggatatgcctatatgtgtgtgtrtgagttttttttctttgcacatctatttgttcttcttgtcacaaatgcaccctcacaaagcaagttagcagtgaaattagacttctctgccaagagatgccacggcaccaaaagtgtcccttctgctcttactcacccaagaaccaagacaatgttttactgttctctgaaaaaagctgtattaatccatttttaacgctgctaataaagacctgagactgggcaatttacaaaataaagaggtttaatggacttacagttccacatggctggggaggcctcacaatcatggcgggaggcaaggaggaacaagtcacatctttcattgatggcggcaggcaaagagcttgtgcagggaaactcccatttttaaaatgatc

SEQ ID NO: 7834 - DNA, 764 bp, Homo sapiens
ccgatctctttgtccaaccccataatgtgccactctgctttgcttacttcagcatttagttcttcaaataaaccacactctccaaactcagggacttctcaccctgagtttggaaaaccccttgagccaacatctgcttcacccaactcttcgctggctaactcatcttttagatcttagtttaaaaatctcagcttaaatgtcacttctccaggtaggcattgctgaagccagacaaactaaatctttttggactatatgctcataaaatcaattagttccttcaagtagacgggatttgagtcaagccttgaataattaggcactttggggtaggagaaggatctgaataatttcccatggatatgcctatatgtgtgtgtatgagttttttttctttgcacatctatttgttsttcttgtcacaaatgcaccctcacaaagcaagttagcagtgaaattagacttctctgccaagagatgccacggcaccaaaagtgtcccttctgctcttactcacccaagaaccaagacaatgttttactgttctctgaaaaaagctgtattaatccatttttaacgctgctaataaagacctgagactgggcaatttacaaaataaagaggtttaatggacttacagttccacatggctggggaggcctcacaatcatggcgggaggcaaggaggaacaagtcacatctttcattgatggcggcaggcaaagagcttgtgcagggaaactcccatttttaaaatgatc

SEQ ID NO: 7835 - DNA, 574 bp, Homo sapiens
gacaraaagaccttccaatgacaaaccctgaaacaatttgagcagcaaagtaaataaattagtataagtatagcttacaatacttatctataattttatataataccccatatgatataaataatcgatttaaaatatataataaatgatggagaacagataaattgcctgtggaaaagaaatgcaaatgatatttctgcaagcactgccaataaaatttaaagctaattcttcacttgtgaagtatgttttgtacttagtgactttaaaataaaagcacaacatggaaagggggaaatagatatattaatacgtataactggtataatgtcatcagagtggcacatatcctctgtggtcttcctcacctaaacccacaccagtcgaatcatcagaaaaacgtcaaattccaaatgtaggtgtaagtatcatgaaaaaaaaaaaaaacaaggaaaatttgagaacctggcacagtggagaagagcacaaggagacatgatatctaaatatgttgtggtatcctggatggaatcctggaacagaaaattgacattaaggcaaaaaatatacaatt

SEQ ID NO: 7836 - DNA, 574 bp, Homo sapiens
gacagaaagaccttccaatgacaaaccctgaaacaatttgagcagcaaagtaaataaattagtataagtatagcttacaatacttatctataattttatataataccccatatgatataaataatcgatttaaaatatataataaatgatggagaacagataaattgcctgtggaaaagaaatgcaaatgatatttctkcaagcactgccaataaaatttaaagctaattcttcacttgtgaagtatgttttgtacttagtgactttaaaataaaagcacaacatggaaagggggaaatagatatattaatacgtataactggtataatgtcatcagagtggcacatatcctctgtggtcttcctcacctaaacccacaccagtcgaatcatcagaaaaacgtcaaattccaaatgtaggtgtaagtatcatgaaaaaaaaaaaaaacaaggaaaatttgagaacctggcacagtggagaagagcacaaggagacatgatatctaaatatgttgtggtatcctggatggaatcctggaacagaaaattgacattaaggcaaaaaatatacaatt

SEQ ID NO: 7837 - DNA, 574 bp, Homo sapiens
gacagaaagaccttccaatgacaaaccctgaaacaatttgagcagcaaagtaaataaattagtataagtatagcttacaatacttatctataattttatataataccccatatgatataaataatcgatttaaaatatataataaatgatggagaacagataaattgcctgtggaaaagaaatgcaaatgatatttctgcaagcactgccaataaaatttaaagctaattcttcacttgtgaagtatgttttgtacttagtgactttaaaataaaagcacaacatggaaagggggaaatagatatattaatacgtataactggtataatgtcatcagagtggcacatatcctctgtggtcttcctcacctaaacccacaccagtcgaatcatcagaaaaacgtcaaattccaaatgtaggtgtaagtatsatgaaaaaaaaaaaaaacaaggaaaatttgagaacctggcacagtggagaagagcacaaggagacatgatatctaaatatgttgtggtatcctggatggaatcctggaacagaaaattgacattaaggcaaaaaatatacaatt

SEQ ID NO: 7838 - DNA, 571 bp, Homo sapiens
atattggacagaaactgatgtggcaggtaggttctaagctgcttcccaatgacccacaactctagataatgcaaaactcttttctgatactctccctgtgaggattagactgctataccacatgtataaacaaacaaaaaaaggggcaaaacaagtggaacaatggcttgtaaaacagattatatcaaacaatgaaggacagtgatatctgagacatacaagacagtgacatgagccctaccaatttctcaagacactgcttcgggagagtttctgtcctgtagtgtggcatggacttttgaagatactctgagtttttgagttaagaagatggaactgagagtcaagmacaaattagctgagtttcatgaagccattctccacattcagtggtaagaatgggggagagcattcacgccagcatccgtgcaggctgggctatttatttctgcataaattataacatactagatggctcaaaaccacatgcacacattacagtttctctggatcattgaattcagatgtagatcattgccaagaatgaggtcttaagtgttcaactggggaa

SEQ ID NO: 7839 - DNA, 571 bp, Homo sapiens
atattggacagaaactgatgtggcaggtaggttctaagctgcttcccaatgacccacaactctagataatgcaaaactcttttctgatactctccctgtgaggattagactgctataccacatgtataaacaaacaaaaaaaggggcaaaacaagtggaacaatggcttgtaaaacagattatatcaaacaatgaaggacagtgatatctgagacatacaagacagtgacatgagccctaccaatttctcaagacactgcttcgggagagtttctgtcctgtagtgtggcatggacttttgaagatactctgagtttttgagttaagaagatggaactgagagtcaagcacaaattagctgagtttcatgaagccattctccacattcagtggtaagaatgggggagagcattcacgccagcatccgtgcaggctgggctatttatttctgcataaattataacatactagatggctsaaaaccacatgcacacattacagtttctctggatcattgaattcagatgtagatcattgccaagaatgaggtcttaagtgttcaactggggaa

SEQ ID NO: 7840 - DNA, 1207 bp, Homo sapiens
cgttgtagatgtggaacttgaggcaggggtgaaggagcgggttctagttagtaaggatgaagaacagctggatattgagcaggtaactagcagcctctgccacaggagccaaagaagaggatttcagggaggaaagtgtggtcaaagtgtcaagtgttgcaaagaggtaacgtcgcctgtgggatttggcaattaggaaatcagtgtaagggaatggtgaggtctcaattcagactctggaggttggattgatctagaagtagggaatgagactctggaagggggagactggtccctagaaggggatacagtggggaaatggagttttgagatggggagggcagagcgggtttagatgctgaggcaaaagccagcagagtaggtgttgatcctgtgggaaggaaagacagtagatgatggcagagaatgtggggaggagctgaagtaacaccgtctcctctgtgggtgggaaggaggagcaggccagggaggtgacagagtgtttgcctccttgggacattcctatgaacacaggaacgctgtgaatcgtggatccatgtctcctaggctggagaaaactgaagtgcagcacttcacgagtttggcatttgtattgtccattgtgctgagcaggagcgttccttctgagtcgcccatggacatgtatcacactaattgttgctatatctcgaccttgctggaggcttaggggacacatagagctttggctcactccagtctcctttctcagtctcctcaggctctgttcatgggccatggccatttggaaggacagctccttccttggctcccgggtgcagctctctggctcatctggaacgtgcaggaaggtttctgtgcctccccagtgctgtccgctaccaggaacgtacttagtagagaggctcactgcctacagacctttggcccttttacctctgcrtccctctccgtcccgtgagaccacacttcagggtttaggccacttgcctcatccaagaagttttatgccccagtttccgggcctgccacggaagcccaggggaccatcaggaagggtgaggggagagagatggagagcaagattgaaagccataaaaaacaaagagaagagaaaggaaggcctcctttcttcactgtttacccttctacacagctaagtaaacccccttagtttcctattcattgcagctcccacacatataat

SEQ ID NO: 7841 - DNA, 618 bp, Homo sapiens
agctagcacatcagcacactcagccccacgcgatgccctgagccatctcagtactcctcagagagttcccaccagcaataagactctcatcctctcaccagacatttccctcaaccttcctttccttataaaatactttccttataaaatactcagtcttagatactctgtcataagcaacagaaaacaagttaagacagaagaggtaacaaggaaaaatcaccctgatgatggaggttgaactctgcattgagtctgagcagttcttccagaaaagttaaggcatcatggctttggaaatttggctagctttttctcattcagagagttatttagtcttgtataagttgggatttctttctactaaatataacagaataccagattttggtatagatttggctgttcagcaatttcacggacaagacctctgttaaaaatctcctggcttgcgctgggtgtggtggctcaggcctaatcccagcactttgggcccaggaggacaagaccagtcaatagtgmgaaccccatctcttaaaaaaattttttttgttttgttttaggctggccgtggtggctcacacctgtaatcccacactttgggaggccaaggcaggt

SEQ ID NO: 7842 - DNA, 618 bp, Homo sapiens
agctagcacatcagcacactcagccccacgcgatgccctgagccatctcagtactcctcagagagttcccaccagcaataagactctcatcctctcaccagacatttccctcaaccttcctttccttataaaatactttccttataaaatactcagtcttagatactctgtcataagcaacagaaaacaagttaagacagaagaggtaacaaggaaaaatcaccctgatgatggaggttgaactctgcattgagtctgagcagttcttccagaaaagttaaggcatcatggctttggaaatttggctagctttttctcattcagagagttatttagtcttgtataagttgggatttctttctactaaatataacagaataccagattttggtatagatttggctgttcagcaatttcacggacaagacctctgttaaaaatctcctggcttgcgctgggtgtggtggctcaggcctaatcccagcactttgggcccaggaggacaagaccagtcaatagtgagaaccccatctcttaaaaaaawtttttttgttttgttttaggctggccgtggtggctcacacctgtaatcccacactttgggaggccaaggcaggt

SEQ ID NO: 7843 - DNA, 764 bp, Homo sapiens
cagttctgtgtctctgggctaccacttctcaggctcgaatctcctctctctcctcacagcccactggccttttgagtctaaggccccacccaattgcatgggaagagtcacagaatcacagactcctggagtgggggagatcatttcattacagaccagaaaggttctgtgacttactccagatggtacacacagtttgaagttgtttgtggacggcaayttatagaccccgggcaatctagtgtcatggatcggaggtgggctctgattcagacaacctgaatccatatcaaggttccatccctgggggactgaatagccttgaacaagtctgtggacctcatccacagtctagggatagtaatggtgcatagctcatgaggttgttgggaggagaaatgagctcattcctgcatcgtgtttggcacacaataaacactcattaaccattagctggaaatattattattattctcatcttgtggacattcccttaacatgcttgataccccagctctgaaggacttgctccactcctccccaacaccacacctttccctccctctttccctccctccctcccttccttccttcttccttccttccttccctccttccttcctcccctccttccttcctctttctttctctcttctgttttctttttgagacagagtcttgctctgtcactcaggctggaatgcagtgatatgatctcggctcaccgcagctttcatcccccacctcagctcaagtgatcctcc

SEQ ID NO: 7844 - DNA, 764 bp, Homo sapiens
cagttctgtgtctctgggctaccacttctcaggctcgaatctcctctctctcctcacagcccactggccttttgagtctaaggccccacccaattgcatgggaagagtcacagaatcacagactcctggagtgggggagatcatttcattacagaccagaaaggttctgtgacttactccagatggtacacacagtttgaagttgtttgtggacggcaacttatagaccccgggcaatctagtgtcatggatcggaggtgggctctgattcagacaacctgaatccatatcaaggttccatcccygggggactgaatagccttgaacaagtctgtggacctcatccacagtctagggatagtaatggtgcatagctcatgaggttgttgggaggagaaatgagctcattcctgcatcgtgtttggcacacaataaacactcattaaccattagctggaaatattattattattctcatcttgtggacattcccttaacatgcttgataccccagctctgaaggacttgctccactcctccccaacaccacacctttccctccctctttccctccctccctcccttccttccttcttccttccttccttccctccttccttcctcccctccttccttcctctttctttctctcttctgttttctttttgagacagagtcttgctctgtcactcaggctggaatgcagtgatatgatctcggctcaccgcagctttcatcccccacctcagctcaagtgatcctcc

SEQ ID NO: 7845 - DNA, 784 bp, Homo sapiens
taaattccaccccagctttaccattttgaaattctaaagagacaacgcaagattatcactgcgtggtcatgaacacagtctttgggaagctccttgtggaggctaatctaaatttgtgttgttctgttttagtccgtttcatgtttttctctaccatgagtctgggggagggcaactggcccttataatgaagcttgtcaccttttggctttctcttcttcaatattcatctgtttttctgcagtcgttttctgtcctggaaattatccttataactcctccatgaaatatcattgaattagaaaattacaaattcttatgatccaaaatgtcaaatgaaaatgtaaagtaagaaaattcatcagactggccaggtgtggtggctcaagcctataatcccagcactttgggaggccraagcaggcagataacctgaggtcaggagttcgagaccagcttggccaacatggtgaaaccccttctctactaaaaaaaatacaaaaaaaattagctgggcatagtggcaggtgcctgtaatcccagtgactcaggaggctgaggtaggagaatcgcttgaacccaggagggagaggttgcagtgagccaagattgcaccattgcactccagcctggatgacaagagcaaaactctatctcaaaaaaaaaaaaaaagaaaattcatcagactgtctctgttatctgatattggctaataaaggctattaatatagcttttccactgggcagagctagttttggaaagtctattaaaggaaggaaaaaa

SEQ ID NO: 7846 - DNA, 521 bp, Homo sapiens
  misc_feature (1)...(521): n = A,T,C or G
annnnnnnnnnnnnnnnnnnnnnnnnnnnnnnnnnnnnnnnnnnnnnnnnnnnnnnnnnnnnnnnnnnnnnnnnnnnnnnnnnnnnnnnnnnnnnnnnnnntgctaagttcccctcagtacattaggtcatacctcgctttttgtccagtcatacttctatatgtctatcaattcttcatcaaacctaagcataaaatagagttttccctcggttctttcgggtcttcatttctgaaggcacctrtgttgcataaaactttggttacataaaatcgttaagcttttctcttattaatctgtcttttgttatagggggtgtcagctatgaaccttgtgataggagggaaatgtattactttttctcctttacaagtgtatgcccctgatcgagaagattttatgcaatgtcatatccctagcccccagaaccagtgcctggcacatggctcatattcaaatatttattggacaaaaaagaaaatgactgcagcaaaaagagtgtgagggagggaaggagttg

SEQ ID NO: 7847 - DNA, 847 bp, Homo sapiens
ggcccctcaccacccctcctccagtcttatcttgtattactctcttcctttctcatttattctagagttccactgaccttatttccattcctacaacattaagccctcttgttaagactttgtttcatggagctccccttctgtggaccacttcttccactttgtcctcctcttccttctttattgtgttcttccccctctgggtctcaaactagactgaagccccagtgaccatgctatctccatccctgttgatccacaggacccgaaacattgtagatgcccaataaatatttgaggagcattctgtagtcctcttgtggatttctgcactgggttgacacatcagtgacaaagcagaaatgtgagttggattaaaagaaaaggagacagagtacaaagactgaaatgagcccaggaagcttccatactcattccaacatgagcagcttttctttttagtaacatctacccgtgcatttatycttccagaaggtttgatggcttagctaagtgtgtgttggcctctccacttgagtctcagatttgagagaggcctttttttactgactcctgtgtgataggcttgatcacttcccttgagggagctagagaaaggtgctgcttcgatggacatcagctgatcacagaaaagctgtatgtctgctgtgagagctagatgtgttgtcatcatggagcaagtacaagcagttggtggggaggagggagccagcagtgctgcttgttggatgctgtcgatcaaagccttaggactgtcctccaggacgaactatgagaagtgaaaagctcgcaaatggaactgatctagaaggccccaagcttagct

SEQ ID NO: 7848 - DNA, 665 bp, Homo sapiens
tccggcttgaggacttcctttacctacattgttccaacatgccagagtctgctcatctcggagacctgctgcagacatgggtatggccctgcgtgagacttacaccgtctaccctggattttcaagggccagccagagctcaccagatgccaccagaaccacgatgctttccaaggtacagtcccctctctcggggygaacccattccagggcgccctgcccttcacaaagaaaaagagaaccctccccagggctcccacatgcttctccagggtcagtcacattaccgcactggacgcctcatggtgcccatctccgccattctggattcggggatctgaacccaactccctttcaatcagctgagggcaacagaggacatcacccatcccttcggaatggcactcacccatctctcaggaccaaatgaaccatgttcaactgctgttcacctgggacccatgttcaactgctgttcacatggaacccttctccacttcggccttcaaagttctcatttgaaaatttgctactaccaccaagatctgcacctgtggcctatccacctgggcccataccctaggcttcaaagcttaccgcagcggccctcctactcctcccggcgtagactccgtggggctgcaggggaggggggggaggagggg

SEQ ID NO: 7849 - DNA, 565 bp, Homo sapiens
agggaggccgaggtcagtgacagcattaaactgggctttaggaccatggggacaacaccagccattgcttgggccactctggctgagaagcaaggcaaagggctgaagccctggaggcaggcaggactgtgcagatctggggtgcatatgcactcacagaattggtgattttagagggatttccaggtgtgactatgggagtgatggctgaagctgagatggagctattagatatgggaagactaacgagttgagacgttaagtgttggatgggtagtccaggttgactctgaaatagcacaggatggtgggatgctaaatactgtgaacctagtgcatagttagtgtacactggctatattatttgatgactacctatacctagaaaaaaaaatcactatttaggaaagtcagtgtaccctgggctgaaacttattatgtatagataaaaccagaagaccaaatttatttatattttgtacttttaaartaaattttactattacttgattgtcaattggacagactattaatttctaatttatatcattattttaaacaattg

SEQ ID NO: 7850 - DNA, 523 bp, Homo sapiens
  misc_feature (1)...(523): n = A,T,C or G
tatgannnnnnnnnnnnnnnnnnnnnnnnnnnnnnnnnnnnnnnnnnnnnnnnnnnnnnnnnnnnnnnnnnnnnnnnnnnnnnnnnnnnnnnnnnnnnnnnnnnngaaccccggatctgttacctgcaaggtgagtcgaggctggagggctggggacaggcaggtgccggggccaggccctgacgtggggtgggggcctgcctgtctccttaggtatgtggggcagcgcctttgccaccagcctggatgagatcttcctaaagaccgccggctcgggcctcagcttcctggagtggtacagaggcagtgtgaatatcacaggtgagggtagcgaccccgagcccctcccacaccacattccagcaacagggccctggcagagrcaagaagaatgagggaggggacagagaaggacttggctgtcccactggattcggggaagtcctgaggaaatgacttctagcttagggtgtctagatgcccagaggtatgatcaagccacacctctgagttctctgttctg

SEQ ID NO: 7851 - DNA, 781 bp, Homo sapiens
tcccctcctcatccscaggtggctgcagtcactggggtgctggatgagtccagtgaccatacatcctgccctacatcctgcctggacagcctgggaagtgttttgatgactgatcaacccagagagcacgaggggagagcaagaggaggagaaaggatgctgctgctcctgactgaacgtgattgaggtgccccaggaaactaccttgctatgcaaagtatggtccccaacctgcggcattggaaccttcattttaacaagatccccagatcctgaagcactgccttagagtataacccagggcctccagggacctactcttccaggacaagcaatgataatgacaatgattatttattgagcacctactttgtgccaggcatgacactaggcctcttataaacattatcttattttatgctttggcaacctagcgaggcaggcgttattacctgcttttcagaaacaaagagagcaggtcagagaggttaactaccttgaccaattctatgcagcaaattatagctgagctggagcttgaacctggaggtctgactccaaagccatgtctctgacaactgtagtatatgtgatgcaatctttcacattaggccaacaaggacagccacttgccaactcgctatggggcccagagatttaaaggcaaatgcaatccccagggagatgtctagaggctgccccattgcctagtgctggcctggggtgtgggcacctatgtgttggggttaggtcaaccctgtggcagaggcctcaatatttc

SEQ ID NO: 7852 - DNA, 813 bp, Homo sapiens
tgcatgcccactgtcagcccaggacttcctgccttgttctctgggtctgtagctggctgccttgctccccacccaaatgtgagtgacttgagggcacatatcccactttgtgctttatacagacccaccatcctgcctcctaccccaggaggtacccccaaaatggtgaagccagaagtgccttcagggacgcttctacagtcacatggagagtaatctgcaaattccccacagccaggggacacctgccacgtgcagtgagaggaacacaaaccagcagcgggggggcacaggcaggatgtgtcggcccacccctcagcggtcacccatcgcttcctcggaactcccagctgctcagggctgaggcgggcgaggctcagaagtgtggaagggccctccccagctggtgactgcatgtggcaggcatccatacccggaacgcccagccagggagtcgggccagcccatccctcctgctcacagagtcacagagtgggagcagactcgggggtcgaagctgggcagcgctcgctcgcacttccttctgcaaacttgaccaggtcccacggcctcttcagcccatggctcctttctctgatccccaagccaaagccagcaaatgagaataatccagtagagacagctgggttttgggatcagggtaggggctcagagccaggsgtctgggattctggtcagtcagtttttcttcatcagaatcaatctcagaacaagagggaggcctaaggcatgcctgctgctggccaggggtgatggggaccactgcccacagaaagccttctaacaagggct

SEQ ID NO: 7853 - DNA, 805 bp, Homo sapiens
ctcagattgaatttgcaatcttacagaactcataaagcagcaaaataattcagtaatcttaatatttggaattactcagtttcttgygatgaaaattaaagttattacatactaaaatctttccttgcttcaagcatttcatatgaatttgatctaaaagaatctgatctgtttcagccattgacagcattctctcatattactaataatgtcccttatactaatgtccctcataaacccttaaatttatatagaactttacagtttacaaagtgctatcacttacattgtcttattagctctcacagaaaacttgtgaaataggtaaggctcaaaatgattattcctatcttaaagatgaggaaactgagccttttcaaaattaaataatgtcccacagattagtaagtggcataaatgagcatgatgttttctctaactgatcagtctgtggtacactaatatttcagcacaaaaggaggacttaatatatcactagtgatataaaagtacacaacagtcaccctagatgtgaaatagcagttgctttgttttacaattgtaggttagtttttaaagtatatttatttggcgtaagtgaaaatatctatcctgctcaacaatcatttgatttaggttatattgagaacatgtataaaattatatattttctctatgttcctatttctttaagaaaaagatttccttttcatatcttgttttcaaaggggtaatttatgaattaacaagtacatattaacaatatgttaattgctgacaatgtgctagacactaaagagaatag

SEQ ID NO: 7854 - DNA, 792 bp, Homo sapiens
ataccttttctcattctgagtgtttaaaggcaaatatatcttggatccagtgyttttgtgtttacaaatctggatatgatttagtaagctttaaagagatagtaagcacacagtaaggaaatcagatttacataattttctgcttgcttacagaacacagcagttgagattatcttttacatttgggaagactgttttaatatgataagatgaaataccacctacagtacgcttgatcttgctagtttgactttttaaaataaattacaggctgatttgtcatcgtgacttttaacataaattgctattataatctaaaggagcaattctaaaggagactgcctttttacctcatctacataaaaagatttaggttatttctacatttattcttttctctgtgcaatttatttgctgtaactttacatggcaggaacaacaaaaatctatgttttgctcatttcatccattcttctattcatgctgataagtagcaaatagcagcttaaatggagaaatggcacaagtaaaagaaatacgtccactttactttttgtatataaaaaagtgttctttaaggggaggtgtgtgcctttttctcccattggaaacataattaaattacaagtttggggaaataagatgagctaaggcattactcattatcttctgcactgtgtatgtatgcatatatgtatgtaggtactcttgcagcttcactaactgctgtaaataatgagtgtcgtagtccagacatcttttagctgtaggagtgtgattgctgggaaaaga

SEQ ID NO: 7855 - DNA, 753 bp, Homo sapiens
atcgagtgataagtactctgcatagaaataggatatggtagtgtgacagagagtgagtgactcagtgtctgcagtagatggggaattttactaggatagtgatgtaatagataaaccacatttatgtaataatccaatatggttccattatagagagggcagaagcattgtgcccccatgcagttattcagagacccaggtgaatgccaactctgccatgtgcaacccttggcttccaagcttcctccaaatgacgacatccaaggaaaggaacatggaggatggtacattggaggtgtttgctytcctggtctggaagtcacatgcatcacttctgctgacattccattagctcacagtcatagagttaccccagctccccactactaggaaacagcctatcttagtgccagggagaatagaaaaaacagctttttaatgtagaggttagcagtcctcctgcgaggtgtcagatcacacagactatgatgagaaactaatggagagtcttagggacagagtgataattttttattatttacatgcttcaaagagccctgtgactatgaatgatggatcagagaaatacaaaaatgggaatgtggaagccagttagaagattcttgtaagagaaagacaatggtggctcaaaggtgtcttggactacagtgcaattcttgtgaagatatagagaaaaaggaacacatgaggataagcttgaagatcttcaaatgaaagatacaatttggaaaa

SEQ ID NO: 7856 - DNA, 807 bp, Homo sapiens
tcttgcttgttgaataaagtttttcttggcaggatgtgtgttgtcatgaggtgtggaagaggaagaaagcacacagatctctgctataggagtgaatggacttttaaagggatgttgtcaaaagattactgtcatggctggtataccatcccccacagacggcgatgcagtgtcccttcccactccccacttcgctcctgaaaaatagtctctacactagggccatccatataggttaactattttttgaacatgacatcacgaagactcaggctggatataagcatagaatatttcatgaaatggtttgctactataacaaatgggtggtatttgcctttttggttttgttttgttttttgagacaggttctcactcggtcgctcaggcyggagtgcagtggtgcgaacatggctcactgcaacctcaacctcctgggctcaagccatcctctcacctcagcctcctgtagacgggaccacaggctcgtaccatcacatccggctaatttttgtatttttatagagacagggtcttgccatgtttcccaggctggtcttgaactgctgggctcaagtaatctcgccttgtcctcccaaagtgcagggattacaggcgtgagccaccacgcttgcctggatatctgtttttttatttcaaggcagcttacttcccttcattagcattttctacttcaggttcttgtactaagtcagttttttcccatgtattttacattctaaggtgtattaataagatctctgtttctgtttcatcacgtatgaagtaagatgctgagtaaggctg

SEQ ID NO: 7857 - DNA, 1656 bp, Homo sapiens
ggatcctagcctgtgggagggccatctagagctcaaaatagtgacatgacatcttcaaccaccgcccacccttcttaaaaaaataaacaaaaacaaaattcctcatatactagctctagtggtttcaggtaaagggcctaccaaaaacttacattgctctatggcttattaccacagctcttctcttagatcagtaactcaccttctctcatccattttattcaattacctctcctctcccaatgtatctgctacttatagattcaaaataagcatgaaatcacaaatggtgaattcctcatcttggtctaccatatccaatatccttgtctccttttctgacatcatctcctaccactttctcttcctgctgcctaccctctgtaccctggtcttaattgttgttcttcaaatgcaccaacctctttctagctttaggacctttgtgtctacactcacactatctcagtggcagcacccttagtatccagggctcaattcagaagatactttcttcaagaggctttccctgcataccaaatcaaaccactgcccccaccctaccccaccatgtcactttcttatatatccccttctgtcgtttttcttcatggaatttataactccttaaagctaccctattcattgtctgtttgtcagtgtattttatttgtcctattctatggcatataagcttcatgagagcagtgtttcattgaccactacatctcccaccatctagtttctacctaaaacagtgcttcataattttagtgctcagtaaacatttgtaaaatttagtagcaaactggttcaacacctagcactgataaagcaacaattttcttgaattattacagtctgagactggctgtatgtaatgttatgctatgtaaagaaaaattaagtgggaaatagtactaaattctgtctctcagttatttttgcccacaaaaatcccagaacccaggattctgtattctcttggtagcagtgtactgcattatggagagattagcttttgaacaccatcaataaacatcccacactcattcctttaacaaaactcaatggaaaaatttgaggccacaaaataagaaataaaaattcacagcataacctacaggggaaaatgtttaaggactacgatcttgaagccctgttaaaataactacatktaataactttagaaatgaaaggcttgaagttactccaagatcacagcattcttgttatatctttctcaactaacagttgagaaacttagggtcagattcaaagactcaggcttaaatctgaaagaaggaaaacagttggttaggatgatatattctcaaacgacactcaaagggtttgagaagaaaaaatacatggcaattgaatcaggctgaagaaaaagtaaaaaaatagaagtggagtcaaagaaggcagaaagaaaaatcaatgctcttaataagttatgatcaaaatgaagaataagtaatttgagtaacaatgcttgaggtccccaatgagatatatgaaaaaaaaaggaagttgttaagactaaacatactcatttatattggtgatgactttccttttcacactgcattctcattgtctcctcaatctctagaatcatacatggtgtaatcttcatggattactttttaa

SEQ ID NO: 7858 - DNA, 1656 bp, Homo sapiens
ggatcctagcctgtgggagggccatctagagctcaaaatagtgacatgacatcttcaaccaccgcccacccttcttaaaaaaataaacaaaaacaaaattcctcatatactagctctagtggtttcaggtaaagggcctaccaaaaacttacattgctctatggcttattaccacagctcttctcttagatcagtaactcaccttctctcatccattttattcaattacctctcctctcccaatgtatctgctacttatagattcaaaataagcatgaaatcacaaatggtgaattcctcatcttggtctaccatatccaatatccttgtctccttttctgacatcatctcctaccactttctcttcctgctgcctaccctctgtaccctggtcttaattgttgttcttcaaatgcaccaacctctttctagctttaggacctttgtgtctacactcacactatctcagtggcagcacccttagtatccagggctcaattcagaagatactttcttcaagaggctttccctgcataccaaatcaaaccactgcccccaccctaccccaccatgtcactttcttatatatccccttctgtcgtttttcttcatggaatttataactccttaaagctaccctattcattgtctgtttgtcagtgtattttatttgtcctattctatggcatataagcttcatgagagcagtgtttcattgaccactacatctcccaccatctagtttctacctaaaacagtgcttcataattttagtgctcagtaaacatttgtaaaatttagtagcaaactggttcaacacctagcactgataaagcaacaattttcttgaattattacagtctgagactggctgtatgtaatgttatgctatgtaaagaaaaattaagtgggaaatagtactaaattctgtctctcagttatttttgcccacaaaaatcccagaacccaggattctgtattctcttggtagcagtgtactgcattatggagagattagcttttgaacaccatcaataaacatcccacactcattcctttaacaaaactcaatggaaaaatttgaggccacaaaataagaaataaaaattcacagcataacctacaggggaaaatgtttaaggactacgatcttgaagccctgttaaaataactacatgtaataactttagaaatgaaaggcttgaagttactccaagatcacagcattcttgttatatctttctcaactaacagttgagaaacttagggtcagattcaaagactcaggcttaaatctgaaagaaggaaaacagttggttaggatgatatrttctcaaacgacactcaaagggtttgagaagaaaaaatacatggcaattgaatcaggctgaagaaaaagtaaaaaaatagaagtggagtcaaagaaggcagaaagaaaaatcaatgctcttaataagttatgatcaaaatgaagaataagtaatttgagtaacaatgcttgaggtccccaatgagatatatgaaaaaaaaaggaagttgttaagactaaacatactcatttatattggtgatgactttccttttcacactgcattctcattgtctcctcaatctctagaatcatacatggtgtaatcttcatggattactttttaa

SEQ ID NO: 7859 - DNA, 1656 bp, Homo sapiens
ggatcctagcctgtgggagggccatctagagctcaaaatagtgacatgacatcttcaaccaccgcccacccttcttaaaaaaataaacaaaaacaaaattcctcatatactagctctagtggtttcaggtaaagggcctaccaaaaacttacattgctctatggcttattaccacagctcttctcttagatcagtaactcaccttctctcatccattttattcaattacctctcctctcccaatgtatctgctacttatagattcaaaataagcatgaaatcacaaatggtgaattcctcatcttggtctaccatatccaatatccttgtctccttttctgacatcatctcctaccactttctcttcctgctgcctaccctctgtaccctggtcttaattgttgttcttcaaatgcaccaacctctttctagctttaggacctttgtgtctacactcacactatctcagtggcagcacccttagtatccagggctcaattcagaagatactttcttcaagaggctttccctgcataccaaatcaaaccactgcccccaccctaccccaccatgtcactttcttatatatccccttctgtcgtttttcttcatggaatttataactccttaaagctaccctattcattgtctgtttgtcagtgtattttatttgtcctattctatggcatataagcttcatgagagcagtgtttcattgaccactacatctcccaccatctagtttctacctaaaacagtgcttcataattttagtgctcagtaaacatttgtaaaatttagtagcaaactggttcaacacctagcactgataaagcaacaattttcttgaattattacagtctgagactggctgtatgtaatgttatgctatgtaaagaaaaattaagtgggaaatagtactaaattctgtctctcagttatttttgcccacaaaaatcccagaacccaggattctgtattctcttggtagcagtgtactgcattatggagagattagcttttgaacaccatcaataaacatcccacactcattcctttaacaaaactcaatggaaaaatttgaggccacaaaataagaaataaaaattcacagcataacctacaggggaaaatgtttaaggactacgatcttgaagccctgttaaaataactacatgtaataactttagaaatgaaaggcttgaagttactccaagatcacagcattcttgttatatctttctcaactaacagttgagaaacttagggtcagattcaaagactcaggcttaaatctgaaagaaggaaaacagttggttaggatgatatattctcaaacgacactcaaagggtttgagaagaaaaaatacatgrcaattgaatcaggctgaagaaaaagtaaaaaaatagaagtggagtcaaagaaggcagaaagaaaaatcaatgctcttaataagttatgatcaaaatgaagaataagtaatttgagtaacaatgcttgaggtccccaatgagatatatgaaaaaaaaaggaagttgttaagactaaacatactcatttatattggtgatgactttccttttcacactgcattctcattgtctcctcaatctctagaatcatacatggtgtaatcttcatggattactttttaa

SEQ ID NO: 7860 - DNA, 1656 bp, Homo sapiens
ggatcctagcctgtgggagggccatctagagctcaaaatagtgacatgacatcttcaaccaccgcccacccttcttaaaaaaataaacaaaaacaaaattcctcatatactagctctagtggtttcaggtaaagggcctaccaaaaacttacattgctctatggcttattaccacagctcttctcttagatcagtaactcaccttctctcatccattttattcaattacctctcctctcccaatgtatctgctacttatagattcaaaataagcatgaaatcacaaatggtgaattcctcatcttggtctaccatatccaatatccttgtctccttttctgacatcatctcctaccactttctcttcctgctgcctaccctctgtaccctggtcttaattgttgttcttcaaatgcaccaacctctttctagctttaggacctttgtgtctacactcacactatctcagtggcagcacccttagtatccagggctcaattcagaagatactttcttcaagaggctttccctgcataccaaatcaaaccactgcccccaccctaccccaccatgtcactttcttatatatccccttctgtcgtttttcttcatggaatttataactccttaaagctaccctattcattgtctgtttgtcagtgtattttatttgtcctattctatggcatataagcttcatgagagcagtgtttcattgaccactacatctcccaccatctagtttctacctaaaacagtgcttcataattttagtgctcagtaaacatttgtaaaatttagtagcaaactggttcaacacctagcactgataaagcaacaattttcttgaattattacagtctgagactggctgtatgtaatgttatgctatgtaaagaaaaattaagtgggaaatagtactaaattctgtctctcagttatttttgcccacaaaaatcccagaacccaggattctgtattctcttggtagcagtgtactgcattatggagagattagcttttgaacaccatcaataaacatcccacactcattcctttaacaaaactcaatggaaaaatttgaggccacaaaataagaaataaaaattcacagcataacctacaggggaaaatgtttaaggactacgatcttgaagccctgttaaaataactacatgtaataactttagaaatgaaaggcttgaagttactccaagatcacagcattcttgttatatctttctcaactaacagttgagaaacttagggtcagattcaaagactcaggcttaaatctgaaagaaggaaaacagttggttaggatgatatattctcaaacgacactcaaagggtttgagaagaaaaaatacatggcaattgaatcaggctgaagaaaaagtaaaaaaawagaagtggagtcaaagaaggcagaaagaaaaatcaatgctcttaataagttatgatcaaaatgaagaataagtaatttgagtaacaatgcttgaggtccccaatgagatatatgaaaaaaaaaggaagttgttaagactaaacatactcatttatattggtgatgactttccttttcacactgcattctcattgtctcctcaatctctagaatcatacatggtgtaatcttcatggattactttttaa

SEQ ID NO: 7861 - DNA, 802 bp, Homo sapiens
gggagagcccgatcctgggtgcagccttggtgccagccgggcccctgatcttgtctctcaaccactcttggtttaccgggagtggacagatgaggacagatggctgcctgtggagtgacgggctccttctcttcggagcactgtctaatctgagtgtgagtccaaccctgcccgagccggaactcaaggagaccatgaagccacccttggcctctagctgggagaggtctgcgtccctgcagcgagcacgccaggtgatctctggcacacacttgccgcgggctgtctctcggaaggtagtcagcggccctggcttcccacctgggtcccaccactgcagaatcacccccgtggctgcccacaggggcggcttccatcaccctgcttcttcctggctgctgcgggctgtgttgtgacttccatcccagcctgagaggcctgcgaagggcttgccaccgactgccagccctgcctctgccaccgaccgccggccctgcctctgccaccraccgccgaccctgcctctgccgtttccttgccacccatcagctcttgaggcttttaggaagaagtgtggctgttttggccagattgctttagctgtcctcagcagggttggtgtggggtcaccaccacccccatgtgaccttggcagaaggaaggtcctcctcccattcacccaacgcctgcaactcagtggttctgagcaatcccagagttacatgacgtcatcgcgatcactttcatcaccctgtacccagagaagacccgaacccactccagcctctccccacaccctgca

SEQ ID NO: 7862 - DNA, 513 bp, Homo sapiens
tcctcagtgtgacgtctgagaccttttcccagctggagccctgtcattcattcattcattcatcccatgccaggctgggcggctgccagaggcacaatccggaaccgccccttgctaatgggcggaccagtgaaagcaaagcgggctcrctgtgcagaccaatgattgacagttccagggtgtgatggacacaggcggctgccaggaaggagccccttcagaagcagtgggcggggcggggtggggaaggccgtggggaggagtgacttccagatgaggctcacaggactgtacccggagggagggggcagcaaggaccctgtgggcagccgggggcacggcacaggctgtggctgtaggtgtgggtggtgcccaggcattgacagaggggagctcactggacggggcagcgtggaggtgagggtcgggtgagggcccctcgggagcccctggccatgttagttgcacatttcatgactctttaaggagttagtgaggcctgggtgtgaccta

SEQ ID NO: 7863 - DNA, 850 bp, Homo sapiens
ggttgttttgctaaaattatttcaaaatctgccttgtggaaaaacgcccacgtcagggtgaccatctgtggtaaccgagaattccttggaggcagcgtcttcaccgcctggctaagcggatggcacaagctgccagccagacctctgtctgtccctgcccagaggccccagctgccccttcctccaggcacctccctgatctctggagtccaggttttgttcccaaggtcctacctttgtatctaaatgctgtgtcctctccccggacgatctcctccaggcactggctctcaggggccagctccccatgggcgatgatgtctctgatacaggaacttatgggtaccttgcaagtttgcacagaaagtggagcccgtctgttccttctggggtgtrcgagcggggcctcggggagcaggtgcaggacagggcacaggaggaacaggcacggctggtggtgtgcagtgaacagcagtggtcacaccaggtggtggctcccgtgggacttttgaggccggcccagccctgagcaggtggggtctgcagaggcctcgtgggttggaggagacttattcagagggagttttggtcttgctagaaattgcatgagatgaaagatgacattttaattctatcattgaggcatagtctttccaacacaccccctgaggtgtgagggaggctgtccctatatgatgtggtccccgctccttcaggctggggctcctggccagttcatctttcgtcctgtgtctgactttctctatcatttctaaaatgactaagacaatttattttgttaaaaaaaaaaaaaaaaggcgttaagatgattctactttgtagagggatc

SEQ ID NO: 7864 - DNA, 720 bp, Homo sapiens
gtctcagttctgactagcgagtacctcgattcatgagtatgttttttaatgtaaggttttaacgtaaggtttaaaaaggcagccgccccgtttcctccccactggtctcgccttcagcagtgatttgtggtgactgtgacgttctcttcggtgggctgcctgtggatcgccaagtatgtgctcctgctgcttctacctgatgtctccccatcttgggctttgaggggggctcatccggggcattcatattttctgcccgagttcgctcctgacccagggcaggtggaagccagcaggtgaggaccagggtgtcagccagaaactcggaagtggcacagaggcagcatccgatagcccctttgtcagaggcgaccagggccttgagtgagctgggatggacttctcttatcctgacatcctggaagggggtgcagcctgcctgtctgtgtcccagttgagttggcaacattttttgtctttcctcatgatgcacgaagtagtggtatctctgagagccaatggcagcctagctgccgtggagaatgctggggrgtgggtgagagttggggcacagaggactcatggggcagaggctgtggtccagtccttgtgggggtgactccagggatggcaggtgggtggtgtggccaaggaggagggaggtcaaggcactggtgttggggcagggagaagggaccgcagtgcccatgtgtttgaggg

SEQ ID NO: 7865 - DNA, 801 bp, Homo sapiens
ttttgttggacaaaaaaggaatatggtggacattaattcttagaagaggttttatttgaaacaagtcacaaaaataatcaaacagcaggttgactttggagttcagctcacgaaagttaagcttacagagcaaataaaataagctgaagaaaaagataagatgactgggcgcagtggctcacgcctgtaatcccagcactttgggaggccgaggcgggtagatcacgaggtcaggagtttgagaccatcctggctaacacggtgaaatccagtctctactaaaaatacaaaaattagccgagtgtggtggtggacacctgtagtcccagctgctcgggaggctgaggcaggagaatcgcttgaacccgggaggtggaggtggcagtgggccgagatcgtgccactgcactccagcctggtgacagagcgagactccgtctcaaaaaaaaaagaaaaagaaaaagaaaaagctaagatgcagcaggtggagccgcctgccgttgggtttcagcttttcttatggaaagaatgttacggcctgggtgcctccattctctgatttctttttctttcttgactttttaaaattgaaacaaaactccctaaaacatgaaatctgaagcgttcaactccacgagtttttacaaagcaaactgcaccgcgtcacatagctgatccgtgtgtagcttgtcctctggacrcggggccacccccacaccccgaggtgaccccaggcgtaacctacccgtccccggccttggtgcctgcagatagttttgcttgtttcgagcttttgtcttg

SEQ ID NO: 7866 - DNA, 803 bp, Homo sapiens
ccagtttttagactcttgctcttaccaagagactctgctccaagatttgaggtctgaaggccaggtttcctcaccctcacacccaggtctggtgcttaagccatttcttatctagatcaggggattatcttgttcttctttgtgtagtggttattatagaaccaggtgctcagcaggacctgaggaaataatattaacaattgtagcatttacagtatgtcagccagtatgctgttttacacatagtatcacttttactctgtgcaaccagaataccctatgaagtagatgttattgtccttgttttacagatgaggaaactaaggtttgggaaggttaataacttgcctgaagtcatggctagcaaatggccrggccaggattcaaacccaggtctttctgactccaaagcctacacaccaaagctccacagtcagtgggtattagtggaactgggctaaccggaaagccaatgccagctcaggagaccctttcagggaaggaaacattagcatcatacgagaggtttcctccaacataaccaggacctaagaattttaaaggcatagcatagagactgcacatgggcaaacaccccaacaaataaaagtgctgtgatgaaataatttatttaattgtttgagaatatttaccaagcatctgccttgtgccaaacactgttctagtcaactgggaatgaggcagacagtccctgtccttgaagagttcataatctagtgaagaaaataaattgtaaaccacaaataggttttctagattaattaaatattgtgatgagtgca

SEQ ID NO: 7867 - DNA, 815 bp, Homo sapiens
tgccctggccatgggccataaacttgcttctgtttctccaggaaacatacacacagctaatcttttctgccaggttcaacttcctcttggtttgttaactttgacttctagatagtaatgtagctgggcaatttttttctttttttttttttyttttttgagacagagtctcgctctgtcccccaggctggagtgcagtggcgcaatctcggctcgctgcaagctccgcctcccatgttcacgccattctcctgcctcagcctccctagtgagtagctgggactacaggcacccgccaccacagccagctaatttttttgtgtgtttttagtagagatggggtttcagctgggcaatttcaaatagaggccttgtctgttttgagggctaagatccaactttgcattattaacatatatttatgtgtgtgtgtatatgtgtacatatatgtacgtgtatatatgtgtattatgtatgtatgtatatttttctctgataacttaatgctgcctttgagggcacaggccccagctccctggtatttgtgctacagaactctggcaggcacccagggacttggctggccagaggaccaggagcatgtgggaccagtgcctggggctcccagccaggttttcagcccttgccatgctgccttctatactgaccccttgccctttgcagaatgcctgtgggtttgagaacgtcccaggggacttgctgttagccgcttccagctggtgacatctaaaggcttggaggccatggctccataggcagcatgcccagaacacttaccaacaagagtgcaccca

SEQ ID NO: 7868 - DNA, 720 bp, Homo sapiens
atcctcccaacaaacttgggagtttggtttgttaatccccaggtcacaaccaaggaagtcacctctcacgaaggccactcagctgatggacagagtcaggcctacatctggcctccctgatctgcttccccaggagtccaaagacccagatgtcctccacattagctcatttcccaccgcactgcactttgtcatccacaccaaagtcaggtggagttaattccctgctaaactcatccttggctctgcaagatgaatgccgaacccttagcctaggccaggaggggaacccttcacacaccgggggccgcagctccagctcagcccccaacacccatcaatgcacacaggctatttgacccccttgacagctcccaggcagcccacacttgtgtctgtgcacgtgtgctgctgcatcttccagggaccatgcttctcctctaacgccttgtgtaagtgtgacctctctggggaaggtctgcctcatcccctggggagacacacttgctccctcatctgggccctcttggcatggtgttcattctccactgcatagcgctatcattgatcagtttgcatgtatgctaggagctcctaaccagtatttattggacctctrcaagcctgggaatctgtaagtgctgaactccatgcaggcagggctgtctcagccacctgctgcctgggtggctctgggcaggcccttcaactctgtgctca

SEQ ID NO: 7869 - DNA, 715 bp, Homo sapiens
tacaactccacagcttggacaagcacccagtccttctctagtaagactcatggccatttacttatgttacaacacactaggcaaagatgaatatatactcagttatttcaaggactgtgagacataggtctgagttgacrttaatctttcaggacgagaagtttatatttttgttgttgtttctttttgttttttcatgttccttcctttatagtgagtcatatagatttaaggttataaatggagtttgggttcaagttttgcttacagtgcatccactgggtccataagtcaatctggtgctttttttccttttccaaaatatataatttgttggacatacttgagagttgtcagaattcatattgttccttggctatgggataaaagctaccgtgctggtaaaagcctatgctacagcaaataaaatagattaacactctgggggataatgaatacgttagtaaacccaaagagattaatccatttagaaaacaactaaaaacctggacataaggcaatacaagacatgagttgtgcatgtttacttgaagaacaagggaataggagcctctacaagtaaattccttactacctgattttagcctcaggagaaaggtcatcctgactgtgcacacaacagcaatagagtccaaatggaaaatgccaatttttctatcccagagaaccagaaaacagaaactaggaaaccaga

SEQ ID NO: 7870 - DNA, 715 bp, Homo sapiens
tacaactccacagcttggacaagcacccagtccttctctagtaagactcatggccatttacttatgttacaacacactaggcaaagatgaatatatactcagttatttcaaggactgtgagacataggtctgagttgacattaatctttcaggaygagaagtttatatttttgttgttgtttctttttgttttttcatgttccttcctttatagtgagtcatatagatttaaggttataaatggagtttgggttcaagttttgcttacagtgcatccactgggtccataagtcaatctggtgctttttttccttttccaaaatatataatttgttggacatacttgagagttgtcagaattcatattgttccttggctatgggataaaagctaccgtgctggtaaaagcctatgctacagcaaataaaatagattaacactctgggggataatgaatacgttagtaaacccaaagagattaatccatttagaaaacaactaaaaacctggacataaggcaatacaagacatgagttgtgcatgtttacttgaagaacaagggaataggagcctctacaagtaaattccttactacctgattttagcctcaggagaaaggtcatcctgactgtgcacacaacagcaatagagtccaaatggaaaatgccaatttttctatcccagagaaccagaaaacagaaactaggaaaccaga

SEQ ID NO: 7871 - DNA, 715 bp, Homo sapiens
tacaactccacagcttggacaagcacccagtccttctctagtaagactcatggccatttacttatgttacaacacactaggcaaagatgaatatatactcagttatttcaaggactgtgagacataggtctgagttgacattaatctttcaggacgagaagtttatatttttgttgttgtttctttttgttttttcatgttccttcctttatagtgagtcatatagatttaaggttataaatggagtttgggttcaagttttgcttacagtgcatccactgggtccrtaagtcaatctggtgctttttttccttttccaaaatatataatttgttggacatacttgagagttgtcagaattcatattgttccttggctatgggataaaagctaccgtgctggtaaaagcctatgctacagcaaataaaatagattaacactctgggggataatgaatacgttagtaaacccaaagagattaatccatttagaaaacaactaaaaacctggacataaggcaatacaagacatgagttgtgcatgtttacttgaagaacaagggaataggagcctctacaagtaaattccttactacctgattttagcctcaggagaaaggtcatcctgactgtgcacacaacagcaatagagtccaaatggaaaatgccaatttttctatcccagagaaccagaaaacagaaactaggaaaccaga

SEQ ID NO: 7872 - DNA, 715 bp, Homo sapiens
tacaactccacagcttggacaagcacccagtccttctctagtaagactcatggccatttacttatgttacaacacactaggcaaagatgaatatatactcagttatttcaaggactgtgagacataggtctgagttgacattaatctttcaggacgagaagtttatatttttgttgttgtttctttttgttttttcatgttccttcctttatagtgagtcatatagatttaaggttataaatggagtttgggttcaagttttgcttacagtgcatccactgggtccataagtcaatctggtgctttttttccttttccaaaatatataatttgttggacatacttgagagttgtcagaattcatattgttccttggctatgggataaaagctaccgtgctggtaamagcctatgctacagcaaataaaatagattaacactctgggggataatgaatacgttagtaaacccaaagagattaatccatttagaaaacaactaaaaacctggacataaggcaatacaagacatgagttgtgcatgtttacttgaagaacaagggaataggagcctctacaagtaaattccttactacctgattttagcctcaggagaaaggtcatcctgactgtgcacacaacagcaatagagtccaaatggaaaatgccaatttttctatcccagagaaccagaaaacagaaactaggaaaccaga

SEQ ID NO: 7873 - DNA, 715 bp, Homo sapiens
tacaactccacagcttggacaagcacccagtccttctctagtaagactcatggccatttacttatgttacaacacactaggcaaagatgaatatatactcagttatttcaaggactgtgagacataggtctgagttgacattaatctttcaggacgagaagtttatatttttgttgttgtttctttttgttttttcatgttccttcctttatagtgagtcatatagatttaaggttataaatggagtttgggttcaagttttgcttacagtgcatccactgggtccataagtcaatctggtgctttttttccttttccaaaatatataatttgttggacatacttgagagttgtcagaattcatattgttccttggctatgggataaaagctaccgtgctggtaaaagcctatgctacagcaaataaaatagattaacrctctgggggataatgaatacgttagtaaacccaaagagattaatccatttagaaaacaactaaaaacctggacataaggcaatacaagacatgagttgtgcatgtttacttgaagaacaagggaataggagcctctacaagtaaattccttactacctgattttagcctcaggagaaaggtcatcctgactgtgcacacaacagcaatagagtccaaatggaaaatgccaatttttctatcccagagaaccagaaaacagaaactaggaaaccaga

SEQ ID NO: 7874 - DNA, 1651 bp, Homo sapiens
ttttttttgtgccctattttaactttactaatggccttaaactctgggattatcaatactgattgttccctttggagtagattgttaatattttctgaacgataaaatgaactttaattaggggtaatatttcaatattttcatctctggacttgcaaatttctagtaaaatcaagacctcataatttctaaatagttctattttccttctttcatttaactccacttacccctcatccagttctgaatactctcctgccatgccaaagaattgaaaagccccttatggaaatgcattccttaaatccgagctcaatctgtctacctttagcctctgaacatttacctgctcttgtctcattctccatgcatacttctatagctaatctataatattaaacaaattattgttcaaaacattagtgagtgactggaaattatgttagttattctttcattgcatttatttcagtatactttgaatacgaattttctatgacaggtactgtactaaaatgctgagaacaaatagatgagcaaaatgaaatccttatcctcagtagttctcagaccagaaagctattaggaaacaatgcaccataagcactaaatattatccaagaaagcactgaaaagtatggttgcaaagaggaaagagtactcacctctctctatcataaagcttttattgtcgttttgacaggcatactcttggagaaaaattccatacccatgggtataagaaaataacagcctagtagaagaagaacaaagaaagatttggggtggggcagaaggcattctggtggtctttaaatcacatcacatgcattgtagcattctgcccaccccttccagacatgaggatcctaaaaagctttgaaaataactcttgtacacagacatactcagcctcctgatagtttataagaaatatagaagaattttacatatttacatcccaaaagcttgatgcttatcagaaaagaggttaatgaccgtgtggataggctgttcatatttaatgtccaggctacttctctttgtaagataaactgttttttcctcaggctactgctaaggaaaaactttccatatcctgttttcctacagcataaggacagctgacagacaagtggggaaaccctaagtcagggtagtcagagcttagacagtactgtgagctgtgtgtggtatgaactatttcagaaagcttatctgtgccatcacactccttcaaactttgaactagaagaagataargaagtcttggcagttggtaatgagacagaagctgggaaaatgctgtgaagaaaagtcacgatctgggcaggtcaaagccatgtacaaggcatgacagagctaaaaccttggagaagctgaggagaaggttgcttgacaatacagaatgaaataatactgttgacaatcctgggtcctaccatatccaatacccaaatcttactgccaagaatcctagatacaccataaatccagaaccaccttctagctatggtcttcttgagcccttaagtgatccatttcaattccaacatttatatgattatatgtgtatcttttcactaaactatttcataaactacataagtagatttctgtgccatggttccacaaaggctagcaacaattg

SEQ ID NO: 7875 - DNA, 762 bp, Homo sapiens
gcctgggcgacagagtgggactccatctcagaaaaaaaaaaaaagtgtatgtacagattaaagaataaagtgaacctcacgtgactacactggagacaggagcacctccagagacccttgagcactctgccattccatcccctttcctctccagaggtaaccaatatccccacctttgtgttaaccaccccctggcatttattcctaattgcttttatctctctgtgaatctctcaaaaacattgtttagtttggaaaaaaactgagcagtaagcacagacctagctttgaaaggggagggcaatgatgctcccacggctccctgaagatgacctgagtggagcttccgggcagagcctggcttccacgtccccttgagttctccagagtctgtctggggttgtgtcacagggcgtagtgtgagtgaggtgcaggctgaccagcagaaacatggtcaaagggcatgggctgctatgaattttctgcctctagactcaccacagctgcagtgggtggaaacagacctggaagagatcaccagtgyccccgggcgctctgggaggcagggcctttcatcttcttcaacctgggcacacctgagcatttttatcttcatgtacaaggaccatcgttgctctgtgatcataaccctccgcatgtctatcttctgagtcacggcggcagtctggaccagctgctcgctattgctaggccggagcacagctgtcctcccaggagctcccttgtcctccgccggcttca

SEQ ID NO: 7876 - DNA, 709 bp, Homo sapiens
gttccattgacaaatctcttttttctgattttgagcttgttgcctccctgttacaaaatcctggttcttatccacccggacaatatgaaataatctaaccatttcaaggtccttaattacatccgcaaagtccattctaccatgtaaagtaacatgtttacaggttctggggattaagtcatgcatatgttgggagacaccattattcagcctcccacactttctgagctaagtatattgatatcactgagtgacttagtgaatgaatgattgaagactttttagcaattcgacaatatttattactaaatccattatgtacttggtcakgtttcatactgttttcagaggatggctaggaaaccagtgtttattctacaaacttgatcctgcttggtctcaaaatgaattttcagttatattaaagtggcagccagttcattgactaccatggaattaaaataagagaaagtggcaagcctattttcatcattctgatgtaaggcatttggcttccctacgtaccagcggcgcctttaagacaccagatgttcatgcggatcttgggctcgactggcccctatttttgataccccctccccttaaccttttttgcctcatgttgcctgggtcttgggttgggtttgggagggtcacagcgcccatttccgggggagggactgcccgtgccttaggtgggggggtcggg

SEQ ID NO: 7877 - DNA, 709 bp, Homo sapiens
gttccattgacaaatctcttttttctgattttgagcttgttgcctccctgttacaaaatcctggttcttatccacccggacaatatgaaataatctaaccatttcaaggtccttaattacatccgcaaagtccattctaccatgtaaagtaacatgtttacaggttctggggattaagtcatgcatatgttgggagacaccattattcagcctcccacactttctgagctaagtatattgatatcactgagtgacttagtgaatgaatgattgaagactttttagcaattcgacaatatttattactaaatccattatgtacttggtcatgtttcatactgttttcagaggatrgctaggaaaccagtgtttattctacaaacttgatcctgcttggtctcaaaatgaattttcagttatattaaagtggcagccagttcattgactaccatggaattaaaataagagaaagtggcaagcctattttcatcattctgatgtaaggcatttggcttccctacgtaccagcggcgcctttaagacaccagatgttcatgcggatcttgggctcgactggcccctatttttgataccccctccccttaaccttttttgcctcatgttgcctgggtcttgggttgggtttgggagggtcacagcgcccatttccgggggagggactgcccgtgccttaggtgggggggtcggg

SEQ ID NO: 7878 - DNA, 709 bp, Homo sapiens
gttccattgacaaatctcttttttctgattttgagcttgttgcctccctgttacaaaatcctggttcttatccacccggacaatatgaaataatctaaccatttcaaggtccttaattacatccgcaaagtccattctaccatgtaaagtaacatgtttacaggttctggggattaagtcatgcatatgttgggagacaccattattcagcctcccacactttctgagctaagtatattgatatcactgagtgacttagtgaatgaatgattgaagactttttagcaattcgacaatatttattactaaatccattatgtacttggtcatgtttcatactgttttcagaggatggctaggaaaccagtgtttattctacaaacttgatcctgcttggtctcaaaatgaattttcagttatattaaagtggcagccagttcattgactaccatggaattaaaataagagaaagtggcaagcctattttcatcattctgatgtaaggcatttggcttccctacgtaccagcggcgcctttaagacaccagatgttcatgcggatcttgggctcgactggcccctatttttgataccccctccccttaaccttttttgcctcatsttgcctgggtcttgggttgggtttgggagggtcacagcgcccatttccgggggagggactgcccgtgccttaggtgggggggtcggg

SEQ ID NO: 7879 - DNA, 709 bp, Homo sapiens
gttccattgacaaatctcttttttctgattttgagcttgttgcctccctgttacaaaatcctggttcttatccacccggacaatatgaaataatctaaccatttcaaggtccttaattacatccgcaaagtccattctaccatgtaaagtaacatgtttacaggttctggggattaagtcatgcatatgttgggagacaccattattcagcctcccacactttctgagctaagtatattgatatcactgagtgacttagtgaatgaatgattgaagactttttagcaattcgacaatatttattactaaatccattatgtacttggtcatgtttcatactgttttcagaggatggctaggaaaccagtgtttattctacaaacttgatcctgcttggtctcaaaatgaattttcagttatattaaagtggcagccagttcattgactaccatggaattaaaataagagaaagtggcaagcctattttcatcattctgatgtaaggcatttggcttccctacgtaccagcggcgcctttaagacaccagatgttcatgcggatcttgggctcgactggcccctatttttgataccccctccccttaaccttttttgcctcatgytgcctgggtcttgggttgggtttgggagggtcacagcgcccatttccgggggagggactgcccgtgccttaggtgggggggtcggg

SEQ ID NO: 7880 - DNA, 804 bp, Homo sapiens
agatactgtcatatctctcctaactggtgactgcttttttctcccggctcccatagaacaggtccttgaagttgagttgaggcacttgctcctcatggcttcttttagacratttttcttccctcctgttttcaaaatttttagctgctctgcagctcctcatcagactatatctactaccactctttatttcaatcatatagcaaccagccattctccagattctagaaccattcagggccaggtggcatgagtctggcattaattgattggttaatagaagagaggaatattctaagtaaatcttagcctatttaagcaaatgtctcaaaagacaattggttctccaatgcttattgtgtctatcggggatggaatgatgtctacctagaagaatttcattttgaatggcctttcttacatggttaaaagtaggaaaagttaattaattttacaattaaatatggtaggctttgaatatttgtgtccctccaaaattcattttgaaactaaatctccgatgcctttagggggtgattaggtcatgaggacaataccttcatgaatgggattagtgagtggccttatgaaaggacttgaaagaacctgtttgaccccttttgttccttctatgtgaggacacagcaacaaggcaccatcttggaagcagagagcagccctcaccagacattgaatcttctggcaccttaatcttggacttcccagcctctagaactgtgagaaataaatttctgttatttataaattaccaagtgtaaggtatgttgtgatagcagccctacc

SEQ ID NO: 7881 - DNA, 827 bp, Homo sapiens
gggtctcccaaagtgctgggattacaggtgtgagccaccacgccgggccagattcccggcctgaaatgcatttttaaagtctattgctatatacttagggacaaagatggttgttaaaggtagagaaaacaaaacattcaacatgtcttgaggaaaaggaagtgttggtgggggtgaggtgggggcagttgcttgtctgtcctggaaaggcaatttcttaccgcttcatacccattttatacccattccattctttctagaaacacagatttctgtcctcattgttttcatatttgtctcctattgtcatgttttatgagcaagtcataaagggaggaagagggaaaacaaagttctgaggctttcttaatctacttgctcaacctgcatttttagtaaccataaagaaattggttgggctcacttttacagcttcctcttctagcaagaagtcccaccacatgccatccacctagccacttaatgctcgtcgaacaagtcaaatctatagcaaatatgtagtcttgttttgtactttttttcaaatgttatgtaaaaggtatactgtaaaatcatactagaacttctttcacccaatgatttttagatgtacctacacacatgtagcgtccccattcactttaacttgcactgaataaatatatcaaatgtactcttctatctccccactgacaagatacttggcattacstactccagacaaccaggcagcgactgttttaagtcttcttatgctgttgtttgtgctagaatttctccacagcatattttggaggtgaaattactggatccgtgtgtatgtgtac

SEQ ID NO: 7882 - DNA, 753 bp, Homo sapiens
tattgttttcctaactcacttgactataacagtttcataacagtttcttgggtttgttctcagaattttctcccagagtttctgatttaagaattaggtccatgaatctgtatttttaacagactcacctgagagattctaatcatgaggcaaatatgagaaacattctaaaagggtatgttcaattgaacaaatttccatcattttactccccaacaatagggaaactgtaaagagtaaaagatttcaaacagggaaatttatggcccaacaggtaaacttaaaatagggagttaccacctgcttgctttgtctgatggkcatgcctgaatcacaaacctttgaaccaactcatcttccagtataattcacttccaaactatcaagtaaccttctcaaaaaatctctgttcattcattcatccattcattcatttgacatttattgaacatctgctatgtgccaggcactgttcttggcacaaagaatagagtggtgaacacatatccaggccctacccttagggggctgaattttagtcttttttcaaatcatagtcctcatgtattaccaatcaaaatatcatatgttcttttggataataccctgcaaagcataatgtgaaatcacaaaggtacaaaagtcacctctctcagacactggtcgaatgcttaccatgcatcagattccattgtaggtatccagatacatcgatgagcacaccaagcaaagatctctgccctcatggatctg

SEQ ID NO: 7883 - DNA, 772 bp, Homo sapiens
agtggtcaaccacattctgtgaaggggagtggttaagaaatgagtaagccttccactgagcagaggagcaccttctccagtctgtggagtccaggaggtttggggccttagactttaaggtttgaggacctgtagtgatgacagcaaggtactataaaatacttcaacatagacagtgagatactacgtatgtgccagttagttgcagctttaattaggagcggccaggggtggtcagctggcactttcaccttgagtccgcccaccagtgcttctgttgtctgcatctcaatcaatagtcaaagcttcaccattgaatatcttacacactgaatatcaaaaatgggtttttattggccgggtgtggtggctcacacctgtaatcccagcactttgggaggccaaggtgggcagatcatgaggtcaagagatcgacaccaccccggccaacacggtgaaaccccgtctctactaaaaatacaaaaattagctgggcgtggtggcacgcacctgtagtcccagctactcaggaggctgaggcagtagaatcatttgaacccaggaggtggaggttgcagtgagccgagatcacgctattgcactccagcctggtgacagagcragactctgtctcaaaaaaaaaaaaaaaaaaggaagggggttatgcaacatcgtgttctattgattcacttaacaaatttcagaaatgatcttttgttggtaacattagaagaattcttaatgtgtggactggctaaaatatctctacccc

SEQ ID NO: 7884 - DNA, 720 bp, Homo sapiens
agcctgcctctttgcagccctytaagtgctgagaacgaagctggctcccagtgagttctcaggacacctgttgactggccgctcaaccctaagtgggttccccatttccctctggttcctctaccagccactctccaccaggtaatgacagcaaagctgacctctgaattacaaatctggtctggtcactcttcccagctcaaagccctttaatagcttcccctggtccttaggagaaggggcccaaattctcatctgtggcctgaaggctctgtaaagcctcctttccctccaaccagtatcatttcccttcattccccccacctcccacctttatctcctccttcaatagcgcagctcccaaagcagtagcatggtctcctctgcaagccttctctgacctctgggaccaagccaaaccgccctgctatgggctctcggagtccctcctggctgtggttccgtatcactgtaattttacctttgggttatgcggcccgcggtggcctccccttggagtcagttaatccatatgggtgggatcatatctgttttgatcaacatgtgtggtgcctaataggtacttgacaaatgctgaatgaattaaccacaggtgtcccagggctctctggatttttgccttggaaatctctaagttagtccacttttccaatcaacttcctgtgtccccacctacaccagagtctgggctaggatgtc

SEQ ID NO: 7885 - DNA, 720 bp, Homo sapiens
agcctgcctctttgcagccctctaagtgctgagaacgaagctggctcccagtgagttctcaggacacctgttgactggccgctcaaccctaagtgggttccccatttccctctggttcctctaccagccactctccaccaggtaatgacagcaaagctgacctctgaattacaaatctggtctggtcactcttcccagctcaaagccctttaatagcttcccctggtccttaggagaaggggcccaaattctcatctgtggcctgaaggctctgtaaagcctcctttccctccaaccagtatcatttcccttcattccccccacctcccacctttatctcctccttcaatagcgcagctcccaaagcagtagcatggtctcctctgcaagccttctctgacctctgggaccaagccaaaccgccctgctatgggctctcggagtccctcctggctgtggttccgtatcactgtaattttacctttgggttatgcggccygcggtggcctccccttggagtcagttaatccatatgggtgggatcatatctgttttgatcaacatgtgtggtgcctaataggtacttgacaaatgctgaatgaattaaccacaggtgtcccagggctctctggatttttgccttggaaatctctaagttagtccacttttccaatcaacttcctgtgtccccacctacaccagagtctgggctaggatgtc

SEQ ID NO: 7886 - DNA, 620 bp, Homo sapiens
aaaatagtgtatttttagaggcaagtggattcacacatgtaatatgaagcttcacgtcacttcccattaatttagattattgatcctattacagaagctgaaatagaaatgagagattagtatactcttcatggggtctggtttttttgtttgtttgtttgcttgcttgttttgttttgactgtcaacaaaactataaacttacttggaattcaaagagaactctactatttgtaataattattgatatcatttcaataaccwggcccctgtgctctgagcttttggggaatgactaaatgaaggtgttaatgtgttacatataacagattaaatctaggcacaaaagtaatctgctaaacaccttcaccaaagttacaaagtacaatagatggagagaaactaagcaggcttggttatatgaaggaggtggcttttaagttgtgccttaaaaaaatgacttgcactttgtccttacttgtctaatactttagattaggacttttggacttagattggaaaatctatatttctaagagaattttttttcttaaaaagaaaggttttgatttcattttaaccatgatatagccttttgaccctaggcaaatcacttcactt

SEQ ID NO: 7887 - DNA, 451 bp, Homo sapiens
agtctcattctgttgcccagactggagtgcagtggagtgatctcggctcactgcaacctccgcatcccaggttccagctgttctcttgcctcagcctgctgagtagctgagattacaggcgcccgccactacgccaggctcatttttttctctttttaggagagacggggtttcaccatgttggccaggctggtctcgaacacctgaccttgtgatttgcctgcctcagcctcccaaagggctgggattacacgtgtgagccaccgctcccagcttccaaaagttttcaacagagctcagaggtcttaaccacaggcacatcggaggagcatttttgaaacrctttccagcttcctcaataggaatggaagccaaaccccgaattgatgactcctttgaggaagtcgagagctgtaaggaaagccaggaacaggggcaagggacagatgga

SEQ ID NO: 7888 - DNA, 836 bp, Homo sapiens
aatatggcaggtgtaggaagaaagtctaaaacmctgtttaagtatttctaataaaataagaaatcagttaagctctgaagtattaaatgtatggactgaaaccggtagtctcattcatttattaccgtaatttcatgtggtaagtaagcttcccaagaaagaatggaaattccaaaaccctctggatcatccacagcatccctagttgttcacttagcatatagacatgttgcagtttacagctatgcaattatgctgacagtaataatttaaatgaattctcacaaaatggacaagtggctccaaaagagttcatcaagaaaacagaatctgaagacaatgttgtatgaataatgcacacacaaatgagcaaaaaccacatggctgacctggccttctgcgccttggaaaaactcttcattttgagaaaagtctttttacagtggaaaaagcaatgatgacatagccagatcagatcagatgttagaaaaaaaaaaaaaaaaggccgggggttgcgggggcgggaatcagagggatcagaaaggttacttgaaatatgtatttacattcattctgagcctttccttaagctaatgacgcttttaacattaaggaagaagaaactgcctttggaaacaaacttcgttctctaaggagaacattttgaaaattgcttcttaaaatatttacaactttatgtaatttttatttctgaaaatcatatatgttccctataaagctccttgtagctctatagtttaagaacttggaaagtaaaatcttctcatctttttaaaattcctcaaaataaagaattttagtgagttttgaatcag

SEQ ID NO: 7889 - DNA, 836 bp, Homo sapiens
aatatggcaggtgtaggaagaaagtctaaaacactgtttaagtatttctaataaaataagaaatcagttaagctctgaagtattaaatgtatggactgaaaccggtagtctcattcatttattaccgtaatttcatgtggtaagtaagcttcccaagaaagaatggaaattccaaaaccctctggatcatccacagcatccctagttgttcacttagcatatagacatgttgcagtttacagctatgcaattatgctgacagtaataatttaaatgaattctcacaaaatggacaagtggctccaaaagagttcatcaagaaaacagaatctgaagacaatgttgtatgaataatgcacacacaaatgagcaaaaaccacatggctgacctggccttctgcgccttggaaaaactcttcattttgagaaaagtctttttacagtggaaaaagcamtgatgacatagccagatcagatcagatgttagaaaaaaaaaaaaaaaaggccgggggttgcgggggcgggaatcagagggatcagaaaggttacttgaaatatgtatttacattcattctgagcctttccttaagctaatgacgcttttaacattaaggaagaagaaactgcctttggaaacaaacttcgttctctaaggagaacattttgaaaattgcttcttaaaatatttacaactttatgtaatttttatttctgaaaatcatatatgttccctataaagctccttgtagctctatagtttaagaacttggaaagtaaaatcttctcatctttttaaaattcctcaaaataaagaattttagtgagttttgaatcag

SEQ ID NO: 7890 - DNA, 756 bp, Homo sapiens
gatccctgtgattgtatcaggcccacccagaaaacccagaataacttccctatctgaaagtccttaacttaattacatctgcattgtctattttgccagataaagtaacattcataggttctggggttaggacatagacatcttagtgtgggagaagaagggattatttacataccaagtcagacaaaatttttctattttacgttttaagatagtggaaaagaggttttaggtcatgtcttagtttgttttgtgttgttgtaacaaacaaccatagactggataatttataaaggacagaagtttattttctaacagtccaaaatctgggacatctaagatcarattaccagcatctggtgagggccttcttgctgcctcatcccatggtggaagtggaagagtaacagtgaatgacagagagcaagatgggagctggacttgacctaaaaagaacccagtcctacaataatgaattgattcccacaatgacagcattaatccattcatgagagcagtgtcctcatgacccaaacagctcccaattaggccccacttcccacttcctaggctcaagtgatcctccaaccacagcctcctgaatagctagaactacaggtatgtgccaccacatccaccatgcccagctaattttaatttttttgatagagatgagggtcttactatgttgcccaggctagtcttgaactcctaggatctagtgatcctcctgccttggccttccaaagttttggg

SEQ ID NO: 7891 - DNA, 766 bp, Homo sapiens
tcaactaagctaattgtaaatagtcattattatagaataagtactttttttggaaaaactaatcataaactaaagcaacacggataaattagaaaccacttcttgaaatacacatggtaattgttcttcaaagatacagcgctcttcacctcattggtgaagtaaataggaatcttgcctcaaatagtaaagaataataaaaataaaaataaaaacacttaatgttagccacttgtgattcagagggtttttacagtgttaaaagcttttcataaaaccaggaagttgcaataatatttaaatcaatgtcactcagatgtctttgcaaggcaaacaaagctctatcaattgaacaaccaaaccactgttcaaattaatcagtaggaacttgataaattccactgatgtagaaaattagcactttgcatgtttcccagattttgatttcatttgggcgtctggtcatgaattataaccactcttcttggactcsagctatttcacttgaaatccattatttctagcagaattatgagtcttgttaaggaaatgccagctatttccattttgagcatctgcactgcagttctattattaacatggagttcatcttaaaaagagggaagaattagatttgtgtctttggggcattgtgggagggggcaggtggtggtgattggagcttcagtgaaacaaacaagctcacaaggcggcttccaattgacacagctgtcatgtaaatatctgtccctgctgtatagataag

SEQ ID NO: 7892 - DNA, 766 bp, Homo sapiens
tcaactaagctaattgtaaatagtcattattatagaataagtactttttttggaaaaactaatcataaactaaagcaacacggataaattagaaaccacttcttgaaatacacatggtaattgttcttcaaagatacagcgctcttcacctcattggtgaagtaaataggaatcttgcctcaaatagtaaagaataataaaaataaaaataaaaacacttaatgttagccacttgtgattcagagggtttttacagtgttaaaagcttttcataaaaccaggaagttgcaataatatttaaatcaatgtcactcagatgtctttgcaaggcaaacaaagctctatcaattgaacaaccaaaccactgttcaaattaatcagtaggaacttgataaattccactgatgtagaaaattagcactttgcatgtttcccagattttgatttcatttgggcgtctggtcatgaattataaccactcttcttggactcgagctatttcacttgaaatccattatttctagcagaattatgagtcttgttaaggaaatgccagctatttccattttgagcatctgcactgcagttctattattaacatggagttcatcttaaaaagagggaagaattagatttktgtctttggggcattgtgggagggggcaggtggtggtgattggagcttcagtgaaacaaacaagctcacaaggcggcttccaattgacacagctgtcatgtaaatatctgtccctgctgtatagataag

SEQ ID NO: 7893 - DNA, 727 bp, Homo sapiens
ttcaaacaagctaataaaggaggcaagaccgaactttccatggactccttcctgccaggtgatttttccaggacctctcacctgcttagctcaagaggtggaatgagagctcacctccagactccaggctgggcgctcgtgtggctaagagactaaacaaacacaaaggaacgaagtttctgcagctgttgggtcagtccatttgatcaccaaaagcaatgcttggagcccatgattctaggagcttacacgcacttttattaccagcatcccagacagaaaaattttggaaatgaactagaagagtcaagaaatgaacaaaaactgttgctgcattggtgggaggactcagtcccgtgcagccctgcaccaatatggyaactgcttcaagttcctgacctcttccctgcagcctgggttccctaaacagggtggggcagagacagctggcccttcaggcacaggaatccttagtgattctggacacacacttcaggccccaagggttgctcaccaaccacctcttgctccctctgcatcagctggtcttgtccattaaagccaagtaagccaagatgggtgttttatgccattaggaaagacttactcagcttcggcatcaagcaacaccagccccaggctagtctcaaactcctgacctcatgacccgcccgcctcagcctcccaaagtgctgggattacaagcatgagccactgtgcctggcct

SEQ ID NO: 7894 - DNA, 635 bp, Homo sapiens
ttccagcaactattactaataaagttgctatgaacattagcgtacaggtctgagtgtgtgtgtgaacataaatcttcatttccctgagataagggcaaaaggattttcaccttcagtgcagccgttggggagagagatgtcttatagtgcctgaaaaccaagaaaaataacttctgagaaaaagaagaaagaacaggaagaaccaaataacgtgtcaacctcctcatgttgtgatggtgcagaaaaaaacccacaaaaaccatattgctgagttcatttgtatttcacagtctacatctcagtattctcttcatctatgcagacacaaatgggaataaaaatagttagagaagcagaaatacaatctgtgaaacctctactttaagattaattttaagacacaaaactgagaactctgcaattactgtatcacttatgctaacagtaatgacaacagggtggagatgtctggtcatgccactataaggagtgcctctgggtattaatagggggagtgatttacatcagggacctgctataaaagctgactcattgayatggttttgatccgtgtccccacccaaatctcacgttcaactcatgatggaggtggggtctggtggaaggtgctcgaa

SEQ ID NO: 7895 - DNA, 580 bp, Homo sapiens
caccttctactcagatagcttttcttctactccccttagccacacactcactcacatatcatacttgttttgcattccagatgatctgtcgaacatggcctcgtctcttagcttgctttttgagttttcctactattgctgttctttgattgcctggattcctctggcccagtgatctcccctatttccctcagttctttagccctctyttttataactcccctccttacccacatgggtttcatggtgtggaatttcagcagtacttttcccaataacctgattgtaacctcagtttctccctaggagattgaaagacttcaatcgtgttgctttaactgtattaaccttagttcctttatctctaaaataatgataatacacaacctatgaggaatttttaataaaatttgcataaaaataaaattaaacagcttctattgtaatacttggcacatagtaggagattaatcaatgtttattctgactaaaggctgatctgtgtatgtacttaatatcaaccaagaggatggcggattgtcattccactctgaaaactgaggaacctcgatgcgactct

SEQ ID NO: 7896 - DNA, 775 bp, Homo sapiens
ccttgaaagactactagtgaatactgaaagacagaattatatgaacatttacagccatttgagaatggccacagtgatataaaacactaaggttctagaggagaaatagatgagcactataagaaagtatatggaggggagggagagcattaggagaaatatctaatgtagatgatgggttgatgggttcagcaaaccaccatggcatgtgtatacctattaacaaacctgcatgttctgcacatttttcccagaacttgtagtataatgaaaaattaaaaaaaaaaaaaaagaaaggatatggaaagtttcactgaagatttaaaacacaggctctgctttgaggaatctactactggcaggtgtgaagcagaggaagcttcaraaactaatgggccaaaaactttactaactaatcttactaatcaacaaaacaaaacaaaatctgtttcaactaaccacagcaatgtagtagagggaaaatatttcaagaccatggtttgaagaatttcatttgttttcttggcagatttatcaaatcttttttctgcatatccattctaaagattaggcaatgcacatgtttatatatccttgaggtgtggtttgggagggaaattggaagaattgtatgtatttttaaataaatgaaattgctagaaggatgaaaaatgttggagtgatcatgtatacctaactttttgttattcccttgtcaattttgtgaatttctagatttaatgactcctaataatagggtttcataaaaaggagt

SEQ ID NO: 7897 - DNA, 775 bp, Homo sapiens
ccttgaaagactactagtgaatactgaaagacagaattatatgaacatttacagccatttgagaatggccacagtgatataaaacactaaggttctagaggagaaatagatgagcactataagaaagtatatggaggggagggagagcattaggagaaatatctaatgtagatgatgggttgatgggttcagcaaaccaccatggcatgtgtatacctattaacaaacctgcatgttctgcacatttttcccagaacttgtagtataatgaaaaattaaaaaaaaaaaaaaagaaaggatatggaaagtttcactgaagatttaaaacacaggctctgctttgaggaatctactactggcaggtgtgaagcagaggaagcttcaaaaactaatgggccaaaaactttactaactaatcttactaatcaacaaaacaaaacaaaatctgtttcaactaaccacagcaatgtagtagagggaaaatatttcmagaccatggtttgaagaatttcatttgttttcttggcagatttatcaaatcttttttctgcatatccattctaaagattaggcaatgcacatgtttatatatccttgaggtgtggtttgggagggaaattggaagaattgtatgtatttttaaataaatgaaattgctagaaggatgaaaaatgttggagtgatcatgtatacctaactttttgttattcccttgtcaattttgtgaatttctagatttaatgactcctaataatagggtttcataaaaaggagt

SEQ ID NO: 7898 - DNA, 775 bp, Homo sapiens
ccttgaaagactactagtgaatactgaaagacagaattatatgaacatttacagccatttgagaatggccacagtgatataaaacactaaggttctagaggagaaatagatgagcactataagaaagtatatggaggggagggagagcattaggagaaatatctaatgtagatgatgggttgatgggttcagcaaaccaccatggcatgtgtatacctattaacaaacctgcatgttctgcacatttttcccagaacttgtagtataatgaaaaattaaaaaaaaaaaaaaagaaaggatatggaaagtttcactgaagatttaaaacacaggctctgctttgaggaatctactactggcaggtgtgaagcagaggaagcttcaaaaactaatgggccaaaaactttactaactaatcttactaatcaacaaaacaaaacaaaatctgtttcaactaaccacagcaatgtagtagagggaaaatatttcaagaccatggtttgaagaatttcatttgttttcttggcagatttatcaaatcttttttctgcatatccattctaaagattaggcaatgcacatgtttatatatccttgaggtgtggtttgggagggaaattggaagaattgtatgtatttttaaataaatgaaattgctagaaggatgaaaaatgttggagtgatcatgtatacctaactytttgttattcccttgtcaattttgtgaatttctagatttaatgactcctaataatagggtttcataaaaaggagt

SEQ ID NO: 7899 - DNA, 885 bp, Homo sapiens
gttcgaagagccatttcttccaagagccctgtttcctcttaatacaatattgggtttagaaaccaagctagctggctgctaaggctgctcaggctatgcactgttgctctggtgttattgcttctagctcttttcaaaagacagcgatgagaagactacattattttgatgagtaggcgcgcgtgtgtgtgtgtgtgtgtttgcacacacattcacatacgaaaactgaagacagagtgataaaataggttgttaaggggcctggatgggaaataaacacattaattaacacagtgcaactgaaataaatataaatagatttgagaacatgtgaaagtattttataaactttcatgtgtcaagatggaagactggtggcattgttagcctgcatctcccacttacaaagacaaaatagtgtgtagagatccatacagtaaactcttgtccaagaaacaacacagaaacataacagaaaagctgaatgaaaccacagaccytttgatgaaagtgtcgggcagcatcctaaactgtgaacaagacggaaaactcccgacaggagacattgaaccagctcacacacccagcacatcactcctacaaacagcatctgagaaagctgctgcacaaacattctctatatctaaggaactcatatggagtctttgcaactgaaagcatcccgagccaaggctaggtgacaataaactatcctcaagaaggaaaaaagaaaaatcaagaaaatccaattgaataaaaaataaatttaaaaataattagaagaaatagtctatctaaatgagaaggaaccagaaaaataattctggcaatatgaaaaaacagggttttatgatacccccaaaagatcacactaactcaagcagt

SEQ ID NO: 7900 - DNA, 885 bp, Homo sapiens
gttcgaagagccatttcttccaagagccctgtttcctcttaatacaatattgggtttagaaaccaagctagctggctgctaaggctgctcaggctatgcactgttgctctggtgttattgcttctagctcttttcaaaagacagcgatgagaagactacattattttgatgagtaggcgcgcgtgtgtgtgtgtgtgtgtttgcacacacattcacatacgaaaactgaagacagagtgataaaataggttgttaaggggcctggatgggaaataaacacattaattaacacagtgcaactgaaataaatataaatagatttgagaacatgtgaaagtattttataaactttcatgtgtcaagatggaagactggtggcattgttagcctgcatctcccacttacaaagacaaaatagtgtgtagagatccatacagtaaactcttgtccaagaaacaacacagaaacataacagaaaagctgaatgaaaccacagaccctttgatgaaagtgtcgggcagcatcctaaactgtgaacaagacggaaaactcccgacaggagacattgaaccagctcacacacccagcacatcactcctacaaacagcatctgagaaagctgctgcacaaacattctctatatctaaggaactcatatggagtctttgcaactgaaagcatcccgagccaaggctaggtgacaataaactatcctcaagaaggaaaaaagaaaaatcaagaaaatccaattgaataaaaaataaatttaaaaataattagaagaaatagtctatctaaatgagaaggaaccagaaaaataattctggcaatatgaaaaarcagggttttatgatacccccaaaagatcacactaactcaagcagt

SEQ ID NO: 7901 - DNA, 750 bp, Homo sapiens
ctggtctctagtactgaagcagatataggacttagcataaaataagcataaaactagaaaaagtaatgcatttgatccaactacttyggtggtaaaaagttaggattgtactttatgatgtgatcaaggtccaggatagtaaaaatggactattcagagtgcacagaagtgtgccagaaaagtgtgacctggtggcttttttaaagtataataaatctaatggacaaaattagcaaagcctcactttaaaaaaagtagcattacaaatcccaaagaaaaaacttaaaaataacaagaaaaaaactcataaaatagaatgatttttaaaagtttgtactgatttacatttcctaatgtctgtgggtgattttatttattcctttgacaatcatttattcagtgtccagtgccaagcactatgctgggcagagaatacaagataagtctcacatgattcctgtgtacgtggagtaaacagcctaggagaaaagatttctctcacaaagtggaggcataatgcagccttacccttcaatgtatggtttgatgcattatggtggtaagtaatcttataagaaagatagacaactgttagaaattatgtgtttaaagaatttagcgacaagttgggtatggtatggtttgatgcattatggtgtatggtttgatgcattatggtggtaagtaatcttataagaaagatagacaactgttagaaattatgtgtttaaagaatttagcgacaagttg

SEQ ID NO: 7902 - DNA, 750 bp, Homo sapiens
ctggtctctagtactgaagcagatataggacttagcataaaataagcataaaactagaaaaagtaatgcatttgatccaactactttggtggtaaaaagttaggattgtactttatgatgtgatcaaggtccaggatagtaaaaatggactattcagagtgcacagaagtgtgccagaaaagtgtgacctggtggcttttttaaastataataaatctaatggacaaaattagcaaagcctcactttaaaaaaagtagcattacaaatcccaaagaaaaaacttaaaaataacaagaaaaaaactcataaaatagaatgatttttaaaagtttgtactgatttacatttcctaatgtctgtgggtgattttatttattcctttgacaatcatttattcagtgtccagtgccaagcactatgctgggcagagaatacaagataagtctcacatgattcctgtgtacgtggagtaaacagcctaggagaaaagatttctctcacaaagtggaggcataatgcagccttacccttcaatgtatggtttgatgcattatggtggtaagtaatcttataagaaagatagacaactgttagaaattatgtgtttaaagaatttagcgacaagttgggtatggtatggtttgatgcattatggtgtatggtttgatgcattatggtggtaagtaatcttataagaaagatagacaactgttagaaattatgtgtttaaagaatttagcgacaagttg

SEQ ID NO: 7903 - DNA, 634 bp, Homo sapiens
tgtataaaatttcaaaatttgtttagagtcacacagatctgaatctgaagattacctttcagatattgagcaaattttggaataagataataaaagagattttcctacatccagtgctggagacagtgtgaacacggatgtcttattttgctaaggctgtcataacaaataccatgactgcaagtcttgaacaacagaaatttatttgctcacagttctggaggctagaagtcctagagcaggttgttgtcagggatgtagctcttctgcagcctctctccttggcttgtagatgaccatccttctctagtgttttcacatgatctcccctttgtgtctgcatcctaatgccttctcgtaaagacaccagtcatattggattagagcccactctaatgccttcattttatctctttaaagaccagatcttcaaatacagccacattctgaagtattgagggttaagatttcaacacacgaatttgggaggggcacaattcagtccatgacaagggctatgagatacctccaggctgtgcatcytgtgtgtaaatgaagagttctcagccaagttatctgtgctatctcatagtggaatgcccattgtaaagaggaaccgaaaagagaaacatgg

SEQ ID NO: 7904 - DNA, 741 bp, Homo sapiens
tggaggatttgcagcaagaggggaaaagtgagtatggctgggaaaggctgagaagtgggggaaggcatatgaggcagcaggggatatgctgtcaagggacagtgtagatgccagtttgacatgagtaatgagttcatgtggcaagacagagagaaaatcctggaaagttaggttagagcttagctgtacaaagttttaagtacccggttttggagcttattgtcggcggggaggcatgggcttttgtatcatttagacctgagttcattcattaattcttttgtaagtcatttattgaaatgccaggtaccattccaggttctggtgatacagtggggaacacaaaggctagtctctacatttacagaacttacattctagtggattcaaaccctcgctttrttattttccagctgggtaaacttaaacaggttatttaacctttctaagtctcaatttgttcgattgtaaaatagggatagttggacctaaatgaaataatgtaaatcaaagggcctggtatatggctgctatccaagtgtgttagctccccgcttcctcttcctccctgccatccctcttcctctatcttccttccataggttttgagagtctttgttctctcctacatctgttgctctgacagaagagcactgtatcttctaacattcagctacaatttagcggtctccttaggtacttggcctaatgtatttgcttcctagaagtgacatctaattg

SEQ ID NO: 7905 - DNA, 662 bp, Homo sapiens
aatattagctcaggtgggtgggaaaggcctctctgtgacacgtaygctgacacctcctgcatgtccaggagccagcctggctcctgaagtcaggggaagaagctccagacagagaacctgccaggcgccaaggccacggagcaaaaaggagcttggcatgttcaaggaacagaagaaggacagggtggctagggcatagggaaggggcagagttggaaagaatcatatagatccagctggaacttaacccagaattagtgccagctagaaatttagaggtcactggattcaattcccagatttacacttggaaaatctgaagctcacagagaaagtgtgactctctcagggtgacccaacaatcgggagcagagccaggacaggtccctgtgcctgtggacactcctgtgtagtgtcactccactgttcatatctgtcacatgtgtcaaggctcacgtgtgtgcagcacagaccctccagctgattcctgcacatttagtgacccccggagaccagcgtggcccctcatggaggagtcaagtttggaaaaaaagcaacagcagcagaaggtggtaaaagagaagaatgaagaacccagacttcagtgttagccagagctaacctcaagttcacactgccccttattacatctatgaccttgg

SEQ ID NO: 7906 - DNA, 662 bp, Homo sapiens
aatattagctcaggtgggtgggaaaggcctctctgtgacacgtacgctgacacctcctgcatgtccaggagccagyctggctcctgaagtcaggggaagaagctccagacagagaacctgccaggcgccaaggccacggagcaaaaaggagcttggcatgttcaaggaacagaagaaggacagggtggctagggcatagggaaggggcagagttggaaagaatcatatagatccagctggaacttaacccagaattagtgccagctagaaatttagaggtcactggattcaattcccagatttacacttggaaaatctgaagctcacagagaaagtgtgactctctcagggtgacccaacaatcgggagcagagccaggacaggtccctgtgcctgtggacactcctgtgtagtgtcactccactgttcatatctgtcacatgtgtcaaggctcacgtgtgtgcagcacagaccctccagctgattcctgcacatttagtgacccccggagaccagcgtggcccctcatggaggagtcaagtttggaaaaaaagcaacagcagcagaaggtggtaaaagagaagaatgaagaacccagacttcagtgttagccagagctaacctcaagttcacactgccccttattacatctatgaccttgg

SEQ ID NO: 7907 - DNA, 762 bp, Homo sapiens
agatccggggcagcacttgtgggaggggatggcggtgggagtggggacacggggtgacggaaggggtaccttttctgcaatgccgttttccgtagtgtagatcgccatgagctcagtgtcctcattgtcctgctcaccgctggaggtggcgcctccatttatcaccacctgcagagacaatccacttagaggctgtttcagcgtgaaccacattttcctccccccgaaagccatttgtaattctcctggtgagtgcatgaccaggcatggttttgatggagaaacatactccatgtaccgtatggggaggctgccttagcagaaggctcagccggggagaaaagaaataaaatcccagggcaacctcagcaggggcacccccacatcctycaggggaagggaagtttggctcagaggcccatgctgtttgtggacgaggcccaggctgaacaggtgagagtaccctgagctgcctcggttaagatccctgcccacataaccacctgaggccgacttcctgcacctagaaggggaaatgttctagctggaggaactcaagctttgctgttcacctaagtaaaccagcccactggagaacactcctcggtaaggggccacaccatcgtcccgggttctgccagccagtagcaagagccataaaatatttttactttttagccaaacggttccacttctaggaatctatactggagaacaataatgagaacaaaagctttaacccaaagaaagtaatcactgttt

SEQ ID NO: 7908 - DNA, 661 bp, Homo sapiens
ttgtaaaatgattgtttatagtggtgttcttgagaccagagggaatgattaaattagaatcagtatgtctgcatgataaagctaggaaatttataatatatttgaggcatatcttcaagacaaagtgttaaataacttcagtatttcaaaatgcaatgtattcccttgcttttggcaggctgcctgaaatgagctgccatggtgtttgagtacaagatacttgttaaagtgcatttgttatctgaggtcactaatgtaaaaatttgcaaattaatatattagaagccatgtataacttaaaacagtaatgcttatccaatggaaacaatttacttctctaawgtatttatagattgaagtctggtggtcaatggttaaaggatttgttaactgggaaacataacacaattcattaatcaaacatgaggatattttagtcatttagctatgtttatacttcatatattttttctaatttttaatctatattgtaattgttcaggttcatctgaatgttatcagttgaaatgttgagtttttttccctaataattttggttagttggcttttttcttggtagaagtagaagagatcatttctttgaattttatttgtaaactgataaagtcatttaggattttagactatggagagataatat

SEQ ID NO: 7909 - DNA, 661 bp, Homo sapiens
ttgtaaaatgattgtttatagtggtgttcttgagaccagagggaatgattaaattagaatcagtatgtctgcatgataaagctaggaaatttataatatatttgaggcatatcttcaagacaaagtgttaaataacttcagtatttcaaaatgcaatgtattcccttgcttttggcaggctgcctgaaatgagctgccatggtgtttgagtacaagatacttgttaaagtgcatttgttatctgaggtcactaatgtaaaaatttgcaaattaatatattagaagccatgtataacttaaaacagtaatgcttatccaatggaaacaatttacttctctaaagtatttatagattgaagtctggtggtcaatggttaaaggatttgttaactgggaaacataacacaattcattaatcaaacatgaggatwttttagtcatttagctatgtttatacttcatatattttttctaatttttaatctatattgtaattgttcaggttcatctgaatgttatcagttgaaatgttgagtttttttccctaataattttggttagttggcttttttcttggtagaagtagaagagatcatttctttgaattttatttgtaaactgataaagtcatttaggattttagactatggagagataatat

SEQ ID NO: 7910 - DNA, 654 bp, Homo sapiens
tttttttgtgcgaagcagttgaaccatattatagaaatatttttaaaatgctggaagaagaagtatagtttttatcacttcatgtcttcttactggtatatttctttccaataatatcaccatgggcttgttttttctaattcctcatattgtgcattttttgaatatgtagcttttcacctcatttggtcaactaagttaaaccagtgctttctacctttacctagtacaaataagtaaaatttggggggtttaggaagcaacaattaagctacctattggattctgacttattcacaccagtttaccagactgaacgcttagggaatccatcttcaagtcagattctttccattctcattgacattgatgcgtgaggyagggtgctcagtagtagctggagctgagtgatgggaccaacatgtatcataagcatttgtaccttttcctaaaataatcttcaaaataaccagtattttttatgtccgcatagtatttaatggaatcagtgttccgttgttaacatagttatagtcctaatggttgggaatcccttccccttccctttcctcttccctttctctttctctttcctttcttttttttatttttatttttatttttttgcttggctattaaacataaggataaggt

SEQ ID NO: 7911 - DNA, 775 bp, Homo sapiens
tttctgagcagtgtataaatttgatcagaaatgttggcagtctttggtaccaaagcatgaaatcgagaaataatgaagcatgaagcttctttttttaccaaaccagagaaaccagatgttattacagagacctgtctttacagagtactgagatttttttcctagtcaaatgtggstgctaacactaacacacacaaacgacaattttgaagaggttgacaatctctaaaatttcaaacaggagcccttaaagtagtcaggcttttgtgactgcatcagcagcacataatgcactaaactcaggaagtggatgtgatgcaggagaatagggtctggaggcaggcagcacgagtctgattcatgctgacttactagaacgagatcaaatggaaacacttcagcaatgacataaatgtgaatggctttgcaacttcacttcatcctctccatttacaaaggcaacatgcaccatgttacatcttctccatttacgtaggccacaggcaccaagcaacatcctctccatttacatagggcacgtactgagtaaatgactttgtaacttgacttcattctcttcatttacatagggcatacagcaagtaaccaatgagaaacctcgagagagtattgaaaccccagaaaattctgtaaccaggactcttgagcccctgtgctcgggcccactcccacactatggagtgtactttcattttcaaaaagaaaatcttaaatctctgcttttgttgcttcactctcctggcttttttttttg

SEQ ID NO: 7912 - DNA, 812 bp, Homo sapiens
aagaagaaataacaaaaaaggataaaatacttttacttgaaggaaatagattagttgttatactaaatacaaatggtctgaaatcctctattgaaagacagagactgtaagtctgggttaaaaaataaaatccaattatctattacatacaagaaatacacttagaaaaaagcacttaaaagaagcagttgagtttctgtgacacttcaaggttattgattttaaaagagctaatagcactcacctttgccctacttttttttcttctgcagttgttattatttttgtcagtttgatgttttctaactaaagctacataaaatatcaaggtatttctaaaaattaattcctagcaagtggaaattctttcaagtagtataaattggtgagaataataataataattcactatgtatatggccaagcatttgttcagagtaaaacaatgattttaataacataattttatataaacttaaaaaccagttttcttaaagcaacaggaaaacattataggaaaaaatatttttatgaccattttttaatgacatacatgggacacagcacgtcctatcgtacttgctagtatcgtaaactagcttgctatatatatttyagcctagtacgcgtgcatagtaaatgtttgatgacttttgaatgaatggattttaatagaatattctttaaatttgggtgttttacttcctttccatgggaaattgggtctgtgcttagcatagagcaataattcagtttataattttaatttgattaatttttgactcaaagataaaaattccaacactgcttgg

SEQ ID NO: 7913 - DNA, 812 bp, Homo sapiens
aagaagaaataacaaaaaaggataaaatacttttacttgaaggaaatagattagttgttatactaaatacaaatggtctgaaatcctctattgaaagacagagactgtaagtctgggttaaaaaataaaatccaattatctattacatacaagaaatacacttagaaaaaagcacttaaaagaagcagttgagtttctgtgacacttcaaggttattgattttaaaagagctaatagcactcacctttgccctacttttttttcttctgcagttgttattatttttgtcagtttgatgttttctaactaaagctacataaaatatcaaggtatttctaaaaattaattcctagcaagtggaaattctttcaagtagtataaattggtgagaataataataataattcactatgtatatggccaagcatttgttcagagtaaaacaatgattttaataacataattttatataaacttaaaaaccagttttcttaaagcaacaggaaaacattataggaaaaaatatttttatgaccattttttaatgacatacatgggacacagcacgtcctatcgtacttgctagtatcgtaaactagcttgctatatatatttcmgcctagtacgcgtgcatagtaaatgtttgatgacttttgaatgaatggattttaatagaatattctttaaatttgggtgttttacttcctttccatgggaaattgggtctgtgcttagcatagagcaataattcagtttataattttaatttgattaatttttgactcaaagataaaaattccaacactgcttgg

SEQ ID NO: 7914 - DNA, 812 bp, Homo sapiens
aagaagaaataacaaaaaaggataaaatacttttacttgaaggaaatagattagttgttatactaaatacaaatggtctgaaatcctctattgaaagacagagactgtaagtctgggttaaaaaataaaatccaattatctattacatacaagaaatacacttagaaaaaagcacttaaaagaagcagttgagtttctgtgacacttcaaggttattgattttaaaagagctaatagcactcacctttgccctacttttttttcttctgcagttgttattatttttgtcagtttgatgttttctaactaaagctacataaaatatcaaggtatttctaaaaattaattcctagcaagtggaaattctttcaagtagtataaattggtgagaataataataataattcactatgtatatggccaagcatttgttcagagtaaaacaatgattttaataacataattttatataaacttaaaaaccagttttcttaaagcaacaggaaaacattataggaaaaaatatttttatgaccattttttaatgacatacatgggacacagcacgtcctatcgtacttgctagtatcgtaaactagcttgctatatatatttcagcctagtacgcgtgcatagtaaatgtttgatgacttttgaatgaatggattttaatagaatattctttaaatttgggtgttttacttcctttccatgggaaattgggtctgtgcttagcatagagcaataattcagtttataattttaatttgattaatttttgactcaaagataaaaattccaacaytgcttgg

SEQ ID NO: 7915 - DNA, 820 bp, Homo sapiens
acaggcccagaggtgttctggagctccctagtgccagyaatcctgataagatgtggtgtcaaaatgatgatctgagctctgtgaggggcagtgtgtgggaagtcaaaggaaatcagctagtattccttcatagagttctagaaaccaaaaccaagaaatgcctgaaattagtgctattctaaaagcaacaacaaaaactgcctgtggtccagagaattgcctccagatccatacataacacacgtgcttcattataccttatcataagtgtgctcttccactaacccacactgacagacacaaatatacttagtgaagtggagtctggggctccatgagccccagggactgggttgctgagtcagccttggggtataccacttatgcctcagtccccatgctgtctctccatggtaggcagctcaaagggtttgaacatcgtggtgctaatgccaagctctcaggccccatcccactgtggcacttcatcgggttggccaggatgaactggcctggccaagtgttgactgctagtgatgggcagaatccagctacatcatttgttgagtgaggggcaaatccctactaatctttatcatgtggcaaaaaaacccaaaacaaaaccctgacccacagtccatgctttatggacagggtcaaagcatgattgtcacatcaaacataaagttctctactgaatgtattagagtcccaaaatgccactgttctcagtccagcaagtgtaccaaggacccccatcctctcagattgccaacaagtcctattcacctgcttttataagacaagatcccacactaaa

SEQ ID NO: 7916 - DNA, 624 bp, Homo sapiens
aatgatttcacctcattgttgatcattttgtagccatgatattttttagagtttgcaaaaatggtgacttttaattatataatttctgctgcgtttattatcaagaatttttttcataaagatcttttcatagtaactaatggtcaacttcaaaayatagtttatatcagaaaaagggaaaaaatgcatgatatttatcaattttcagaatcagatattctcttctaacataagatctaaataagcttacacatataatcaaggatgccagtaaatttttctaaaaaatttttcccttgggaaaattatttatttatttatttatttatttatttatttatttattgagacagagtttcactattgtctcccaggctggagtgcagtggtgcaatcttggctcactgcaacgtctgcctcctgggttcaagtgattctcctggcttagcctcccgagtagctggaattacaggcatgcaccaccatgcccagctaatttttttgtgtgtattttttaatagagatggggtttcactatgttgctcaggctggtcttgaactctggcctcaagtgatcctccccacttggcctcccaaagtgctgggattacaggcatgagccac

SEQ ID NO: 7917 - DNA, 624 bp, Homo sapiens
aatgatttcacctcattgttgatcattttgtagccatgatattttttagagtttgcaaaaatggtgacttttaattatataatttctgctgcgtttattatcaagaatttttttcataaagatcttttcatagtaactaatggtcaacttcaaaacatagtttatatcagaaaaagggaaaaaatgcatgatatttatcaattttcagaatcagatattctyttctaacataagatctaaataagcttacacatataatcaaggatgccagtaaatttttctaaaaaatttttcccttgggaaaattatttatttatttatttatttatttatttatttatttattgagacagagtttcactattgtctcccaggctggagtgcagtggtgcaatcttggctcactgcaacgtctgcctcctgggttcaagtgattctcctggcttagcctcccgagtagctggaattacaggcatgcaccaccatgcccagctaatttttttgtgtgtattttttaatagagatggggtttcactatgttgctcaggctggtcttgaactctggcctcaagtgatcctccccacttggcctcccaaagtgctgggattacaggcatgagccac

SEQ ID NO: 7918 - DNA, 1567 bp, Homo sapiens
gaaggcaggaatttttgtttatttttaaaaagatatggtagaaagagttaggaaacactgccttagggatatgatgattccaaatcctgataaccccaaaatatctgatactgtctgctttccctcccactggtctcaaatgttcccctgcaaagtcactagagattagaccttgacgagaaaagcaattagaaatgaaaagataaaacacacgcgacacctaagtcggtggttccacmgtcttgctaagagcacgtcggtaggaataaaaatttaagtggagaaagttgacaccttgggccaaaaggaatgagatacatttcagaggtaagcagcatgggagactctaaccttgtgagacgcctttggatgaaaagaccggatgctgaaagggacgggaggtaatatttccttactagacagtttggcctgggacaaatcccagttcttactcttacctgtcttgacagcctcccagcctacttctcacttgcccctccttctcctccccaccaggtggccatcaggcgcaggtgcaggcccagcccctacgtggtaaactttctggtgcccagtggcattctgattgccatcgatgccctcagtttctacctgccactggaaagtgggaattgtgccccattcaagatgactgttctgctgggctacagcgtcttcctgctcatgatgaatgacttgctcccagccactagcacttcatcacatgcttcactagtacgtcctcatccatcaagagaccaaaagcgaggtgtgtgttggatggggagagggatgggcagaaccaggcgaagtgaaaagggatcctggaaaaagatcctctgggaaagaaacaagaaattctaggtggcgcctctggccctcatgcagacccccttgcctgcaggtgtctacttcgccctgtgcctgtccctgatggtgggcagcctgctggagaccatcttcatcacccacctgctgcacgtggccaccacccagcccctacctctgcctcggtggctccactccctgctgctgcactgcaccggccaagggagatgctgtcccactgcgccccagaagggaaataagggcccgggtctcacccccacccacctgcccggtgagggaagtcatacttcctcttcccccacctccacttctctgctcctgcctccttccctgtctccctccctccacaggtgacatttgcagcccatggctgagtctctgtctttctgtaggtgtgaaggagccagaggtatcagcagggcagatgccaggccctggggaggcagagctgacagggggctcagaatggacaagggcccagcgggaacacgaggcccagaagcagcactcggtggagctgtgggtgcagttcagccacgcgatggacgccctgctcttccgcctctacctgctcttcatggcctcctccatcatcaccgtcatatgcctctggaacacctaggcaggtgctcacctgcaaacttcagtctggacttctttttgccagagaactccagaaaccagtcaggctctcagtcagccttgtggccctgtcaac

SEQ ID NO: 7919 - DNA, 772 bp, Homo sapiens
acctcagtttcctctgctgtctttccagagcacccccaataagttcagctctgtctgcagagtctagaggtatatgctggacatgtcatcacttgctgacctagggtccaagaggtcaagatgagatagaggaagggatttactgaggcccaggccacagagcttgttccatggtggctggtagaggggcctgtctcctgtttccccaaactgctagagatgtgtaaggcttttgagcaggggtagaggatgctgtgtggagttttagctgccagactttgaaaaaaacctcttcagaaagatatctggataccttggttcctaggggtcgtatcctcaagaaatcttagggtgcttcctagcaacagtctggaaggaagggagggagagatggagggagagagggaggggcctaggcatggctgttctgatgggagcccagagaacaggctgttcctgctacctccttagcaacggaaatctcagctggaggggccatcagacatatcctcttggagggtctatccagccttattcatgccacccctaccctcctcatagattcggggaatgctctgaagcagaggtggggaatgggaggggacagccctggtggtggtggggggtttcatgacaaggacggaaaaggagctgaggatgaactcaatctgagaagagctagcagcttcaagaaatgggtgggcagggtgagtggggtgggaggacagatgrggcaacacagggacagtggctatacgcccagacatgggct

SEQ ID NO: 7920 - DNA, 1385 bp, Homo sapiens
cctaagaatgtggtttgagtgtttttagatgtaataaacaaggccatttgcgtctcatgacccgagcacaaatagccacctcgtagatatttcttgtttgcctgaattgtagttcaacaaaccttctcaataaatacgtggcagacggatctttttagatccatctttgtagatgctttagctcaggctcaggtggacggccgtctttttcctcattgctcgcagcactcccttggaggagttgctcctcaccccattcagctataattgtctgaatacttatttctcggtgttcactgcagaccaacctgcaagtggtgaccctgacatgattgcctttaagttaaacgcatggagtaggatgactcaccagtcttcggggaataccggtaagggacagtcccgacccgttttcaggacaggaccaacccgtataatactaggggttgggttaccatgggctaggagttgaccaaaaagcagraagtattttttaaaacagtgcaacaattacttaaggctatccagttcacggtagagtctggagctttgcataagcttgtgcttttaatttggcaggaatgcccttggttccctgatcaaggaacattagagttatgggagcaggtgggatgctgcctgaaaagaggatttgagcagggcaattttaccaaaccacctggagtctggtacgctctgcgttgtaccctctttatattccagatcgtagtcagtcagatcgcccattttcttcacctgaagggaattcagaagatttacagggaaaggaaacacaggaaccagaacaacagggaggggctcctccccccactttattcccttcagtgcagcataaagaagagactttttctcgcaatgatgaggacggaccagagccttttcctcccccaagagaaaagccattgccctcttttcctccacccttaagaagaccttcattcattggccccgttcaggcaacagcatctcccacccaccttgaggagattggaggccacccaagagacggttcttggataagacctccagccagcgaacatctatctatatgactgggtggccgcatcccctcgacaaacttccctactagagagatgcctccaggagggacttagggagaccctgaggcgctttttggtgcattccctgccattgttcaaaataacaggagacagcatgaaagcttgcctgtcactgtctttaaggagtcaaaaaaaagtatctgcgaaaatggtgtacattcatcctttactcgggatggttgaggctctgggaaatggttatgagatgattctgcatgattggaaaactctggtaaaagttttggtctcagctgctgaatatactgtgtagtggagtgagta

SEQ ID NO: 7921 - DNA, 1385 bp, Homo sapiens
cctaagaatgtggtttgagtgtttttagatgtaataaacaaggccatttgcgtctcatgacccgagcacaaatagccacctcgtagatatttcttgtttgcctgaattgtagttcaacaaaccttctcaataaatacgtggcagacggatctttttagatccatctttgtagatgctttagctcaggctcaggtggacggccgtctttttcctcattgctcgcagcactcccttggaggagttgctcctcaccccattcagctataattgtctgaatacttatttctcggtgttcactgcagaccaacctgcaagtggtgaccctgacatgattgcctttaagttaaacgcatggagtaggatgactcaccagtcttcggggaataccggtaagggacagtcccgacccgttttcaggacaggaccaacccgtataatactaggggttgggttaccatgggctaggagttgaccaaaaagcagaaagtattttttaaaacagtgcaacaattacttaaggctatccagttcacggtagagtctggagctttgcataagcttgtgcttttaatttggcaggaatgcccttggttccctgatcaaggaacattagagttatgggagcaggtgggatgctgcctgaaaagaggatttgagcrgggcaattttaccaaaccacctggagtctggtacgctctgcgttgtaccctctttatattccagatcgtagtcagtcagatcgcccattttcttcacctgaagggaattcagaagatttacagggaaaggaaacacaggaaccagaacaacagggaggggctcctccccccactttattcccttcagtgcagcataaagaagagactttttctcgcaatgatgaggacggaccagagccttttcctcccccaagagaaaagccattgccctcttttcctccacccttaagaagaccttcattcattggccccgttcaggcaacagcatctcccacccaccttgaggagattggaggccacccaagagacggttcttggataagacctccagccagcgaacatctatctatatgactgggtggccgcatcccctcgacaaacttccctactagagagatgcctccaggagggacttagggagaccctgaggcgctttttggtgcattccctgccattgttcaaaataacaggagacagcatgaaagcttgcctgtcactgtctttaaggagtcaaaaaaaagtatctgcgaaaatggtgtacattcatcctttactcgggatggttgaggctctgggaaatggttatgagatgattctgcatgattggaaaactctggtaaaagttttggtctcagctgctgaatatactgtgtagtggagtgagta

SEQ ID NO: 7922 - DNA, 795 bp, Homo sapiens
ctaggcaacaagagtgaaactccatctcaaaaaaaaaattaatgttttctgggtgagactacatctatctaatgaatggagagaaattaagtgcagcaagagtagaacaagagtagaacatggtggagccgatttgttggctgaggtttgggtgattggctgattccaaacccagcacagcaagagctgcatgtccccacccagcctctctcctcagcaccgtgacctgcaccccgtcctctccctgctggggctacacagtggctggagagtagcaatcatgtgaaagttgttcctgctcagcacacaccattgaaaacctgaagcagacttcttttttcttttcttttttaaaaaatttccctctgaaaaccttgtacaaggcatctgtgtgtggccaacttctctggatatgaaggtaataagaaggtaacgcttgattcaactgtaggcctaacttgcctaggacaaccctggtttatatatgatgttattattaatcgcatcacmttttactctcaaagggtccaggtttgggtcataaattatatggtagctctagttatattgcctcttcagacagcacataacttatcaactggaatatttatttggctttcctgttttcaaaaagctttaaggttgtcagagcaggctccacactgccggtggcaccatgacaatgttaacaagtgtgctcttctcagccctgtggaacaggtgacttaagctgggccaaccacactacctggcctcagtgactggtctgcgggagtgggcatgtggcctaagcca

SEQ ID NO: 7923 - DNA, 392 bp, Homo sapiens
cctgaggtcaggagttcgagaccaccctggccaacacggtgaaactccatctctattaaaaatacaaaaattagccgggtgyggtggtaggcacctgtaaccccagctactcgggaggctgaggcacaagaatcgcttgaaccctggggatggaggttgcagtgagctgagatcataccacagcactccagcctgggtgacagaataagactctgtctcaaaaccaaaccaaaccaaaaactcactgaactgaatacttaatgtacactgcatttttattgtatgtaaattatgccttagctacaaaaattccttctaggcaagaaagaaaggaagggccactcttcttcttacccatgttctttttagttttcccaactacgtgtccattt

SEQ ID NO: 7924 - DNA, 805 bp, Homo sapiens
tgtataaaactagttcataatcatttttatgttttaacaaccaatatgttatatttttatacaatggctgaatattagtcccagtctatagatttgcttccaatgttcccaatagtgaatttttgtaacacacaaggtttcagaaaataaatcttcatagttctaaaggatacactaaatcctgatgaagttaaatctatcacatctctttgtaccaccagtatcaataaaacacagaaaaatctacctgttctagaattgaatatgagatgygtgtgtctgcatgtgctggaaacggtgggtaaaatgtgtgcatttcagcgttctaagcccttaaatgtatgattcaaatgtctcagctttattagactttaaatacgaatattgtcacattaattgtaaagtcttatttcctgtatttaactaccacctttacttgcaggcttctaccccaccctacccatggtatttctgataattcttggagcgtgcttgtgatgtgcttatgaagcagaacagcagttcacaggagccacatgacttgctctatgtgcttaatgtctaactttcctaccctttttatgacgctctacacaagaggtttctagactgtgcctcacatgctgatactgctgatgttttcaggacactgaaataaactgcatggtttcttttataaactttataaactgtatggtttctgctgcttcctgacctggacttcaggtaccaaattctctctgtactgaagagcgaaattctaattattaaccctgtgtggtacactgtcactaacatggagcag

SEQ ID NO: 7925 - DNA, 619 bp, Homo sapiens
aaaaaaaaaaatatgccacaggttctaaaggtcattccaaagtaagaatttgcaaaagactagccaatagagtccttgaaataaacatgtggctccctttcttaaagaaggcaaaacttgtttatataatgtaaacattcattatggttgttaaaaattcagccatattactttgtgrttatagctcaaaactgctattgctttgtactttctaacttaaagatgacaagattaagtagtataactaaattataataattcagagaaaagggaagggtgtatatttgtgtttgttcatatatttgtttgtgtatatgtgtgtgtgtgacagagaaagtgatagatagagagatagagaaaaaatgagagacatttatttctacctctgagcagctgccagttctaccttcctacctcctactttaatgtaatctatcttggatcttataacaattgactcggtcattgattcatgtgagaagcagcactgattcctctaaaaggttgtctatttattcattaaatgtcacccaccttgtcatataccatagcatgagagcaccttacctgacccttgggaacattgagataaatgcagtcacttcatttcctcctgcat

SEQ ID NO: 7926 - DNA, 619 bp, Homo sapiens
aaaaaaaaaaatatgccacaggttctaaaggtcattccaaagtaagaatttgcaaaagactagccaatagagtccttgaaataaacatgtggctccctttcttaaagaaggcaaaacttgtttatataatgtaaacattcattatggttgttaaaaattcagccatattactttgtgattatagctcaaaactgctattgctttgtactttctaacttaaagatgacaagattaagtagtataactaaattataataattcagagaaaagggaagggtgtatatttgtgtttgttcatatatttgtttgtgtatatgtgtgtgtgtgacagagaaartgatagatagagagatagagaaaaaatgagagacatttatttctacctctgagcagctgccagttctaccttcctacctcctactttaatgtaatctatcttggatcttataacaattgactcggtcattgattcatgtgagaagcagcactgattcctctaaaaggttgtctatttattcattaaatgtcacccaccttgtcatataccatagcatgagagcaccttacctgacccttgggaacattgagataaatgcagtcacttcatttcctcctgcat

SEQ ID NO: 7927 - DNA, 619 bp, Homo sapiens
aaaaaaaaaaatatgccacaggttctaaaggtcattccaaagtaagaatttgcaaaagactagccaatagagtccttgaaataaacatgtggctccctttcttaaagaaggcaaaacttgtttatataatgtaaacattcattatggttgttaaaaattcagccatattactttgtgattatagctcaaaactgctattgctttgtactttctaacttaaagatgacaagattaagtagtataactaaattataataattcagagaaaagggaagggtgtatatttgtgtttgttcatatatttgtttgtgtatatgtgtgtgtgtgacagagaaagtgatagatagagagayagagaaaaaatgagagacatttatttctacctctgagcagctgccagttctaccttcctacctcctactttaatgtaatctatcttggatcttataacaattgactcggtcattgattcatgtgagaagcagcactgattcctctaaaaggttgtctatttattcattaaatgtcacccaccttgtcatataccatagcatgagagcaccttacctgacccttgggaacattgagataaatgcagtcacttcatttcctcctgcat

SEQ ID NO: 7928 - DNA, 2430 bp, Homo sapiens
gtgtcattaaagacaatgaggcagatctctatctgcaaataagaaatgaactccaaggtataccattaaggtgcaagcaagtcagttctgtatatgtaaatgtaaaggttattctggaggaaacggatatcaatggttttacatgaataatatcaaagaaaacaaaacccagcctgcctgtgaagtcttgactcttttcagtttatacacccacaaaatatctgatggagtttcagccctgtttcccatctccctccaatctcatttaaaaacaaactccaagtcctccaagtcttcaaaaacaaaacaaaatactgccacccccaacacaaacaaaagactgaaagcgtaaacccaactgcgctcttttaaaaaatgcaaaaccaccagcttctttacatttcctgaactgctaatttgcagtctttccccagagagatcaccacccaggaatcaagctgaagtgctttctcccatgccggtaagtcatggcggcaaacccacaagtccccacaaatctgggggttaagttgacattctttgccttggggatcccaaagacacaagcatcctgagtctcctcagccacggaattcccccagtttcatggctacagtttgcctatgatgatgtcaatcttcccacctctgatgcccatatctcagaggtagtaacaggctcagcttagagttacaagcacgagcattaatgattgtttaaaatgtgacacacactctgttgtcaaggctttgggaaatcccactctcttacattgctgccaaatacaacctctttgaatggcagtttgacaatatctacctccaaatttaaaatacatatatcttggcctgacaattcaaatgtcaggactttctcctgcaggtaacctgaaaggaacatccttaaacacatacaaaactcttctttgcagggttctgaatatctgaatatcaagagattgagaaaatcttaagtacccatcaatagaagactattaaatcaactatggcacatccatacaacggaattctgggcaggcattaaataagcaggagattagagctaaaaagaccagaccagtgaggaatgctcttaaagatacagtgttaaatttaaaagcaaggtggagcacacccatttagaaatataattataagtccatcctacagcttcatcatgcattcatccatgtttccacataagcttggagatgcactgaacagctctggaaaattattcaagatatcagtaccagtggttacttctaggaaagggggctggaaggctagaaattgggtgggaaggaagcttactttttattgtatattccttcatattagattgctattctttatttatttatttttgagacagggtctcgctttgttgcccaggctggagggcagtggtgtaataacagctaactgcaacctccaaggcctgggctcaagttatcctcaagctttggcctcctgagtaactggactacaagcacacaccaccgtgactggctaattttttaactttttgtagaaacggtgtctcactatgttgctcagggtggtctcaaactcccggcctcaagcaatccttccaccttgacctcccaaagtgcagagtttataagcatgaaccactgtgcctggactaaattattattttttaacaatgttttttgcatcaattttaagaaaagagtaaggtctttgaagtcagactgtctgattctctacttggctttgtgatcgtgggcaagttacttactctctctgagtcatagtttctgcatctattaaataggggtgataatagtgcctacatagatagggtgtctgaggatacaaagagataatagttaatgttttctccttttttatttatgtatttattttgagacggagtctcactctgtcacccaggctggagtgtggtggcgcaatctcggctcgctgcaacctctgcctcccaggttcaagtgattctcctgcctcagcctcctgagtagctgggactacaggcacccgccaccactcctggctaatttttgtattttaatttttaaatttctattatttttattcttttttgagacgtaatcttgctctgttgcccrggctgagtgcagtggcgtgatcttggcttactgcaacctctgcctcccaggttcaagtgatcctcctgcctcagcctcctgagtagctgatatcacacctggctatttttttttttttttttttttttgtatttttagtagagatggggtttcaccatgttggccaggctggtctcgaactcctatcctcaagtgatccacctgcctcggcctcccaaagtgctgggattacagacatgagccactgtgcccagccaatagttaacgttttctatgttattacaatgcaccatagactaggtaagtgcccaggaaat

SEQ ID NO: 7929 - DNA, 2430 bp, Homo sapiens
gtgtcattaaagacaatgaggcagatctctatctgcaaataagaaatgaactccaaggtataccattaaggtgcaagcaagtcagttctgtatatgtaaatgtaaaggttattctggaggaaacggatatcaatggttttacatgaataatatcaaagaaaacaaaacccagcctgcctgtgaagtcttgactcttttcagtttatacacccacaaaatatctgatggagtttcagccctgtttcccatctccctccaatctcatttaaaaacaaactccaagtcctccaagtcttcaaaaacaaaacaaaatactgccacccccaacacaaacaaaagactgaaagcgtaaacccaactgcgctcttttaaaaaatgcaaaaccaccagcttctttacatttcctgaactgctaatttgcagtctttccccagagagatcaccacccaggaatcaagctgaagtgctttctcccatgccggtaagtcatggcggcaaacccacaagtccccacaaatctgggggttaagttgacattctttgccttggggatcccaaagacacaagcatcctgagtctcctcagccacggaattcccccagtttcatggctacagtttgcctatgatgatgtcaatcttcccacctctgatgcccatatctcagaggtagtaacaggctcagcttagagttacaagcacgagcattaatgattgtttaaaatgtgacacacactctgttgtcaaggctttgggaaatcccactctcttacattgctgccaaatacaacctctttgaatggcagtttgacaatatctacctccaaatttaaaatacatatatcttggcctgacaattcaaatgtcaggactttctcctgcaggtaacctgaaaggaacatccttaaacacatacaaaactcttctttgcagggttctgaatatctgaatatcaagagattgagaaaatcttaagtacccatcaatagaagactattaaatcaactatggcacatccatacaacggaattctgggcaggcattaaataagcaggagattagagctaaaaagaccagaccagtgaggaatgctcttaaagatacagtgttaaatttaaaagcaaggtggagcacacccatttagaaatataattataagtccatcctacagcttcatcatgcattcatccatgtttccacataagcttggagatgcactgaacagctctggaaaattattcaagatatcagtaccagtggttacttctaggaaagggggctggaaggctagaaattgggtgggaaggaagcttactttttattgtatattccttcatattagattgctattctttatttatttatttttgagacagggtctcgctttgttgcccaggctggagggcagtggtgtaataacagctaactgcaacctccaaggcctgggctcaagttatcctcaagctttggcctcctgagtaactggactacaagcacacaccaccgtgactggctaattttttaactttttgtagaaacggtgtctcactatgttgctcagggtggtctcaaactcccggcctcaagcaatccttccaccttgacctcccaaagtgcagagtttataagcatgaaccactgtgcctggactaaattattattttttaacaatgttttttgcatcaattttaagaaaagagtaaggtctttgaagtcagactgtctgattctctacttggctttgtgatcgtgggcaagttacttactctctctgagtcatagtttctgcatctattaaataggggtgataatagtgcctacatagatagggtgtctgaggatacaaagagataatagttaatgttttctccttttttatttatgtatttattttgagacggagtctcactctgtcacccaggctggagtgtggtggcgcaatctcggctcgctgcaacctctgcctcccaggttcaagtgattctcctgcctcagcctcctgagtagctgggactacaggcacccgccaccactcctggctaatttttgtattttaatttttaaatttctattatttttattcttttttgagacgtaatcttgctctgttgcccaggctgagtgcagtggcgtgatcttggcttactgcaacctctgcytcccaggttcaagtgatcctcctgcctcagcctcctgagtagctgatatcacacctggctatttttttttttttttttttttttgtatttttagtagagatggggtttcaccatgttggccaggctggtctcgaactcctatcctcaagtgatccacctgcctcggcctcccaaagtgctgggattacagacatgagccactgtgcccagccaatagttaacgttttctatgttattacaatgcaccatagactaggtaagtgcccaggaaat

SEQ ID NO: 7930 - DNA, 2430 bp, Homo sapiens
gtgtcattaaagacaatgaggcagatctctatctgcaaataagaaatgaactccaaggtataccattaaggtgcaagcaagtcagttctgtatatgtaaatgtaaaggttattctggaggaaacggatatcaatggttttacatgaataatatcaaagaaaacaaaacccagcctgcctgtgaagtcttgactcttttcagtttatacacccacaaaatatctgatggagtttcagccctgtttcccatctccctccaatctcatttaaaaacaaactccaagtcctccaagtcttcaaaaacaaaacaaaatactgccacccccaacacaaacaaaagactgaaagcgtaaacccaactgcgctcttttaaaaaatgcaaaaccaccagcttctttacatttcctgaactgctaatttgcagtctttccccagagagatcaccacccaggaatcaagctgaagtgctttctcccatgccggtaagtcatggcggcaaacccacaagtccccacaaatctgggggttaagttgacattctttgccttggggatcccaaagacacaagcatcctgagtctcctcagccacggaattcccccagtttcatggctacagtttgcctatgatgatgtcaatcttcccacctctgatgcccatatctcagaggtagtaacaggctcagcttagagttacaagcacgagcattaatgattgtttaaaatgtgacacacactctgttgtcaaggctttgggaaatcccactctcttacattgctgccaaatacaacctctttgaatggcagtttgacaatatctacctccaaatttaaaatacatatatcttggcctgacaattcaaatgtcaggactttctcctgcaggtaacctgaaaggaacatccttaaacacatacaaaactcttctttgcagggttctgaatatctgaatatcaagagattgagaaaatcttaagtacccatcaatagaagactattaaatcaactatggcacatccatacaacggaattctgggcaggcattaaataagcaggagattagagctaaaaagaccagaccagtgaggaatgctcttaaagatacagtgttaaatttaaaagcaaggtggagcacacccatttagaaatataattataagtccatcctacagcttcatcatgcattcatccatgtttccacataagcttggagatgcactgaacagctctggaaaattattcaagatatcagtaccagtggttacttctaggaaagggggctggaaggctagaaattgggtgggaaggaagcttactttttattgtatattccttcatattagattgctattctttatttatttatttttgagacagggtctcgctttgttgcccaggctggagggcagtggtgtaataacagctaactgcaacctccaaggcctgggctcaagttatcctcaagctttggcctcctgagtaactggactacaagcacacaccaccgtgactggctaattttttaactttttgtagaaacggtgtctcactatgttgctcagggtggtctcaaactcccggcctcaagcaatccttccaccttgacctcccaaagtgcagagtttataagcatgaaccactgtgcctggactaaattattattttttaacaatgttttttgcatcaattttaagaaaagagtaaggtctttgaagtcagactgtctgattctctacttggctttgtgatcgtgggcaagttacttactctctctgagtcatagtttctgcatctattaaataggggtgataatagtgcctacatagatagggtgtctgaggatacaaagagataatagttaatgttttctccttttttatttatgtatttattttgagacggagtctcactctgtcacccaggctggagtgtggtggcgcaatctcggctcgctgcaacctctgcctcccaggttcaagtgattctcctgcctcagcctcctgagtagctgggactacaggcacccgccaccactcctggctaatttttgtattttaatttttaaatttctattatttttattcttttttgagacgtaatcttgctctgttgcccaggctgagtgcagtggcgtgatcttggcttactgcaacctctgcctcccaggttcaagtgatcctcctgcctcagcctcctgagtagctgatatcacacctggctwtttttttttttttttttttttttgtatttttagtagagatggggtttcaccatgttggccaggctggtctcgaactcctatcctcaagtgatccacctgcctcggcctcccaaagtgctgggattacagacatgagccactgtgcccagccaatagttaacgttttctatgttattacaatgcaccatagactaggtaagtgcccaggaaat

SEQ ID NO: 7931 - DNA, 716 bp, Homo sapiens
catctgcatcttcccacccatcttgatcaatggttccttcttctcatagttgcttatccttgggattctccctttccttgccccgcatcaaggtctgtcaatcctatctccaaaaactagtaaaagcattctccagttacctagctgctacattaaccaatactctccatttcctctagaagagcacattgactcaggaccatggcactctgagtgcttgcagctaatatgaaattaatttctagtattatcctatctacattttcacttcttccagtcaaatgatatccttatcagaagtcagttgtatttgtttccaaacctgcttayaccagttgtacttattattgaaattatgtatttccatgaaacattacataaactggtataatttgcactttaaaaagtttggttctagaaaaactaggtagaatattttggaaaaccacaaagaaaaattgctaaatgagttatttttaaatcacatatgtgcaaaattggaaaaaaatatttaaatagaaatttctgggctctcaacctcatccttgtgtcataaaaacctttacagatgtcttttaaattctcgcttctcttcaacagaattaaaactaaaaatcatagaggatgtaactatgggtatggttcatacaaaatgaaaccaaaaaaaaatcaattcagaacttcaactcatatattcacgttcaacaaatggtccc

SEQ ID NO: 7932 - DNA, 658 bp, Homo sapiens
tgctcacaaagtgaggctgaattgtcaagcctgggacgaagcgctttggatggcaggcctgcactcaccggggctccctgcttccgtgtttcccaacaggccctagaggcctagtaagcaggcctgggcaggctccttaacctctttccacagtggcagaaacagccaggggctgcctactctcccagccaccctcccctagacttgcctctgcccccacccaagccctcatctgtttgcacaagactcagcataagtgaagagcacagcggggttttggagtcaggcacacttagtagctgtgtgaccttgcaygagttactcaacctctctgagccttggtagcttcacagacactaaaaaacagacatttaaagaagtgagataggccgggcatgggggctcatgcctgtaatcccagaactttgggaggccgaggtgggcagatcacgaggtcaggaattcgagaccagcctggccaacatggtgaaaccccgtctctactaaaaatacaacaacaacaaaaaaattagctgggcgtggtggcatgcgcctgtaatcccagctactcgggaggctgaggcaggagaattgcttgaaactgggaggcggaggttgcagtgagctgagattgcgccactgcactccagcctgggca

SEQ ID NO: 7933 - DNA, 796 bp, Homo sapiens
tgagccaagatggcaccactgcactccagcctgggcaacagagcgagactccacctcaaaaaaaaaaaaaaaagatatgtacacatgggtacacacatacmcaccatgtactgggcaagcacacggactttcactaaagagataacagaaaatgggctacttcgtatgcctcataggctatgccttgtgtaattaaattagactccagtgtggatggcagccctgcgcctccactcactctgagctgtgcaagtgcacggctatcctatagcctgtacgcccagcagaagtatccctggttatgcacgaaactgaaagattttgtctgcagcctcttaattttcctccctgtctcgtatctgcctgcttccaatccaccgtgcatattaatgacagatttattttcctttgacaatggtctctgttagataaagcagaaggtacttgatcaaagaataaccgctacaggaaaaggctactctgaatgaattttaaaccaggttccaacatttcaaagtcaaaaatgaaaagaaatttttaaagctttgattaagacttggacaatgaagctaaaattattaaattagcttgcttcatagcacttcagcaacattagcttataattacaaccgcaggctaattcttaggaaaaacacaaagactgcagcccaactccatatcgaattaatataatgaatacagaggagaaaaatgttaatctgtgaagtataaacctttaaaatacaacacaacacttgtaacactctttgtcacttcttcgtctgtcagaattctg

SEQ ID NO: 7934 - DNA, 548 bp, Homo sapiens
gaagcagattgaggaaggacgctagtggaccacagagctgagccatgcacacagaagaaatctttttttctttttttctggagacggagttttgctctctagttgcccaggctggagtgcaatggcgcgatctcggctcactgcaacctccacctcccaggttcaagcgattctcctgcctcagcctcccgaggagctgggattacaggcgtgacaccctgccgggccacttttgtatttttagtagagacagggtttgaacaccttggccaggctggtctcaaattcctgacctcaggtgatccacccacctctgcctcccaaagtgctgggattacaggcrtgacccaccgcgcctggccagaagaaatctttatcttggtgtgcagtgtctggtgagggacaaatgtcatctctcttggatctgaatctggaaggatcaaggcactgaagggatttttttgtttcagacagtatccctctgtcgccaggctggagtgcagtggcgcaatctcagctcacggcaacctctgcctcccgggctcaag

SEQ ID NO: 7935 - DNA, 548 bp, Homo sapiens
gaagcagattgaggaaggacgctagtggaccacagagctgagccatgcacacagaagaaatctttttttctttttttctggagacggagttttgctctctagttgcccaggctggagtgcaatggcgcgatctcggctcactgcaacctccacctcccaggttcaagcgattctcctgcctcagcctcccgaggagctgggattacaggcgtgacaccctgccgggccacttttgtatttttagtagagacagggtttgaacaccttggccaggctggtctcaaattcctgacctcaggtgatccacccacctctgcctcccaaagtgctgggattacaggcgtgasccaccgcgcctggccagaagaaatctttatcttggtgtgcagtgtctggtgagggacaaatgtcatctctcttggatctgaatctggaaggatcaaggcactgaagggatttttttgtttcagacagtatccctctgtcgccaggctggagtgcagtggcgcaatctcagctcacggcaacctctgcctcccgggctcaag

SEQ ID NO: 7936 - DNA, 825 bp, Homo sapiens
aaatcagtatttccatataataacagtggaatgcacaatcaggtattaaatgctaagtcaattaatcatgttaaaggtgctgatttaaatgccaaaagaattaacacgacctttcatttatcaagaactgctggcattttgaaaagatttagaaaacactgttttgaaaatacttcaagactcttaggaatcatttgaacttgtttcttttaaagatagtcttctcctctaatgaaatattgcaaaaagagctaaatgtttttatggcggaacatttaagcatccctccaaattgaaagaatcatgttaacagtcaaaagctgttttgaagatggactctgtgtgtgtgtatgtgtgtgtgtgtgtgtgtgtggktgtgtgtaagtgtctcaactacaacataatttaaaattctgttacatctggacctaaacttcaaggcagggaagaagtttcaccagaaacctactttttcggaaatgtttaagagctaactcatcctaaaggtggcaaaagtgaaataagcagggccatggcaggcatgattctaaggcagcccctgaagactgtctgccctgattcttggacctctgagtacaatgagctaacatgtctggattatgttatcttattcggcaaagggattctgtagacataaagtcactaatcagttgactttgagtttatcaaatgcaaagttattcgagtgggcctaatctaatcacacaaacccttgagaggcaaaaaattttgtttggctggtggcagaaaaagaaatcagagagtcaaagcacaaaaagaaatctatacaccattgccggctgt

SEQ ID NO: 7937 - DNA, 714 bp, Homo sapiens
tgttttttcaagccattggcattttgaaggaatcaggtccatttacctgcatgaggtcccacctaaccggatttcactgttgcttctttgtgcagttttacttgtttctcttactgtgtagacaatgctagctctaaaggcaggttccaacttttttttagaacaaaagacttcatcagtggtgctgtgtatttcatrttgcacaacttttatgatgctaagattaattcatgagttcagaagatgaaactctgatcccttcactataaagttgtccttcagcattttccctcataattttgacatctattgatgaccattgtctgaatcagatttttcacttagaagctgcaaaatgttgattttccaactctctcattcctttcacatttggtagttgagattcctttttattgaactgcctctcatccattaatgctacaaggttactctgccaattcacttcaaaaagtcagaataaaagctgaattatttttctttagtaagtaacttttagaggaacgagttggagtcagaagttgatgccatggtgtatcactgacctcccttcaggaatgaagcactcattccacagctgtgggaaatgttagaagctgctgctcaaagctgaaccctccacaagaatgtcctctgcagaaggcagctgtattacccaaggttatgcaccagcctcttccctgcagacagacggat

SEQ ID NO: 7938 - DNA, 714 bp, Homo sapiens
tgttttttcaagccattggcattttgaaggaatcaggtccatttacctgcatgaggtcccacctaaccggatttcactgttgcttctttgtgcagttttacttgtttctcttactgtgtagacaatgctagctctaaaggcaggttccaacttttttttagaacaaaagacttcatcagtggtgctgtgtatttcatattgcacaacttttatgatgctaagattaattcatgagttcagaagatgaaactctgatcccttcactataaagttgtccttcagcattttccctcataattttgacatctattgatgaccattgtctgaatcagatttttcacttagaagctgcaaaatgttgattttccaactctctcattcctttcacatttggtagttgagattcctttttattgaactgcctctcatccattaatgctacaaggttactctgccaattcacttcaaaaagtcagaataaaagctgaattatttttctttagtaagtaacttttagaggaacgagttggagtcagaagttgatgccatggtgtatcactgacctcccttcaggaatgaagcactcattccacagctgtgggaaatgttaraagctgctgctcaaagctgaaccctccacaagaatgtcctctgcagaaggcagctgtattacccaaggttatgcaccagcctcttccctgcagacagacggat

SEQ ID NO: 7939 - DNA, 560 bp, Homo sapiens
acttctaagcaaaactttgtgaaagatctcctgctgacagaagcatcactattgttggccagaaattacagacgttaaactaatttcaaacgttagctaaacactatgaaatacttaataataacagttaaccttctctgagtactaattatgtgctaagtactgaacttgaatggtttatctgatttaatcatcacaacagtccaacgggggaaagtgaggctcagagatgttcagtttcttgtccatagtcactgagygtgtcttaataaacttaaattgctgataataaatcattccttggtcattgttattcctccagttgtttggggttagatgagtccctcaaaggaagaaaaagacatgggtctcggtggacgtgtacaaattgcccactactgttgttattaacgggtgccctactcagatttgtttaaatgaagacagcgtttttgtttgtttttaattttttttgagacagggtcttgctcagtcgcccaggctggagtgcagtggtgcaatcatagctcactgtagccttgaactcctgggctcaagtg

SEQ ID NO: 7940 - DNA, 771 bp, Homo sapiens
atccctttattgattctggcagcttgtgtgagtagggatctggctttcaaaacccaccttaaggccagggaagggaaacaatcagactccctcgttcttgcctttttaacatggggtatatatagtatggtgccctggaatcagcgccagcctggaattttggagatttcaactcaatttccagtcttccaattgacaacsgcatggcttaattcgattcctggctttggtgtttctttttctccctcctcctgctctcctccttcctgctgtccctagtgtaaaagagaaaataaagtgtatgcactctaccttccattgctcctctgaaggatgagatgcctttctgggaatacttggaagtggtctattcatgcactgaaaagcattttttggcctggaatccaataatccataaaggagatctttcctactcacagagatatcatagcctggtaagaacaacagactgaaaagaaacattacagatgagacaggtgctgtgtttgggctgtgttcagagggtcgctgggacacaggaggccctccaaggctttcctgtttggtggtggtagatccagctcattgtggttctcccgtgcagatgagcaagtcttggtcaggatcaaagcagtgctgcacacaaagctggtgatagctgttaccttccccaggcatatgcctcctctttcctgagtacctcacatttcaaatttgacataatgttcagaatcctacagttcacctaaaggaaatcaggagcagtcctaa

SEQ ID NO: 7941 - DNA, 779 bp, Homo sapiens
aagagaaaaagattggagtaataacttaaggagtcaaatggaaatgtttcttagaataaaggggtatattcgtgttattaggcaaaggtaaaagaggttgacgggtagaatagttgatggagtggtatctcagcagatataggaagtgatgaragcaggaacaacagactgatgcaacccatgtcagatgagcttcatcttcttagaaatgctgtcagtagaatcattttctaagagtgagagaggtagcggaggggagtgaaaccttgggaaactgagtagaatgggaataagcaacagatgtctttgagggtccttttgagagtcactagtttaagctgcatgttgactgccagctcctgttaaataaggacctgtttgaagcacacagcaggaacctttgtatggtccaggaaaatagcatgctaagcaaattaataacaatctaagggtgaaaactttgaactcataaagctatactataataaacatggcaatagacaatgcttatgttcatttcggctgattctgtggtttgaaacacctaggcaggatcctcaagattctaggaaatataggtatatatccacttttctctattcctgtaagcagtgtatgtatttcaagatagagataatttcttcaatgtttgatagctcccactatggcacgttatctcccaccaatgcacacatacacacatacactgactatttgttatatattcgcttttattcaatgagtttaaagttatcacctggtgactcaaaacttaacgt

SEQ ID NO: 7942 - DNA, 681 bp, Homo sapiens
  misc_feature (1)...(681): n = A,T,C or G
cnnnnnnnnnnnnnnnnnnnnnnnnnnnnnnnnnnnnnnnnnnnnnnnnnnnnnnnnnnnnnnnnnnnnnnnnnnnnnnnnnnnnnnnnnnnnnnnnnnnnctcagtgttttttctgaactgggaggctcttggggcccagtctgtttggaagaatctccctgcatccagctcctgaaccttccattgccactcccttcctggtgcttctgcctggacacttaacaaaaccagggcgtctgtttccactgaatagtgtccagcggagggtgtggagggggagagctcagtgctgtttgtttctatcacacacattaaaatcgatggtgtttgctcatctggcggaatgacaactcattcctctggacaggttggcttcacaattgctcatgcaaggggaaatctggtaagaaacgatagtctggtctttgggagcattaaaccgttgtattctaatttaaacttgaggcgcactgactgtcttcttctcctttatttattttttgtttcatttttttttttacattattgattttttgattcttgcttttttaagaaagaaaaaaaatcctcaaaaccaaatgaccagatgagaaaattcagttaaggtcatcacagactatctgcaaaaacamggtcccatccactcagcccaggcaatattcggatggcaggaatgaaa

SEQ ID NO: 7943 - DNA, 482 bp, Homo sapiens
acagaaactgtgagagataataaatgcccattggtgttttaagccattaggttgtggggcactttgttacaaggcattagataacatgaacaacagcttttactctattgcattaaagtgtatctttttacaggcttctctgtacaatccatcagcatctttgaaaacatgggcatatgtctttctcctccaaatctatagtgtctagcaaactgcatgatgcaaaaaaagtaggctataaataaatccttgcctaacttattaattagtaattaawtttttaaagccctaaagatctggtttatatttctccttgttcaactacttgattctttgctgtagcttcctttaggcatcaatctgtcccatacccccacctccatactctacagggctctacatcacatttgcagtttgcaaagaccttttacctgcctgttcattcctacaatgacattctgaggttggcagacagcgtatga

SEQ ID NO: 7944 - DNA, 760 bp, Homo sapiens
ttgggctgggagcagggtcagtacctgggacagctggctttgggtttccttagggctcaactatctgtgcatgatggctctgaagagcaggggccacttcttaccctccccatagctgtaaacaggctccagaatccactcgtggggagatgcatctgcagagcaagcmcaagtctgactggctgtcaccaggtggtagtgagtgtcctgtggggttggagggaggataccaagctccccaagacccccggcgcccacttcgcatatgcacagccatggctgagcatgaggctgcccctggcaggctcctggtggggaggttctttgctatttctcagcacatgattgagaagcaattgtcatgtcacctgggacaccttaaggtggattcttaggccagatccagaaccactcatcagagtcttagggataaggaatctcaattttgctaactgccctggattttgcaggccagacgctgagagccactctctaaagcttgtgctcgtatcccagccactaggcctcagaggtgggtctcttggcattctccactctggacccatgggttttcctcacaccccaaccttccagccaagtgagcctctcgctttccctgcctgaagacctcggtttccgccatccatctccatgctcctgcccatgctctagcccctccagacccctgcacagtttgtaatggacagaatggaaacacatctttcttcacacagcagggaaagtgtttccctgtcctggg

SEQ ID NO: 7945 - DNA, 426 bp, Homo sapiens
cgtcctgctgattggcctgggttttgctcttggcactcagtggcaagcgtccagacctccactgggctgccacgcacagckagaagggtgggagaagaggaactggtctttccatacagcgtcttctggctttgagacaaaagaaaaagaacagcttattgcacacttcatgacacagagagacagctattgatcagctgagaaacattacagacagacagacaggaaaggaggaaggaagcgggaagatgatcaaatagtttgttcagcttgaagccgcatttttacaaacacaaagagcccagaagaagagaaagttacttttgtgtgggtccttaattaggaagttcacgttggccaccggctatcttaggaactactctccattgtttgaagtgctctgtcttcatcagagatgggtcaggg

SEQ ID NO: 7946 - DNA, 811 bp, Homo sapiens
tttccttttcacattttgtttaattgaaacgtttcatgagatactaaaatattctttcaataaattggcctccccttcttttaagatttaaggtaatcagagaatttttttaaacttttttaaaatttaaatttaatcttatgtaaagatttcaaagagacaaaaataatgtaacaaaagctcacatttcctcttatactccaatttttcatcttggatttacctttctttatatatataatggatgtatactttctagatataattcagaatttgaatttgatgtttttccatcagcactttgatagtcttattccattacattctggtctctcttgttattggaagcctgtgatcagtttaacatgcatttttacatacaaytttttgacttctcattgttaaaatttttcaatcttgaggattctacagatttataacgtgaaatcccagatctaagttaacttcttttttgttgttcagaaaattgtgcacacaaactttgagaatttatgtttgcacaatattttggaaaattcccagcagttatgtctttcaagcccctcccttcccattctttctcattctaattccatgtctcataacttgtctccatttctatattaccttttcagttacttttcttcttcaattactttgtcttctgtttctttttcaaatattctcattctttttttctcctcagccatgtgtttccttttttaagggtattaattattttttaaagttttaaaaatgtttgcatatttggattttactccttgtgtttgatcaccgctctgttatctga

SEQ ID NO: 7947 - DNA, 811 bp, Homo sapiens
tttccttttcacattttgtttaattgaaacgtttcatgagatactaaaatattctttcaataaattggcctccccttcttttaagatttaaggtaatcagagaatttttttaaacttttttaaaatttaaatttaatcttatgtaaagatttcaaagagacaaaaataatgtaacaaaagctcacatttcctcttatactccaatttttcatcttggatttacctttctttatatatataatggatgtatactttctagatataattcagaatttgaatttgatgtttttccatcagcactttgatagtcttattccattacattctggtctctcttgttattggaagcctgtgatcagtttaacatgcatttttacatacaactttttgayttctcattgttaaaatttttcaatcttgaggattctacagatttataacgtgaaatcccagatctaagttaacttcttttttgttgttcagaaaattgtgcacacaaactttgagaatttatgtttgcacaatattttggaaaattcccagcagttatgtctttcaagcccctcccttcccattctttctcattctaattccatgtctcataacttgtctccatttctatattaccttttcagttacttttcttcttcaattactttgtcttctgtttctttttcaaatattctcattctttttttctcctcagccatgtgtttccttttttaagggtattaattattttttaaagttttaaaaatgtttgcatatttggattttactccttgtgtttgatcaccgctctgttatctga

SEQ ID NO: 7948 - DNA, 749 bp, Homo sapiens
tgggtggcagaggttgcagtgagccagatcacgctactgtactccagcctgggcaacagagcaaactctgtctcaaaaaaaaaaaaaaaaaaaaaaagcaacaattsgtaaatctaggataggctacatgggtgttcctcactatactattcgtctaacttttccataggttcgacacttcaaaataaacgggggagcccactccctctctagaaaaaagtgctaggttgctctcttcatggtcatccgcctcacggaactaagaagatggcaaaaagatgataaaacaaagcttattgccagctaggttttaaataggctgatgctatactggattaatattaaaaatcttttattctatcaaaatctgttgatcctgaatatactgaaacagatgagacaaaatcacttaaatcatataatcaattttcaaagggtaaatatttggggaagctgggtaaagggtgtaaggaaaatctttgtaccatgtggcaactttttgttttgttttgttttgttttgttttttgagacagagtctcgctcagtcgcccaggctggagtgcagtggcacaatcttggctcactgcaagctccgtctcccaggttcacgccattctcctgcctcccgggttcacgccattctcctgcctcagcctcccgacatgtggcaacttttttgtgtgaaattatttcaaaatgtaaagtttaaaaaatttaaaaataaaacagaaaactcaaaaaagataa

SEQ ID NO: 7949 - DNA, 621 bp, Homo sapiens
caaggctgggcttgcctcactccctgtcgcccccacccagcagaaggaaggtcaacagaaggaagccccttctctctacttggctacacatccgcatcattctcttcccaccgcagaccagctttctctatgtttccctacacatcgtagggagatagttgcctccagcccctccaaacttgcatctcaaggactactagccacagacgcagaatgatcagccacctctgattcctggtcccacatatctgggagagaggatctgcctggcccagctctagtcaaatgtctactcccatcaactgtggaagggaggaagggagttgggagggagagaatccacctggcccaatgtgggtcatatgtctcccacggaggctagtgggggagaaagatgcaggatggtggtttaggggatactggggaggagactctcagaaaagaaaacaattaggcaggcaccccaaaggagttcgctcctgcaggatttcatcgttgttagtgctgctgctgcctgaattgcaggctgttgtatcataccagctagctatgctgcatacaaactgcccccaaattgartggcttttcacaaccattacatctgacaaatttctgggtcag

SEQ ID NO: 7950 - DNA, 809 bp, Homo sapiens
actatcaggtgaatccacgggagagctgtttggaatcaatgctaaaataaacattcccaaactctgttaaaatatcctaatttatttagagtggatttcatgtactatgaagaggaaaacaccatgctccactagtttttatgtgtttttaaaggtaatttaacatagttatggttgcatgctaatatattcataagaaggatggaaaataatcaacaaatatagggtaattaagcatcaggccaagttataaaagaaggaaaacttgcataattaaattttaaatgtactttcttaatatctaattgactaattctaaaaaaatagaaatgtaatatgtattcatctgaatttttgttgggttttctttcaacttggatttaaaggagtagacattcgtggaaattcttcctggaaatgtttttcacaagtgctactttcaaactcagaaacaagcactaccctactgactaactgattcctcaggcaaggtttataaattcactctgrtgtagaccatatttaacactttctaattataggtatgtggaatgctaattaattggttgtgtgatactaattagctagcaccttccccaattgtcttaagtgaaaatatttccttttggattttcctatggaggaaatgtgatattctctattaggaaaggaatatcaataaataataatcatttttgaattctgtttgcttctcatgccagcaaactctcttacactttttgactaacaagtattgcaaagttgctatccagttggcctactgtagcactacttttatatttacgtgg

SEQ ID NO: 7951 - DNA, 809 bp, Homo sapiens
actatcaggtgaatccacgggagagctgtttggaatcaatgctaaaataaacattcccaaactctgttaaaatatcctaatttatttagagtggatttcatgtactatgaagaggaaaacaccatgctccactagtttttatgtgtttttaaaggtaatttaacatagttatggttgcatgctaatatattcataagaaggatggaaaataatcaacaaatatagggtaattaagcatcaggccaagttataaaagaaggaaaacttgcataattaaattttaaatgtactttcttaatatctaattgactaattctaaaaaaatagaaatgtaatatgtattcatctgaatttttgttgggttttctttcaacttggatttaaaggagtagacattcgtggaaattcttcctggaaatgtttttcacaagtgctactttcaaactcagaaacaagcactaccctactgactaactgattcctcaggcaaggtttataaattcactctgatgtagaccatatttaacactttctaattataggtatgtggaatgctaattaattggttgtgtgatactaattagytagcaccttccccaattgtcttaagtgaaaatatttccttttggattttcctatggaggaaatgtgatattctctattaggaaaggaatatcaataaataataatcatttttgaattctgtttgcttctcatgccagcaaactctcttacactttttgactaacaagtattgcaaagttgctatccagttggcctactgtagcactacttttatatttacgtgg

SEQ ID NO: 7952 - DNA, 749 bp, Homo sapiens
ttcctattttatgttgtctggaagaaggggttcttagttaaatggagaccattactgatttgtgagatgaaattaatgtcctataattaccagctgccatgacctttaacagaattttaaacaaggagaatctagatagctgaggattttcagtaaacttttgttttgttaaaaattcttcagttctagttacctagtactgtaacatgtctgcatacagtttaacttcatgaattactatttagctatgtgcttgttgtccactaatatcttttcatacttcactggcctgactccatgctagggacataggtcagactggcagtcaatgaattctgattggttcattggctgtcyctggagtccttcagacaagagaatcgtttttattttttttttaaatatgagctggatattgtgaattgctcatctctaataaattaaaaatttaatgattctggtgaatattttcatgagcagatttaagtactgaggaaacgtagaattctgaagtatagctgcttactcagataaagctggtctcaagataaaccaggctctctataatgcattataaccttaagaatattcattcatgatatactgacaattagcttaagaaagacctctagcctgagtaatttggtttagagtctccttcctctgcagccgtaagttgtggagacttcaaagtttgttctgtatctactacaaattgtgatataatttatgatgtaatagttatgttc

SEQ ID NO: 7953 - DNA, 749 bp, Homo sapiens
ttcctattttatgttgtctggaagaaggggttcttagttaaatggagaccattactgatttgtgagatgaaattaatgtcctataattaccagctgccatgacctttaacagaattttaaacaaggagaatctagatagctgaggattttcagtaaacttttgttttgttaaaaattcttcagttctagttacctagtactgtaacatgtctgcatacagtttaacttcatgaattactatttagctatgtgcttgttgtccactaatatcttttcatacttcactggcctgactccatgctagggacataggtcagactggcagtcaatgaattctgattggttcattggctgtctctggagtccttcagacaagagaatcgtttttatttttttttwaaatatgagctggatattgtgaattgctcatctctaataaattaaaaatttaatgattctggtgaatattttcatgagcagatttaagtactgaggaaacgtagaattctgaagtatagctgcttactcagataaagctggtctcaagataaaccaggctctctataatgcattataaccttaagaatattcattcatgatatactgacaattagcttaagaaagacctctagcctgagtaatttggtttagagtctccttcctctgcagccgtaagttgtggagacttcaaagtttgttctgtatctactacaaattgtgatataatttatgatgtaatagttatgttc

SEQ ID NO: 7954 - DNA, 637 bp, Homo sapiens
tctattttgttacactgtctatggaaatttaactgcaaaaaccaccaaatttgagagctgcaagggaccctagagattgagctttaactctcttgttttatgaaggaggaaatacagatccagaaaattaaattgtttctgcaaagttatatagtgagtgttaataggaagttagcatgggactgtgcctgcctcaggyttcaactgaggtaccacaaaaaactatcagatagcagaggatgtgccagacacccccatccccatgtgctgacattcaaagaaaatgtcacaaaaacatggctcttgcacctctgccaggttaagtgcatagaaacatatcagagacggtggaaaggaaaagagattggtaaggaaatttctctggagaaagctcttgatttgatgtgtgcctccaaactttaggggaaagtttggggcatgctaacttctaaacataagcttcatgaagaggacttcaagagaaccacttgataggccatacccataccttggtgatagtgtcaaaaaagtgctgcactgagattgcataaacatccaaagttggcacagaaaatgtcactatttgctgtgggtcagatgtgggccatgtaaagtcaaagagtcaacgtacgacttt

SEQ ID NO: 7955 - DNA, 637 bp, Homo sapiens
tctattttgttacactgtctatggaaatttaactgcaaaaaccaccaaatttgagagctgcaagggaccctagagattgagctttaactctcttgttttatgaaggaggaaatacagatccagaaaattaaattgtttctgcaaagttatatagtgagtgttaataggaagttagcatgggactgtgcctgcctcaggtttcaactgaggtaccacaaaaaactatcagatagcagaggatgtgccagacacccccatccccatgtgctgacattcaaagaaaatgtcacaaaaacatggctcttgcacctctgccaggttaagtgcatagaaacatatcagagacggtggaaaggaaaagagattggtaaggaaatttctctggagaaagctcttgatttgatgtgtgcctccaaactttaggggaaagtttggggcatgctaacttctaaacataagcttcatgaagaggacttcaagagaaccacttgataggccatacccataccttggtgrtagtgtcaaaaaagtgctgcactgagattgcataaacatccaaagttggcacagaaaatgtcactatttgctgtgggtcagatgtgggccatgtaaagtcaaagagtcaacgtacgacttt

SEQ ID NO: 7956 - DNA, 763 bp, Homo sapiens
aaaccccatctctacaaaaaatatgaaattagccaggcatgctggtgtgcaccagtggtcccagctacttagggggtgaagtgggagtatcacttgagccgaggaggtcgaggctgaaatgagcctagatcatgccactgcaccccagcctggctgacaaagtgagactctgtcaccaggcacggtggctcacgcctgtaatcccagcactttgggaggctgaggcaggcagatcacgaggtcaggagattgagaccgtcttggctaacacagtgaaaccctgtctgtactaaaaatacaaaaaattagccaggcgtggttgcaggcgcctgtagtcccagctacttgggaggctgaggcaggagagtggcgtgaacccaggaggcggagcttgcagtgagccaagatcgcgccactgcactccagcctgggcaacagagcgagactctgtctcaaagtgagaccctgtctcaaaaaatgacacaaaaaacccccacaatactaaacaatatattgataggttagttgtggaaggtgggagaaggtgtaacataggatgttctttcttaaactgtatagtatgtcaatgtttattcctatatataagcacatgtatatgtgttaatgtgtatgtatttgtgtgtgtatgtgtctatatatatgtrtatatatatattttaatttttaattttttttttaaatcttttgtagagacagggtttcaccatgttgcttgggctggtcttcaactcctgagctcgag

SEQ ID NO: 7957 - DNA, 571 bp, Homo sapiens
atggggtttcaccacgttggccagactggtcttgaactgacatcaggcgatctgctcgccttggcctcccaaagcgctgggattacaggtgtgaggcaccgcactcggctcagagttcttacagacagcaggcaggcacttcgacaggttcccaagcccggagtttggatgcacgaaggagctccscccaccgcccctgccctggggaccgggccaacctaccacccctggccttggcgctggtttccacccacgcccacgggccttggctcctggctcctccgacccagccgtgccaccgtctttgccctccccagtgtctttgctggtcttccggctgcggcgcttggcacttggcaccaggagggccggggatggctcagcacctgtggggcagaggacagagtggctcgtcaggcctggggtccccagcttggagcttccaagaccatggtctgtcccggggatcagggatgggggcggaagcaactgacaccaggtgtctgaccccgggtgggctcccatgacaggctgtgaggtccagcaggggaaaccccgtctgcagggggca

SEQ ID NO: 7958 - DNA, 571 bp, Homo sapiens
atggggtttcaccacgttggccagactggtcttgaactgacatcaggcgatctgctcgccttggcctcccaaagcgctgggattacaggtgtgaggcaccgcactcggctcagagttcttacagacagcaggcaggcacttcgacaggttcccaagcccggagtttggatgcacgaaggagctccccccaccgcccctgccctggggaccgggccaacctaccacccctggccttggcgctggtttccacccacgcccacgggccttggctcctggctcctccgacccagccgtgccaccgtctttgccctccccagtgtctttgctggtcttccggctgcggcgcttggcacttggcaccaggagggccggggatggctcagcacctgtggggcagaggacagagtggctcgtcaggcctggggtccccagcttggagcttccaagaccrtggtctgtcccggggatcagggatgggggcggaagcaactgacaccaggtgtctgaccccgggtgggctcccatgacaggctgtgaggtccagcaggggaaaccccgtctgcagggggca

SEQ ID NO: 7959 - DNA, 571 bp, Homo sapiens
atggggtttcaccacgttggccagactggtcttgaactgacatcaggcgatctgctcgccttggcctcccaaagcgctgggattacaggtgtgaggcaccgcactcggctcagagttcttacagacagcaggcaggcacttcgacaggttcccaagcccggagtttggatgcacgaaggagctccccccaccgcccctgccctggggaccgggccaacctaccacccctggccttggcgctggtttccacccacgcccacgggccttggctcctggctcctccgacccagccgtgccaccgtctttgccctccccagtgtctttgctggtcttccggctgcggcgcttggcacttggcaccaggagggccggggatggctcagcacctgtggggcagaggacagagtggctcgtcaggcctggggtccccagcttggagcttccaagaccatggtctgtcccggggatcagggatgggggcggaagcaactgacaccaggtgtctgaccccgggtgggctcccaygacaggctgtgaggtccagcaggggaaaccccgtctgcagggggca

SEQ ID NO: 7960 - DNA, 858 bp, Homo sapiens
gataagaaggagaaacgtggacacagagacagacacatagacaggatgtcacagggagacaaaggaaaggctrggctgatgatctacaagacaaagatgaccaggaaaccaccagaagctgggacagggacacagtagattctcccctacagccagcagaaggaaccagccccgtggacatcggtgttttaaaaccactctgctgagctgggcatggtagctcacacctgtaatcccagcactttgggaggccgaggtgggtggatcacctgaggtcaggagatctagaccagactggccaacatggtgaaatgctgtctccaccaaaaatacaaaaattagccaggcgtggtggtgggagcctgtaatactagctacttgggaggctgaggcaggagaattgcttgaacccaggaggcagaggttgcactgagctgagatcatgccgctgcattccagcctggcgacagagcaagactccatcccccacacacaaaaaaattaattaattaattaaaaaaaaccactccaagcatgtcgttttgtctaaactagcataaaaaccaaaaaccctagtgttcctccacccattggagctgtatcacagggaccacgactttcagacctctccccatgccctcttccactaacacagggaaattccagcccagtcctgaggaacatggtcaggtcgatgggtttaattaattcagtatgcaaatgggccatgaggtttcttaaaagagatgacttaaaagatccttttctaaatgatgaagtcccctcagccccacagacaagaatgggccccaaggctgggcgcagtggctcatgcctgtaatcccaacaatttaggaa

SEQ ID NO: 7961 - DNA, 858 bp, Homo sapiens
gataagaaggagaaacgtggacacagagacagacacatagacaggatgtcacagggagacaaaggaaaggctaggctgatgatctacaagacaaagatgaccaggaaaccaccagaagctgggacagggacacagtagattctcccctacagccagcagaaggaaccagccccgtggacatcggtgttttaaaaccactctgctgagctgggcatggtagctcacacctgtaatcccagcactttgggaggccgaggtgggtggatcacctgaggtcaggagatctagaccagactggccwacatggtgaaatgctgtctccaccaaaaatacaaaaattagccaggcgtggtggtgggagcctgtaatactagctacttgggaggctgaggcaggagaattgcttgaacccaggaggcagaggttgcactgagctgagatcatgccgctgcattccagcctggcgacagagcaagactccatcccccacacacaaaaaaattaattaattaattaaaaaaaaccactccaagcatgtcgttttgtctaaactagcataaaaaccaaaaaccctagtgttcctccacccattggagctgtatcacagggaccacgactttcagacctctccccatgccctcttccactaacacagggaaattccagcccagtcctgaggaacatggtcaggtcgatgggtttaattaattcagtatgcaaatgggccatgaggtttcttaaaagagatgacttaaaagatccttttctaaatgatgaagtcccctcagccccacagacaagaatgggccccaaggctgggcgcagtggctcatgcctgtaatcccaacaatttaggaa

SEQ ID NO: 7962 - DNA, 344 bp, Homo sapiens
attatagatgaatatcttttttcaaatactagtacttgaaactaaaaaggccattttaaaattkcccataagtaagtttgacatttgtggctaatgtctacctcctttgactcagtaattccatttctggcaaaatgtcttaagaaaatagcttgaaaaaaaaattacacacaaaaaggacagcccactggcatttaagtgatttttaatgtggcactctatagacatgaggaaatctgatgcttaaaaccagtgcatgaagtacgaatggttatccctgttgccacacgaggaaggtgagactgagaggacctgcccatggaccagggctcctgcaggcagga

SEQ ID NO: 7963 - DNA, 762 bp, Homo sapiens
tccttctctccagaagaaagggcaaccctttaaaatgtgccaccatttgtcamttccattcaacagatattcacagaacatccactgggtgcagagaatgccaagcatgccagtatgagtacaacagaaccctacttccccagagagcctatgattaataagaaagaatattccagtggctcagattattgtgatatgaaagaatgtgaactgaggccaggtgcggtggctcacacctgcactttgggaggccggggcaggtggattacctgaggtcaggagtttgagaccagtctggccaatatggcaaaaccccgtctctactaaatgtacaaaaattagctgggcatagtggcgggcacctgtaatcccagctacttgggaggctgaggcaggagaatcgcttgaacccgggagatggaggttgcagtgaggaccatgccattgcactccagcctgggtgacagagtgagactcagtctcaaaaaaaaaaaaaaagaaaagaaaaagaaaaacaatatgaactgagacataggagaggtgcaaagggcaaagacagttccatggagcgggcaggcagggtctgtgggctgggtcatggaggctccatgggaaagagggcattcaagatgggcctcaaaggatgggtaagatcacaatgtgggaagtgcggagagcagagccttctggatggaggatgtggcttgagacaaaaaaaatggtgtggagttgccagaaggatgttctttcaaagcagcaaat

SEQ ID NO: 7964 - DNA, 729 bp, Homo sapiens
atctatatctcttattggaaagtaaaactttctctaggacccctcagcagacttccgcatcttctcactggccaaaactgagtcttatgttctctagtcattagtaaaggaattgagagcaccatgactagataaagctaactctgatttttcccctatattagttccttctcacactgctataaagacatacctgagactaggtaatttataagaaaaatggttgaatttgtttatggttctgtggactgtacaggcttctgcttctggggaggcttcaggaaacttacaattatggtggagggtgaaggggaagcaaacacatctttacacggtgtcaggagagagacagagagaagggggacatgctacacactttcaaacaaccagctattgtgagaactctatcacgaaaacagcaagggggaattccaccaccatgatccaatcacctcccacaaggccccacctccaatactggaaattataactcaatgtgagatttgggtggaaatacagagmcaaaccatattatatcctaagactggagaaatacctccttaactaagggcgctgatacctacccaattcccaaaatggattctgttagcaaagaagaaagaaggaactggtgttacatagacaatcagaaatatgacccaaacctgcttcttccaagtatccaaattctatattatgaaggcctaatgaagtagtctgtcattaaga

SEQ ID NO: 7965 - DNA, 630 bp, Homo sapiens
ggatcctgtgagatacctaatgacaggcatttgcctctgggttctgagctaactgaggaagggacacaggcaatagagaaagcaccaaatattagttttatttccgacgaagatacactagagagttcaacccagaactgtgaggctttctaacacgaagagtgcttgaaagcccctttcccacctgcagggtagacactgaagtcatcagctacaaaagttactccctgcacttcctacttctcayctctgccactcctccaccccacaccagtcaagtgcctagagcggggaggagaggaagttctaattttatagaccaagaaaggaatgctgggaggagaaaacagttcttctcacactatgaatatggacaactaacttcacatgtacaagccagaaataactgcccagtgtcgtgaaaataaaccagatacacacgctctgtaaactgtaaagggctttatacacagtttctcttgttatttttatcaagaagggagctaaagtgcaggtgggctgagtgacgcaggccatcactgaactcattagaagtagagttgggacctaaacctaggtctccaaactctcaactgagtatttttcccatagggatcagggacggggatt

SEQ ID NO: 7966 - DNA, 579 bp, Homo sapiens
cccagaaggtcctgcccccggctccttcatatggaaaatccatcctcattctggaagagccaggtcaggagtcctttctcagagtctttcctgatccaaccagtcagttgctgctgctctttttttgtttttttgagacagagttttgctcgttgcccaggctgcagtacaatggtgcaatctcagcttactgcagcttccacctcctgggttcaagtgattctcctgtctcagcctcccgagtagctgggattacaggcatccatcaccacacccagctaatttttgcatttttagtagagacagggtttcaccatgttggtcaggctggtctcaaactcctgacctcaggtgatccacccaccccggcctcccaaagtgctgggattacaggcatgagccaccgcgcccggcccagttgcttcttctatgtgatgtgccatagaacgttgaatgtctctcaactcactcatccattctatgaccttgtgaatatttacatactggtaastttattccctgtgctagctgaccacgtgctcctgggaaacagaaaccatgtctgattctttctgtgga

SEQ ID NO: 7967 - DNA, 958 bp, Homo sapiens
ttcctttctagtctaccagaaattaaaaaaaaaccttcaaaatagatttatttgccccataatgtattgaattctttacagcacaaagaaagcttccattttatactatgttttgattctccagaaaaagaagatacctataggtatcctctattttttgtttgataaattctttaaaatcaattatctaaatatatcattattggcatttgaattattgttagcagcaattaggtagatagggagagtatgatcagaattttatggctgaaacaaacttgaaatatttaaatcttaatatatttttctaatatttgaatatttatcaaaaacacttaygcttgtattgtggcataattttttctcaaggtgtaaatattaagtggttaattaaatgtagaacattctttggtgaccaaatatgaacaggtgccctgttttcttgtgctgaccataacttatgcacaactcatcaaaataatgactctaatttttccttagtgtacacttaactagctaatgattaatgctatcccctaatcaaaactgtttttctttggctaaatgtggcatttccagggccagagaaccaaattcaaaagttaccagaataaacagaaatagaaaggcaaatttaggcataccctaaaacgttaggttattatgtcagatttaatataaatgttatttgaattctcaatgttttagattatccacatgagtgcacacttcgagtactaagcagaatggagttgactgtataaatgaatcgataataaggttgttttaaaaatgtattttaaaatatcagagcaatggcttccatatctaaagcactcttgtcttctagttagacaccagcctttctcaatcgttgctttttgttgtagtgtagtcctggtgacaatgccattcaacgtttttttgatgcaaactgcttgaaaggagccccaaattg

SEQ ID NO: 7968 - DNA, 648 bp, Homo sapiens
cttgagcccagaagttcaaggttgcagtgagctgtgatcacaccactgcatccctgcctgggtgacagagcaagaccttgtctgtaagaaaaaaataaaaagtaaaaaacgaaaataaattcaattacatttcttcattctatataaacataaaatgaaagagaagtggtagacagttcccacataatttcatttggcagcaaaagtaaatatatggtgctcacttcagcagcacatacactaaaaccataacagttcagagaggactagcatgcccctgcagaaggatgacacacatttgcagtgttacatattttctttaraaaagtaaatatggctgggcgcagtggctcacccctgtcatcccagcactttagaaggccaaggcgggtggataacctgaggtcaggagtttgagaccagcctggccaacatggtgaaaccccatccctacaaaaatacaaaaaaaaattagccgggcatcatgacgggggcctgtaatcccagctactcgggaggctgaggcgggagaactgcttgaacctgggaggcggaggttgcagtgagccgagatcgcaccattgcattcccgcctgagtgacagagcaagactctgtctcaaaaaaaaaaaaaaaaaaaaaaagtaaa

SEQ ID NO: 7969 - DNA, 648 bp, Homo sapiens
cttgagcccagaagttcaaggttgcagtgagctgtgatcacaccactgcatccctgcctgggtgacagagcaagaccttgtctgtaagaaaaaaataaaaagtaaaaaacgaaaataaattcaattacatttcttcattctatataaacataaaatgaaagagaagtggtagacagttcccacataatttcatttggcagcaaaagtaaatatatggtgctcacttcagcagcacatacactaaaaccataacagttcagagaggactagcatgcccctgcagaaggatgacacacatttgcagtgttacatattttctttaaaaaagtaaatatggctgggygcagtggctcacccctgtcatcccagcactttagaaggccaaggcgggtggataacctgaggtcaggagtttgagaccagcctggccaacatggtgaaaccccatccctacaaaaatacaaaaaaaaattagccgggcatcatgacgggggcctgtaatcccagctactcgggaggctgaggcgggagaactgcttgaacctgggaggcggaggttgcagtgagccgagatcgcaccattgcattcccgcctgagtgacagagcaagactctgtctcaaaaaaaaaaaaaaaaaaaaaaagtaaa

SEQ ID NO: 7970 - DNA, 648 bp, Homo sapiens
cttgagcccagaagttcaaggttgcagtgagctgtgatcacaccactgcatccctgcctgggtgacagagcaagaccttgtctgtaagaaaaaaataaaaagtaaaaaacgaaaataaattcaattacatttcttcattctatataaacataaaatgaaagagaagtggtagacagttcccacataatttcatttggcagcaaaagtaaatatatggtgctcacttcagcagcacatacactaaaaccataacagttcagagaggactagcatgcccctgcagaaggatgacacacatttgcagtgttacatattttctttaaaaaagtaaatatggctgggcgcagtggctcacccctgtmatcccagcactttagaaggccaaggcgggtggataacctgaggtcaggagtttgagaccagcctggccaacatggtgaaaccccatccctacaaaaatacaaaaaaaaattagccgggcatcatgacgggggcctgtaatcccagctactcgggaggctgaggcgggagaactgcttgaacctgggaggcggaggttgcagtgagccgagatcgcaccattgcattcccgcctgagtgacagagcaagactctgtctcaaaaaaaaaaaaaaaaaaaaaaagtaaa

SEQ ID NO: 7971 - DNA, 648 bp, Homo sapiens
cttgagcccagaagttcaaggttgcagtgagctgtgatcacaccactgcatccctgcctgggtgacagagcaagaccttgtctgtaagaaaaaaataaaaagtaaaaaacgaaaataaattcaattacatttcttcattctatataaacataaaatgaaagagaagtggtagacagttcccacataatttcatttggcagcaaaagtaaatatatggtgctcacttcagcagcacatacactaaaaccataacagttcagagaggactagcatgcccctgcagaaggatgacacacatttgcagtgttacatattttctttaaaaaagtaaatatggctgggcgcagtggctcacccctgtcatcccagcactttagaaggccaaggcgggtggataacctgaggtcaggagtttgagaccagcctggccaacatggtgaaaccccatccctacaaaaatacaaaaaaaaattagccgggcatcatgrcgggggcctgtaatcccagctactcgggaggctgaggcgggagaactgcttgaacctgggaggcggaggttgcagtgagccgagatcgcaccattgcattcccgcctgagtgacagagcaagactctgtctcaaaaaaaaaaaaaaaaaaaaaaagtaaa

SEQ ID NO: 7972 - DNA, 637 bp, Homo sapiens
ctgggagggacaggggttaggggaatcagctaaagggcacagtgtttctttttgaatgttcaaaaatggaccgtggagatagttgtctgtatctgtaaaaatactgaaaatcattgagttgtacactttcaaggagtgaattgtatgacgtgtgtgatttatatctcaataaatttgtttaaagaaataactcagagttggccaggcatggtcgctcatgcctgtaatcccagcactttgggaggccgaggcaggcagatcacttcaggtcaggagtttgagaccagcctggccaacatggtgaaatcccatctctactaaacaaaaatacaaaaattagccaggcgtggtgctgtgcacctgttatcccagctattcaggacgctgaggcagcagaatcgcttgaacccaggaggcggagkttgctgtgagccgagatcatgccactgcactccagcctgggtgacagagtgagactccatctcaataaaaaaataaataaaataataactcagaggcatgtggggctgcagtcacagaatagcatctaaaccaaggttctgtttgatgggaacagcactaggattcaggtctggggttccagtgtttgtgaacgacaggaaataccaagaggaag

SEQ ID NO: 7973 - DNA, 776 bp, Homo sapiens
aaatttatctcaaaggcttcacatctttcttgtcaatgtcacacttacttccactcaagtcaaggaccattaataaccccagggaaaagacttcatatggaaaatccattcatttcatttttaggagacaaatgtcagtttcagacttaattttctttactttsatatattgagttccaaaaaataagacctttttccccttgactaactcaattacttacagagacatttcatttttgaaaggatgttaaactttttatcattaatacatacaaagctattgagaaaatagttttaaggaataaaagatggtcctattcttcattaatgttcacattgtgcagagctcattgcctttcaaaaatatggacattatttaagattatataatagctaagacttggtcttacgcgtttaagtctctttctttatgatgcaaaattgggtttaaatagactaaaatgttgattgtgttatggaaagtattgacttatttttctcttactcttgaaagttgtgttaattactaaaagtatttgaaaaaattacatataagcattgtcaaaccaacaaacccctctgaatcttctccttctgcatagcaaagatgactttaggaaaaaggtagaaaaatctgacctacttagtctgatacagaagttgtccttctaaatttaagatatgtccatttggcagtgtgacattgacaggcttaatctcttcactaactgccatttttacaactaaaaaggattacagagggctacactgtccat

SEQ ID NO: 7974 - DNA, 739 bp, Homo sapiens
cttaatgagttttatctttttactagatattgtaaaaacaatgtctataattctaataacaatctagcacaataggtgattatacttatttttctgatggagtaactgacactaaaatattgagtatcaaagcaaacctgtgcatcaagttgaactccaattggtgtcatgcctaacattttaattttgccccacaactttccatttttcctgtatgcttttcaagtctggagtctacttgattgcccacattacagtgcttttctgtattctgtaatttttagcactttttggaatactggacttggcttgcccttctaaaccatgttttwaggtgttctctttacaggattctgtgtcctcatttggatttatgaatcgatggtgacctgcctcaactccttgatctcctacagaacatctttggcaggcccatttctcttaataaaacttctagctatggccccttctaccgctctttggatcagggcagagactattggctagcagaaagggggccatatccaccctaaaatgtgtatatttagctaactcagtgttgttgttaattgttttttagcagtgaccatattttaaatgaagtgatttcaaaagccagacacaaaaggtcacatattgtatgattctatttctatgaaatatccagaataggtaaatccatagaaatagaaagtagattggtagtttccagagtggttgccagaagaggggatgggga

SEQ ID NO: 7975 - DNA, 823 bp, Homo sapiens
atgcctgacagccaaggcagacatatggaaggaacccatccctggtgggccttgaatgatggaggggcccgaagggcagagtgctccagcctgctcagaagaactatttctaacaatgttttttaatagtattttactgggtccaagtggaggagaacttgatgaccttctccatgtcttctctaggtcaacatcgggcaaggtagccatcctcagaaggtcaaagtgtttgggccaggtgtggagagaagtggtctgaaggcaaatgaacctacacacttcacggtggactgtactgaggctggggaaggtgagaaagggctttgttcaacccagtgatcattgctccktggggaaggcagttcttttcataacgtttcaattccttttgaactaggaagtagtccatctgaataggtaatcatctactgagcctctgagtcattccttagtgatatctttgctaatccatcatccctttccccaaatccttactctttctcaggtttcttactagaaacttcccaattgctttttgagggtgttaacctgagctggaagagattgcacaggacatgctgtttcttgtaagctggtgctaataagctggtctgttccaggtgatgtcagtgttggcattaagtgtgatgcccgggtgttaagtgaagatgaggaagacgtggattttgacattattcacaatgccaatgatacgttcacagtcaaatatgtgcctcctgctgctgggcgatacactatcaaagttctctttgcatctcaggtacgtggtggggcctgggaggagatgggtggagtaggcctg

SEQ ID NO: 7976 - DNA, 823 bp, Homo sapiens
atgcctgacagccaaggcagacatatggaaggaacccatccctggtgggccttgaatgatggaggggcccgaagggcagagtgctccagcctgctcagaagaactatttctaacaatgttttttaatagtattttactgggtccaagtggaggagaacttgatgaccttctccatgtcttctctaggtcaacatcgggcaaggtagccatcctcagaaggtcaaagtgtttgggccaggtgtggagagaagtggtctgaaggcaaatgaacctacacacttcacggtggactgtactgaggctggggaaggtgagaaagggctttgttcaacccagtgatcattgctccttggggaaggcagttcttttcataacgtttcaatkccttttgaactaggaagtagtccatctgaataggtaatcatctactgagcctctgagtcattccttagtgatatctttgctaatccatcatccctttccccaaatccttactctttctcaggtttcttactagaaacttcccaattgctttttgagggtgttaacctgagctggaagagattgcacaggacatgctgtttcttgtaagctggtgctaataagctggtctgttccaggtgatgtcagtgttggcattaagtgtgatgcccgggtgttaagtgaagatgaggaagacgtggattttgacattattcacaatgccaatgatacgttcacagtcaaatatgtgcctcctgctgctgggcgatacactatcaaagttctctttgcatctcaggtacgtggtggggcctgggaggagatgggtggagtaggcctg

SEQ ID NO: 7977 - DNA, 531 bp, Homo sapiens
gttagaataaagtcccttccagagtccagatttgcttcttattggacagtgtcttatccacaatagttcagttaatcctcaaaccaccccatacatttacaagtgagaaagccaaggccctgaacctggtcctgagacagggggaggaagagtgggagctaggaagcaytgagacagggggaggaagggcgggagctgggaagcacctgagacagggggaggaagggcgggagctgggaagcctctctctctctctctccttttttttttttttttttttttttttttgagacggagtctcactctactgcccaggctagagtgcaatgacacaatctctgctcactggaaactccgcctcctgggttcaagtgattctcctgcctcagcctcctgagtagctgggattacaggtgtgcaccaccatgcctggctaatttttgtatttttagtagagatggggtttcaccacgttggccaggctgatctcctgacctcaagcgacccacccacctcggcctcccagtgttg

SEQ ID NO: 7978 - DNA, 917 bp, Homo sapiens
aaaagtctaagctagacgctacatgcagaatttgaattgtaggtcagaagaatttgaggttaggcatttgaatatgaggtcaagagtcaagctattcattttaataaatgattgttaaaaatggagaaaacttttcaagattgagaggtcaggtaggagaaacagtccaagcctacattactaggcaaaagccactaatgaatgctaaaatttgcaagtgaaagtttgatgaggatagagattaagagcaccctctcaaaaattacttactaattacaaaggaaatataatacctgtacagtacacggagaaaccagggaataccagyttaactaggggaggaagccttagcccagcacacatagctggtgtgtatacacacacacacacacacacacacacacacagagtttacatagtcagaaaaagatctccagtattgggacaagctgacgctgtacacatccatatgtgacacactgagaagggagaaacatcacttcccccatattcttgatgtgcatggaatgtctattcatatacacagaagggggaagagggaaagaaggaaggtacaaggagaatcacaaaggtaccaaaaagagggggaagtcaagaatcagtattaccgaattggaaaaaaaaaaaaaagtaaatgtcaaacaaacaaacaatctacaaagatggcatccagagatggtattgaaagcactgtgtgaagaacgcaggtgacgtcaagatgaagagactctgtttaattcttcatttttgctatgtgagaagtatgagtgctggaaacctatgttgttcctctactctgacacacttagctactgagaactcgaggctctgaagacgcattggcattttggtcacacaggctgtaaaaaagtggccctccaactacccccgtcctg

SEQ ID NO: 7979 - DNA, 917 bp, Homo sapiens
aaaagtctaagctagacgctacatgcagaatttgaattgtaggtcagaagaatttgaggttaggcatttgaatatgaggtcaagagtcaagctattcattttaataaatgattgttaaaaatggagaaaacttttcaagattgagaggtcaggtaggagaaacagtccaagcctacattactaggcaaaagccactaatgaatgctaaaatttgcaagtgaaagtttgatgaggatagagattaagagcaccctctcaaaaattacttactaattacaaaggaaatataatacctgtacagtacacggagaaaccagggaataccagtttaactaggggaggaagccttagcccagcacacatagctggtgtgtatacacacacacacacacacacacacacacacagagtttacatagtcagaaaaagatctccagtattgggacaagctgacgctgtacacatccatatgtgacacactgagaagggagaaacatcacttcccccatattcttgatgtgcatggaatrtctattcatatacacagaagggggaagagggaaagaaggaaggtacaaggagaatcacaaaggtaccaaaaagagggggaagtcaagaatcagtattaccgaattggaaaaaaaaaaaaaagtaaatgtcaaacaaacaaacaatctacaaagatggcatccagagatggtattgaaagcactgtgtgaagaacgcaggtgacgtcaagatgaagagactctgtttaattcttcatttttgctatgtgagaagtatgagtgctggaaacctatgttgttcctctactctgacacacttagctactgagaactcgaggctctgaagacgcattggcattttggtcacacaggctgtaaaaaagtggccctccaactacccccgtcctg

SEQ ID NO: 7980 - DNA, 917 bp, Homo sapiens
aaaagtctaagctagacgctacatgcagaatttgaattgtaggtcagaagaatttgaggttaggcatttgaatatgaggtcaagagtcaagctattcattttaataaatgattgttaaaaatggagaaaacttttcaagattgagaggtcaggtaggagaaacagtccaagcctacattactaggcaaaagccactaatgaatgctaaaatttgcaagtgaaagtttgatgaggatagagattaagagcaccctctcaaaaattacttactaattacaaaggaaatataatacctgtacagtacacggagaaaccagggaataccagtttaactaggggaggaagccttagcccagcacacatagctggtgtgtatacacacacacacacacacacacacacacacagagtttacatagtcagaaaaagatctccagtattgggacaagctgacgctgtacacatccatatgtgacacactgagaagggagaaacatcacttcccccatattcttgatgtgcatggaatgtctattcatatacacagaagggggaagagggaaagaaggaaggtacaaggagaatcacaaaggtaccaaaaagagggggaagtcaagaatcagtattaccgaattggaaaaaaaaaaaaaagtaaatgtcaaacaaacaaacaatctacaaagatggcatccagagatggtattgaaagcactgtgtgaagaaygcaggtgacgtcaagatgaagagactctgtttaattcttcatttttgctatgtgagaagtatgagtgctggaaacctatgttgttcctctactctgacacacttagctactgagaactcgaggctctgaagacgcattggcattttggtcacacaggctgtaaaaaagtggccctccaactacccccgtcctg

SEQ ID NO: 7981 - DNA, 917 bp, Homo sapiens
aaaagtctaagctagacgctacatgcagaatttgaattgtaggtcagaagaatttgaggttaggcatttgaatatgaggtcaagagtcaagctattcattttaataaatgattgttaaaaatggagaaaacttttcaagattgagaggtcaggtaggagaaacagtccaagcctacattactaggcaaaagccactaatgaatgctaaaatttgcaagtgaaagtttgatgaggatagagattaagagcaccctctcaaaaattacttactaattacaaaggaaatataatacctgtacagtacacggagaaaccagggaataccagtttaactaggggaggaagccttagcccagcacacatagctggtgtgtatacacacacacacacacacacacacacacacagagtttacatagtcagaaaaagatctccagtattgggacaagctgacgctgtacacatccatatgtgacacactgagaagggagaaacatcacttcccccatattcttgatgtgcatggaatgtctattcatatacacagaagggggaagagggaaagaaggaaggtacaaggagaatcacaaaggtaccaaaaagagggggaagtcaagaatcagtattaccgaattggaaaaaaaaaaaaaagtaaatgtcaaacaaacaaacaatctacaaagatggcatccagagatggtattgaaagcactgtgtgaagaacgcaggtgacgtcaagatgaagagactctgtttaattcttcatttttgctatgtgagaagtatgagtgctggaaacctatgttgttcctctactctgacacacttagctactgagaactcgaggctctgaagacgcattggcattttggtcacrcaggctgtaaaaaagtggccctccaactacccccgtcctg

SEQ ID NO: 7982 - DNA, 803 bp, Homo sapiens
ccgagtggctgttgccattttacctcttcaaggagcctgaatctaaagccaacacagcaaaaggcagacccaagaggtggagagagatcagctgctgctgacatcctttcagtcctgaatcaagtttgttcactagattcttaactacaagagacagagaggaaaacaaaacccctttgctcaggccagttggagtcagggttttctaacatttttgcaagcgaacaagtctcaagtgattcgccctactatttaaaaatgcatatgagaggctgggcgyggtggctcacgcctttaatcccagcactttgggaggccgaggagggcgaatcacgaggtcaggagatcaagaccatcctggctaacacggtgaaatcccgtctctactaaaaatacaaaaaaattagccgggcatggtggtgggcgcctgtagtcccagctactccagagggtgaggcaggagaatggtgtggacccaggaggcagagcttgcagtgagtgagccgagatctcgctactgcattccagcctgggtgacagaggagactccgtctcaaaaaaaaaaaaaaaaaatgcctatgaatgacggcatgtgtgtaccgagctggggcagaggttagagaaatttaaaaatgcatttgaataacagcatatctctacagagctggggcaaatgttagagaaagcaatctatgtaaaacagccgaccaggcccgtacacagtaggtgctcagtaaaggctgtctccctgtcctgtcctcaaatatctgcttcttgatctgggcttcaaagctgatcccatt

SEQ ID NO: 7983 - DNA, 651 bp, Homo sapiens
agtagtgacttttacaktttatatctaaatagaagctggaggtttagtctggggactcataggcataaaatattatttattatagagttaaatgctacaaagacaaatctaattaataggcctattttcctttttaaattctactcataatttcttcatagtttttatgataaaaggttggattttgattagaactcccatgattttgtgtcagaattaaaactggtattagaataaataattcaaaagctagagaaagagtacaaagagaagccatgagttgcatttgaattataatattatgtcttacagatttggggtatatgctaaagttaccaaagttgtagaaaataaggccgggcattgtggctcacatctgtaattccagcactttgggaggccgaggtgggcggatcatttgaggtcaggagttcgagaccagcctggccaacatggtgaaactccgtctgtactaatagtacaaaaattagccaggcgtgatggtgtgcacctgtagtccttgctactcagaaagctgaggcaggagaatcgcttgtacccaggaggcagaggttgcagtgagcagagattgtgccactgcactccagcctgggtgacagagtgctatgagtcaccacacctggtatgagc

SEQ ID NO: 7984 - DNA, 651 bp, Homo sapiens
agtagtgacttttacagtttatatctaaatagaagctggaggtttagtctggggactcataggcataaaatattatttattatagagttaaatgctacaaagacaaatctaattaataggcctattttcctttttaaattctactcataatttcttcatagtttttatgataaaaggttggattttgattagaactcccatgmttttgtgtcagaattaaaactggtattagaataaataattcaaaagctagagaaagagtacaaagagaagccatgagttgcatttgaattataatattatgtcttacagatttggggtatatgctaaagttaccaaagttgtagaaaataaggccgggcattgtggctcacatctgtaattccagcactttgggaggccgaggtgggcggatcatttgaggtcaggagttcgagaccagcctggccaacatggtgaaactccgtctgtactaatagtacaaaaattagccaggcgtgatggtgtgcacctgtagtccttgctactcagaaagctgaggcaggagaatcgcttgtacccaggaggcagaggttgcagtgagcagagattgtgccactgcactccagcctgggtgacagagtgctatgagtcaccacacctggtatgagc

SEQ ID NO: 7985 - DNA, 651 bp, Homo sapiens
agtagtgacttttacagtttatatctaaatagaagctggaggtttagtctggggactcataggcataaaatattatttattatagagttaaatgctacaaagacaaatctaattaataggcctattttcctttttaaattctactcataatttcttcatagtttttatgataaaaggttggattttgattagaactcccatgattttgtgtcagaattaaaactggtattagaataaataattcaaaagctagagaaagagtacaawgagaagccatgagttgcatttgaattataatattatgtcttacagatttggggtatatgctaaagttaccaaagttgtagaaaataaggccgggcattgtggctcacatctgtaattccagcactttgggaggccgaggtgggcggatcatttgaggtcaggagttcgagaccagcctggccaacatggtgaaactccgtctgtactaatagtacaaaaattagccaggcgtgatggtgtgcacctgtagtccttgctactcagaaagctgaggcaggagaatcgcttgtacccaggaggcagaggttgcagtgagcagagattgtgccactgcactccagcctgggtgacagagtgctatgagtcaccacacctggtatgagc

SEQ ID NO: 7986 - DNA, 651 bp, Homo sapiens
agtagtgacttttacagtttatatctaaatagaagctggaggtttagtctggggactcataggcataaaatattatttattatagagttaaatgctacaaagacaaatctaattaataggcctattttcctttttaaattctactcataatttcttcatagtttttatgataaaaggttggattttgattagaactcccatgattttgtgtcagaattaaaactggtattagaataaataattcaaaagctagagaaagagtacaaagagaagccatgagttgcatttgaattataatattatgtcttacagatttggggtatatgctaaagttaccaaagttgtagaaaataaggccgggcattgtggctcacatctgtaattccagcactttgggaggccgaggtgggcggatcatttgmggtcaggagttcgagaccagcctggccaacatggtgaaactccgtctgtactaatagtacaaaaattagccaggcgtgatggtgtgcacctgtagtccttgctactcagaaagctgaggcaggagaatcgcttgtacccaggaggcagaggttgcagtgagcagagattgtgccactgcactccagcctgggtgacagagtgctatgagtcaccacacctggtatgagc

SEQ ID NO: 7987 - DNA, 612 bp, Homo sapiens
attgtagaagggatagctccctatagctattatttaagagtgataggatagggagagcagggggaatggatgcttgtcagagtagaatatattagatcagttcaaaagtaattgccattttgccattacttttaatggcaaaaaccacaattacttttgcaccaacctaatatcatgcaatgactttggacaactgatcctatttctgacaaatggctgagtcccttgtgttagtttgagaaaagactattctgaaaagggcttttgaggaagaatccagaatgtctatgcaaccccaggaaaatcagttgccctttgaacctctagatgtttatgtgtaaaattagagtttcaggcaatgaatctccaagatctctttatgctstcacatgctgcatctcagtgatatggtttcacttcctgtacccacccaaatcccatctggaattgtaatccccacgtgtcaagggagatacctggtgggaagtgattggatcatgggggcggttccccccatgctgttctcctgatagtgggtaagttctcacaagatctgatggttttataaggggctcttccctcttcactctcacttctctctcctgccacctt

SEQ ID NO: 7988 - DNA, 734 bp, Homo sapiens
caaaaatgagacaccaaaggccatatttccaaaattgagttgagcaagtacatccacaaaaaacagagacacacactaagtgccagactttccctgtcttcatatcatagtttcaaggcacaaaatgcaaaatcacatctgcagaaatgcatccagacatagaattacacaattattgccccatagaaagaaggcacaggtgtttcagactttagagacacttctacccctcatagaccaccccacctgtattctctcgatttgttttccaaaagatgatttttatcctagagacaaggtatcttaaaaaagaccacagtctttacaaggaagcaggtgtgagtgtgtgtgtttgtctgttgcgtggcaaacagctgggtctaatattcctggaggaatccagcatgtggactgaattctctagttctactacttctcagattatttgctgaacacactttaccatgcaaatagtaacgaggattcagccaatgagaaaggagaattgaaagatgcaaaatgtctcagatggacacagagctaatagtttgagaacatttcagcagctacaactgaggttttcttaggcttgagaaagttggctctttagccttcattgccacatgttttaaattgtcaggcaaggctgggaggagaagtcctttgtattaataaagtgctgagtttttcacacagaaatgaattgtaaataggtttttatttccyaacagtga

SEQ ID NO: 7989 - DNA, 837 bp, Homo sapiens
cagctcaggacaagattcattctgaggcccagattttgctcatagtwtattgggggaacccgccctgataattcaatgtaggttcttttctgttttccctatgtgtcggctggtctgagaaataaagggaaagagtacaacagagagaaattttaaagctgggtgcccgggagagacatcacatgtcggcaggttccatgaagccccccaagccgcaaaaccagcaattttttattagtgattttcaaaggggagggagtgtacgaatagggtgtgggtcacagagatcacatgcttcacaaggcaataaaatatcacaaggcaaatgggggcagagcatcggggcaaaattaaaattgctaatgaagtttcgggcatgcattgtcattgataatatcttatcaggaggcagggtttgagagcagacaaccggtctgactaaaatttactagtcaggaatttcctcgtcctgataggcctgggagtgctacgggagaccggggcttatttcatcccttatctacaactgtataagacaggcattcccagagcagccatttcagagacctccccctaggaacgcattctctttctcagggctgttccttgctgagaaaaagaattcaacgatatttctcctatttgtttttgaaaagagaaatatggctctgttctgcctggctctcaggcagccagatctaatggttatctccctagttccctgaacatcgctgttatcctgttcttttttcaagttgcccagatttcatattgtttaaacacacatgctttacgaacaatttgtgcagttaacgcaatcatcacagggtcctgagg

SEQ ID NO: 7990 - DNA, 837 bp, Homo sapiens
cagctcaggacaagattcattctgaggcccagattttgctcatagtatattgggggaacccgccctgataattcaatgtaggttcttttctgttttccstatgtgtcggctggtctgagaaataaagggaaagagtacaacagagagaaattttaaagctgggtgcccgggagagacatcacatgtcggcaggttccatgaagccccccaagccgcaaaaccagcaattttttattagtgattttcaaaggggagggagtgtacgaatagggtgtgggtcacagagatcacatgcttcacaaggcaataaaatatcacaaggcaaatgggggcagagcatcggggcaaaattaaaattgctaatgaagtttcgggcatgcattgtcattgataatatcttatcaggaggcagggtttgagagcagacaaccggtctgactaaaatttactagtcaggaatttcctcgtcctgataggcctgggagtgctacgggagaccggggcttatttcatcccttatctacaactgtataagacaggcattcccagagcagccatttcagagacctccccctaggaacgcattctctttctcagggctgttccttgctgagaaaaagaattcaacgatatttctcctatttgtttttgaaaagagaaatatggctctgttctgcctggctctcaggcagccagatctaatggttatctccctagttccctgaacatcgctgttatcctgttcttttttcaagttgcccagatttcatattgtttaaacacacatgctttacgaacaatttgtgcagttaacgcaatcatcacagggtcctgagg

SEQ ID NO: 7991 - DNA, 837 bp, Homo sapiens
cagctcaggacaagattcattctgaggcccagattttgctcatagtatattgggggaacccgccctgataattcaatgtaggttcttttctgttttccctatgtgtcrgctggtctgagaaataaagggaaagagtacaacagagagaaattttaaagctgggtgcccgggagagacatcacatgtcggcaggttccatgaagccccccaagccgcaaaaccagcaattttttattagtgattttcaaaggggagggagtgtacgaatagggtgtgggtcacagagatcacatgcttcacaaggcaataaaatatcacaaggcaaatgggggcagagcatcggggcaaaattaaaattgctaatgaagtttcgggcatgcattgtcattgataatatcttatcaggaggcagggtttgagagcagacaaccggtctgactaaaatttactagtcaggaatttcctcgtcctgataggcctgggagtgctacgggagaccggggcttatttcatcccttatctacaactgtataagacaggcattcccagagcagccatttcagagacctccccctaggaacgcattctctttctcagggctgttccttgctgagaaaaagaattcaacgatatttctcctatttgtttttgaaaagagaaatatggctctgttctgcctggctctcaggcagccagatctaatggttatctccctagttccctgaacatcgctgttatcctgttcttttttcaagttgcccagatttcatattgtttaaacacacatgctttacgaacaatttgtgcagttaacgcaatcatcacagggtcctgagg

SEQ ID NO: 7992 - DNA, 837 bp, Homo sapiens
cagctcaggacaagattcattctgaggcccagattttgctcatagtatattgggggaacccgccctgataattcaatgtaggttcttttctgttttccctatgtgtcggctggtctgagaaataaagggaaagagtacaacagagagaaattttaaagctgggtgcccgggagagacatcacatgtcggcaggttccatgaagccccccaagccgcaaaaccagcaattttttattagtgattttcaaaggggagggagtgtacgaatagggtgtgggtcacagagatcacatgcttcacaaggcaataaaatatcacaaggcaaatgggggcagagcatyggggcaaaattaaaattgctaatgaagtttcgggcatgcattgtcattgataatatcttatcaggaggcagggtttgagagcagacaaccggtctgactaaaatttactagtcaggaatttcctcgtcctgataggcctgggagtgctacgggagaccggggcttatttcatcccttatctacaactgtataagacaggcattcccagagcagccatttcagagacctccccctaggaacgcattctctttctcagggctgttccttgctgagaaaaagaattcaacgatatttctcctatttgtttttgaaaagagaaatatggctctgttctgcctggctctcaggcagccagatctaatggttatctccctagttccctgaacatcgctgttatcctgttcttttttcaagttgcccagatttcatattgtttaaacacacatgctttacgaacaatttgtgcagttaacgcaatcatcacagggtcctgagg

SEQ ID NO: 7993 - DNA, 727 bp, Homo sapiens
attaaaaaggtgtttattctagcacagctgaacacaataaagcctgaaccaggacagagccctgggatcgggtggagggaaggggtgcaacagaaatctctggggagcaagttaaaacacagattcccatgctttgcccagagacccagatcttgtaggtctaaggaggggcccaagaatctgaatatttagcaagacctccccacagggtgctgctgttgcaggtaatcctcatgcccaccactgttattaagcccacaatcatcctcgcccccctccttcttactgcctctgtggcctctgcctggaaagttcttcccattctgctctcgcttggcaaatgccttctccttcaagacccggcagtgcaaatgttcataggtaaaccctttccgagtgcttgctttgtgctttgcaccacattattactttataaagaaacactatttaattcttaaaaaaaaaraaaaaagaaaaaaaactctacagagtaggtctcctaataaaccccattttacagacgaggaaactgaggcaaagcgcacttgactaactggcccattacccatactgctgagatgtatgttttctttctttctttttttttttttttttttttgagaaggggtctcactgtcgcccaggctgaagttcagtggttcgatcatagttcactgcagtcttgaacttctgggttcaagtgattctctcacctcagcctcccaag

SEQ ID NO: 7994 - DNA, 1984 bp, Homo sapiens
atccagtttctgcagaagccagacttgcaaattaaatagatatgataataaccattttccttgcattttttgtatccttaagggtggcattagtctccaccatcccctccactagattgcaatattgtttctaatctactcttttttcctgggagaagggggcagtttcagagatttccacttcaccttccctctagagatgcttgttctattaaccattgccacaactctccatgggtcaagaccccttgattgtcactccaaccttgctggctataaygatatttagaaccccttggcttctgtttgttaaatgctgctacctagcctccactgcttcaaggcaagaaagctccactgcttcaaggagagagggccccactgcttcaaggaggaagagctatcaatgggccaagttttgtgacagccactcttaccatcagccctagcctataaagaaggcgggaccactaacttcttagaaatgctggtgctcctctcaccagggagtcctggtggctttggtgaatagtgcattcccatggaacataatctggtgagtcttctggcctcatgtaatgtatccactccagcatgaccacttccatgactcttttaatcccttccttctccatctgtcatggcaattcgggtattttaacttcactcggcatgagccattgctttctcaggcttctggagcctttctgacaacaaatctgtaccaacccctggggtccttctcaagaggttacagcctatatccggaaagaatactcccaagtcagtaagttatctcttatcgaggcttatattccaactccttttatcaagcaccctcaaaatccaaacccaagtctacttcccctgctcaggctgacacatgcttgctaaattctgctagtgctttagagtatagtcccttttctcccttattaggaatataatttattgacacaagaatgtgttaccagaagatatggaaaatatgaatggtttcatttccactaaggaattaaatcaataattaaaaaccatggttagaaaacatcttcatacctagctggtttcataagcaagttctaccaaacatttatggaaaaaataatggaaagacagcctttttaacaaatagtacctgaacaattggacatcaaagaccaaaaaacaaatctcaacgtaaacttcacaccttccacaaaaattactcaaaatggatcatagacttcatgatcagggtgattcaaactcccattaaagttggggaagtcaaataaactgggacatgtgtgttatgtaagacatgacatttagaaaaaaataagaattgagcccaggaggtggaggttgctatgagctaagattgcgccagggcactccagcctgggtgagaaaaccagactctgtcttaaaaaataaagtaaaataacaataaaataaatagaaaaaataattttaggacctaggactaggtaaaaaaaaattcacatttgataccaaaagcatgcataatccataaaagaaaaaagcaacaaattagatttcatcaaaattttaaaatcttgctcttcaaaaagcccttgtcaagagaatgaaaagacaaactacagactgggaaaaagtaattgcaaaccacttaattgacaaaggacttgtattcagaatatataaataattctcaaaactcgaaagtaagcaaatgtaccatccagttagaaaatggacaaaaaacatgaatagactgaggagaatacacagatggcaaataagtaatggtatcttgattgtgtcgggttttaaaatccttattttaaagatacatactgaaatattgtggtagtcagaataacatttcccccaaaagaatatccacatcctaatccctgagacctgtacacagccagaaggaattaaggttgctaatcctgactttgagatagggagaatatcctggagtatctgagtaagcccagcataatcacaa

SEQ ID NO: 7995 - DNA, 1984 bp, Homo sapiens
atccagtttctgcagaagccagacttgcaaattaaatagatatgataataaccattttccttgcattttttgtatccttaagggtggcattagtctccaccatcccctccactagattgcaatattgtttctaatctactcttttttcctgggagaagggggcagtttcagagatttccacttcaccttccctctagagatgcttgttctattaaccattgccacaactctccatgggtcaagaccccttgattgtcactccaaccttgctggctataacgatatttagaaccccttggcttctgtttgttaaatgctgctacctagcctccactgyttcaaggcaagaaagctccactgcttcaaggagagagggccccactgcttcaaggaggaagagctatcaatgggccaagttttgtgacagccactcttaccatcagccctagcctataaagaaggcgggaccactaacttcttagaaatgctggtgctcctctcaccagggagtcctggtggctttggtgaatagtgcattcccatggaacataatctggtgagtcttctggcctcatgtaatgtatccactccagcatgaccacttccatgactcttttaatcccttccttctccatctgtcatggcaattcgggtattttaacttcactcggcatgagccattgctttctcaggcttctggagcctttctgacaacaaatctgtaccaacccctggggtccttctcaagaggttacagcctatatccggaaagaatactcccaagtcagtaagttatctcttatcgaggcttatattccaactccttttatcaagcaccctcaaaatccaaacccaagtctacttcccctgctcaggctgacacatgcttgctaaattctgctagtgctttagagtatagtcccttttctcccttattaggaatataatttattgacacaagaatgtgttaccagaagatatggaaaatatgaatggtttcatttccactaaggaattaaatcaataattaaaaaccatggttagaaaacatcttcatacctagctggtttcataagcaagttctaccaaacatttatggaaaaaataatggaaagacagcctttttaacaaatagtacctgaacaattggacatcaaagaccaaaaaacaaatctcaacgtaaacttcacaccttccacaaaaattactcaaaatggatcatagacttcatgatcagggtgattcaaactcccattaaagttggggaagtcaaataaactgggacatgtgtgttatgtaagacatgacatttagaaaaaaataagaattgagcccaggaggtggaggttgctatgagctaagattgcgccagggcactccagcctgggtgagaaaaccagactctgtcttaaaaaataaagtaaaataacaataaaataaatagaaaaaataattttaggacctaggactaggtaaaaaaaaattcacatttgataccaaaagcatgcataatccataaaagaaaaaagcaacaaattagatttcatcaaaattttaaaatcttgctcttcaaaaagcccttgtcaagagaatgaaaagacaaactacagactgggaaaaagtaattgcaaaccacttaattgacaaaggacttgtattcagaatatataaataattctcaaaactcgaaagtaagcaaatgtaccatccagttagaaaatggacaaaaaacatgaatagactgaggagaatacacagatggcaaataagtaatggtatcttgattgtgtcgggttttaaaatccttattttaaagatacatactgaaatattgtggtagtcagaataacatttcccccaaaagaatatccacatcctaatccctgagacctgtacacagccagaaggaattaaggttgctaatcctgactttgagatagggagaatatcctggagtatctgagtaagcccagcataatcacaa

SEQ ID NO: 7996 - DNA, 786 bp, Homo sapiens
atttgaagacagggaaaatagaaaatttttattgtaaagggaagaacttatccttttaattttatggactaacagagtctgcaggtcttaactcatttcagcctgtcaaatgtgcaattaaaaatgaattttctaattgtattcaaatgaggctctatagtgaatacagaatcactcttctaagttttttcccakttaatttgtttaaaagtgttgtactctcttgcaagaacgtttaaaagttaagtcttgtaactgttaacatctaatgtattaatataagccatttgttttttaccatttttttaaggccgtattcaatagtctgtaaataaattgccgtaacactcccaggccatttttcagccttgtttgctttttgcttctatccagaacagactttttgaagtaatcttatctgataaagatgaccacttgtaatccactgtgccgtttttttgacaaaggttaagatgtggaatctttttttttctttttataattagtacatatttggaaataggaacacagagaagaacacccccagataaccacataatattttgcctttgatggatgtatttgaatgcatatcttgtttttttttttcttaaaacaatgggatcatactgcccatagctttgtaatttgaattttttcatttaataatatgttgtgaacatctcttggtatcagtcagttaaattctatcctctttcccccagtctggaatgcagtgtcgacatcatggctcactgcagccttgaactcctaggctcgagtgat

SEQ ID NO: 7997 - DNA, 786 bp, Homo sapiens
atttgaagacagggaaaatagaaaatttttattgtaaagggaagaacttatccttttaattttatggactaacagagtctgcaggtcttaactcatttcagcctgtcaaatgtgcaattaaaaatgaattttctaattgtattcaaatgaggctctatagtgaatacagaatcactcttctaagttttttcccagttaatttgtttaaaagtgttgtactctcttgcaagaacgtttaaaagttaagtcttgtaactgttaacatctaatgtattaatataagccatttgttttttaccatttttttaaggccgtattcaatagtctgtaaataaattgccgtaacactcccaggccatttttcagccttgtttgctttttgcttctatccagaacagaytttttgaagtaatcttatctgataaagatgaccacttgtaatccactgtgccgtttttttgacaaaggttaagatgtggaatctttttttttctttttataattagtacatatttggaaataggaacacagagaagaacacccccagataaccacataatattttgcctttgatggatgtatttgaatgcatatcttgtttttttttttcttaaaacaatgggatcatactgcccatagctttgtaatttgaattttttcatttaataatatgttgtgaacatctcttggtatcagtcagttaaattctatcctctttcccccagtctggaatgcagtgtcgacatcatggctcactgcagccttgaactcctaggctcgagtgat

SEQ ID NO: 7998 - DNA, 811 bp, Homo sapiens
acatgtctcttctactctgatgttttgtgggactcccatgtgtacttgcatagttcaatatggtttttctcctgttagtctgtcttacatcagtttaatttgtagcccagctaaggaacttacaaggatggaagatagccccgtctttctctgctacattctctagtttaaaaaatcatttgctattaattcctcaagtttaactttattctttccaaagtacaatattgtgcaaggagatcaccaaagagctttctccttggaacccatctctctaggtgcctcaggggcctcatttgaaagtttcttttgttgttgttgttgttgttgttgttgttgttttgagactgtctcactgtgttcgccsaggctggagtccactggtgagatcttggctcaccacaacctccgccacccgtgttcaagagattctcctgcctcagcctcccgagtagctgggactacaggcgcacacccccatgcctggctaatttttgtattttaagagagattgggtttcactatgccaagctggtctcgaactcctgatctgccttcctcagcctcccaaagtgctggaattacaggcatgagccaccgtgcccggcctggcaaagtttctacctaatttttcccattcccgtgcctacaagacccgcctgagcagaaagctatgctggacacttgccggtggaggagagcacttttttttctctctctctctttttgtagagagtggtgaaaagcactagctggcactgccttttagaaatgcatctgatttacatgcaggcctaaaaagagaaacatc

SEQ ID NO: 7999 - DNA, 803 bp, Homo sapiens
ctggtgcactttttcttatcctcttattgctatcttcactatttcctgaaattcatcttcttgtttttatccagtctcttctattgctctctttatctcctctttcccttatagaatcagttaattctctatattcaaaagagtaaatgttaccaggtatttcccatattgctttgctagggctgctataatggagtataccacagactgggtggcttgcacaacagaagttgttctcacaattctgaaggctataatccaaggccaatgtgtccacaaggytcatctcttttgaggcctctctttggcttgtacatggccatcttcaccctgtatcctcatagggtctttcctctctgtgtgtctgtcttaatttatgcttttcatgaggacaccagtcatattagatagggcccgccctaatgacttcattttaacctaattatccctttatagaacctgtctttgtttgtgctgctataacagaataccacagactggataatttgttaaaaaaaaacaaaacaaaaaaaaccagaaacttatttttagcagtctggagactgggccaagatcaaggcacaggcaggttcattttctggtaagggtcctatctctgcttccaagatggtgccttgaatgccatgacctccagaggggaggaatgctgtgtcctcacatggcagaaggcagaaagacaaaaagggacaaacttccttcatcaggcagaaggcagaaagacaaaaagggacaaactcctttaatcaggcagaaggcagcaggacaaaaagggacaaacttcc

SEQ ID NO: 8000 - DNA, 554 bp, Homo sapiens
ctttgcttgttgtatgtcctcagtatgtaattttaataatttagtcaatgttctaccacttcagattctcctaagttcaaaccacatgaaagctgtccacccattaattgttttcagtcaattcctaaaaaacgtgttctttcaaaaagggtcctattcagtcacattaataagaattcagtttggtgaaatcagagcagttgtggatagtgtttgaggytgaccctatttagatcaaaaccagcagaaattagtggtaaggcttcgatggggtcagttcaggaagaggtttttaataagataacagtcagagggaaggtgagggagtccattcagttggcaagaggaattttgagcacaggacatccccgagctgcaagtcaggcagagggacactgcagatgctactcaagtctgtggcagaggaagaagcatccgctcagaggacagcaccctgggtgagtctgagggaggatgcatccgctcagaggacagtgccccgggtgagtctgagagagaaacactgcctcattactcagtgggtgcaggagccc

SEQ ID NO: 8001 - DNA, 683 bp, Homo sapiens
  misc_feature (1)...(683): n = A,T,C or G
tttcaagccagaagtttgagaccagcctggatgacatascaagactctgtctctaccaaaaaaaaattttttaagtagccagttgtgatgatgtgtacctgttgtctcagccactcaagaggctgaggtggaaagatggcttgagcctgggagttggaggctgcagtgaactatgatcgagccactgcactccagcctgtgtgacaaagtctcactttatgtgagacccccatctctaaaaagaaaaaagaaaaatatatatctaggttcagaacatagacaacttgcttacagaccttcgtgaatgcaaaatgtgataattcttttcagaagaaagattttttaaaaaaataagcagggtctcnatggtacccataaaggcaaatcttgctttgtgagtattacatcaacatgaacagctggaacaggttgaacaaaaatggctggggagaagaaggtgggggaatttggagagagagtgaataaagaaaatgccaacccaaaccagaagctgtgtaacttatgccttgattcattagtactgcattcaaagaaatcagagtttcgaacctttttttcaaaggtacttcccctccatcctgttcaaatcaaagatggtaaaaactattatgctattttttaaaagaaaagtaaatgatttgaattagatatattttaaaaat

SEQ ID NO: 8002 - DNA, 814 bp, Homo sapiens
atctgtgaaccaaataaaatctggattgtacaaggttctttcctgtaactcagctcttgggagaaggagttgagcagttaagtgtcaaacagttatggtgagatgcgttgaatggaaggggcaaaagcgtagcagagttcaactattgcattgagtaatagttacrttaggagatgaaagtaaaaggatctcataagaagccagtggactcattgattaacattgggtgtgatatgaatttaagagtgcttcaatggaatgaatggagcatatatagttatgggggacccattgttatttcttctatagacctaaatagcagggcaatagctgaaatagcacttagacatgggggcaggccttgagccactgagtccaccctctggttgtaataccctgtgggtctgttatgattcccatgtttttgtataagaactctcaaggcattcccatgtgtttaatgcacaaataaagagaaaggcattttgtaatttgggtgtcctaaagctggagttccattagggcttgtttagtttgatttatggctttctggcttttttctgtccatattaatagctctggctggtcaatttttagtaattcacaaagaggttaggtcattggagaaaaatcaggattacagttttgacgatatcctgccaatcagaggaagcctcatagctatttcttagtgtttggttttagaaaggcaattatgcctttaactctatcagagttgatggaaaacccctccttagatattgaatgacccaaacatttaacttgttcttggcataactggagtttttcttta

SEQ ID NO: 8003 - DNA, 814 bp, Homo sapiens
atctgtgaaccaaataaaatctggattgtacaaggttctttcctgtaactcagctcttgggagaaggagttgagcagttaagtgtcaaacagttatggtgagatgcgttgaatggaaggggcaaaagcgtagcagagttcaactattgcattgagtaatagttacgttaggagatgaaagtaaaaggatctcataagaagccagtggactcattgattaacattgggtgtgatatgaatttaagagtgcttcaatggaatgaatggagcatatatagttatgggggacccattgttatttcttctatagacctaaatagcagggcaatagctgaaatagcacttagacatgggggcaggccttgarccactgagtccaccctctggttgtaataccctgtgggtctgttatgattcccatgtttttgtataagaactctcaaggcattcccatgtgtttaatgcacaaataaagagaaaggcattttgtaatttgggtgtcctaaagctggagttccattagggcttgtttagtttgatttatggctttctggcttttttctgtccatattaatagctctggctggtcaatttttagtaattcacaaagaggttaggtcattggagaaaaatcaggattacagttttgacgatatcctgccaatcagaggaagcctcatagctatttcttagtgtttggttttagaaaggcaattatgcctttaactctatcagagttgatggaaaacccctccttagatattgaatgacccaaacatttaacttgttcttggcataactggagtttttcttta

SEQ ID NO: 8004 - DNA, 560 bp, Homo sapiens
aactttttatctttcatatagctacaccattatctcacgtgattttttgaaaagccaatttttaatttgttcatttgtcctcctttaatttgacaagctgyctctctctttttttttttttcaagacagagtcttgctctgttgcccaggctggagtgcagtggcgcaatcttggctcactgaaacctccacctcctgggttcaagtgattctcctgcctcagcctccagagtagcagggattacaggtgcctgccaccacgcccagctaatttgtgtatttttagtagagatggggtttcaccatattggctagactagtcttgaactcctgacctcaggtgatctgcccacctaggcctcccaaagtgttgagattacaggcatgagtcactgcgcccggccagacaagatgtctttatcacacagtgaaattccaacatgtattgggtttatatcaggatttccaatttgattcaataccattctttttattattattacttactaaaatgttataattttttagcttttttccccaaaattagcacacaaccacat

SEQ ID NO: 8005 - DNA, 560 bp, Homo sapiens
aactttttatctttcatatagctacaccattatctcacgtgattttttgaaaagccaatttttaatttgttcatttgtcctcctttaatttgacaagctgtctctctctttttttttttttcaagacagagtcttgctctgttgcccaggctggagtgcagtggcgcaatcttggctcactgaaacctccacctcctgggttcmagtgattctcctgcctcagcctccagagtagcagggattacaggtgcctgccaccacgcccagctaatttgtgtatttttagtagagatggggtttcaccatattggctagactagtcttgaactcctgacctcaggtgatctgcccacctaggcctcccaaagtgttgagattacaggcatgagtcactgcgcccggccagacaagatgtctttatcacacagtgaaattccaacatgtattgggtttatatcaggatttccaatttgattcaataccattctttttattattattacttactaaaatgttataattttttagcttttttccccaaaattagcacacaaccacat

SEQ ID NO: 8006 - DNA, 623 bp, Homo sapiens
acaggctggctccctcctctactgcagtggaaatcttcagctttgagagctgcagaggactgggaaaagaactgaatggttctcaccaggtgcaaagcgcacagcatgatttgttctctcctcgagtggctctatggggtcaatggcaatgtggggatagtactgggtacagtaattatgaaattatgtgtctgggattagaaagaggaaagagggaaggaatcttaaaagcaggcaggcaggccagacgctgtagctcacgcctgtaatcccagcactttgrgaggctgaggcaggtggatcacgaggtcaggagttcaagaccagcctggccaagatggtgaaaccctgtctctattcaaaatacaaaaattagccgggcatggtggcaggtgcctgtaatcccagctacttgggaggttgaggcaggagaataacttgaacctgggaggcggaggttgcagtgagcagagatcacagaactgcactccagcctgggtgacagagtgagactccgtctcaaaaaacaaaacaaaacaaaacaaacaaacacacacaaaacacaaaaaacaggaaggcttcctgaaggaggaagactttgaaagggcccagaggtatcttct

SEQ ID NO: 8007 - DNA, 639 bp, Homo sapiens
  misc_feature (1)...(639): n = A,T,C or G
cagaggtgcatctcaccacactgartatcaccttattgtagagctagctgtacattccttttctcacaacctgagccctacatgccagccaacatcttaatctggaccctcagaagaaacagcaaagccaggtgcggtggctcatgcctgtaactttgggaggctgagaggtgggtggatcgcctgtagtcaggagttcgagaccagcctggccaacatggcgaaaccttgtctctactaaaaacacaaaaattagcccaggtttggcagcacatgcctgtaatcccagctactntggaggctgaggcaggagaatcgcttgaacctgagaggcggatgttgcagtgagccgagatcgggccaccgcactccagactgggggacagagcgagactccgtctcaaaaaaaaaaagaagaaacagcagctgttacagcaatgcccatagactgctggctccaatatgatgactttctgagggcttttcttgaggctttagaccatacattatttttgatccaaaatgctgacccccttatgagataggacacagatgtaccattttaccatttaaaaaaatggagttagccaggcatagtggctcatgcctgtaatcccagcactttgggacgctgaggtg

SEQ ID NO: 8008 - DNA, 783 bp, Homo sapiens
ctgtgtgtttgggcgggtttgtgtttgggcagtgaggtccaatccaaaagtgaggcctcccttgagtgggagggtccaggaggctggcaatactctcaggcttggggcaactggtttcttcacaacaggctctgagccaggaggaaggcagtgtgaactaccttggttataggtttctcattcaaaaagctcaggttcagggaagtgttaagctctagcaggaaatggagctaggacccaggtgtagggaatggccaaggcatatgacagaggctagagtgaaggcttctgtggtttagaggccacatggtgagccctagttgatcctggtgtcgtggaatccagaccacaggcagcaggattcaccttagacgttgcctgctgctgctgctgaggctgctgccctgacttaaactgacaaggggatggggttgaggcggattgagagtggtgtggacatcactgtggactgcatagggccctcatccctgygtgagtggcactgatggggcagtggtggatttccccatgagatggcgctcagagtttatctttctgtgtgcttttttttcttgctttgattaaaaataatgcatactctgcattgtactgttttagaattcatagaaatatgacttgtctttcctaatctcaaaagcagatttcatgtactttcatgattcccaggggattatatttctgatagttatttgtttttccttctgggatgtggtgacagaaggaggcagggcataggttataatctcttaccctgacaccctt

SEQ ID NO: 8009 - DNA, 780 bp, Homo sapiens
ctcctttgtctgcagcacagcaactgatggggcaggatgctggtgtgtgcacacagcccagctcaggacagccacgccaggggctgcgcgcacggcccagctcggcccagctcagcccagctcagggcggccacaccaggggctgcgcgcacagcccagctcaggacggccacgccaggggctgtgcttgcccatcgtggcaaggcaggcaaggggacggccaggatggtaggtggggccccargtgttccggtgttttgtcagtgtggctggggactcccagccgggcaggtgctgcaatgcgctggctcccagagcacctgcagaagcagtcccaggggaccctgaggtcaccttcacctggtacggcagaagacaagatgccctcactcactgctctctgcgttcgaggataaacccctttctagcactggctgtttgttagatgtgtgacagaaagaccctggagagcttctgcactgagatgggcagtggaggctgagccccgctgtccatctggagcacagagccaaacaaatctgaagggctggcagtgaccccaccactccagcgagaaaccagtacccctgtgggcatacttggcagggcccagaaaatacagacccaccaacccacatctaaaatgcatctctttacttccagaaaagcaagtcaatatatcctatctgggaactcgagccaagtaatgggtcaggtcaaataaggcatgatccagtgtcatgaactagcagactaaggcgggaggctgggtcgagagga

SEQ ID NO: 8010 - DNA, 780 bp, Homo sapiens
ctcctttgtctgcagcacagcaactgatggggcaggatgctggtgtgtgcacacagcccagctcaggacagccacgccaggggctgcgcgcacggcccagctcggcccagctcagcccagctcagggcggccacaccaggggctgcgcgcacagcccagctcaggacggccacgccaggggctgtgcttgcccatcgtggcaaggcaggcaaggggacggccaggatggtaggtggggccccaagtgttccggtgttttgtcagtgtggctggggactcccagccgggcaggtgctgcaatgcgctggctcccagagcacctgcagaagcagtcccaggggaccctgaggtcaccttcacctggtacggcagaagacaagatgccctcrctcactgctctctgcgttcgaggataaacccctttctagcactggctgtttgttagatgtgtgacagaaagaccctggagagcttctgcactgagatgggcagtggaggctgagccccgctgtccatctggagcacagagccaaacaaatctgaagggctggcagtgaccccaccactccagcgagaaaccagtacccctgtgggcatacttggcagggcccagaaaatacagacccaccaacccacatctaaaatgcatctctttacttccagaaaagcaagtcaatatatcctatctgggaactcgagccaagtaatgggtcaggtcaaataaggcatgatccagtgtcatgaactagcagactaaggcgggaggctgggtcgagagga

SEQ ID NO: 8011 - DNA, 781 bp, Homo sapiens
tagcaaatgttcgcttactgataaagatattttccttgatcgtgttttcatcaccagaatgtgaaattagatccacctgtgtattccaccattgcctcaaaatactcctggtttaggttattttcttyctttcctagggtctaatggattgcatttatttgttcttattatttttacaaagcatctcaatattacattgtgtgatggttttcagagaggttaagtaacttggccaagcttacaaaggcaatatgtgggaagtgttttttcaaatctaggtctggatttctgttctttcttccatacaataccactttggtagtgagaactaaaattgtttatactcatgtacttgttgtctatattaacatgattgtattatttgtttgtctttactaattttactattccactgttttcatcaacatgtctttaccattctaggagactcttgcctaaggagatgaaaataatattattgtttataccagggccattctgcaaaaatccacttaaatgagcattgcagaatacatagccttaagttgctgtttactctccagtacttcttgtgcatcaaagctttctcattgctttgtccactgatcctagactattgtaccatgatctttactcaatcccagttaagccccaacactgaaaaatgtcttagtgtctggactccaaaaccttacaaatatcccaacttcacctgtcctttccaatgtgttactaagaccacatcaagggagagttctgccctactgtgataagtaataat

SEQ ID NO: 8012 - DNA, 781 bp, Homo sapiens
tagcaaatgttcgcttactgataaagatattttccttgatcgtgttttcatcaccagaatgtgaaattagatccacctgtgtattccaccattgcctcaaaatactcctggtttaggttattttcttcctttcctagggtctaatggattgcatttatttgttcttattatttttacaaarcatctcaatattacattgtgtgatggttttcagagaggttaagtaacttggccaagcttacaaaggcaatatgtgggaagtgttttttcaaatctaggtctggatttctgttctttcttccatacaataccactttggtagtgagaactaaaattgtttatactcatgtacttgttgtctatattaacatgattgtattatttgtttgtctttactaattttactattccactgttttcatcaacatgtctttaccattctaggagactcttgcctaaggagatgaaaataatattattgtttataccagggccattctgcaaaaatccacttaaatgagcattgcagaatacatagccttaagttgctgtttactctccagtacttcttgtgcatcaaagctttctcattgctttgtccactgatcctagactattgtaccatgatctttactcaatcccagttaagccccaacactgaaaaatgtcttagtgtctggactccaaaaccttacaaatatcccaacttcacctgtcctttccaatgtgttactaagaccacatcaagggagagttctgccctactgtgataagtaataat

SEQ ID NO: 8013 - DNA, 781 bp, Homo sapiens
tagcaaatgttcgcttactgataaagatattttccttgatcgtgttttcatcaccagaatgtgaaattagatccacctgtgtattccaccattgcctcaaaatactcctggtttaggttattttcttcctttcctagggtctaatggattgcatttatttgttcttattatttttacaaagcatctcaakattacattgtgtgatggttttcagagaggttaagtaacttggccaagcttacaaaggcaatatgtgggaagtgttttttcaaatctaggtctggatttctgttctttcttccatacaataccactttggtagtgagaactaaaattgtttatactcatgtacttgttgtctatattaacatgattgtattatttgtttgtctttactaattttactattccactgttttcatcaacatgtctttaccattctaggagactcttgcctaaggagatgaaaataatattattgtttataccagggccattctgcaaaaatccacttaaatgagcattgcagaatacatagccttaagttgctgtttactctccagtacttcttgtgcatcaaagctttctcattgctttgtccactgatcctagactattgtaccatgatctttactcaatcccagttaagccccaacactgaaaaatgtcttagtgtctggactccaaaaccttacaaatatcccaacttcacctgtcctttccaatgtgttactaagaccacatcaagggagagttctgccctactgtgataagtaataat

SEQ ID NO: 8014 - DNA, 796 bp, Homo sapiens
ttcaaattccaaaccacctttaattttcattttatttgccttggccatcaccattttctaggtgagtaaacctcctgagtttaagtgactagcccaaaaggatatgactcttaagtcagatagcagragcttaactagattctaagtcttgtatcccacacggacttaacagatattaagaccatgggcataggccctcaaaccttttcttctctgtcctaacagaatcttgctataaattgatgcccatggattaagccccagggcatccagggttggggaaaggtggcataatctataagcaatgatgcatggaccctactctgggccacccatcattgcacccaggagctgtgtagtacctttaggggaaggagaaagatctgagcaaacttcgttccactgagttgcaccctgagcatgcacatgcaccaccagcctcctgtagccaaatgcctctggccaatgagcagaaggtcttcggcaccaggcccccgctggctaagaacatgcttgcatggcccttcccaggcagggtgcttgggtcttggaggtagacctactatgagtgtgggcctcctcctggttccaaatggccaggctacactccttggcctgggtgcttttgacaatcctttagacatcatggaacatttgagttttcttggcaactttgggagagcaggcttttagcaacctaatgcttttcagatgctcttcttcctgaggccagatgcttcttgcttgatcctggggcaccctgccattcaccccaggccagatgtgaactggtctt

SEQ ID NO: 8015 - DNA, 673 bp, Homo sapiens
gtcctggccagcctgtcctcctagagaccccacattatgccccatgcttcagggtcagtagtcatttgatttgttccttttacagttgtatctttattttcttattataataatacctgcttattataaagataaataccacacagtacagaaagataaaaggcagaaaaaaatcacttctgttccctatggttaatagtttgagtttaggcttctatggtgttagaaataaattttcggtgccgcaaaagaaatagcactcgaacgtaaatttaatttctcagcaaggcaattttacttctatagaagggtgggtctcgtggattgagcaatggtgagagcacaactgaacaagggaggggaaggggttcttatcctaacgcagctaatctctactgctgtgtctttcacctattggctagggttggaccacacagtctaagctaattctgattggctattttaaacagagcaggggtatgagctggagtggcagggtgagtagtttsgtggggaggagttacagaacaggtaactaaaggtgactcaggtcagagcaggtgattaggagtgactcagaatggagcaggtgacctggggtgactcaggatggagctaggtgatagaggctaggaggggggttgttactgaaactagggggcaggagacataa

SEQ ID NO: 8016 - DNA, 810 bp, Homo sapiens
ggatcctacaaaatatttaaaggcttattttatagggcatcagatagttaatttggatttattttttggtccaatatcttcccagataatactttataagtgtctaggtttccatttattgtagtctactggcagacagacccttggcagaaaaaccatgctacttagtgatagctctttcttttcgtggtctttctttaaaacctaaaaacaagccaggtattaacaggaaggtcttgtgaaagaatgatcatctctgaaagktgtccccagtcctgaggcctgctctcactgggacagctgttctgctctgaggagctgcctgggggctgtcctcagctccttcttggtcctcatcacacgctccccttccctccagccgaggggtcgcatcctccaggagtttaagatgagcctaggcatcacagcaagacccccatctttaaagaaaataaaaataaaaattagcccagtgtggtggtccctgcctggagtcctagctacctagggggctgagatgggaggatcactggagcctagaaaattgaggctgcagtgagctacggtcgcactgctgcactccagcctaggcaacagagtgagaccttgaaaaaaaaaaaggtagagaagaaaaagaaagaagaaagaaagaaagagagagagagaagaaagaaaaaagaaagaaaagaaagaaagaagaaagaaagaaaaagaaggaaagaaaaagagaaagaaagaaagaatgaaagagaaagagaagaaagaaaaaatatacagaaaaaaatttattttctttagagatggggtatt

SEQ ID NO: 8017 - DNA, 743 bp, Homo sapiens
cactcatatcgctggtctaattgcatccttttcttcgtggcagcttggcctgctgtcccctggctgccaagatgttcttactcacactgctctgccttcactcttgccattgtgttgagaatccatcaatacaaagctgtacaattctaagtacccaggaagtgagcagaccatattgcacagggcaactaagtggtaagagtgaaaacagcgtagcagacggaagccctaagcaggtcctccaggccagaaggagggwtgggagagggaagacactgggggcaagtgacagattacctaatcctagaaacaggtagaaatattaattccctttggggtagaaagtcagaagcaaatgtagctacaatcagtcatagcatgctaatagccaggaagtcacatttgatgctcctggaaatagactgctcacctcgtaggtcagaaggcaattacctccattcagctcaggaaatgcctatttttcaaccagtgagcataatgtttggggatttttgctcatctgttgttccgcctccattggaaagaatatataaaagtcatagccaaaggcaaaacacttgccccgctgacaaacagcccattgaccatggcaaatcctctactgctaaactattagaattacgactcgctgcttccttggcaaatacctgccctagatgaagtgctccaaacgctgtagctgtctctgtctattcccacccctccaaagactctatgatgtt

SEQ ID NO: 8018 - DNA, 743 bp, Homo sapiens
cactcatatcgctggtctaattgcatccttttcttcgtggcagcttggcctgctgtcccctggctgccaagatgttcttactcacactgctctgccttcactcttgccattgtgttgagaatccatcaatacaaagctgtacaattctaagtacccaggaagtgagcagaccatattgcacagggcaactaagtggtaagagtgaaaacagcgtagcagacggaagccctaagcaggtcctccaggccagaaggagggttgggagagggaagacactgggggcaagtgacagattacctaatcctagaaacaggtagaaatattaattccctttggggtagaaagtcagaagcaaatgtagctacaatcagtcatagcatgctaatagccaggragtcacatttgatgctcctggaaatagactgctcacctcgtaggtcagaaggcaattacctccattcagctcaggaaatgcctatttttcaaccagtgagcataatgtttggggatttttgctcatctgttgttccgcctccattggaaagaatatataaaagtcatagccaaaggcaaaacacttgccccgctgacaaacagcccattgaccatggcaaatcctctactgctaaactattagaattacgactcgctgcttccttggcaaatacctgccctagatgaagtgctccaaacgctgtagctgtctctgtctattcccacccctccaaagactctatgatgtt

SEQ ID NO: 8019 - DNA, 743 bp, Homo sapiens
cactcatatcgctggtctaattgcatccttttcttcgtggcagcttggcctgctgtcccctggctgccaagatgttcttactcacactgctctgccttcactcttgccattgtgttgagaatccatcaatacaaagctgtacaattctaagtacccaggaagtgagcagaccatattgcacagggcaactaagtggtaagagtgaaaacagcgtagcagacggaagccctaagcaggtcctccaggccagaaggagggttgggagagggaagacactgggggcaagtgacagattacctaatcctagaaacaggtagaaatattaattccctttggggtagaaagtcagaagcaaatgtagctacaatcagtcatagcatgctaatagccaggaagtcacatytgatgctcctggaaatagactgctcacctcgtaggtcagaaggcaattacctccattcagctcaggaaatgcctatttttcaaccagtgagcataatgtttggggatttttgctcatctgttgttccgcctccattggaaagaatatataaaagtcatagccaaaggcaaaacacttgccccgctgacaaacagcccattgaccatggcaaatcctctactgctaaactattagaattacgactcgctgcttccttggcaaatacctgccctagatgaagtgctccaaacgctgtagctgtctctgtctattcccacccctccaaagactctatgatgtt

SEQ ID NO: 8020 - DNA, 855 bp, Homo sapiens
aaagaaaaaggaaagcctaaaataccatgtcgtatgtgctttacttcactctattaaaacctatatcctttgtaactttttaatttaaaaagttaatttagtaaaacatgtttaatttattttcctaatttctataatcaggtgattatccaccttgcaggggatctttctttcgtgtagttctgctcctgtaatttgacatcttgctcttgagagtcttcttcctttttaaaggcataaaccttttatttttaaaaagtgtaattgaaacataacattattgtaaacacaattcatggttcccacaaaagaatcaatagttaagtgccatcatatttcactttccttaacagatgtactgcttaaatttttatttaaatctaattctatttttgtgctggtataatttcaggaggttttttttctattttttttcttttggacatacttgacaataaattctaatcttttctccccaaaactccttgctaataagtttgtaatctataaatgtgtgcccaaattaagttatgtagctactattttaaaagttgttccgcaaggttaaaacaaattttttaatgtaaagagtgacaacctcacgtagtcactaagccatttcaatttatttcattgtatttttaagccattttccttcttaagtcattttactttatttttttattgctgtatttggatgttctaaaatatattatgtaagcacattttctctaarttacagatttattttgtcttcacatttttaaaataatcctaaatgacataaaatataatgaagctattacataattctggtcctattgtctaaagacaccacaatatagctgatggcaa

SEQ ID NO: 8021 - DNA, 774 bp, Homo sapiens
ttcccgagagcgaggacctgtgccaagcccctcagcacctctggggcgttctgactgatgcctgttattgacagcaccatgttcctctgggagaagtggttgagacgaagggcttgggataaataagccacagcatgctgggccatggtagttcctgactctccctgtaaagcagaggacagacgcaatgatgtgctgaagaatatgrtttaattatttaagtcatccattaggctttcacacttgagtcatgacttagagcacagcgggtctgcctggaagggctttttgcttctcctgctgcatggttcaggggtccttgggttcaggggcgaggcgttctcttgcacccacctctaactgtccggcacactgcaccgtggtcactgctcacggaccatgcagtagacggttagccgtgcccacagagcgcctggctttggcccttgacctttggtccctgggaggttggtccccaggccactggggtgtcctgtcgggagcactttgttacctgagcacctcaggcccccctagatagtgtgcgctgacaatggtgtttatagtggggaccttgggccacactctattggcttgacctcccagggctggacatggaaggcagccagggtcagaagtgaggtggtcctgaggacccccaagctccgcagttagtttcatcaatgaggtggtcttggaacccccaaggtccacagtttgggtgagaagtgaggtggtcttggggcccccaggctacacagctggggtcagaag

SEQ ID NO: 8022 - DNA, 427 bp, Homo sapiens
ccggggcattgagcctgtctctgtgaggcctgacacagagccagctccagaatctctcctgcttgctgccgccacttccgttcagagcatggccgagaggggagagcgcctggcagccttccccagggtcccagggctctgcttttctggggattgactgatcctcaggatagacaccctcgtggcrgcaaaatggctgctctaggcctcatagtcacacaccacacccccagggagagaggccgtccttccactgtgtcagcgtgcagccaggcttcttacccagatgccccagaaatcacctgtgtgtcattcatgacccgtcacggaaccagtccccagagccaggcccaagcccagcaggtcccagtcttgcagctgtggtggtcagcccatttcccctgacacccgtgaacccattgaggag

SEQ ID NO: 8023 - DNA, 594 bp, Homo sapiens
tgctcggtgcactccctgctacgctcccttctgtaactcctgctccttagtgcggtggagagcatgccccgaatcgtctgtgttagcaagtgcacagatcagtaggtctgtgggtttttaaaaataattctaaaacactgttctggttagaagacatgctgcaaatacttctgcagagcacgcagtcacctttctctggacggccgckcattcctgtgtcttaggggtgtgcctttcctcttggttcactatgcagtgcttccaacctgctgggccactcttgccgggtaagacgctcactctccaggagtgatggtgccgattcctgacctcggctacctgtgtgctttcactggttccacagcctcatttggtcagctgtgctagccacatagaccaacagagtgggtgccctgaagatgtgcttttggcttcagaagaggtcgtctctctccctctgccacacctgcgccttgaggtgctcgtctgggccagtgggggttttttctcctagctttattgaaatataatttttaatttttatgagtacttaataggtatatttttgaggtatattgacaagtaaaaattgtg

SEQ ID NO: 8024 - DNA, 594 bp, Homo sapiens
tgctcggtgcactccctgctacgctcccttctgtaactcctgctccttagtgcggtggagagcatgccccgaatcgtctgtgttagcaagtgcacagatcagtaggtctgtgggtttttaaaaataattctaaaacactgttctggttagaagacatgctgcaaatacttctgcagagcacgcagtcacctttctctggacggccgctcattcctgtgtcttaggggtgtgcctttcctcttggttcactatgcagtgcttccaacctgctgggycactcttgccgggtaagacgctcactctccaggagtgatggtgccgattcctgacctcggctacctgtgtgctttcactggttccacagcctcatttggtcagctgtgctagccacatagaccaacagagtgggtgccctgaagatgtgcttttggcttcagaagaggtcgtctctctccctctgccacacctgcgccttgaggtgctcgtctgggccagtgggggttttttctcctagctttattgaaatataatttttaatttttatgagtacttaataggtatatttttgaggtatattgacaagtaaaaattgtg

SEQ ID NO: 8025 - DNA, 594 bp, Homo sapiens
tgctcggtgcactccctgctacgctcccttctgtaactcctgctccttagtgcggtggagagcatgccccgaatcgtctgtgttagcaagtgcacagatcagtaggtctgtgggtttttaaaaataattctaaaacactgttctggttagaagacatgctgcaaatacttctgcagagcacgcagtcacctttctctggacggccgctcattcctgtgtcttaggggtgtgcctttcctcttggttcactatgcagtgcttccaacctgctgggccactcttgccgggtaagacgcycactctccaggagtgatggtgccgattcctgacctcggctacctgtgtgctttcactggttccacagcctcatttggtcagctgtgctagccacatagaccaacagagtgggtgccctgaagatgtgcttttggcttcagaagaggtcgtctctctccctctgccacacctgcgccttgaggtgctcgtctgggccagtgggggttttttctcctagctttattgaaatataatttttaatttttatgagtacttaataggtatatttttgaggtatattgacaagtaaaaattgtg

SEQ ID NO: 8026 - DNA, 594 bp, Homo sapiens
tgctcggtgcactccctgctacgctcccttctgtaactcctgctccttagtgcggtggagagcatgccccgaatcgtctgtgttagcaagtgcacagatcagtaggtctgtgggtttttaaaaataattctaaaacactgttctggttagaagacatgctgcaaatacttctgcagagcacgcagtcacctttctctggacggccgctcattcctgtgtcttaggggtgtgcctttcctcttggttcactatgcagtgcttccaacctgctgggccactcttgccgggtaagacgctcwctctccaggagtgatggtgccgattcctgacctcggctacctgtgtgctttcactggttccacagcctcatttggtcagctgtgctagccacatagaccaacagagtgggtgccctgaagatgtgcttttggcttcagaagaggtcgtctctctccctctgccacacctgcgccttgaggtgctcgtctgggccagtgggggttttttctcctagctttattgaaatataatttttaatttttatgagtacttaataggtatatttttgaggtatattgacaagtaaaaattgtg

SEQ ID NO: 8027 - DNA, 747 bp, Homo sapiens
gcccaccgtgggcttcatccaggagctgtaaaatggaccggagtctgggtcccaccctgggagattctgatgtaattgggcttgggctgggtggagcctggacacctggatggtaaaagcttcccaggtgactctaatgtgcttctaacttgaggaccgccatcagcgccagcccactcttggatcagccagcgtttagtaacttgcacgctttacttgagggggaagccagtttgaattgctttgtaatgtaatggatgtctttctacttctcagttctattcaggaggtacttgagtacctactaggtacaagacactgttgttaaattaggggatttaagtatgtacgagatgattcggttcttgycttcaagagcttataaaaaagctaaaaatacggaaataactctaatgggaaccactacaagctaaatgtcattaaagtgaatcatgcaaattatggtaattgagagaagggacagattgcatttaattagaggggatcaagaaagtctttgagaagctgccatctgagctgagtctgagagcttggcctgcagagctgggggtgggtggacaggccaggtggagggaagataatgagcgcagatagaaggagagtgggcagatgcctgcggtgcctgttttgaccagagcctacggtggtggggaaggtagtgggaaacaaacctaggagggagggtggggccagcaataaaatatctttagcctgctccagcagtct

SEQ ID NO: 8028 - DNA, 747 bp, Homo sapiens
gcccaccgtgggcttcatccaggagctgtaaaatggaccggagtctgggtcccaccctgggagattctgatgtaattgggcttgggctgggtggagcctggacacctggatggtaaaagcttcccaggtgactctaatgtgcttctaacttgaggaccgccatcagcgccagcccactcttggatcagccagcgtttagtaacttgcacgctttacttgagggggaagccagtttgaattgctttgtaatgtaatggatgtctttctacttctcagttctattcaggaggtacttgagtacctactaggtacaagacactgttgttaaattaggggatttaagtatgtacgagatgattcggttcttgccttcaagagcttataaaaaagctaaaaatacggaaataactctaatgggaaccactacaagctaaatgtcattaaagtgaatcatgcaaattatggtaattgagagaagggrcagattgcatttaattagaggggatcaagaaagtctttgagaagctgccatctgagctgagtctgagagcttggcctgcagagctgggggtgggtggacaggccaggtggagggaagataatgagcgcagatagaaggagagtgggcagatgcctgcggtgcctgttttgaccagagcctacggtggtggggaaggtagtgggaaacaaacctaggagggagggtggggccagcaataaaatatctttagcctgctccagcagtct

SEQ ID NO: 8029 - DNA, 747 bp, Homo sapiens
gcccaccgtgggcttcatccaggagctgtaaaatggaccggagtctgggtcccaccctgggagattctgatgtaattgggcttgggctgggtggagcctggacacctggatggtaaaagcttcccaggtgactctaatgtgcttctaacttgaggaccgccatcagcgccagcccactcttggatcagccagcgtttagtaacttgcacgctttacttgagggggaagccagtttgaattgctttgtaatgtaatggatgtctttctacttctcagttctattcaggaggtacttgagtacctactaggtacaagacactgttgttaaattaggggatttaagtatgtacgagatgattcggttcttgccttcaagagcttataaaaaagctaaaaatacggaaataactctaatgggaaccactacaagctaaatgtcattaaagtgaatcatgcaaattatggtaattgagagaagggacagattgcatttaattagaggggatcaagaaagkctttgagaagctgccatctgagctgagtctgagagcttggcctgcagagctgggggtgggtggacaggccaggtggagggaagataatgagcgcagatagaaggagagtgggcagatgcctgcggtgcctgttttgaccagagcctacggtggtggggaaggtagtgggaaacaaacctaggagggagggtggggccagcaataaaatatctttagcctgctccagcagtct

SEQ ID NO: 8030 - DNA, 747 bp, Homo sapiens
gcccaccgtgggcttcatccaggagctgtaaaatggaccggagtctgggtcccaccctgggagattctgatgtaattgggcttgggctgggtggagcctggacacctggatggtaaaagcttcccaggtgactctaatgtgcttctaacttgaggaccgccatcagcgccagcccactcttggatcagccagcgtttagtaacttgcacgctttacttgagggggaagccagtttgaattgctttgtaatgtaatggatgtctttctacttctcagttctattcaggaggtacttgagtacctactaggtacaagacactgttgttaaattaggggatttaagtatgtacgagatgattcggttcttgccttcaagagcttataaaaaagctaaaaatacggaaataactctaatgggaaccactacaagctaaatgtcattaaagtgaatcatgcaaattatggtaattgagagaagggacagattgcatttaattagaggggatcaagaaagtctttgagaagctgccatctgagctgagtctgagagcttggcctgcagagctgggggtgggtggacaggccaggtggagggaagataatgagcgcagatagaaggagagtgggcagatgcctgcggtgcctgttttgrccagagcctacggtggtggggaaggtagtgggaaacaaacctaggagggagggtggggccagcaataaaatatctttagcctgctccagcagtct

SEQ ID NO: 8031 - DNA, 747 bp, Homo sapiens
gcccaccgtgggcttcatccaggagctgtaaaatggaccggagtctgggtcccaccctgggagattctgatgtaattgggcttgggctgggtggagcctggacacctggatggtaaaagcttcccaggtgactctaatgtgcttctaacttgaggaccgccatcagcgccagcccactcttggatcagccagcgtttagtaacttgcacgctttacttgagggggaagccagtttgaattgctttgtaatgtaatggatgtctttctacttctcagttctattcaggaggtacttgagtacctactaggtacaagacactgttgttaaattaggggatttaagtatgtacgagatgattcggttcttgccttcaagagcttataaaaaagctaaaaatacggaaataactctaatgggaaccactacaagctaaatgtcattaaagtgaatcatgcaaattatggtaattgagagaagggacagattgcatttaattagaggggatcaagaaagtctttgagaagctgccatctgagctgagtctgagagcttggcctgcagagctgggggtgggtggacaggccaggtggagggaagataatgagcgcagatagaaggagagtgggcagatgcctgcggtgcctgttttgaccagagcctacggtggtggggaaggtagtgggaaacaaacctaggagggagggtgggrccagcaataaaatatctttagcctgctccagcagtct

SEQ ID NO: 8032 - DNA, 816 bp, Homo sapiens
tgcaaaagaaaaagactaaaatatcagaaagcatacaattcctcctcatgtagccaggcaatataaaaatgcaggaggaggagaaacaaagagctttcaggacaaagagtaaaattggctttagtaagctaacgctataaagaagcaaagcagtcatgtaatgaaattttaccgtacatcacagacagatgaggggcacttgtgacctaaaaatgttataaactatccaaaataatgaaatgaatagattaaactaggctatattcaaaactactataaaatgaaatagaaaatgagaatcaaaaccccttagctgatggaaatctctgcccctgcccatcaaaagtaaaaatacacaagaagtaaataaaaatggtaacacaacattacaaactgatatatataaatatataaatatwaatatataaatatataaatatatataatatataaatatataatatatatacacatatataaatatatatatccatatataatatatatatatccatatatatattatatatatatccttaagcacttcaggggagtttaaaaccacattgaatcagaaattcaaaaatttacagaaagggacataataacacaccaggaagaaatgaaaagatatttgattgaactcagaaaagaaagaaaagaaaaaactgattttggaaatgaagactaaaataaacatagccaaggtaacaatagattaaaatgaaatgtaataagggccttgaataaaggcagtaaagcaatcaacaaaacaaagttcaagaaaatctattcacacgtagttgaaatgaaaca

SEQ ID NO: 8033 - DNA, 762 bp, Homo sapiens
  misc_feature (1)...(762): n = A,T,C or G
acccacctcggccgkaaaccactgtgtacagccccaagtgtaatttttttttcttttttttttttttgagacagagtttcactcttgttgtccaggctggagtgcaatggcgtgatcttggctcactgcaacctccgcctaccaggttcaagcgattctcctgcctcagcctcctgagtagctgggattacaggcatgtgccaccatgcctggctaactttatatttttagtagagatggggttttaccttgttggccaggctggtctcaaactcccgacttcaggtgatccccctgcctcggcctcccaaagtgctgggattataggcatgaaccactgtgcccggcccccaagtataatttttaactctcttttatgcctcactatgtgtctcttaagttctgaaattcagtccactgatgaaagctcaaggggaagtgtggtatggtggaaggagtaaaaggctaagagtcagatgaagctctggctctgccatttgtaagtcatattcatttaatctctctttggttcggtttccacagctgtgaaatggcaagaatgatagctgcctcgcttatttttacaaagttcttgtaaaaatactggataacataaatgaataatctgagccagtatatgaagtaggtactaatattacntattttacagaagaggtaactaaaggttgaagggcttaagtgacttgctcaacatcactcacaatatacctgactgagtttgtgccccatccagactcactt

SEQ ID NO: 8034 - DNA, 742 bp, Homo sapiens
acaaaatatttttaaaaattagctgggtgtggtggtttgcacctgtagtcccagctacttgggaggctgaggtgggagaatcacctgagcccaggaggctgagactgcagtgagccatgattgtactactgcactccaacctgagcaatggagtgagaccatgtctcaaaaaactaataataattaaatgctaaaaactatatttcaaaattatcttttaatctagagctcattttctagaacttccaacgattttgtacacatcattttccttacattaaattgtttttctgcctaaactagctaggatactttccattgcctgtccaatacacttcttctccaataacatactttaacataaattttatttttataaaatacacttcttctccaataacatactttaacatacattttacttttataaaatactgtcttagaattattctcttttctttcatggaagcctcataagaccccaagaaaagatatgcatgtcactaggcccattttttcataagattaagcttaggttctaggtagtaagcaccttatggctagaaggcaataggacaatgcaaaccatttcaaatcctaagytctttcctccatatcacataatcttaaagcccaggcttttcagacagggcatctgggtaaaggttctacttcaggtggaattatagactcagtgaaaacataatagagctagttgattagccttgctggcacagggact

SEQ ID NO: 8035 - DNA, 637 bp, Homo sapiens
cttaagctcaggagttccagaccgtcstggacaacatggtgaaaccccgtccctacaaaaaaaaaaaaaaaaaaaaaaattaggtggcccaggcctgtagttccagctactccaaaggccaaggcaggagaatcgcttgagcttgggaggtagaggctgcagtgagctatgactgcgccactgcattccagcctgtatgacagcgtgacagcccacctcaaataaacaaaacaaaatatttaaaatttacaatcgtctttggaggctcaagttggtgcccagagaaaaatgctagttatgattgctcattttattttaattttgttttagcagagatgggagtctcgctatgttgcccaggctggactcgaacgcctggcctcaagcgatcctcccacttcggcctcccaaagtgcggggattacggcgtgaaccaccgtgacaggcccgcgtttacgtaaataaactcatttaaataaataaaacagcaggccccctaggaaatgtcttggtaacaccgtcagcccactccgatttactacacgggcttggcgaataaaactccacttttggggtcaggcccttcgctaactcagaccagctagaccggccttttcccggaatcctgagagcaacg

SEQ ID NO: 8036 - DNA, 817 bp, Homo sapiens
ttggaaggctgaggcaggagaatcacttgaacctgggaggcagaggttgcagtgagctgagactgcaccactgcactccagcctgggcagcagagtgaaactgtgtctcaaaaaaaaaaaaaaaaaagaaagaaaagaaaagagaaaagagaataaaagaaaaggaaaagaaaggacaggacaggaaaggaaaggaaaagaaaagaaaaaagaaaagaaggtaccaagaggtggaaaggaacagggagaaagaaaacagttattcaatgtttttggaggcccaagcacagggttttggcataatttatttagtccataaaacaactctgtatttagggatcatccacattttacaacaaaggaaacccaatttcagtgaggtgagmttatttgtccaagatctctcagctggtaagtgacaaaaccacaacataaaaatctgatctatatccagtaactatatcccatccattctataaagcaagaattggcacaccacagcccacagggccagacttggacagcagcctcttgataccaccacaaattaagaatgatttttacattttaaaagcactgaaaaaattcaaaagaattatgtttcatgacacatgaaagttttataaaactcagatttccataccaataaataaaatgccattggtacacagccacatttacctactgtctagagctgctttcaaattgcaagatggtgttgagcagttgtgaaagaatcagtagggtcccaaggcctaaaatacttactgtctggccctttacaaaagaagtttgctaacccctgaggtagagaaaa

SEQ ID NO: 8037 - DNA, 817 bp, Homo sapiens
ttggaaggctgaggcaggagaatcacttgaacctgggaggcagaggttgcagtgagctgagactgcaccactgcactccagcctgggcagcagagtgaaactgtgtctcaaaaaaaaaaaaaaaaaagaaagaaaagaaaagagaaaagagaataaaagaaaaggaaaagaaaggacaggacaggaaaggaaaggaaaagaaaagaaaaaagaaaagaaggtaccaagaggtggaaaggaacagggagaaagaaaacagttattcaatgtttttggaggcccaagcacagggttttggcataatttatttagtccataaaacaactctgtatttagggatcatccacattttacaacaaaggaaacccaatttcagtgaggtgagattatttgtccaagatctctcagctggtaagtgacaaaaccacaacataaaaatctgatctatatccagtaactatatcccatccattctataaagcaagaattggcacaccacagcccacagggccagacttggacagcagcctcttgataccaccacaaattaagaatgatttttacattttaaaagcactgaaaaaattcaaaagaattatgtttcatgacacatgaaagttttataaaactcagatttccawaccaataaataaaatgccattggtacacagccacatttacctactgtctagagctgctttcaaattgcaagatggtgttgagcagttgtgaaagaatcagtagggtcccaaggcctaaaatacttactgtctggccctttacaaaagaagtttgctaacccctgaggtagagaaaa

SEQ ID NO: 8038 - DNA, 817 bp, Homo sapiens
ttggaaggctgaggcaggagaatcacttgaacctgggaggcagaggttgcagtgagctgagactgcaccactgcactccagcctgggcagcagagtgaaactgtgtctcaaaaaaaaaaaaaaaaaagaaagaaaagaaaagagaaaagagaataaaagaaaaggaaaagaaaggacaggacaggaaaggaaaggaaaagaaaagaaaaaagaaaagaaggtaccaagaggtggaaaggaacagggagaaagaaaacagttattcaatgtttttggaggcccaagcacagggttttggcataatttatttagtccataaaacaactctgtatttagggatcatccacattttacaacaaaggaaacccaatttcagtgaggtgagattatttgtccaagatctctcagctggtaagtgacaaaaccacaacataaaaatctgatctatatccagtaactatatcccatccattctataaagcaagaattggcacaccacagcccacagggccagacttggacagcagcctcttgataccaccacaaattaagaatgatttttacattttaaaagcactgaaaaaattcaaaagaattatgtttcatgacacatgaaagttttataaaactcagatttccataccaataaataaaatgccattggtacacagccacatttacctactgtctagrgctgctttcaaattgcaagatggtgttgagcagttgtgaaagaatcagtagggtcccaaggcctaaaatacttactgtctggccctttacaaaagaagtttgctaacccctgaggtagagaaaa

SEQ ID NO: 8039 - DNA, 626 bp, Homo sapiens
acttatgagtaagggctggggagatggccaggaattcatacagactttcagctctaacacttaatttagcagaagttcctggggacaggcaaaaaggcaaggtggaggacaagtgacagtgacttaaacccaggtccctgtaggtgcctaaaatcttacatggctgagtctttgagcctggaagctatgatatggatatggaaccatgtcaggtgagggatgttgggctctgccaagctcaaatatgaagctcacagaatttgagagttctagttctgagggtcccggcctgctcagctgatatatagaatgtgttgattgcagaagcagacttgtgatgcgggtgaacttaaggctgttggttgttgctctgataatgagctagttaacccaattttctaggctttctgtatcctattttattcatgccagaagaactgctgtcagatggctccagaactaggtagaacacaatttctggactttctacagggaagccactcatgacaaagcttggcttccagcctcttccctaatagaccctcagtggcagggaagtgtgtgatgggccatatggcaaagatgctcaggtcacacgcttttgrggccagatatagctttggcct

SEQ ID NO: 8040 - DNA, 830 bp, Homo sapiens
tgttgatctgtgaccttacccccaaccctgtgctctctgaaacatgtgctgtgtccactcagggttaaatggattaagggcagtgcaagatgtgctttgttaaacagatgcttgaaggcagcatgctcgttaagagtcatcaccactccctaatctcaagtacccagggacacaaacactgcggaaggccgcagggtcctctgcctaggaaaaccagagacctttgttcacttgtttatctgctgaccttccctccactattgtcctatgaccctgccaaatccccctctgtgagaaacacccaagaatgatcaataaaaaaaaaaaaaagaaaaaagaaaaagtgagattaaaggagagaakgatggggaggcaatgatagagacaggagacagccaagggtccccagcaaaaccacaccttcaatcctaaaacagcctgaaggctgagggaccggactgctggtcccagatgaaacctacaacccagagggagaactgcccctgtttgcccaccctttcctgactagttctttctgaataatgcctacttgcacactgggaaaatggggcggagccataggaagttcatgccttatgccaggggaggaggccggtcttttcagcttttgtgtgtggtggcctggtattcaacctgggaggtaggggcccattagcaggatgccttgtcactttgctcagttttttttttttttttttccttttcgccaatgaatccagccctcctcagccttcaatgtgtccatgtgcctaatttctcctggttgtgacacaaaaacctggatttagctaaactaaggagcaaaactt

SEQ ID NO: 8041 - DNA, 811 bp, Homo sapiens
ggatccacctgccttggcctcccaaagtgctgagattacagacttgagccaccgtgaccttcctgcttttacatttctgagtcatcattttggcaaaataaataagttatggtaatctggaattctatttcataacatcaagtgttttaaacttctaacatttaacaagcttcccaaaatcaaacttctatttcaaaattgtctttcctgacacctgccttttggatgctatagagggcccctggaacatccagaagagaggtaaacagaattaccggacatgtctaggtacatgggattgccaaaatgttgtttaatcttcatatattaatattcactaacctatattacctatattaatataggttattaatattaatagataattaatattaatakgtaattaatattaataacctatattaatataggtttagtgaatattaatatacgttccaaaattgtatgggatttctaaaattctaatgcctgagtatatgctatcaatcacaaggtggttaaattattgtaaaccacagaaataaaccaaatttctttgtcaatcatgtttctgactgtaactaccctggacattttgttatttatagatgattgttgtttttatcatcttcagaagatggtgtgtaatcagctatagaactttaacaggtgctctcaaatgcaggtttctgatatctttgaagattgtgacactggaataaagtgaaaacatacaggactcatgaagagctgacatgttcgtgaatatcacgcaaaacaagagttaatggaatggactgaactaatagaa

SEQ ID NO: 8042 - DNA, 758 bp, Homo sapiens
ccacataacacgtgtctagctccccatcctctcaactcccttagtagagtaggttgctctgggcactgggctcccacagtctccactgttcaaacytccactgtaattccgtgtggtactgcagctgtgtgtgagcccacagaggacaggaaatttgtcacacctctctatgcagaatggagacagagatagactgaaatcacattattgcgatgcacataaataatgtgcccaagtaacctaaaacctgggacaaagataattagactattccgaagctagaagaaaaggagttgtaaaagggattccaagagataggtaccttaaagcctttagtgaatttcatgattgtcagtcatttttctgcaaggtccaggggaagggcctcctgggtccagctgatccatacttttctttagggtggatttggaataaagttcaaagacatagaacttccctataataagaaggataattataggtgtggaggtaaatgcagttccgtacttactctctctgttttttgttttttgtttttgagacggagtctcgctctatcacccaggggctggagtgccatggcacgatctcggctcaccgcaatctccgcctcctgggttcaagcgattctcctgccccagcctcccgagtagctgggattacaggcatgcgccaccacgcccagctaattttctatttctagtagagacggggtttctccgtgttggtcaggctggtctcgaactcccgatctcagg

SEQ ID NO: 8043 - DNA, 758 bp, Homo sapiens
ccacataacacgtgtctagctccccatcctctcaactcccttagtagagtaggttgctctgggcactgggctcccacagtctccactgttcaaacttccactgtaattccgtgtggtactgcagctgtgtgtgagcccacagaggacaggaaatttgtcacacctctctatgcagaatggagacagagatagaytgaaatcacattattgcgatgcacataaataatgtgcccaagtaacctaaaacctgggacaaagataattagactattccgaagctagaagaaaaggagttgtaaaagggattccaagagataggtaccttaaagcctttagtgaatttcatgattgtcagtcatttttctgcaaggtccaggggaagggcctcctgggtccagctgatccatacttttctttagggtggatttggaataaagttcaaagacatagaacttccctataataagaaggataattataggtgtggaggtaaatgcagttccgtacttactctctctgttttttgttttttgtttttgagacggagtctcgctctatcacccaggggctggagtgccatggcacgatctcggctcaccgcaatctccgcctcctgggttcaagcgattctcctgccccagcctcccgagtagctgggattacaggcatgcgccaccacgcccagctaattttctatttctagtagagacggggtttctccgtgttggtcaggctggtctcgaactcccgatctcagg

SEQ ID NO: 8044 - DNA, 758 bp, Homo sapiens
ccacataacacgtgtctagctccccatcctctcaactcccttagtagagtaggttgctctgggcactgggctcccacagtctccactgttcaaacttccactgtaattccgtgtggtactgcagctgtgtgtgagcccacagaggacaggaaatttgtcacacctctctatgcagaatggagacagagatagactgaaatcacattattgcgatgcacataaataatgtgcccaagtaacctaaaacctgggacaaagataattagactattccgaagctagaagaaaaggagttgtaaaagggattccaagagataggtaccttaaagcctttagtgaatttcatgattgtcagtcatttttctgcaaggtccaggggaagggcctcctgggtccagctgatccatacttttctttagggtggatttggaataaagttcaaagacatagaacttycctataataagaaggataattataggtgtggaggtaaatgcagttccgtacttactctctctgttttttgttttttgtttttgagacggagtctcgctctatcacccaggggctggagtgccatggcacgatctcggctcaccgcaatctccgcctcctgggttcaagcgattctcctgccccagcctcccgagtagctgggattacaggcatgcgccaccacgcccagctaattttctatttctagtagagacggggtttctccgtgttggtcaggctggtctcgaactcccgatctcagg

SEQ ID NO: 8045 - DNA, 719 bp, Homo sapiens
ctcgcgctgctgcccgctggcttctctggctgtcacagatggactcccagtcaactttgtcaattctgagtgtctcctgtgggagcgcctgggcagcactgacaagagagtttatgccatacaggaatttgcacaaagccgcagaaaaccagaggatttgtcgcatcctgtgagactaagccagtcaaagatctgagatggttgatgttaacatacagggtgtctgtgaagtctggaaatgcacatactattactatttttgttgttgttttttgtttttgttttttgagactgagtgttgctctgttgcccagcctggagtgcaagggtgccacccctgctcactgcaaactgcaaactctgcctccygggttcaagcgattcttgtgcctcagcctcctgaagtagctgggattacaggcgcctgccaccacacccggctaattttcgtattttttggagacaaggtttcatcatgttggccaggctggtctcgaactcctgacctcaagtgatctccccgccttggcctcccaaattgctgggattacaggtgcgagccactgcacccggcccactatttattttctgaagatgttcttgatgacattctacatttttgcctgtttccagactgcatggacaccccgtatagttagctagggtgtaactcgattactacatgaatggagctgttttcagtcttgctatttatagga

SEQ ID NO: 8046 - DNA, 719 bp, Homo sapiens
ctcgcgctgctgcccgctggcttctctggctgtcacagatggactcccagtcaactttgtcaattctgagtgtctcctgtgggagcgcctgggcagcactgacaagagagtttatgccatacaggaatttgcacaaagccgcagaaaaccagaggatttgtcgcatcctgtgagactaagccagtcaaagatctgagatggttgatgttaacatacagggtgtctgtgaagtctggaaatgcacatactattactatttttgttgttgttttttgtttttgttttttgagactgagtgttgctctgttgcccagcctggagtgcaagggtgccacccctgctcactgcaaactgcaaactctgcctcctgggttcaagcgattcttgtgcctcagcctcctgaagtagctgggattacaggcgcctgccaccacacccggctaattttcgtattttttggagacaaggtttcatcatgttggccaggctggtctcgaactcctgacctcaagtgatctccccgccttggcctcccaaattgctgggattacaggtgcgagccactgcacccggcccactatttattttctgaagatgttcttgatgacattctacatttttgcctgtttccagactgcatggacaccccgtatagttagytagggtgtaactcgattactacatgaatggagctgttttcagtcttgctatttatagga

SEQ ID NO: 8047 - DNA, 615 bp, Homo sapiens
ctacaggtgcctgccaccttgcccggctaatttttttttttttttttttttgtatttttagtagagacagggtttcaccgtgttagccaggatggtctcgatctcctgacctcgtgatctgcctgcctcggcctcccaaagtgctgggattacaggcgtgcagctgcgcccagcccaatattttaaaacattagtttagctccaattctagttagaaggaacatggtgagcaaaaactaaggcaaaggcagaagaaagcacaggatttgcatagacagtagcatgacattcagctacaggataaggtctgggaggcaagttaaagctgcaatggtagattagaaccacgccataggggccacgtaatagaatgccattactttgtttgcartatctgttttaatttggaatacagagatgcttccacaatgaagaaccagaagcatgatcatggcaatgctaagtctgaaacaaatgacaaaaagaaggggagtgaacagtggactccacacctaagcctgctgtatcagaattgcctggggagctttaggaataaaaacacaagcaaaaaccaaaaccaaaaccacagatttctgagagaacctcagaggtgga

SEQ ID NO: 8048 - DNA, 615 bp, Homo sapiens
ctacaggtgcctgccaccttgcccggctaatttttttttttttttttttttgtatttttagtagagacagggtttcaccgtgttagccaggatggtctcgatctcctgacctcgtgatctgcctgcctcggcctcccaaagtgctgggattacaggcgtgcagctgcgcccagcccaatattttaaaacattagtttagctccaattctagttagaaggaacatggtgagcaaaaactaaggcaaaggcagaagaaagcacaggatttgcatagacagtagcatgacattcagctacaggataaggtctgggaggcaagttaaagctgcaatggtagattagaaccacgccataggggccacgtaatagaatgccattactttgtttgcaatatctgttttaatttggaatacagagatgcttccacaatgaagaaccagaagcatgatcatggcaatgctaagtctgaaacaaatgacaaaaagaaggggagtgaacagtggactccacacctaagcctgctgtatcagaattgcctggggagctttaggaataaaaacacargcaaaaaccaaaaccaaaaccacagatttctgagagaacctcagaggtgga

SEQ ID NO: 8049 - DNA, 593 bp, Homo sapiens
aaatctgttaaatgttatgttccaagaatagtatctcctatggcaagcaaatggacagaaatatattgggctttaaattgtaatttcacttctttttggccagtgaaatgtgagaaacagggaaagcaatatctgagatggttttcttattcatatattaaccaacatatttcttacacatattttaactcttccttgtggaaaataaaacacatgcaaaagtagagaatagtataagcctctcttcttcccacaatgtacccataacccagctccagaaatgttgcacacatggctgatcctgcttccattctaccgcaacccacttcctacccactctcccgtcactggattatttcaaaccaagtcacatcatgtgaccgactaatttaatgtatatttaatctaaattaatacatttaatctaatacttyggtataagctctaaaaataggtatccttttagtttttataacagcatagctatgaaacattatcatttacatctaaaacattcaataatttcttaatattagtgtacaaatttcctttagtgtttcatgagtgattttttttcttaacttgatttgtca

SEQ ID NO: 8050 - DNA, 593 bp, Homo sapiens
aaatctgttaaatgttatgttccaagaatagtatctcctatggcaagcaaatggacagaaatatattgggctttaaattgtaatttcacttctttttggccagtgaaatgtgagaaacagggaaagcaatatctgagatggttttcttattcatatattaaccaacatatttcttacacatattttaactcttccttgtggaaaataaaacacatgcaaaagtagagaatagtataagcctctcttcttcccacaatgtacccataacccagctccagaaatgttgcacacatggctgatcctgcttccattctaccgcaacccacttcctacccactctcccgtcactggattatttcaaaccaagtcacatcatgtgaccgactaatttaatgtatatttaatctaaattaatacatttaatctaatactttggtataagctctaaaaataggtatccttttagtttttataacagcatagctatgaaacattatcatttacatctaaaacaytcaataatttcttaatattagtgtacaaatttcctttagtgtttcatgagtgattttttttcttaacttgatttgtca

SEQ ID NO: 8051 - DNA, 593 bp, Homo sapiens
aaatctgttaaatgttatgttccaagaatagtatctcctatggcaagcaaatggacagaaatatattgggctttaaattgtaatttcacttctttttggccagtgaaatgtgagaaacagggaaagcaatatctgagatggttttcttattcatatattaaccaacatatttcttacacatattttaactcttccttgtggaaaataaaacacatgcaaaagtagagaatagtataagcctctcttcttcccacaatgtacccataacccagctccagaaatgttgcacacatggctgatcctgcttccattctaccgcaacccacttcctacccactctcccgtcactggattatttcaaaccaagtcacatcatgtgaccgactaatttaatgtatatttaatctaaattaatacatttaatctaatactttggtataagctctaaaaataggtatccttttagtttttataacagcatagctatgaaacattatcatttacatctaaaacattcaataatttcttaatattagtgtacaaatttcctttagtrtttcatgagtgattttttttcttaacttgatttgtca

SEQ ID NO: 8052 - DNA, 823 bp, Homo sapiens
taattatggtgattttagctttgaaatatttcatagccatcattcaaccaaagaaataatcttgtcatttctgcagccctttttcagtgtaggaaattgagggctggctgggggcccgaggtccatggcacatttaattttttaaattttattatttcgttattattattttagagacagggtcttgctctgttgcccaggttggagtgtcactgtatgtaaactcaaactcctggcctcaagcgaccttctcgctctggcctctctcaaagggctggcattacagccatgcaccacgtgtccggctccattttaagatgaactgaaactaaaatctgctgcttcctctcgctatgcccattttcatgcacataaccttttaaatcctcctgtgaagtcagaaagatgagtgttgtgaagaatcccatttcacaaaggaggaaactgaggcacagagaggctaagcaacttgcccaagtctcagagtagacggagacttctaatccccagtccatcctgtaccccccacagggatggcatgrgaaaccctgcccttcccatattctccccaccaggttctcccaggccccagcccagcccgagcctctcatcctgggggtgggtaccacattcgttgaccacaggcagtgcagacacacgccggtccacaaagatgtccagtgcagtcaggatgggtgctgtctccagcaccacagccaagtctcggaatgtgccgatgcccaaatcttggatagtgcggtagaggaaggagggccggggcagcagggaaccctggttaggatggggaccaggtggagatcag

SEQ ID NO: 8053 - DNA, 681 bp, Homo sapiens
agaatctgaattcttaatcactgtagtaccttgtctccatactatatatttcttcttaagcagaaggactgagaaactcatttttagctgcctcttaggatgtgtttgaaattatgaacctaaattygaccaagtgtttttcgggggctgttgggagaatggaatcaattaatgcttcaaagcacttgagaacccttaatgtaaaaaactgttatggaaagtgtatacctctctgtaaagccaactgtctgttattcccaaattcttatttgtgctttgtatgctagttgcttccaaatgggatctatttctatcggccacattctgaatatgacacttttcatttaaagtcagttgtacattatagaaatcctctaagaaacctgtttagaaaccgttctatccaaagtactttgcatagtttctaggttataagggatttgtttatggtgacaagattgactgctgaaatgtgtgcttgggagtgaatgcctcagaagtgtagcaatttactacaaaacgtgtgtatctgtgcacgatggaattttcttactttgtatgccagtctgccaactggcagcataaaagtgacctacgagagtctcagtggtgctctcttatgaagtccacccctttgggtctgatctgcttacttcttcaacccaggtggccatggaggca

SEQ ID NO: 8054 - DNA, 681 bp, Homo sapiens
agaatctgaattcttaatcactgtagtaccttgtctccatactatatatttcttcttaagcagaaggactgagaaactcatttttagctgcctcttaggatgtgtttgaaattatgaacctaaatttgaccaagtgtttttcgggggctgttgggagaatggaatcaattaatgcttcaaagcacttgagaacccttaatgtaaaaaactgttatggaaagtgtatacctctctgtaaagccaactgtctgttattcccaaattcttatttgtgctttgtatgctagttgcttccaaatgggatctatttctatcggccacattctgaatatgacacttttcatttaaagtcagttgtacattatagaaatcctctaagaaacctgtttagaaacygttctatccaaagtactttgcatagtttctaggttataagggatttgtttatggtgacaagattgactgctgaaatgtgtgcttgggagtgaatgcctcagaagtgtagcaatttactacaaaacgtgtgtatctgtgcacgatggaattttcttactttgtatgccagtctgccaactggcagcataaaagtgacctacgagagtctcagtggtgctctcttatgaagtccacccctttgggtctgatctgcttacttcttcaacccaggtggccatggaggca

SEQ ID NO: 8055 - DNA, 727 bp, Homo sapiens
cactgcccagaggatgtcgctgacttcacttctatttgctgtagcagggggatttccagctcagttgcttctgagcaggctatgttttgccagtcacccttgtagcactttgtcctgtcttcttcactttagttcagctaatctattttggtgtcctgatgttccgtgaatattgtgcataaaataaggcagcacaggacagtggttaagactgtctgagtttgactgagtgcagtggctcatgcctgtaatcccagcactttgggaggctgaggcaggcggatcacctgaggtcgggagttcaaggccagcctgaccaamatggagaaaccccgtctctactaaaaatacaaaattagccgggcgtggtggcacatgcctgtaatctcagctactctggaggctgaggcaggagaaattgcttgaccctgggaggcggaggttgcggtgagccaagatcatgccattgcactccagcttgggcaacaagagcaaaactccgtctcaaaaaaaaatgtctctctgaaccttaactctgcccactaaaataaggataaaactataaagtattggatgaagtgcttatctacagctcttggaacagcactataagcatagtcatgatgcaaataaatatttatcgctactagaagattctactgaaagcattcatgcttgacacaaactgtagatatatgaggttggaaatgattacaaaaactattta

SEQ ID NO: 8056 - DNA, 690 bp, Homo sapiens
ttgagggtggtattgtttgttgtttgagtggaagttacctcttaagtgctgggcwctcagactgtaggatattcactagttgtctgatgttacaaagggatctcagaccactggcaccgtatctgtaatcatttaggcaattgacccaagctgtcattggtactctagggagtcataggaagttttcaagattgacatgacttttcaaaaaatttatttaatttaacacttactaagtatctgttatgggtcaagcactgtgtgctgtgatgaaagaagagagatgaacaaggtcagatctaccaaaagacagagatatgcaaataaggccatttcactgcaggatgggaaatgccatgataaaaggtaaaagcaagggaggtcttctaggcgaagggaagccacttgaaaagaatggagaaatgatgtcccagggactaattatatattacaggactatgtgggaagtgataggagttgaggcttacatggtaagtagtatctaggacataaaggagaagtttattattgaaaagacttacctgaaatgactatataaaatgcctttgttttcttgagaactatcttagagacttggtaaggagtttttaaaagaggacatcaaaaattataagccttatgagttggaaagaatcttagagggcatgtagcacgtagttgtataattct

SEQ ID NO: 8057 - DNA, 682 bp, Homo sapiens
tttctgcagtattaaagaaacacatctttgaacttgaaaagctttagtttttcatcattacactcatataaaatggataacaggatttaagatgaaaccgaaagtaagatataatttagacctggcttgtttcactcatatttgaaagagacctcttcctgtggcttaagtaaaccaaatagagtgattaaagagtattggtatgstatgtatgtagaacaaaactgatcatgcctccatttgccttttccagtaatatattttgcttcagtaaaatgtttctacttctaaaagagatagcatagcatagtggtgcaaatgtaaacactggagccaggttgcctggtttgagactcagctctgcccttactagctgtgtgacactgatcaaattactcaacatctctgtgcctcagttatcttatctgaaagtggagataataaatagatactaattcataggggtgttatagattttaaatgagttactacttttaaagtattaagaactgctcctgatcataatgtgcactgcttatttgttaaataaggtagaaaggctactgatatggtatggctctgtgtccccactcaaatgtcatcttgtagcctccataattcccacatgttgtgggagggacctggtgggagatgattgaatcatggggggtggatctttcct

SEQ ID NO: 8058 - DNA, 682 bp, Homo sapiens
tttctgcagtattaaagaaacacatctttgaacttgaaaagctttagtttttcatcattacactcatataaaatggataacaggatttaagatgaaaccgaaagtaagatataatttagacctggcttgtttcactcatatttgaaagagacctcttcctgtggcttaagtaaaccaaatagagtgattaaagagtattggtatggtatgtatgtagaacaaaactgatcatgcctccatttgccttttccagtaatatattttgcttcagtaaaatgtttctacttctaaaagagatagcatagcatagtggtgcaaatgtaaacactggagccaggttgcctggtttgagactcarctctgcccttactagctgtgtgacactgatcaaattactcaacatctctgtgcctcagttatcttatctgaaagtggagataataaatagatactaattcataggggtgttatagattttaaatgagttactacttttaaagtattaagaactgctcctgatcataatgtgcactgcttatttgttaaataaggtagaaaggctactgatatggtatggctctgtgtccccactcaaatgtcatcttgtagcctccataattcccacatgttgtgggagggacctggtgggagatgattgaatcatggggggtggatctttcct

SEQ ID NO: 8059 - DNA, 801 bp, Homo sapiens
ctctggtgcagcactatcatgatcactgtgaggtgaacttgcagtggcattttccctacagcccctctgaggtcttctctcaggcagcaagaatgtcagtagactatggacctaccttttctttttctttctttctttctttctctctctctctctctctttctttctttctttctttctttctttctttctttctttcttcttctttctttttctttctctcttctttctttctctctctttctttctctatctctctccctcccctccctccctctctccttcctttctttctttcttttccttctttctttctttctttctttctttctttctttctttctttctttctttctctctctctctctctctctctctccctccctccctctttccttctttcctttctttctctctttctctctccctccctccctccttccctacttcctttcttctttccttccytcctttctttcttctctctctctttctttcttccacttttgagaaataggatctcagggtggtgtgcagtgctgtgatcatagctcactgaatcctcaaactcctgcactcaacagatcttcctgcctcagtctcctgagtagatgaaactacaggtgcatgccaccacgcctggctaaattgttataatgtttttagagatgagatcttgctatgttgcccaggctggtctcaaattcctggcctcaagtgatcatctcatcttggctttccaaaagactatggactttttaaaagacaaaaccttcgagggaactgatcctcagggatgaa

SEQ ID NO: 8060 - DNA, 576 bp, Homo sapiens
acccgtctcagcctcccaaagtgttcagattacaggcgtgagctatagcaccaggctgtttgcattacatttgatctgtgtttttgccttagctcctatgatgatatgaagtatggcaagtatgtcaatgtaccctgcttctcacagtgctatgttttcttaatgaacatgaggatgactgctaaagaaaacatttgaaaggcatgaaaagatatcattgatcaagttcagaggctctgatttgaaacgwgcatgcttgaatacgtaagcattggatgtttatgtagacccacaaccagttcagtagaaacctcattgactaccctgaagcagaggggaggaaaaaagtataaagaagtcaagttttaatacgggaaaactaacctgacctatgatgcacaaaagcttttaaattatctaattgctgaatcagaagtttttgggaaacttatgatttcatagcttccaaactctacttcccaatttgaataacttaatctatgctagtggttctcaacgttggctgggcattagaatcacctgaggaatttaaaaatcccaatgtctaggctacaa

SEQ ID NO: 8061 - DNA, 805 bp, Homo sapiens
gttttcaattctctctgcttattaaacgcagaggctggaaacacagccctcaggggagagcttcaaggctaacccaggccctaagtggaggaggaggctggctgccctctctgccttctggagtgggcccttccaaccaccccttctagatgctccatttgcaccaaagctggcccctcctgtctataaggattaatctgtgtaagataagagatcctggggaaaaactccatcaggaagatagttatagtgataacccatctgaactgctggaacagcctggctttctcacatcatatgccatcaaattgctctatgtgcatctgaaatgtaccatcactggacattagaccaaacctataaaaagagcatattacttgtcaggttgggtgtggtaggtacgaaatttcactttgggaagagctctcaacatayctctgtaggtttaattttaacaacaacaacaggaacacagtggaaggccaggcacggtggctcatgcctgtaatcccagcactttgggaggccgaggagggtggatcacgaggtcaagagatcaagaccatcctggccaacctggtgaaaccccatctctactaaaaatacaaaaattagcgggtgtggtggtgctgtagtcccagctactcgggagactgaggcaggagaatcacttgaacccaggaggtggaggttgcggtgagccgagatcatgccactgcactctagcctggagacagagcaagattccatctaaaaagaaaaaaaaaaaaactaaaacaaacaaacaaacaaaatacagtggact

SEQ ID NO: 8062 - DNA, 1587 bp, Homo sapiens
cttgggataagatgttgctgattgctgttgtggattcgagtggctccctcaagtaggttcaaattgagcccctttgaagtattatctggtagcccattctaggtttttgtcctggtgggagaaccaactgatgttttaagagatttggcaattaccaaatattaagactctaggcactatactaacttctgttcatgagtttgcttctagcaggaccactcatccagcagatgtggtcctacatccttttcaactgggaaattagatcctcctaaatacctggaaagaacaaggacctgaacaccaatttgctgccaagtggacaaggccatttgagctgctggtgaacacacgcttatcagttaaacttgctggagtaaagccatgtgcacattatactcaggtcaaggcagtaccaccagaagacagcccactaatccggaaaccaggaaaacagtgggcttgtgagcacttgaaagaccgaaagctactgtttcacaaaaagataagtacaatgaaaatgtatcccctatgtgtcttgcatgtcctttagagatttttgtttccttggcaagacaactcttgagttaggatttctcaatctattgcctctttcactagcatatcacactgccagatttgtcatcttaaaccttgttcagtacatgaccactctgatcctctagttgttcctgtacacataattttagtcatgtagcctcttgggcattagatctatagaagctggtttctcaaatcatacataggatccaattgataactccatacccagaggccccatgtttctttcttatgcagcacctcattagacactacatgcaaagcaataataaggacccacaagcctgcaagcctactttctttttttttttttttgagacggagtctcgctctgtcgcccaggcaggactgcggactgcagtggcgcaatctcggctcactgcaagctccgcttcccgggttcacgccattctcctgcctcagcctcccgagtagctgggaytacaggtgcccgccaccgcgcctggctaattttttgtatttttagtagagacggggtttcaccttgttagccaggatggtctcgatctcctgacctcatgatccacccgcctcggcctcccaaagtgctgggattacaggcgtgagccaccgcgcccagccgcaagcctactttctacttaccaaatggcgtccctaagctagccacctgttgctagcttaattcctcctctacagacccatattgatacaattagacaacaggctacctggctttaacaaaccttagaacaccaaagcaggcttaatctgggggcacttacagagactgctttaaagacctattctcctggattcctagtgtaattccatcaatcttgggaggcattcttaaattcagccttgatgttcttcttttagtcatggtggcctacgttctagtaaaacttattatgtactgtgtaaacaaaggttgtgcaagtctcgctaaaactatcaaagcaaaaagggaaatgccgatgatcattgttcctaaaaatggcactacgaaatatttccttagcc

SEQ ID NO: 8063 - DNA, 551 bp, Homo sapiens
cacccttattcactctcacccaatcaaagagaatggtggaggtcgcaggttcggcataaaatactaacaaatgacaccacagctgcctctgaggtccatgctattgtatcgagcatttagtatgtccagacgctgtgctaggcatttcccacattaccttgtttaaggctcacagccttaaggtgggtattatcagtcacatttcacagatgatgcaactgaggagcagaaagttttctctagggtcacacagataggaagtaacagagtttagactcaacccaggactacacctcagggttcttcccctccccctagagctcttccatagctaagactctataacgtgtactaagcagaaaaacccctgccgagctctcctgaccatgtccttctggtcaatcggggtcctcccgagagcatagcaacagtgcagctgactgggctctgcacygtgcaactgctgagcatcaatttgtgcagaatccaacgctccaaatcaagtactggggcaggggtgccctctttcattccagcctccgtgagcctct

SEQ ID NO: 8064 - DNA, 722 bp, Homo sapiens
gtatttagaaatcaagatctagggccaggtgcggtggctcatgcctgtaatcccagcatgttgggaagctgaggtgggcagatcacctgagctcaggagttcaagaccagcctgggtaacatggcaaaatgccatctctacaaaaaatacaaaaatcagccaggcatggtggcatgtgcttgtagtttcagctacttgggaggctgcggcaggagaatcacttgagtccaggaagcagaggttgcagtgagccaaaatcacgccactgcactccagcctgggcgacacggagagagaccccgtctcaagatctgggtgtaaggtgtactcattgctactgggtgtcactgcctctagtctgtctcagaggacaaatctagggaatatgtctacctatattaacccccatatacccacatatctatatgtctgtatctatctgtgtgtgtgtgtctattaaacatgattgtaggctacrttctactctaatccagcattacatggttcattctagtctcatgcagttttgaaggctgtgatggtggtagttaatgttgtaggttgctgggaggctacagtaaacggcaattatccctgatgacttcagagtctttcatctccacgtacccttgacctggcaggcattttgctgcttgacactggactcatcaagatgagctgatgtgctgccagaatgacccttctgcgcccaagctcatcct

SEQ ID NO: 8065 - DNA, 780 bp, Homo sapiens
aagtcaactggcctccagcaccaccaggctgattgcagtcctgcctggactggaacgctggcactgccacctatgagctgtggcatacatcccttagcccctttgagtctcggcttccttgcccatgaaataagatgcttgtatccacttcctgggctttctgggggatgatgtggacttgtgtgtagcaggtgtcaggcagggggctggcaccgaacaaatcttaagtccctttcctcccctgaactccaggaaggaaatgtgaagacaatgcatatgacaaaacactattgttccccaagagggaggggacctggaattctagtgatgctgggattaaacccaacagagagccctctggagaagggaaaaggggtgaccactaatgtttcccgaatagctaatgtttcccgagtgcccactgtgtgccaggctgcccataaggtatgtcatgtccctgagccctcctgacaaagctgcagggcacaaaagtctgagattyggagagtgtaagcaatggacccaagttccaaagcagtcacagcagaagacagctttgaacccagcaccctctcatttcctgtgtcccctgcatcttccctggctcccaggaggtactactgaagcacaagtcagtgtgccaaggaaaagagacactttgaatgttacctctgggtggggaagtgcctgcctgctgccaataatgctaaggatctcttgccctctggccattggtgtcagatccaaactcctccaagcctacaagcccctgccagctct

SEQ ID NO: 8066 - DNA, 892 bp, Homo sapiens
aaagaaaaacatgaattaaggtaattacttttatgttccttcagcaaattactaaaagtggttccagagatatatttaaaaatgattattaaaagagtttttaagggagccctattcagggcaaaaagacattgtacattacctcagtacacaaactttcctaatgttttgggaaggacctagggtcctgttttgtccttttggcccgtgttaacactaggacacctgatacctgggaaccagcctgtgtgggagtcacagagtggtggatgtggctcccaaagtggcttaaaggggtcccttctctgtgcagttgagtattctgattgtacgaaggagtcaggcctttcccgtgtgacgttttctcctctttattacagtggcaggcgcatccctgcgagaggcctgacccaggtgtgtaggccaagcagccagccyggaaatccaatggggtgttcttggggtacagaggaggatctgtgacagtccagagagagagaaaggaaaaggtggctttgaagaggcaagtgcaaagataccagagacggggtattgtcattttaggcagttaattgacggtttcacttaccagggagctcccatcatgggctcccaaaaggcctgacaactgctacgcccacgggccattagctgcacctttactgaggggctgtactatgcatgtctgaaagccgcgtgggacagaggaaggggcagggatgagggaaaggacggggtgagggaaggaagggagggtaaacctaactacggcaaccttgagcaggctggaagaggcttcctcaggtaggggtgatgtcacaatcacaggttgagatcagctgcccgggcacacgctgtctcctcgcaggcaggcgagatttgggaacagcca

SEQ ID NO: 8067 - DNA, 892 bp, Homo sapiens
aaagaaaaacatgaattaaggtaattacttttatgttccttcagcaaattactaaaagtggttccagagatatatttaaaaatgattattaaaagagtttttaagggagccctattcagggcaaaaagacattgtacattacctcagtacacaaactttcctaatgttttgggaaggacctagggtcctgttttgtccttttggcccgtgttaacactaggacacctgatacctgggaaccagcctgtgtgggagtcacagagtggtggatgtggctcccaaagtggcttaaaggggtcccttctctgtgcagttgagtattctgattgtacgaaggagtcaggcctttcccgtgtgacgttttctcctctttattacagtggcaggcgcatccctgcgagaggcctgacccaggtgtgtaggccaagcagccagcccggaaatccaatggggtgttcttggggtacagaggaggatctgtgacagtccagagagagagaaaggaaaaggtggctttgaagaggcaagtgcaaagataccagagacggggtattgtcattttaggcagttaattgacggtttcacttaccagggagctcccatcatgggctcccaaaaggcctgacaactgctacgcccacgggccattagctgcacctttactgaggggctgyactatgcatgtctgaaagccgcgtgggacagaggaaggggcagggatgagggaaaggacggggtgagggaaggaagggagggtaaacctaactacggcaaccttgagcaggctggaagaggcttcctcaggtaggggtgatgtcacaatcacaggttgagatcagctgcccgggcacacgctgtctcctcgcaggcaggcgagatttgggaacagcca

SEQ ID NO: 8068 - DNA, 1589 bp, Homo sapiens
gggctcagaaagaacagttgcattacccagatgtttggcccaggtgtatgtcacaatcccagctatatataggcactgctaagacagaaaagccatatcacctggatgcttggcccactgatttgtcacaatcccttctgtaggcaagatccaggcaaaacagacagtaacatctgctaggtgctgggcccagtaatttgtctcaattccccatgtaagaaggtccaaggcaaaagaggagattcatatcacctaggtgataggcccacggatatgtccaaattccaaatgggggtggggccaggcagaagaggagagtcatgtcacctaggtgatgaacccagtaatacgtcmtaatgcccctgtggctcgagccacggcaggagaggagagtcacattagctaggtgatggctgcataagatatttctaagtcacctctgagagactggcccaggcaggagagtcccatcacctatgtgcttggcctaggtatatgtcacaatcccacatttagtctgaacccatgcagaaatgtaaaatcagttaggtgctgggcaaaggtatgaatcaaaatcacacctgcagaaaggtccagggatgagattaacaatattgcatatggcctggctccaaatataagaattagcagctcttgtgaattctgtccaagtacctgagtcacaacctcaaccgtggactagatctgtgtatgagacccccaacctcatctgcaaatagtatcctgataggggagacacagcctcacaagggtgtttgatcttgattcagaagtcatcatcttacctgtgatctggatccatgtataagaatcacacatccaactttcaattgcctccagctgtgagattcagaacctcaacaatgggctgtgtccatatggaagggtaataatccttaccatcagctgagtgtgaaaacaagagtcacaatttcatctgtgtgctgggccctgttatgaaattctctatacctcctgagagcattgtataatatgtttgcgtgttgtaaggctctttgacttttgtacaagtaagaaacccaggacattacctgctgccctaagcctagttactgaagtaaacatctcttctattgactgggtcttggtattagagtccttaccatgcctatgagctgggaccagaaatgagtcaccatcccacctgtggccagatttacatgtaacagtcacaattccaactgtggacttaatcaacatgtgagattcaggagcttactagtaggctctgtccacatatgagagtgacaatcctaatcttctgctgggtgtgcctatgaaagtcacaatttcacctgtgttctagtttgtattatgatgctgtctgtaccagccaaggacttcataatatatgtgtgtgtgtaggaaccttctgtaacctttctacaagtaggcgattcaggaccttatcatttgccctaaacctatctatgagagtcaaaatctcaccatttggctggttctacatctgagagacattataatttctgtgtgctgggcctaggtagcagtcacaattctacctgtgtgtgaaaagaaggcaagaa

SEQ ID NO: 8069 - DNA, 1589 bp, Homo sapiens
gggctcagaaagaacagttgcattacccagatgtttggcccaggtgtatgtcacaatcccagctatatataggcactgctaagacagaaaagccatatcacctggatgcttggcccactgatttgtcacaatcccttctgtaggcaagatccaggcaaaacagacagtaacatctgctaggtgctgggcccagtaatttgtctcaattccccatgtaagaaggtccaaggcaaaagaggagattcatatcacctaggtgataggcccacggatatgtccaaattccaaatgggggtggggccaggcagaagaggagagtcatgtcacctaggtgatgaacccagtaatacgtcataatgcccctgtggctcgagccacggcaggagaggagagtcacattagctaggtgatggctgcataagatatttctaagtcacctctgagagaytggcccaggcaggagagtcccatcacctatgtgcttggcctaggtatatgtcacaatcccacatttagtctgaacccatgcagaaatgtaaaatcagttaggtgctgggcaaaggtatgaatcaaaatcacacctgcagaaaggtccagggatgagattaacaatattgcatatggcctggctccaaatataagaattagcagctcttgtgaattctgtccaagtacctgagtcacaacctcaaccgtggactagatctgtgtatgagacccccaacctcatctgcaaatagtatcctgataggggagacacagcctcacaagggtgtttgatcttgattcagaagtcatcatcttacctgtgatctggatccatgtataagaatcacacatccaactttcaattgcctccagctgtgagattcagaacctcaacaatgggctgtgtccatatggaagggtaataatccttaccatcagctgagtgtgaaaacaagagtcacaatttcatctgtgtgctgggccctgttatgaaattctctatacctcctgagagcattgtataatatgtttgcgtgttgtaaggctctttgacttttgtacaagtaagaaacccaggacattacctgctgccctaagcctagttactgaagtaaacatctcttctattgactgggtcttggtattagagtccttaccatgcctatgagctgggaccagaaatgagtcaccatcccacctgtggccagatttacatgtaacagtcacaattccaactgtggacttaatcaacatgtgagattcaggagcttactagtaggctctgtccacatatgagagtgacaatcctaatcttctgctgggtgtgcctatgaaagtcacaatttcacctgtgttctagtttgtattatgatgctgtctgtaccagccaaggacttcataatatatgtgtgtgtgtaggaaccttctgtaacctttctacaagtaggcgattcaggaccttatcatttgccctaaacctatctatgagagtcaaaatctcaccatttggctggttctacatctgagagacattataatttctgtgtgctgggcctaggtagcagtcacaattctacctgtgtgtgaaaagaaggcaagaa

SEQ ID NO: 8070 - DNA, 1589 bp, Homo sapiens
gggctcagaaagaacagttgcattacccagatgtttggcccaggtgtatgtcacaatcccagctatatataggcactgctaagacagaaaagccatatcacctggatgcttggcccactgatttgtcacaatcccttctgtaggcaagatccaggcaaaacagacagtaacatctgctaggtgctgggcccagtaatttgtctcaattccccatgtaagaaggtccaaggcaaaagaggagattcatatcacctaggtgataggcccacggatatgtccaaattccaaatgggggtggggccaggcagaagaggagagtcatgtcacctaggtgatgaacccagtaatacgtcataatgcccctgtggctcgagccacggcaggagaggagagtcacattagctaggtgatggctgcataagatatttctaagtcacctctgagagactggcccaggcaggagagtcccatcacctatgtgcttggcctaggtatatgtcacaatcccacatttagtctgaacccatgcagaaatgtaaaatcagttaggtgctgggcaaaggtatgaatcaaaatcacacctgcagaaaggtccagggatgagattaacaatattgcatatggcctggctccaaatataagaattagcagctcttgtgaattctgtccaagtacctgagtcacaacctcaaccgtggactagatctgtgtatgagacccccaacctcatctgcaaatagtatcctgataggggagacacagcctcacaagggtgtttgatcttgattcagaagtcatcatcttacctgtgatctggatccatgtataagaatcacacatccaactttcaattgcctccagctgtgagattcagaacctcaacaatgggctgtgtccatatggaagggtaataatccttaccatcagctgagtgtgaaaacaagagtcacaatttcatctgtgtgctgggccctgttatgaaattctctatacctcctgagagcattgtataatatgtttgcgtgttgtaaggctctttgacttttgtacaagtaagaaacccaggacattacctgctgccctaagcctagttactgaagtaaacatctcttctattgactgggtcttggtattagagtccttaccatgcctatgagctgggaccagaaatgagtcaccatcccacctgtggccagatttacatgtaacagtcacaattccaactgtggacttaatcaacatgtgagattcaggagsttactagtaggctctgtccacatatgagagtgacaatcctaatcttctgctgggtgtgcctatgaaagtcacaatttcacctgtgttctagtttgtattatgatgctgtctgtaccagccaaggacttcataatatatgtgtgtgtgtaggaaccttctgtaacctttctacaagtaggcgattcaggaccttatcatttgccctaaacctatctatgagagtcaaaatctcaccatttggctggttctacatctgagagacattataatttctgtgtgctgggcctaggtagcagtcacaattctacctgtgtgtgaaaagaaggcaagaa

SEQ ID NO: 8071 - DNA, 1589 bp, Homo sapiens
gggctcagaaagaacagttgcattacccagatgtttggcccaggtgtatgtcacaatcccagctatatataggcactgctaagacagaaaagccatatcacctggatgcttggcccactgatttgtcacaatcccttctgtaggcaagatccaggcaaaacagacagtaacatctgctaggtgctgggcccagtaatttgtctcaattccccatgtaagaaggtccaaggcaaaagaggagattcatatcacctaggtgataggcccacggatatgtccaaattccaaatgggggtggggccaggcagaagaggagagtcatgtcacctaggtgatgaacccagtaatacgtcataatgcccctgtggctcgagccacggcaggagaggagagtcacattagctaggtgatggctgcataagatatttctaagtcacctctgagagactggcccaggcaggagagtcccatcacctatgtgcttggcctaggtatatgtcacaatcccacatttagtctgaacccatgcagaaatgtaaaatcagttaggtgctgggcaaaggtatgaatcaaaatcacacctgcagaaaggtccagggatgagattaacaatattgcatatggcctggctccaaatataagaattagcagctcttgtgaattctgtccaagtacctgagtcacaacctcaaccgtggactagatctgtgtatgagacccccaacctcatctgcaaatagtatcctgataggggagacacagcctcacaagggtgtttgatcttgattcagaagtcatcatcttacctgtgatctggatccatgtataagaatcacacatccaactttcaattgcctccagctgtgagattcagaacctcaacaatgggctgtgtccatatggaagggtaataatccttaccatcagctgagtgtgaaaacaagagtcacaatttcatctgtgtgctgggccctgttatgaaattctctatacctcctgagagcattgtataatatgtttgcgtgttgtaaggctctttgacttttgtacaagtaagaaacccaggacattacctgctgccctaagcctagttactgaagtaaacatctcttctattgactgggtcttggtattagagtccttaccatgcctatgagctgggaccagaaatgagtcaccatcccacctgtggccagatttacatgtaacagtcacaattccaactgtggacttaatcaacatgtgagattcaggagcttactagtaggctctgtccacatatgagagtgacaatcctaatcttctgctgggtgtgcctatgaaagtcacaatttcacctgtgttctagtttgtattatgaygctgtctgtaccagccaaggacttcataatatatgtgtgtgtgtaggaaccttctgtaacctttctacaagtaggcgattcaggaccttatcatttgccctaaacctatctatgagagtcaaaatctcaccatttggctggttctacatctgagagacattataatttctgtgtgctgggcctaggtagcagtcacaattctacctgtgtgtgaaaagaaggcaagaa

SEQ ID NO: 8072 - DNA, 778 bp, Homo sapiens
tctgtcacccaggctggagtgcagtgactcgatctcggctcactgcaagctccacctccaggattcacaccattctcctgcctcagcctcctgagtagctgggaccacaggcgcctgtcaccatgcctggctaattttttgcatttttagtagagacagggtttcaccatgttagccaggatggtctcaatctcccgaccttgtgatctgcccaccttggtctcccaaagtgctgggattacaggcataagccactgtgccccgccctggcccaatggcattataatcccttatgtagaaagggcacaggtagcaaaaaagagtcacattacctagttgcttggctcagctatatgtcacaattgttttagttagcagggcacagcctatagagagccayatcacaaactggtgagctcagtgacatgtcaaaatgcttaatggaggcagaacataagcaagaaagtagagtcaaatcacttaagtgatgggcccagagacatgtcacaatgtcccctatgggctgagcccaggtcagagactcacatcacctaggggcctggttcaggtatatttcataatctcaactccaattgttggctaggcttccacaggacagaaaaatcaatcagctgctgggcaaaagtatatgttacacctgcaggaaggcctgtgaataagattcataatcccacacattttcagggttcaggtataagagtcaacaccttctgtgagttttgtccaagtatgtgagacagaatctcaatggtggaca

SEQ ID NO: 8073 - DNA, 785 bp, Homo sapiens
tgttgaacctccattttagacttccagcctccagaacattgacagaatagaactatgttgttttaagccaccgtgtttgtggtactttgatacggcatccctagaaaatcaatacgtaccttcaaaaagtttgtttaggattcaatttgcacactcctgaaatgacacattgtctaacttatatcatttgataaaatgtgtctcattccattatttttctttttgggagaacaatgaaaaagagctagaaaacaaacttctaaacaatagatttcctgttggtacaaaagcaaggcagctgatacttcacagtgctgacaagtggattctgaatgggatgctgcaagttcrtattctttgatggatgagccaaaccaaggatttctgggaaactatctgggaggcttttcatggagtgtattccatcactaagaaattttcaggcagccaaatgcttgaaggagtgttggtattttcctataataaatagctaaggagcctgataaccacatcccctaattattttaaaacataactacttgataaaaatctatatttacatacctatctggttagctcgtttttgcctttactttcaatagcaaaaaccccaactggttttgcacaacctaatatttaaaatccatggtctatttcaatgaggattgagaggccattattatagactatatgtttgtgtccctcaaaattcacatattgaaaccccgagcccctgtgggtggtattaggagtggggcctttgggggctaattaggtcatgaggg

SEQ ID NO: 8074 - DNA, 1255 bp, Homo sapiens
atcagaaagcttattaccacgtaaacagtcaataggtaaatttaattattgtgtttaacattcttttgattattaacattaatggagtgttatctaaaaaaattctagttggaggaaaataaaacatgttaaagcagctaaaacacactttactgaagaaacatgccaaataacggatctctttgtctgcttatccccaagaaaaaaaaaattaaaagaattcttggtgattaaacatcatctgatcatggatgttacaaaggaggactaagactttgccggcattagcagggagcaagcacagagagataaaattgcacactggagtgaaacggcccagcctgggctgcaaagaaagctacacaaccgggacttaacttcaaaagaaacaaaatgtggacgtatttaagggtttggaaacaaaacagagtgtaggacrgcaggaaagcctttacttgaggctttcagtgagcaggaaaaatacttttcttcagtgagtgtggggaagaaatactttgagtggtgcagaagttgatgagaggccattaaataaataatggtctgaagtctccagtgttccttgtgaggctgtctcttacagagttaaaagaaaggctcaagatgcattggaaagtcagtcagcatttagcatttcctagggtcagatcccaggtttaagtttatgccacacagtgttcagaaaacagattctattgccatttaatagatgaagaaagtaagatacagtattaaaggatccactaattaagtgataaagccatattcaaaatcaggtatgcaggattccaaagctcgtgttttagaacaaagtcaattctcctttccactatactagtatttcttaagatgtgtttattttaacatttgaatcctactttaaaattttcagcacagatggtatagagttgtgtgcatttgtgttttagttaaagttgcgatccagaggcagttcctcttctgatcaggaatccacaagtaagaggtgtcaagagttttagtgcagaaacggtacacccacaccagagggggtgactcttagatttttactatttattcccatatcaacttaattcactgaatcaacaagtcctctaatgaactgaatgccaaactgggttttctttggtgaaatcagtggtctgttagatagcataaatgttaaagaaatgttagaaaggagatatcagtagtgaacttaaaggcattaagggtctgtggtttgccacaacacctt

SEQ ID NO: 8075 - DNA, 742 bp, Homo sapiens
aaagcaacatccaatttcaaaacgtgattgttctctagatcaagaattttgttctgaaatataattttcagatataggtgtgcttgctgatagttctaaaatattgagcttgatataaaggcaaacctgtctaaacatatggaattcttttggtagtcttagccatgctaacaaatatgttttctgactacagcttttttttccccactgataaaggaatattttcaataaggaaatgatagcaagtcttgtagttactctttggtatttgcaaggtaataaccagctaacagcaatgtatcaatgattgcatttgtgtagacatcttgacyaaagtcacacagacagtagcagaaagtcacttgtcactgtgcagctggcactcttgcataataaggattaggatagccgatgttttgtcacagtgccaaagttaatcatggtctaaggacattgaaaaaaagctgagaagtgagtgaattaatcatcattaaaaacagatttaaaaagtaatcctgaaggggaacttttaagaaaaaaatactactttgaataatacaaagttctttcaatattaaaaaaatgaaagatgcttctagaagggactccttcctctaagacatcagtattataactgtaggcaggaaatcattttctagaaattaacctttcagggcaattccatcaaatcatgagtttttattgctccaaagaaataaacccttcatcagaataggattct

SEQ ID NO: 8076 - DNA, 742 bp, Homo sapiens
aaagcaacatccaatttcaaaacgtgattgttctctagatcaagaattttgttctgaaatataattttcagatataggtgtgcttgctgatagttctaaaatattgagcttgatataaaggcaaacctgtctaaacatatggaattcttttggtagtcttagccatgctaacaaatatgttttctgactacagcttttttttccccactgataaaggaatattttcaataaggaaatgatagcaagtcttgtagttactctttggtatttgcaaggtaataaccagctaacagcaatgtatcaatgattgcatttgtgtagacatcttgaccaaagtcacacagacagtagcagaaagtcacttgtcactgtgcagctggcactcttgcataataaggattaggatagccgatgttttgtcacagtgccaaagttaatcatggtctaaggacattgaaaaaaagctgagaagtgagtgaattaatcatcattaaaaacagatttaaaaagtaatcctgaaggggaacttttaagaaaaaaatactactttgaataatacaaagttctttcaatattaaaaaaatgaaagatgcttctagaagggactccttcctcwaagacatcagtattataactgtaggcaggaaatcattttctagaaattaacctttcagggcaattccatcaaatcatgagtttttattgctccaaagaaataaacccttcatcagaataggattct

SEQ ID NO: 8077 - DNA, 778 bp, Homo sapiens
ttctacctcagcctctggagtagccaggactacaggcacacaccaccacacccggctaatttttttattttttgtagaaatggggttttgccatgttgctcaggcaggtctcaaattcctgccctcaagcaatccayccactctggcctcccaaagtgctgggattacagatgtgagccaccacacctggccttttttaaaaaaaaatctataagattgatagccttctgtgatgaaaggattcccttgtgctcctctagccctttgaagcattggatttccaacagaatttttctgagggccttctcctgtttgggcacagtgtcacccacagcctttctccaggccggggcttctaccctttggcccacattctctgggccccgtttcctgaccaccagctgggcactggctctccaggaaccccatctgtcttcaagcaatactaaaggcaaaaacatcacctggcagaagaaacaaatgggaagacggtatttgatttactacctgtctgatatggtttggctcttgtgtccccacccaaatctcatgtcaaattgtcatctccagtgctggtggaggggcctggcaggaggtgattggatcgtggcggtagatttcccccttgctgttctcatgatagtgagtgagttctcaggagagctgatggcttaaaagtgtgtggcagttcccccttctctctcacctgtcatgctgtgaagaaggtgctttattccccttcgcccttccaccatgattgtaagtttcctgaggtctc

SEQ ID NO: 8078 - DNA, 778 bp, Homo sapiens
ttctacctcagcctctggagtagccaggactacaggcacacaccaccacacccggctaatttttttattttttgtagaaatggggttttgccatgttgctcaggcaggtctcaaattcctgccctcaagcaatccacccactctggcctcccaaagtgctgggattacagatgtgagccaccacacctggccttttttaaaaaaaaatctataagattgatagccttctgtgatgaaaggattcccttgtgctcctctagccctttgaagcattggatttccaacagaatttttctgagggccttctcctgtttgggcacagtgtcacccacagcctttctccagsccggggcttctaccctttggcccacattctctgggccccgtttcctgaccaccagctgggcactggctctccaggaaccccatctgtcttcaagcaatactaaaggcaaaaacatcacctggcagaagaaacaaatgggaagacggtatttgatttactacctgtctgatatggtttggctcttgtgtccccacccaaatctcatgtcaaattgtcatctccagtgctggtggaggggcctggcaggaggtgattggatcgtggcggtagatttcccccttgctgttctcatgatagtgagtgagttctcaggagagctgatggcttaaaagtgtgtggcagttcccccttctctctcacctgtcatgctgtgaagaaggtgctttattccccttcgcccttccaccatgattgtaagtttcctgaggtctc

SEQ ID NO: 8079 - DNA, 719 bp, Homo sapiens
gtttgaggttaccatgagctatgatcatgccactgcactccagcctgggtgacagagcaagaccctgtttctaataaattaaaaaattacagtcacaaaaactgttttaaaaataaaagtttttgaaaccattcttgtcactcagagagtaatttttaaataaattggaattaacaaaaaaaggcacaaaacctttatttaattgatgcataacggatatacatagttttggggttgatgtgatcatttaatgtattcgtgtaattttcaaagatcaagtcagtgtacgtgggatatctgtcaccttaaatatttgccttttctttatgcaccaaayctttttgacagaaaaggaataattgtcagaagcataaagccttgtcagtgtcaagtttctgctgacctcttcagctattctggttgtcatttttttttctggcatcaataagcattttttccctttggataaatatcaagtttattctgattctcaattcacattggcttgcaaattcagatgacactgaagaccaaattactgcctgtgggacaatggactttgtttagttgctaataggggatttagtagatagcccaagagacaggatatgggtctgagattacacttagttgcattttttaaaaactatgttaattataggcttaagtcatgtattcaaatgcagatataagaaatacagcattcccatattttaatt

SEQ ID NO: 8080 - DNA, 719 bp, Homo sapiens
gtttgaggttaccatgagctatgatcatgccactgcactccagcctgggtgacagagcaagaccctgtttctaataaattaaaaaattacagtcacaaaaactgttttaaaaataaaagtttttgaaaccattcttgtcactcagagagtaatttttaaataaattggaattaacaaaaaaaggcacaaaacctttatttaattgatgcataacggatatacatagttttggggttgatgtgatcatttaatgtattcgtgtaattttcaaagatcaagtcagtgtacgtgggatatctgtcaccttaaatatttgccttttctttatgcaccaaacctttttgacagaaaaggaataattgtcagaagcataaagccttgtcagtgtcaagtttctgctgacctcttcagctattctggttgtcatttttttttctggcatcaataagcattttttccctttggataaatatcaagtttattctgattctcaattcacattggcttgcaaattcagatgacactgaagaccaaattactgcctgtgggacaatggactttgtttagttgctaataggggatttagtaratagcccaagagacaggatatgggtctgagattacacttagttgcattttttaaaaactatgttaattataggcttaagtcatgtattcaaatgcagatataagaaatacagcattcccatattttaatt

SEQ ID NO: 8081 - DNA, 661 bp, Homo sapiens
attttatgtgggtgattaaaattttgaaaatattagttggcacttcataatatgaaatgaaattatgaaattttatatacaagagggttaattatttttaaagggctaatcatgtagcactttgttaaacacagggattataaatactgtatttctcaatattaatcaagataattaygctctgtttaaatgtgcgtaaatcacttaacaaaagaatttagaagcaggcatgagcaccaagagcagaaactataccattttctatttcagattatttgtcacaacaaccctttcattctgccacaaaaattaccagggcatttcaataccaacatgaaacagttttatagcccctgagatggcatgtgcttaactttaacttgtttactcaacagtttttgagaaataaccagtactctttagaaataaaaatatttatcaactatcaggcaaatgatcttgagccaataatttaacctccacaactttttcatctgtaaaattttttgtcagtaatttctaagaggtttcctattgatagaattttgtggcttcataaggattttcctaatttcaaaaataataaggtataatgtgttaaaaatattgtaattatccattttcagttggcagcagtgaggagctgattttttcttcgaac

SEQ ID NO: 8082 - DNA, 661 bp, Homo sapiens
attttatgtgggtgattaaaattttgaaaatattagttggcacttcataatatgaaatgaaattatgaaattttatatacaagagggttaattatttttaaagggctaatcatgtagcactttgttaaacacagggattataaatactgtatttctcaatattaatcaagataattatgctctgtttaaatgtgcgtaaatcacttaacaaaagaatttagaagcagrcatgagcaccaagagcagaaactataccattttctatttcagattatttgtcacaacaaccctttcattctgccacaaaaattaccagggcatttcaataccaacatgaaacagttttatagcccctgagatggcatgtgcttaactttaacttgtttactcaacagtttttgagaaataaccagtactctttagaaataaaaatatttatcaactatcaggcaaatgatcttgagccaataatttaacctccacaactttttcatctgtaaaattttttgtcagtaatttctaagaggtttcctattgatagaattttgtggcttcataaggattttcctaatttcaaaaataataaggtataatgtgttaaaaatattgtaattatccattttcagttggcagcagtgaggagctgattttttcttcgaac

SEQ ID NO: 8083 - DNA, 661 bp, Homo sapiens
attttatgtgggtgattaaaattttgaaaatattagttggcacttcataatatgaaatgaaattatgaaattttatatacaagagggttaattatttttaaagggctaatcatgtagcactttgttaaacacagggattataaatactgtatttctcaatattaatcaagataattatgctctgtttaaatgtgcgtaaatcacttaacaaaagaatttagaagcaggcatgagcaccaagagcagaaactataccatyttctatttcagattatttgtcacaacaaccctttcattctgccacaaaaattaccagggcatttcaataccaacatgaaacagttttatagcccctgagatggcatgtgcttaactttaacttgtttactcaacagtttttgagaaataaccagtactctttagaaataaaaatatttatcaactatcaggcaaatgatcttgagccaataatttaacctccacaactttttcatctgtaaaattttttgtcagtaatttctaagaggtttcctattgatagaattttgtggcttcataaggattttcctaatttcaaaaataataaggtataatgtgttaaaaatattgtaattatccattttcagttggcagcagtgaggagctgattttttcttcgaac

SEQ ID NO: 8084 - DNA, 734 bp, Homo sapiens
attatatggctattaacaaatggaaaaaatataataacattatttaatatccgattttacgaccttcctagcttctggtcctttaagcaggcagcctgagattttaaaacggagttaattctctgaaataaaatgtaagccacatgtgaattttaaatattctagtagccaaacttaaaaaaaaaaggaagaaacaggtggaatttattgtaacaatttcatcgttatatattctagttctagaattcaaatattctaatattcaaaatattattttaatatgtgagcagtatgtaatttttcatgtaatatatattattgtatataataatataaaatatgtataataatatataatattatgtataatattatacatgacctcaagtgatctgcccgccttggcctcccaaagtagtgctaggattacaggcgtgagccaccgcgcccgaagcagcggtgctttttgagaaggagtttcactcgcacaatgtgggctcaccgcaacctccacctccgggttcaagcgattctcccacctcagcctcccgagtagctgagattaccggcatgtgccatygtgcccggctaattttgtatttttagtagagacggcctttctccatgttggtcaggctggtctcgaactcccaacctcatgtgatccgcccgcctcggcctcccaaagtgctgggattacaagtgcttttaagagaaagagacacatcatagga

SEQ ID NO: 8085 - DNA, 239 bp, Homo sapiens
  misc_feature (1)...(239): n = A,T,C or G
tttcttggccacatgtctttttattctcacaaggtgtctccagatcatttctttgtgtaacattttgtacgttgatttaatgaaataaatatgagtgtttcctgggcnctggccattgtgtctgcaggccacttatctggctgctcagcccataaatcagcacctgcccctccccagtgatcttgcccttctgagaggagctgagctccacacrcagcacatcccagctgcttagggag

SEQ ID NO: 8086 - DNA, 856 bp, Homo sapiens
tgtctaactagaagacaagagtgctttagatatggaagccattgctctgatattttaaaatacatttttaaaacaaccttattatcgattcatttatacagtcaactccattctgcttagtactcgaagtgtgcactcatgtggataatctaaaacattgagaattcaaataacatttatattaaatctgacataataacctaacgttttagggtatgcctaaatttgcctttctatttctgtttattctggtaacttttgaatttggttctctggccctggaaatgccacatttagccaaagaaaaacagttttgattaggggatagcattaatcattagctagttaagtgtacactaaggaaaaattagagtcattattttgatgagttgtgcataagttatggtcagcacaagaaaacagggcacctgttcatatttggtcaccaaagaatgttctacatttaattaaccacttaatatttacaccttgagaaaaaattatgccacaatacaagcrtaagtgtttttgataaatattcaaatattagaaaaatatattaagatttaaatattcaagtttgtttcagccataaaattctgatcatactctccctatctacctaattgctgctaacaataattcaaatgccaataatgatatatttagataattgattttaaagaatttatcaaacaaaaaatagaggatacctataggtatcttctttttctggagaatcaaaacatagtataaaatggaagctttctttgtgctgtaaagaattcaatacattatggggcaaataaatctattttgaaggtttttttttaatttctggtagactagaaaggaa

SEQ ID NO: 8087 - DNA, 444 bp, Homo sapiens
  misc_feature (1)...(444): n = A,T,C or G
ggaggnggagggggagggggagggggagagggagrgggagagggagcctccaacactttagaatgcgactgcatttggaggcaaggtctttcgagaagtgattaagctaaaatgaggtttttgttttgttttgtttgtagggtgggctctaatctaatgtgaagacatagcaaggagatgccatctacaagccaaaaaaaaggggtgctgggagaaaccagacctgctgacaccttgtgcttggacttccggcctccagaacagtgagcagatgcatttccgttatttaagccacccagtctgtggtattttgttagcagccacagccaactaatacacttaggaaggctggaacacacagtctccatacctgtttctctttttcctgtggcattctccctgggctcaaacaggaagtgggaaaatacataatttccaggtaca

SEQ ID NO: 8088 - DNA, 737 bp, Homo sapiens
cctcagctactgtgccgaggagtctggtccctttggggaatgtggcagtcaggtgctggcagggacctcgaagtggctgaaagatcattaagaaaaagctgtttacaaaggtgtgggctgggccaaggggaaccatgagggatggcgcaggtccctggtgttagcgtcatctgggagctgtcaccacactccaggctgatggggccatagagaagctgttccaataactcagagggagaatctacagctgaaagaggaggccaggggacacatcactccctgtgccctttgactgcgtgtggatgcccccaccgaccacactaccatctccttattagattggagaggctgcagagtggggttctaagcctcctattgtggctcacctccaacagtgagtcagcagcagctcccctagccccacagcccagggtccacttagcccctctatcctgtacggtccccttccccactgggaagcagatacccaaatgagcagcagaatcctgtctctccctgcaggtccctctgctccttatgagtggtgttttgtgggtgtcctcccttggtttaggatgggaaacaaccttttcccttccacagggattgtttctgtstaccccaccctgagttttcccctggtgggacaacgggcaggtggggatggtgggacgaactctttagaaccagcaatgccaaacacatcccactctggggaagttcattctaagtgtcat

SEQ ID NO: 8089 - DNA, 810 bp, Homo sapiens
ccacatagagaaagcaaggaaacatcttgcctccagtatccccatcactcagctggaatcagctcagaaccaggagggagtccctcttgcagagaaaaagtaaataagaagatcccagcacctgccatcaccatcatgaatacctgagtcttcactagcagagactgctgcagtactcacaggctctgaacctagctgaggaagctcctcagagtccacactaagctaccctcagagaaaaagccattactgtgcccctagctcctgtgacccatgctgctactgcactctaccaccttaaaaccggagtcactgccagagtgcatcctacattaggggtgagtagctattgcactccttcatccctgaggttttgctgccactgcaatgtgcctacctggtaacaagtcacccctgagacaaactgctgctctgctctacccactaggtccaagctaccacaaagataccccatcctcttcattccagagtcactgtgccctgttggtttggggtcccgaattgcagctgagtcctgctctttggagcctaagccactgaagcacccattttttcccccgagacatgccagtgctattccctgctcaccagrgacagaccacaaccacatcccaagcctctgggcctgagctactggggtgtgcctcagagcaacagatcctgtcttggtgggagaactgcatccacttggaccttgaaaagtgaacctctgcctcaagtcccagttgctacagcagtttcactgagcccaggaacctgaccccacagctgttccaagcactagtaccg

SEQ ID NO: 8090 - DNA, 810 bp, Homo sapiens
ccacatagagaaagcaaggaaacatcttgcctccagtatccccatcactcagctggaatcagctcagaaccaggagggagtccctcttgcagagaaaaagtaaataagaagatcccagcacctgccatcaccatcatgaatacctgagtcttcactagcagagactgctgcagtactcacaggctctgaacctagctgaggaagctcctcagagtccacactaagctaccctcagagaaaaagccattactgtgcccctagctcctgtgacccatgctgctactgcactctaccaccttaaaaccggagtcactgccagagtgcatcctacattaggggtgagtagctattgcactccttcatccctgaggttttgctgccactgcaatgtgcctacctggtaacaagtcacccctgagacaaactgctgctctgctctacccactaggtccaagctaccacaaagataccccatcctcttcattccagagtcactgtgccctgttggtttggggtcccgaattgcagctgagtcctgctctttggagcctaagccactgaagcacccattttttcccccgagacatgccagtgctattccctgctcaccagggacagaccacaaccacatcccaagcctctrggcctgagctactggggtgtgcctcagagcaacagatcctgtcttggtgggagaactgcatccacttggaccttgaaaagtgaacctctgcctcaagtcccagttgctacagcagtttcactgagcccaggaacctgaccccacagctgttccaagcactagtaccg

SEQ ID NO: 8091 - DNA, 685 bp, Homo sapiens
gtgtcagagtttccattataaaccccatttctcagaggtttataacttggccgtaaaaacgtactgaggcctgaggctgggaccctacggtgcacagctgctgggtcccttccatgcccccaggtggggacatccagtyggcctacaacagagaacaagaggctaggagacctgggctttgcctcctggtgtgaggggatgtggacatggggcctccccttgccagccaggagagctatgtggtccaaagtctgctcataaaggattttccatgagttcacaaggccatgaagctttttagcagcccagcgaccaagggggaaaagctacactgactctcagtgaccacaacctctgtcactcccgagtcatcctgcaaaaacaaacaaacaaacaacaacaaaaaaaaacactgtcctccgagccatccaggccccctttgtacaagctcctgacccagtgacccaacagatacatttcagactgattttcacatcaggaggagattccacgcttggtacgacggcactcgagataacactccccgttttcattaaagggcaagctaccaagggtcacctgtttgggatattgaaggggtaaaggccaacagttcttaggtctaaggagtttgtaaaaaatatgcaaatgcctgggccccacccccgggaattctggtgcccca

SEQ ID NO: 8092 - DNA, 685 bp, Homo sapiens
gtgtcagagtttccattataaaccccatttctcagaggtttataacttggccgtaaaaacgtactgaggcctgaggctgggaccctacggtgcacagctgctgggtcccttccatgcccccaggtggggacatccagttggcctacaacagagaacaagaggctaggagacctgggctttgcctcctggtgtgaggggatgtggacatggggcctccccttgccagccaggmgagctatgtggtccaaagtctgctcataaaggattttccatgagttcacaaggccatgaagctttttagcagcccagcgaccaagggggaaaagctacactgactctcagtgaccacaacctctgtcactcccgagtcatcctgcaaaaacaaacaaacaaacaacaacaaaaaaaaacactgtcctccgagccatccaggccccctttgtacaagctcctgacccagtgacccaacagatacatttcagactgattttcacatcaggaggagattccacgcttggtacgacggcactcgagataacactccccgttttcattaaagggcaagctaccaagggtcacctgtttgggatattgaaggggtaaaggccaacagttcttaggtctaaggagtttgtaaaaaatatgcaaatgcctgggccccacccccgggaattctggtgcccca

SEQ ID NO: 8093 - DNA, 685 bp, Homo sapiens
gtgtcagagtttccattataaaccccatttctcagaggtttataacttggccgtaaaaacgtactgaggcctgaggctgggaccctacggtgcacagctgctgggtcccttccatgcccccaggtggggacatccagttggcctacaacagagaacaagaggctaggagacctgggctttgcctcctggtgtgaggggatgtggacatggggcctccccttgccagccaggagagctatgtggtccaaagtctgctcataaaggattttccatgagttcacaaggccatgaagctttttagcagcccagcgaccaagggggaaaagctacmctgactctcagtgaccacaacctctgtcactcccgagtcatcctgcaaaaacaaacaaacaaacaacaacaaaaaaaaacactgtcctccgagccatccaggccccctttgtacaagctcctgacccagtgacccaacagatacatttcagactgattttcacatcaggaggagattccacgcttggtacgacggcactcgagataacactccccgttttcattaaagggcaagctaccaagggtcacctgtttgggatattgaaggggtaaaggccaacagttcttaggtctaaggagtttgtaaaaaatatgcaaatgcctgggccccacccccgggaattctggtgcccca

SEQ ID NO: 8094 - DNA, 685 bp, Homo sapiens
gtgtcagagtttccattataaaccccatttctcagaggtttataacttggccgtaaaaacgtactgaggcctgaggctgggaccctacggtgcacagctgctgggtcccttccatgcccccaggtggggacatccagttggcctacaacagagaacaagaggctaggagacctgggctttgcctcctggtgtgaggggatgtggacatggggcctccccttgccagccaggagagctatgtggtccaaagtctgctcataaaggattttccatgagttcacaaggccatgaagctttttagcagcccagcgaccaagggggaaaagctacactgactctcagtgaccacaacctctgtcactcccgagtcatcctgcaaaaacaaacaaacaaacaacaamaaaaaaaaacactgtcctccgagccatccaggccccctttgtacaagctcctgacccagtgacccaacagatacatttcagactgattttcacatcaggaggagattccacgcttggtacgacggcactcgagataacactccccgttttcattaaagggcaagctaccaagggtcacctgtttgggatattgaaggggtaaaggccaacagttcttaggtctaaggagtttgtaaaaaatatgcaaatgcctgggccccacccccgggaattctggtgcccca

SEQ ID NO: 8095 - DNA, 817 bp, Homo sapiens
cagaaatgacgtcaagaatctttcaagtgatgaaattcttggggcgagaatgtgtggtttatacaagcagcctttacctccagcctttccagaaactcacataaaatgagtttcctccattgtgtttaccctactggggacagcaggacctttgtcctcctgctccaggatggctctctaccttccaggcatcccagttcataaacacacactgtaattcctacttttgtttgagagcattgcttggggtcccggtggtttgggagtcactgtacctttgccagcgtgaccctgccccatctgcctgtccacatcstacaccctccatcgccccactctaaagccaccttttccagggaggctcctgggagcttcgagcctcccctctttaaactctccgtgtgtgttactccttcggcactcgcccgattgcccgaggcattctttccacagccagaaactcagcacctgctactgggtgtcagccgagcctcctggaaggcaggaactgtgcctacgagcatttccaacccccttcccaattagcagggcaccttgcatagtaggtttatcaactttcagttaagccaggataatgcaggatagcaccaggggacacttcagacttcgaatcagaaagccttgagttcacatcctggagggacaccctagtagctccgtgaccttgagtgtccactttctttcctgtaatgtggggatcatcacccatatattaagtgttatgagaaaaagaaataatgaatgtaaatcatcttggcatctttgtggcatttatagcatgtgcaggatgataatt

SEQ ID NO: 8096 - DNA, 817 bp, Homo sapiens
cagaaatgacgtcaagaatctttcaagtgatgaaattcttggggcgagaatgtgtggtttatacaagcagcctttacctccagcctttccagaaactcacataaaatgagtttcctccattgtgtttaccctactggggacagcaggacctttgtcctcctgctccaggatggctctctaccttccaggcatcccagttcataaacacacactgtaattcctacttttgtttgagagcattgcttggggtcccggtggtttgggagtcactgtacctttgccagcgtgaccctgccccatctgcctgtccacatcctacaccctccatcgccccactctaaagccaccttttccagggaggctcctgggagcttcgagcctcccctctttaractctccgtgtgtgttactccttcggcactcgcccgattgcccgaggcattctttccacagccagaaactcagcacctgctactgggtgtcagccgagcctcctggaaggcaggaactgtgcctacgagcatttccaacccccttcccaattagcagggcaccttgcatagtaggtttatcaactttcagttaagccaggataatgcaggatagcaccaggggacacttcagacttcgaatcagaaagccttgagttcacatcctggagggacaccctagtagctccgtgaccttgagtgtccactttctttcctgtaatgtggggatcatcacccatatattaagtgttatgagaaaaagaaataatgaatgtaaatcatcttggcatctttgtggcatttatagcatgtgcaggatgataatt

SEQ ID NO: 8097 - DNA, 665 bp, Homo sapiens
aacaccattgcttccatctgtccttatccattctcacagcctgaaacaagctcactggtagcttatgcttgccagcaggactgggaacattcacgctatttattcgggagtactgactccagaaagtacagcaaccttggactgctcagcgccattggtacggtcttccgtggtgcacttggccttatttattttttacgacatttgacagagtgcagagagagagcaagcataaaaacggcagaagctactggaaacgtcctgaacaatctacagtcataccaccgtgaacgctcccaatattgtytggtctctgaagtacagagtagatgcgattgggcccaggttggggcctgtttcattgttggatagaaggaacttcctgaatgctttgttccgcttaagctgcgtattgttgaagcactcaatggcccagccattcgaccaggagcatccgtattgcctctttgtgttatggtttaggctaatgaaaagacttggtttccaacaccctcttctacctctgggcagattccagatagctgatctaccattacgtttccgaaatcatgggacgaccagctgcaagtgagacgatgctcagtgggttgaaactgatcacacaggaggcatttggcaacggccttctctcccagctgtttgga

SEQ ID NO: 8098 - DNA, 914 bp, Homo sapiens
agctgagaagaacaccattgcttccggctgtccttcttcattctcacagcctgaaacaagctcactggtagcttatgcttgcaagcaggaccgggaacattcacgctatttattcgggagtactctggataaatcatcccattatttcggaaatgtaatgctaggtcaggtatctggaatcttcctggaggtagaagagggtattggatggaaggaacttcgtgaatgcgatcattgaactccagaaagtacaccaaccttgtactgctcagggccttaggtagggtcttctgtggcgcacttgaccttatttatgttttacaaygtttgacagaggacagaaagagagcaagcattaaaagggcaaaagctaccagaaacatcgtgaacaatctacagccataccaccgtgaacgctcccaatctcgtctggcctctgaagtacagagtagaggagattgggcccaggtaggggcctgtttcatagttggatggaaggaactttgtgaatgctatcatttaacttaagctgtctattactaaaccagtcagccgcccagccattcgactaggagcatccgtattgcctctttgtgatatggtttaggctaatgaaaagacttggtttccaacaccctcttctacctctgagcagatcccacatagctgatctaccattacgtttccgaaatcatgggacgaccagctgcaagcgagacgatgctcagtgggttgaaactgatcactcaggaggcagttggcaacggccttctctcccagctgtttgggtcctggaccttcactcaggaaattggtggctcagaacaggaagcttgtctcatgtaatcgaatagtgctggaggaatccaaagccttggtgtgctgcaacatgaagagggatctggaacaggcca

SEQ ID NO: 8099 - DNA, 1720 bp, Homo sapiens
tccaaacagctgggagagaaggccgttgccaaatgcctcctgtgtgatcagtttcaacccactgagcatcgtctcgcttgcagctggtcgtcccatgatttcggaaacgtaatggtagatcagctatctggaatctgcccagaggtagaagagggtgttggaaaccaagtcttttcattagcctaaaccatatcacaaagaggcaatacggatgctcctggtcgaatggctgggccattgagtgcttcaacaatacgcagcttaaggggaacaaagcattcaggaagttccttctatccaacaatgaaacaggccccaacctgggcccaatcgcatctactctgtacttcagagaccagacaagattgggagcgttcacggtggtatgactgtagattgttcacgacgtttccagtagcttctgccgttttaatgcttgctctctctctgcactctgtcaaatgtcgtaaaaaataaataaggccaagtgcaccacggaagaccgtacgaatggcgctgagcagtcgaaggttgctgtactttctggagtcagtactcccgaataaatagcgtgaatgttcccagtcctgcttgcaagcataagctaccagtgagcttgtttcaggctgtgagaatggataaggacagatggaagcaatggtgttcttctcagccggaacccgacgtggtcagtgtgcagcctgacaatcgaaactcattcatcttcctttctaagtcctttcacatggagtccaacccttgggcagaaccccagattttcttcagtacttcacatgttctctcgttggcctgttccagatccctcttcatgttgcagcacaccaaggctttggattcctccagcactattcgattacatgagacaagcttcctgttctgagccaccaatttcctgagtgaaggtccaggacccaaacagctgggagagaaggccgttgccaactgcctcctgagtgatcagtttcaacccactgagcatcgtctcgcttgcagctggtcgtcccatgatttcggaaacgtaatggtagatcagctatgtgggatctgctcagaggtagaagagggtgttggaaaccaagtcttttcattagcctaaaccatatcacaaagaggcaatacggatgctcctagtcgaatggctgggcggctgactggtttagtaatagacagcttaagttaaatgatagcattcacaaagttccttccatccaactatgaaacaggcccctacctgggcccaatctcctctactctgtacttcagaggccagacgagattgggagcgttcacggtggtatggctgtagattgttcacgatgtttctggtagcttttgcccttttaatgcttgctctctttctgtcctctgtcaaacrttgtaaaacataaataagatcaagtgcgccacagaagaccctacctaaggccctgagcagtacaaggttggtgtactttctggagttcaatgatcgcattcacgaagttccttccatccaataccctcttctacctccaggaagattccagatacctgacctagcattacatttccgaaataatgggatgatttatccagagtactcccgaataaatagcgtgaatgttcccggtcctgcttgcaagcataagctaccagtgagcttgtttcaggctgtgagaatgaagaaggacagctggaagcaatggtgttcttctcagct

SEQ ID NO: 8100 - DNA, 1720 bp, Homo sapiens
tccaaacagctgggagagaaggccgttgccaaatgcctcctgtgtgatcagtttcaacccactgagcatcgtctcgcttgcagctggtcgtcccatgatttcggaaacgtaatggtagatcagctatctggaatctgcccagaggtagaagagggtgttggaaaccaagtcttttcattagcctaaaccatatcacaaagaggcaatacggatgctcctggtcgaatggctgggccattgagtgcttcaacaatacgcagcttaaggggaacaaagcattcaggaagttccttctatccaacaatgaaacaggccccaacctgggcccaatcgcatctactctgtacttcagagaccagacaagattgggagcgttcacggtggtatgactgtagattgttcacgacgtttccagtagcttctgccgttttaatgcttgctctctctctgcactctgtcaaatgtcgtaaaaaataaataaggccaagtgcaccacggaagaccgtacgaatggcgctgagcagtcgaaggttgctgtactttctggagtcagtactcccgaataaatagcgtgaatgttcccagtcctgcttgcaagcataagctaccagtgagcttgtttcaggctgtgagaatggataaggacagatggaagcaatggtgttcttctcagccggaacccgacgtggtcagtgtgcagcctgacaatcgaaactcattcatcttcctttctaagtcctttcacatggagtccaacccttgggcagaaccccagattttcttcagtacttcacatgttctctcgttggcctgttccagatccctcttcatgttgcagcacaccaaggctttggattcctccagcactattcgattacatgagacaagcttcctgttctgagccaccaatttcctgagtgaaggtccaggacccaaacagctgggagagaaggccgttgccaactgcctcctgagtgatcagtttcaacccactgagcatcgtctcgcttgcagctggtcgtcccatgatttcggaaacgtaatggtagatcagctatgtgggatctgctcagaggtagaagagggtgttggaaaccaagtcttttcattagcctaaaccatatcacaaagaggcaatacggatgctcctagtcgaatggctgggcggctgactggtttagtaatagacagcttaagttaaatgatagcattcacaaagttccttccatccaactatgaaacaggcccctacctgggcccaatctcctctactctgtacttcagaggccagacgagattgggagcgttcacggtggtatggctgtagattgttcacgatgtttctggtagcttttgcccttttaatgcttgctctctttctgtcctctgtcaaacgttgtaaaacataaataagrtcaagtgcgccacagaagaccctacctaaggccctgagcagtacaaggttggtgtactttctggagttcaatgatcgcattcacgaagttccttccatccaataccctcttctacctccaggaagattccagatacctgacctagcattacatttccgaaataatgggatgatttatccagagtactcccgaataaatagcgtgaatgttcccggtcctgcttgcaagcataagctaccagtgagcttgtttcaggctgtgagaatgaagaaggacagctggaagcaatggtgttcttctcagct

SEQ ID NO: 8101 - DNA, 1720 bp, Homo sapiens
tccaaacagctgggagagaaggccgttgccaaatgcctcctgtgtgatcagtttcaacccactgagcatcgtctcgcttgcagctggtcgtcccatgatttcggaaacgtaatggtagatcagctatctggaatctgcccagaggtagaagagggtgttggaaaccaagtcttttcattagcctaaaccatatcacaaagaggcaatacggatgctcctggtcgaatggctgggccattgagtgcttcaacaatacgcagcttaaggggaacaaagcattcaggaagttccttctatccaacaatgaaacaggccccaacctgggcccaatcgcatctactctgtacttcagagaccagacaagattgggagcgttcacggtggtatgactgtagattgttcacgacgtttccagtagcttctgccgttttaatgcttgctctctctctgcactctgtcaaatgtcgtaaaaaataaataaggccaagtgcaccacggaagaccgtacgaatggcgctgagcagtcgaaggttgctgtactttctggagtcagtactcccgaataaatagcgtgaatgttcccagtcctgcttgcaagcataagctaccagtgagcttgtttcaggctgtgagaatggataaggacagatggaagcaatggtgttcttctcagccggaacccgacgtggtcagtgtgcagcctgacaatcgaaactcattcatcttcctttctaagtcctttcacatggagtccaacccttgggcagaaccccagattttcttcagtacttcacatgttctctcgttggcctgttccagatccctcttcatgttgcagcacaccaaggctttggattcctccagcactattcgattacatgagacaagcttcctgttctgagccaccaatttcctgagtgaaggtccaggacccaaacagctgggagagaaggccgttgccaactgcctcctgagtgatcagtttcaacccactgagcatcgtctcgcttgcagctggtcgtcccatgatttcggaaacgtaatggtagatcagctatgtgggatctgctcagaggtagaagagggtgttggaaaccaagtcttttcattagcctaaaccatatcacaaagaggcaatacggatgctcctagtcgaatggctgggcggctgactggtttagtaatagacagcttaagttaaatgatagcattcacaaagttccttccatccaactatgaaacaggcccctacctgggcccaatctcctctactctgtacttcagaggccagacgagattgggagcgttcacggtggtatggctgtagattgttcacgatgtttctggtagcttttgcccttttaatgcttgctctctttctgtcctctgtcaaacgttgtaaaacataaataagatcaagtgcgccacagaagaccctacctaaggccctgagcagtacaaggttggtgtactttctggagttcaatgatcgcattcacgaagttccttccatccaataccctcttctacctccaggaagattccagatacctgacctagcattacatttccgaaataatgggatgatttatccagagtactcccgaataaatagcgtgaatgttcccggtcctgcttgcaagcataagctaccagtgagcttgtttcaggctgtgagaatgaagaaggacagcyggaagcaatggtgttcttctcagct

SEQ ID NO: 8102 - DNA, 859 bp, Homo sapiens
gatccaaacagctgggagagaaggccgttgccaaatgcctcctgagtgatcagtttcaacccactgagcatcgtctcacttgcagctggtcgtcccatgatttcggaaacgtaatggtagatcagctatctggaatctgcccagaggtagaagagggtgttggaaaccaagtcttttcattakcctaaaccatatcacaaagaggcaatacggatgctcctagtcgaatggctgggccattgagtgcttcaacaatacgcagcttaagctgaacaatagcattcaggaagttccttctatccaacaatgaaacaggcccgaacctggacccaatcgcatctactctgtacttcagagaccagacaagattgggagcgttcacggtggtatgactgtagattgttcacgacgtttccagtagcttctgccgttttaatgcttgctctctctctgtcctctgtcaaatgtcgtaaaaaataaataaggccaagtgcaccacggaagaccgtaccaatggcgctgagcagtccaaggttgctgtactttctggagtcagtactcccgaataaatagcgtgaatgttcccagtcctgcttgcaagcataagctaccagtgagcttgtctcaggctgtgagaatggataaggacagatggaagcaatggtgttcttctcagccggaacccgatgtggtcagtgtgcagcctgacactcgaaactcgttcatcttcctttctaagtcctttcacatggagtccaacccttgggcagaaccccagattttcttcagtacttcacatgttctctcgttggcctgttccagatccgtcttcatgttgcagcacaccaaggctttggat

SEQ ID NO: 8103 - DNA, 859 bp, Homo sapiens
gatccaaacagctgggagagaaggccgttgccaaatgcctcctgagtgatcagtttcaacccactgagcatcgtctcacttgcagctggtcgtcccatgatttcggaaacgtaatggtagatcagctatctggaatctgcccagaggtagaagagggtgttggaaaccaagtcttttcattagcctaaaccatatcacaaagaggcaatacrgatgctcctagtcgaatggctgggccattgagtgcttcaacaatacgcagcttaagctgaacaatagcattcaggaagttccttctatccaacaatgaaacaggcccgaacctggacccaatcgcatctactctgtacttcagagaccagacaagattgggagcgttcacggtggtatgactgtagattgttcacgacgtttccagtagcttctgccgttttaatgcttgctctctctctgtcctctgtcaaatgtcgtaaaaaataaataaggccaagtgcaccacggaagaccgtaccaatggcgctgagcagtccaaggttgctgtactttctggagtcagtactcccgaataaatagcgtgaatgttcccagtcctgcttgcaagcataagctaccagtgagcttgtctcaggctgtgagaatggataaggacagatggaagcaatggtgttcttctcagccggaacccgatgtggtcagtgtgcagcctgacactcgaaactcgttcatcttcctttctaagtcctttcacatggagtccaacccttgggcagaaccccagattttcttcagtacttcacatgttctctcgttggcctgttccagatccgtcttcatgttgcagcacaccaaggctttggat

SEQ ID NO: 8104 - DNA, 859 bp, Homo sapiens
gatccaaacagctgggagagaaggccgttgccaaatgcctcctgagtgatcagtttcaacccactgagcatcgtctcacttgcagctggtcgtcccatgatttcggaaacgtaatggtagatcagctatctggaatctgcccagaggtagaagagggtgttggaaaccaagtcttttcattagcctaaaccatatcacaaagaggcaatacggatgctcctagtcgaatggctgggccattgagtgcttcaacaatacgcagcttaagctgaacaatagcattcaggaagttccttctatccaacaatgaaacakgcccgaacctggacccaatcgcatctactctgtacttcagagaccagacaagattgggagcgttcacggtggtatgactgtagattgttcacgacgtttccagtagcttctgccgttttaatgcttgctctctctctgtcctctgtcaaatgtcgtaaaaaataaataaggccaagtgcaccacggaagaccgtaccaatggcgctgagcagtccaaggttgctgtactttctggagtcagtactcccgaataaatagcgtgaatgttcccagtcctgcttgcaagcataagctaccagtgagcttgtctcaggctgtgagaatggataaggacagatggaagcaatggtgttcttctcagccggaacccgatgtggtcagtgtgcagcctgacactcgaaactcgttcatcttcctttctaagtcctttcacatggagtccaacccttgggcagaaccccagattttcttcagtacttcacatgttctctcgttggcctgttccagatccgtcttcatgttgcagcacaccaaggctttggat

SEQ ID NO: 8105 - DNA, 554 bp, Homo sapiens
agacttgatcacctcataagggatgaaacctggcccactgaggtgaaggcagaataaaaagcgaatatcgattggatcagggggaataacattataaatactgatgaaaccctggtgaacagttgcagaaatgagaacagtaatagctcctcatattcttcttgcatgatcatacttagtagtacctaattattaatcatatacttctttttcatttctgtagtaytttatactgaatttttttgtcgtggttaccttttataattggtctataatttacaaaaataaagatggcatcgaaactggaagagaagagaattaacattacctagagttaaatgtaataactgatatgactttgggtcttccctttcatggaaacaatgagcacactttaatttgtctgaggtcttactgtgctgtttatgtgggagcatgctgttgttgcagttgggagtttaaacatgagaagaaacctgtgtgtaagtgtggagtagccaagggtcagtagtgtagattgtcttggtcagtatttattctagcacccaaagctg

SEQ ID NO: 8106 - DNA, 635 bp, Homo sapiens
tagccattgtcctcagttcatcactgctgctacgtaggtaaaaggaaatttaaaaccctggycaggggtcctgccactgtcagtccactccctaatgatacctctgtatctctttccttactggtgtgtaagctgctccaaccagcctggggctcagagctcccactgaaaaggccacttgcgggtccataatcagggatgtcccccttcagctggcccaagacccttaccaagtcatagaagacctcatggtgctgacaatatcatcaggtaagccagcaagcctttgtggccatgctgtttaattgagtgcatctgatttgttcgcaagcgtacgtactcaccctacatttgaacaaaccattatatctataaaggaaaataaaaacatctcaggacccccaaacttgttatggcgaaagtaaagtgaagcctcagtcaggcaacgccaatatcttttttccaaataaaataacagatacttcacaatcttttgttaaaacattatacagtagccagaccccagatgttttgttggatttgatgcctatcctcccataaacaaggacatggcaattgtaactttaggtctgcaatctaagtctagcttctaaaaaactaaagtctgttagatt

SEQ ID NO: 8107 - DNA, 635 bp, Homo sapiens
tagccattgtcctcagttcatcactgctgctacgtaggtaaaaggaaatttaaaaccctggtcaggggtcctgccactgtcagtccactccctaatgatacctctgtatctctttccttactggtgtgtaagctgctccaaccagcctggggctcagagctcccactgaaaaggccacttgcgggtccataatcagggatgtcccccttcagctggcccaagacccttaccaagtcatagaagacctcatggtgctgacaatatcatcaggtaagccagcaagcctttgtggccatgctgtttaattgagtgcatctgatttgttcgcaagcgtacgtactcaccctacatttgaacaaaccattatatctataaaggaaaataaaaacatctcaggacccccaaacttgttatggcgaaagtaaagtgaagcctcagtcaggcaacrccaatatcttttttccaaataaaataacagatacttcacaatcttttgttaaaacattatacagtagccagaccccagatgttttgttggatttgatgcctatcctcccataaacaaggacatggcaattgtaactttaggtctgcaatctaagtctagcttctaaaaaactaaagtctgttagatt

SEQ ID NO: 8108 - DNA, 672 bp, Homo sapiens
ataggtgcagcacaccaacatggcacatgtatacatatgtaacaaacctgcacattgtgcacatgtaccctaaaacttaacgtataataaaaaataaaaaaataaaaataaaaaataataaaaaaacctggtatcataaaaattgatacaagcacatgataatctacttattttaagtgaaaacaaataaatctgttatttcatcttttaatrtaatggtaaagctttctcttgaagtttattgccaccacccgatttggtacatcagtcagtatgtatctcaggagaaatgtagggtttgattttaatccaacaagtcaatgacatgaaggtcaaaaaagagatctccttctagactgtcattagcagaacagttttgcattgaaaacatttacatgcgggtatccaacatggtatgaaaatcctaaaaggccctgtagaatcattttgggtccttaaaaatcagggcatctctagtaggacataacataagaaccacgaaattgctatatggcatcagaagactgtcagtctagtctgtattaagtgtctaaccactggtctatatttgaagtgatgttattgggaagaacgtggtaagtgctaattaaaagttagcaatatgcgcaaagcccacttaatgttcaagtacattgctatgattcattactt

SEQ ID NO: 8109 - DNA, 672 bp, Homo sapiens
ataggtgcagcacaccaacatggcacatgtatacatatgtaacaaacctgcacattgtgcacatgtaccctaaaacttaacgtataataaaaaataaaaaaataaaaataaaaaataataaaaaaacctggtatcataaaaattgatacaagcacatgataatctacttattttaagtgaaaacaaataaatctgttatttcatcttttaatataatggtaaagctttctcttgaagtttattgccaccaccygatttggtacatcagtcagtatgtatctcaggagaaatgtagggtttgattttaatccaacaagtcaatgacatgaaggtcaaaaaagagatctccttctagactgtcattagcagaacagttttgcattgaaaacatttacatgcgggtatccaacatggtatgaaaatcctaaaaggccctgtagaatcattttgggtccttaaaaatcagggcatctctagtaggacataacataagaaccacgaaattgctatatggcatcagaagactgtcagtctagtctgtattaagtgtctaaccactggtctatatttgaagtgatgttattgggaagaacgtggtaagtgctaattaaaagttagcaatatgcgcaaagcccacttaatgttcaagtacattgctatgattcattactt

SEQ ID NO: 8110 - DNA, 672 bp, Homo sapiens
ataggtgcagcacaccaacatggcacatgtatacatatgtaacaaacctgcacattgtgcacatgtaccctaaaacttaacgtataataaaaaataaaaaaataaaaataaaaaataataaaaaaacctggtatcataaaaattgatacaagcacatgataatctacttattttaagtgaaaacaaataaatctgttatttcatcttttaatataatggtaaagctttctcttgaagtttattgccaccacccgatttggtacatcagtcagtatgtatctcaggagaaatgtagggtttgattttaatccaacaagtcaatgacatgaaggtcaaaaaagagatctccttctagactgtcattagcagracagttttgcattgaaaacatttacatgcgggtatccaacatggtatgaaaatcctaaaaggccctgtagaatcattttgggtccttaaaaatcagggcatctctagtaggacataacataagaaccacgaaattgctatatggcatcagaagactgtcagtctagtctgtattaagtgtctaaccactggtctatatttgaagtgatgttattgggaagaacgtggtaagtgctaattaaaagttagcaatatgcgcaaagcccacttaatgttcaagtacattgctatgattcattactt

SEQ ID NO: 8111 - DNA, 649 bp, Homo sapiens
ctcatgaatggcttggtgctgtcctcatgatagtgagttcttgcaagatctcattgtttaaagtgcataacacctccagctccctgttgttcccgctctcaccatgtgatgtgcctgcttcccctttgccttctgctatgattgtaagcttcctgaggcctcactagaagttgagcaaatcccagcatcatgctgcctatacaacctgtagaaccatgagccaattaaactattttcaaaataaattacacagcctcagctagttatttatagcaatgcaaggatggcctaacacaggtacctacagagtggtttgcttctcacctgatttgagaatattagtgaaagttctaggaatttttttttcaactattctgtgtgggatttgagaggacartaagtacaggcactggctttgctttatttcttagctctgctctagaattttatatttacctgcatgccaacttattttaacttcatggcattagattactccgttctccttggttatttgttactgggcaacttttttgtggggacagtgctattttttgctcatctgtttagattttggagaaggaagattctgttactagttgtcactctattgtctttactcagaagttctgtagctctatgctaattg

SEQ ID NO: 8112 - DNA, 531 bp, Homo sapiens
agaagggacacgatgaggatgtgagctcctgggcagaaagcctgcaccaggaacccaaagaccagcagtgcgagcccagggccccgtggaagacatgactccaggtcacagaaataaggtcactggtgctatttttattaattctctgagtatgctgcaaatttggtttctacttatgatatcagccttaactttttttaatgttgatgagaatgttcatttttagcacagataattttaaaccattttcaaatcaaccttttctggcaatgaatagatgcgatttgctcccacgaagacacccacagactgtcaaaatccagtgtcactgagagggaacggtgacggatsgagaccgtaagtcgtctctgtcccaggttttttactcgctggactgggcccttcccttccttcctctaccacaaacacacaacacacaaaaacacagttttcagctgaaagtgtaactccccctctctctggccatgccaagaaggaagttacactgggctttagttctcagcctataga

SEQ ID NO: 8113 - DNA, 531 bp, Homo sapiens
agaagggacacgatgaggatgtgagctcctgggcagaaagcctgcaccaggaacccaaagaccagcagtgcgagcccagggccccgtggaagacatgactccaggtcacagaaataaggtcactggtgctatttttattaattctctgagtatgctgcaaatttggtttctacttatgatatcagccttaactttttttaatgttgatgagaatgttcatttttagcacagataattttaaaccattttcaaatcaaccttttctggcaatgaatagatgcgatttgctcccacgaagacacccacagactgtcaaaatccagtgtcactgagagggaacggtgacggatcgagaccgtaagtcgtctctgtcccaggttttttactcgctggactgggcccttcccttccttcctctaccacaaacacacaacacacaaaaacacagttttcagctgaaagtgtaactccccctctctctggccatgccaagaaggaagtyacactgggctttagttctcagcctataga

SEQ ID NO: 8114 - DNA, 805 bp, Homo sapiens
  misc_feature (1)...(805): n = A,T,C or G
cgactaaaccagcacgcatgtggcattctggccttcaaggagaacacatctctttccctaagtatctctcccnnnnnnnnnnnnnnnnnnnnnnnnnnnnnnnnnnnnnnnnnnnnnnnnnnnnnnnnnnnnnnnnnnnnnnnnnnnnnnnnnnnnnnnnnnnnnnnnnnnngaacatgaaacaccacccctgggtagcaggcctcagaaacacctctgccagcaggctgactttactcatttgatcatatcacacaattccacacaaatacacacctgggtcagagcccacaggctggtgtttacagtcctttctctccccagctcctgccactgcctcacctctgtggccccctcctcgcccckgcccactaacaaccttgaatgcactgcccgtgcctttctgataatcacataccaagatacaaatgttgcatatttaaacacatatacagaaacacacccacgcataggggattttggcgtggctttacaaaaatgggatatgtatcactctagtctacgtcttgtccttttcacacaatgttaccttggaaatccctgcaaacgcactggcatggtgacaaccccattctttcacagttacaccgcgtttcgtgacttcatcattcctcttttagtatagagatgaataatctcccttagcgtggatgtattagaatttacacaatcattagtgttatgtttattcatgcttctgttatttctactataaataatgtcaatattctgattttatacttttttatgtcatcttacttgctgattcttttaattctctgac

SEQ ID NO: 8115 - DNA, 748 bp, Homo sapiens
tagggtgtttactcatcactgaagtgcagcctagtctgttgtaacagatctatccacctccgaccccagtgttccccatcctccgatttctctcccttctgtactctttctgcagccaccttggcctcagtcatttcctcacagcacagtattcacagttgcagcagaggcaggggaagaagacccaagaagggaagacctgggtgcttctcttcccctagcatgctattgcactgcctctcatcctggctgttcctctctctggaatactcttcctctagatgttcactcctggcttctttwcagctgaaatgactctttctcagagaaagttgctggcaccacccatccacccacaacttctcaacacaatactctttactgcgttcgtagcagtaaattattcaagaaattatctcatctgtttattgtctttctccttgtaggatgtcatctccaccagaacaaggactacgttttgtatgttgctgttccgttagtgccagaacatgcccacccctgctcagtaaataagcgttaagtgaatgaattaataagtgaaaggctgtaagtactttgacctccaggttatctagtctcactccctttacagatgaggaaattgactcttttcccagaaaagaggaaacagaaaagcaaaggcaactctcccatgctagctgtttctggagtgctgaacttagatgtgatttattcaaatgaaaactcttggggaattgtttcagag

SEQ ID NO: 8116 - DNA, 779 bp, Homo sapiens
gtatgctccctgcttctgcccgtaggttgtcagttttcactttaattttgatttttatctttttttcttcttaagtatttcaattggaaatttaaaaagaatatgtcaggatttgttagctgaatgccattttatattggaaatcttcctatgataaacacaactttacttacaaactttatttttcttctagcccttttcatgcaaaaatgttgtgattaaatagagctatttcacattatatttccttagagcaagagcatgtaacgaggacagacccaattcartctagaatttcttttttttctttttctttgtcagcaggaagtcatctatctagagtctgtaagaatgtgttggaatttacagtggtgccctgaataaaaagattcctttaatatgcacaaatgaattagcagaattataaattctgcttagaaggagagctgatggtgctgtaaggataaaaagcatctactgaagcctgttttttttttactacactgaacctggaaacattggaatttctagacaatcatggaacagttgtgtagtccacacacacaagcagctgtgctcatgctcagcatgcggagctggtcccccaccatggggaggagctcagggacaccgagtgtgaccacaagatgaaggagactctatggagagccacactgggggaggtcatatcctccttcttatccaccaaacatccttttagcaagaccaggaaaagtcaggagaccactcaaaaaagaaggagactctgagaaacgatc

SEQ ID NO: 8117 - DNA, 779 bp, Homo sapiens
gtatgctccctgcttctgcccgtaggttgtcagttttcactttaattttgatttttatctttttttcttcttaagtatttcaattggaaatttaaaaagaatatgtcaggatttgttagctgaatgccattttatattggaaatcttcctatgataaacacaactttacttacaaactttatttttcttctagcccttttcatgcaaaaatgttgtgattaaatagagctatttcacattatatttccttagagcaagagcatgtaacgaggacagacccaattcaatctagaatttcttttttttctttttcyttgtcagcaggaagtcatctatctagagtctgtaagaatgtgttggaatttacagtggtgccctgaataaaaagattcctttaatatgcacaaatgaattagcagaattataaattctgcttagaaggagagctgatggtgctgtaaggataaaaagcatctactgaagcctgttttttttttactacactgaacctggaaacattggaatttctagacaatcatggaacagttgtgtagtccacacacacaagcagctgtgctcatgctcagcatgcggagctggtcccccaccatggggaggagctcagggacaccgagtgtgaccacaagatgaaggagactctatggagagccacactgggggaggtcatatcctccttcttatccaccaaacatccttttagcaagaccaggaaaagtcaggagaccactcaaaaaagaaggagactctgagaaacgatc

SEQ ID NO: 8118 - DNA, 779 bp, Homo sapiens
gtatgctccctgcttctgcccgtaggttgtcagttttcactttaattttgatttttatctttttttcttcttaagtatttcaattggaaatttaaaaagaatatgtcaggatttgttagctgaatgccattttatattggaaatcttcctatgataaacacaactttacttacaaactttatttttcttctagcccttttcatgcaaaaatgttgtgattaaatagagctatttcacattatatttccttagagcaagagcatgtaacgaggacagacccaattcaatctagaatttcttttttttctttttctttgtcagcaggaagtcatctatctagagtctgtaagaatgtgttggaatttacagtggtgccctgaataaaaagattcctttaatatgcacaaatgaattagcagaattataaattctgcttagaaggagagctgatggtgctgtaaggataaaaagcatctactgaagcmtgttttttttttactacactgaacctggaaacattggaatttctagacaatcatggaacagttgtgtagtccacacacacaagcagctgtgctcatgctcagcatgcggagctggtcccccaccatggggaggagctcagggacaccgagtgtgaccacaagatgaaggagactctatggagagccacactgggggaggtcatatcctccttcttatccaccaaacatccttttagcaagaccaggaaaagtcaggagaccactcaaaaaagaaggagactctgagaaacgatc

SEQ ID NO: 8119 - DNA, 779 bp, Homo sapiens
gtatgctccctgcttctgcccgtaggttgtcagttttcactttaattttgatttttatctttttttcttcttaagtatttcaattggaaatttaaaaagaatatgtcaggatttgttagctgaatgccattttatattggaaatcttcctatgataaacacaactttacttacaaactttatttttcttctagcccttttcatgcaaaaatgttgtgattaaatagagctatttcacattatatttccttagagcaagagcatgtaacgaggacagacccaattcaatctagaatttcttttttttctttttctttgtcagcaggaagtcatctatctagagtctgtaagaatgtgttggaatttacagtggtgccctgaataaaaagattcctttaatatgcacaaatgaattagcagaattataaattctgcttagaaggagagctgatggtgctgtaaggataaaaagcatctactgaagcctgttttttttttactacactgaacctggaaacattggaatttctagacaatcatggaacagttgtgtagtccacacacacaagcagctgtgctcatgctcagcatgcggagctggtcccccaccatggggaggagctcagggacaccgagtgtgaccacaagatgaaggagactctatggagagccacactgggggaggwcatatcctccttcttatccaccaaacatccttttagcaagaccaggaaaagtcaggagaccactcaaaaaagaaggagactctgagaaacgatc

SEQ ID NO: 8120 - DNA, 623 bp, Homo sapiens
acactttatgattctgttttatcattttttttcgagatggaattttttttgctcttgttgcccaggctggagtgcaatggcagaatctcggctcactgcaacctccacccccgggttcaagcaattctccagcctcagcctcccgagtagctgggattacaaagtgcccgccaccacacccggctcattttttatatttttagaagagatggggtttcagcatgtaggtaaggctggtcttgaactctgacctcaggtgatccacctgcctcagcctcccaaagtgttgggattacaggcgtgagccactgtgcccggcctgtttaatcaaattttttaaacaatgaaatcgcaaatggggtaaaagttttcattkttaaaaaaattacaagatgggtattactttgtgcatcaagaccatgtttcaggcagaaagggttaaatggtatgttagctgaatttgtccctcatcgtattaggaattcttttgggaattcttcccaaagaacccatcctgcagatttctgcttacatttctttttttttccagagagggtctcactctgtcacccaggctagactgcagtggtatgaccacagctcactgcagtctcaatctcctg

SEQ ID NO: 8121 - DNA, 792 bp, Homo sapiens
tgtctttgctagtatgacatgtctatttttggtcccattatacagtgatgtgggacacacagtgattttccagctcatactctcggattctgggtaagcagcccatcttcaaattctctgaggacccctgtaaaagtatgtatttgctgcctaagataggcaagacttagagagctgctgtggtcacaagaacagtaggatttatatagagttccggattagaggtttgcttatttagttatttcctgatctctcttaagaggacaaagagagaagaaacaagtagaatgaagatttttttatttttcctttagaatgaggacactattagcagcatctgtgattttttacaatagcgcatgtcaamaaactaagggaaggtgaaagtgaaaggaaaaattgcaagaccaatgtgatcactgggtcttccctcttgtccactcagttgagataacattgtttgcagtgataatctattcacacattctataataatagtgtctaattctttgttggaaacatatttggaaggaaaagacaataattgaatgaattttatattttaacctgttatatttgtctatgtcatttatacacttatttttcttcacatgcatttcagaacaatcaactaattgattttaatgtattttatatattatgttaattgtatacttaaaacaataaagtcttgctcacaaaaattataaaaaccattatgttaagtggataagaagtatataaaattgaatgaccctcataagttatatgaggtcattcataatatatatg

SEQ ID NO: 8122 - DNA, 688 bp, Homo sapiens
cctcacctggggaggaatgagaggggtggattagtaagggcaagggcagagggcagaggtgagggggctgctggggaagggtggtgggattggtgagtggagaaatggatagggtgggggtgggggataagcaaggagctggacgtaggacctggatgcgggctaggggagctaagctgggcaggagcggaactggctctttaacaccrtctcttctgctgtcatttcaggcaccctatcttccagtgcagggcctgctgtggccagagcttcatttggtacccacacgttcgacaacccattctccttccccttctgtctggacttcctaatacaggcacatcttattttactgcacttcccagatattgcctcttttacaaattgaaagtttgtggcaaccctgcaagagacaaggctatcagtgccactttttccaacggcaagtgctcacttcatgccactgtgtcacattttggcaattcctgaaatatttctttcttcttattattatatgtggtatggtgcacaggcatagagcacacagcccagggcctggagggggtgtggggatacataactggagagggacactggcagctgccggtggcattggacctctggcccagcactggcctcctcttcccttggcaccaccctcccactgcctccccaggcctcccagaaa

SEQ ID NO: 8123 - DNA, 775 bp, Homo sapiens
ccttctttaacttcctcactgtacacaccatttaacaaactcttttccttgccttacaataacaattcccacctcagatcacccaaccatgcatcttctctcatcttactgaatgttgctggtaaaatrtttcttctcagaatatctgtctactttcacatgtaagcaggagatagtaattatttttgacaggggaggaagggggacaatataggaatgttgagaatcaatgttgtttcaacctggtaattaccaatggaagaggtcatattcttatgtgttgagacagaaaaagactgagatccattaagcttaggcactgtcttccctggaattcagttcccctgggagtatagaaaaacatcctatagataacagctgtactgaaagacagttatgtagagaggaatggcccccagattttgtagacaaatgtcctgggtccaaaccttgactctgcccatactgtccgcataacccttggaaagttattagctcctgtatctttcatatttcttatctataaaataaaattaaccattgtattaactcatggggttactgtgattaaatgagcatatgccttgaaaacacttagaacaatggcttcaacttaacaagtactacagaagtcttcataatttttaatactacttttcagggtacatttgtttttctcaaattgacttttcttttcttttctttctttttttttttttgctctgtctcccagggtggagtgcagtgacgcgatcttggctcattgcaacctccg

SEQ ID NO: 8124 - DNA, 775 bp, Homo sapiens
ccttctttaacttcctcactgtacacaccatttaacaaactcttttccttgccttacaataacaattcccacctcagatcacccaaccatgcatcttctctcatcttactgaatgttgctggtaaaatgtttcttctcagaatatctgtctactttcacatgtaagcaggagatagtaattatttttgacaggggaggaagggggacaatataggaatgttgagaatcaatgttgtttcaacctggtaattaccaatggaagaggtcatattcttatgtgttgagacagaaaaagactgagatccattaagcttaggcactgtcttccctggaattcagttcccctgggagtatagaaaaacatcctatagataacagctgtactgaawgacagttatgtagagaggaatggcccccagattttgtagacaaatgtcctgggtccaaaccttgactctgcccatactgtccgcataacccttggaaagttattagctcctgtatctttcatatttcttatctataaaataaaattaaccattgtattaactcatggggttactgtgattaaatgagcatatgccttgaaaacacttagaacaatggcttcaacttaacaagtactacagaagtcttcataatttttaatactacttttcagggtacatttgtttttctcaaattgacttttcttttcttttctttctttttttttttttgctctgtctcccagggtggagtgcagtgacgcgatcttggctcattgcaacctccg

SEQ ID NO: 8125 - DNA, 775 bp, Homo sapiens
ccttctttaacttcctcactgtacacaccatttaacaaactcttttccttgccttacaataacaattcccacctcagatcacccaaccatgcatcttctctcatcttactgaatgttgctggtaaaatgtttcttctcagaatatctgtctactttcacatgtaagcaggagatagtaattatttttgacaggggaggaagggggacaatataggaatgttgagaatcaatgttgtttcaacctggtaattaccaatggaagaggtcatattcttatgtgttgagacagaaaaagactgagatccattaagcttaggcactgtcttccctggaattcagttcccctgggagtatagaaaaacatcctatagataacagctgtactgaaagacagttatgtagagaggaatggcccccagattttgtagacaaatgtcctgggtccaaaccttgactctgcccatactgtycgcataacccttggaaagttattagctcctgtatctttcatatttcttatctataaaataaaattaaccattgtattaactcatggggttactgtgattaaatgagcatatgccttgaaaacacttagaacaatggcttcaacttaacaagtactacagaagtcttcataatttttaatactacttttcagggtacatttgtttttctcaaattgacttttcttttcttttctttctttttttttttttgctctgtctcccagggtggagtgcagtgacgcgatcttggctcattgcaacctccg

SEQ ID NO: 8126 - DNA, 1407 bp, Homo sapiens
ttgtttgtcaatgttttcagtatgggtttcgtaactagaagtctactcactttctcttccatcaaccacagccacagtatggtactcaggaatcagagttttagaggtttttgtttgtgtttttcaacaaagcaactaaacctataattccagtacaaaatcctccagtaattatacctagttctctacagttgcttcaactacatttaagacaaaagaattttttttagtatgtctgttaagtaaacctactgctttcaatttaggtttcatagaaataaccctattttgccctcttatctcattgacatatgatgctttattaaagcacctaaattcagtaacacacacaaccggcataagcaaaacttaggaattaggcatgctgactcctggccaaccagtaccctccctggtaggaagagacgtggctgggaatggagagggactgaccccatacatggtcacatgccctgggctgtggtcagcatgtgcagagggaacagaaagtcagtgttggggggttgctatgtgaatatcaaccaaggaaccttccactaagttattattatatggtacacagagggatcctgccacactcatgtgattagtaagtccaaatgtatatacccaaaaacacagagagagagagagagagagaatgtaatttgaactgttcagctaattcaagtcgaggagcccaatcccccaaatggcgaggagctgagggacgagcccaatcccccaagtggagaggagctgtcccctcatctgtctctccaggggggtgaacatctcaccattcagaagctggtcttgatgtttaaaacgaagtttttcattcaaaatggccctacaaaaaggaagctacttcatctgatactagacagaaaacaatgcaatctgctccaatgccaggcaatggtgctgtttaaaggccctgagtgtaaacgtaatccctgagtgatatatggttcaactgcattgtccatatttttatagcccccacatattgtgtgtcaccatcccactgtgccacwttctgggtattaaggacccaacttggagtggggcacacttgtgtgggaatcctggctctctcctttgccggatgtgtggcctctgccggatgcatggcctttgtcaactctataccctctctgtgccttggtttcctcaagtaaaatgtggatgataacagaacgtacctcactaggcaaggattagatgagataatccatctaaggcctttagcacaaggcctgccacacagtaggtgcacaataaatgctgtggttattaacttcaagttcacaagatggactctgcagtaaaggatgcagaaataattatttaatttgtcatgcttgttccaaggcttttgtgaataaagcactgcatttgaag

SEQ ID NO: 8127 - DNA, 778 bp, Homo sapiens
actcagcctttctttatacttcacgtctatggcacgaaatactttagttccagtattaacagttagttcctagagactgagaggtcatgggagagagaaaagttcacaaattttgttgagaaaagttctcaaatcttggccgggcacggtggctcatacctgtaatcccagcactttgggaggctgaggcacatggatcacaaggtcaggagatcgagaccatcctggctaacaaggtggaacccatctctactaaaaaaaaaaaaaaaaaaaaaaaargaaaacaaaaattagcagggcatggtggcgggagctgtagtcccagctactcgagaggctgaggcaggagaatggtatgaacccaggagacggagcttgcagtgagctgagattgcaccactgcactccagcctgggcaacagagcgagcctccgtctcaaaaaaaaaaaaaaaaagctatctcaattatggtatctctcaatcatggtatcttttttgggcaaccagtagtattaacagccatcctgacgggcatgcattttaaaatccttctcaactgctgttaataactctggaaaacaagtatattaaaggacagaaaccctaaaatggccaagacatctcagaaggagtgacagtaaaatgacaacgcaaatacatggtgtccttcaaaataggcaccatggagaggataacctatttcaatgatgctgccattatacaagtgtttggggaccattctgaatctttttgaagccactttaaatgacccacaacc

SEQ ID NO: 8128 - DNA, 810 bp, Homo sapiens
catgtccttcacacctgtcacacactatcttactaaagttctcaaataaataaccttaggttatttaactgaccttgacaaataggaaagataggcagaagtcaagatctagtgtgcaaaatatctgatttctgtgcatttttattgcttttgtttctttgcagtctttgtctttctggcatctccctctcttttttctctgtgtgctccctcctcctcctttgcacttttccccatattttggctaaatgcacctgtggcaccaaaccacagtgtggagccgagacaacagagggtcactgagccgcatactaactgcagacaatctgccttggaaagcatctaaaaaggaatgggcagcttcagctgaaattggataaatccttctgtaaatcgagagcctctaataagccttttattacaattaaagaagatattgtgcattaaattggaatcagttgttgctgatggggaagcattaaaatcaattattttaaaaacggattgtttttcaattggcttttcagttttcttttttaagactacttttttgcttttctggaaaataatcaaaagagtaaatgtgaaaaagtgaaacagaattcagtgtgaaaagaaaaggttaaacctggtaacattaggtggattgcttgtcagtttgcacatgaagcagaggtttattatggaattggacatgatgtttcagaatatcatttgtggctcctcctgcctccaatacttactgatccccaattatttcgcrgctaggtcttgcattacataaatcctacactgcataatctaggatcc

SEQ ID NO: 8129 - DNA, 852 bp, Homo sapiens
ttaatttgagatctttctaactttttgaggtagacgtttagtgctataaactttgctcttaacactgcttatgctgcatctcagagatttgggtatgttcgtctctgttttcatttatttcaaagatttatttttatttctgccttgattgcgtcttttatccaaaagtcattcaagagcaagttgtttaatttccatgtaagtgtgtggttttgagagctcttcttggtattgatttctatttttattccactgtagtccaggagtatggtttttcatgatttcaacttttttgaatgtattgagacttgctgagagtagattttaagtgttctcacgacagaaatgataaatatgtgggagaatgcatatgttaattagctcagtttagccatgctaaaatgtatatatgttttgaagcaacatgttgttcatgataaatatgtacactttttatttgtcaattaaaaataaataaaatagaacgttgwcaacaaaagaaaattagagataggtggagtttttgtttgtttgttttgttttgttttgttttttgagacggagtttcgctcttgttgtccaggctggagtgcaatggcgcaatcttggcttactgccagataggtggagattttaaaacatagtatctataaggaaaaaaataacaaaaagatgttcttgttggggaaaagtgtgggatctatggattagcctgtgactatgtgagtcccaaggggaggtgatcctggctaaggagccacagtgcaagactccctgcatatgaaagttctggggcttttctaattaaggttcagagaccagttgaggctaagcattctaccatcctctttg

SEQ ID NO: 8130 - DNA, 673 bp, Homo sapiens
aggccatcataatgccagtcttcatctcttagctttgtatccctctgtgatggtttcactctcatgctgctaaagataaatcccagaagctcaacccccatggaaaattccctgtagttccaggaaaatttccaggattcccctaaatttgcctggcctgggtcacaggaccaatttcttatccagtcactgcagcttgattgcataggtttaaggtcatatgcttagctctggagcaggggatgagaacccactcaactacttggattgagagtggggaaggcatgaggaggatggatgctggacgggcagataccaccattcaccagacatccattcaccagcatccctgtgagataggcatttcctgagtcagaaaactgaggygcagagaggtgcaatgacttctcaaggtcacacagcatatcgaggcctccctcttagttctttttgtaatttttttgagacagggtctcactcattaatgcttattgtggagtgtggcaggatactgaggaagcctaaatcaagcctaggttacatgtgggatgctaataggaccagatttaaatcctatctggggcccatctatagggcatgtggaagtcattttagactctctcaggtccatgtctgagcatgccacatcaggacaggtcatgtatattgtgtc

SEQ ID NO: 8131 - DNA, 919 bp, Homo sapiens
tggcttctcaaaaaaaaaaaaaaaaagaagargaagaagaagaaaaagaacgaaaaagaatggatgcttcatgataatttcatgtactgctgcagcattagcgcctaaataatgtctggctcagagtagatactcaacaaatatttgttgcatgaatgaatgacataactgcttgcaacacatctttgggagagcacaagctgcagccccttaaggtactgggctgcctagagagggctatttgttttcttatgattcacttttgagagttctctgtataaatctaaatataagtctttgtcagatatttgctttgcaaatattttctgtgccttgtctttttattatttcatcagcgtcctgtaaaggagatgaatttttttattttgtccagtttatcatttggttcttttatggattgtgcttttggtgtcatatctaagaaatctttgcctaacccaaagtcacagattttcttctaaaagttttacagttttaggttttacatttaggtctgtgttctatttcagattaatttctgattacagtgaggtagtggtcaaggttctttttttgcatttgaatactcaattgttccagcatcatttattggaaagattattcttccagctccattcatgtccctgcaaaggaaatgttctcattccttgttacagctgcatagtattccatggtgtgcatgtactacattttcttcatcaaatctgtcactgatgggcatttgagttgattctttctccacaaacacagcaatatttgcaatagcacattactgtaaacaatgtaaatattcatcaataggggaccagttaaataaattccagtatatttatccagtagaaatccacggcaccattaaaaagaatgtaatagctctatacatacttattttgagcaa

SEQ ID NO: 8132 - DNA, 799 bp, Homo sapiens
cccagacaatcatgtctccattttcatcagaagaaatccaggggcagagttcagtgatgaaacaagtacttaactgaaccaagactcaaaccctggtcttctgttttctggtgttgtcctctggccaaaataaccctgtcatgtttggttgaagtcattataaatgctgccccagatgctacctagggctccttcaagtttctagttcctccttccacaaaccagaggccacagcccttgatttgaattttaaattatcaggaacctcctacccaaagaacacacagccctcatttacagcagctgctggcagctagctgagttcgaacagatgcaagaatctcataatctgggccagatattaatctgtcttttctgtaacagcaaaacagaagggtgagtcttgaagcagtgcagggggaaaccccttattgtgcaactcttttgtaactcctgggcggagtctggacatgtgacttctgcttgaaatttaacattaggggaaagaccatttttggtcatagctgaggtgatgacatcttggcaactggaatggacatgacctctgttccatgtactatgagtaactgccccctccccatttctcaaagtcatgttcagatggcaaaactgcctgggattaccacatctgactcttgctagctgwttctgtgtctatggcttcatactgtccagacatagacctggggctcagcacacatgtatgtttgagtggcataaggtcagaagcacagatccagcaaagactgtggcccggaggaaggtgggttggttggag

SEQ ID NO: 8133 - DNA, 650 bp, Homo sapiens
tgaaatgaattgatatatgctaagcgcttagaacagggcctggcacataataagcacaatatgaattttttaggtaaaaataaagattgaaagctttctcagtgccgggcactgtgataaggactttaaacgcggtactataatgatgctaggggattggttgctatgatccctactcaaaggcaggaaacaaactcagagaggtgaagggactgttcaaagtcaagagctaataaggcagagccaggctttaagagaggcgtgtctgatccccacctgacctcatcaccacctgcgatgctgcctgcaratgcagcctgagaaatggttttgttctgcgaataaatgagccaacaaacacttgctgagtgtctgtcatgaggtgacaggttcatgacacacttgaacagaatactgatgacatttataaataaaaggcttatttacacttgaatgtcagttctaataattcatgtgaactatgctttgccaccttctctacatttactagtattaagagtaaataaagaggttcatggatttcaccccatttgaattttgaattgagcttctctaaaaggtttcagtgattacttactactgagtagctgaatatcttccttaaccttacagataattatttttattat

SEQ ID NO: 8134 - DNA, 650 bp, Homo sapiens
tgaaatgaattgatatatgctaagcgcttagaacagggcctggcacataataagcacaatatgaattttttaggtaaaaataaagattgaaagctttctcagtgccgggcactgtgataaggactttaaacgcggtactataatgatgctaggggattggttgctatgatccctactcaaaggcaggaaacaaactcagagaggtgaagggactgttcaaagtcaagagctaataaggcagagccaggctttaagagaggcgtgtctgatccccacctgacctcatcaccacctgcgatgctgcctgcagatgcagcctgagaaatggttttgttctgcgaataaatgagccaacaarcacttgctgagtgtctgtcatgaggtgacaggttcatgacacacttgaacagaatactgatgacatttataaataaaaggcttatttacacttgaatgtcagttctaataattcatgtgaactatgctttgccaccttctctacatttactagtattaagagtaaataaagaggttcatggatttcaccccatttgaattttgaattgagcttctctaaaaggtttcagtgattacttactactgagtagctgaatatcttccttaaccttacagataattatttttattat

SEQ ID NO: 8135 - DNA, 650 bp, Homo sapiens
tgaaatgaattgatatatgctaagcgcttagaacagggcctggcacataataagcacaatatgaattttttaggtaaaaataaagattgaaagctttctcagtgccgggcactgtgataaggactttaaacgcggtactataatgatgctaggggattggttgctatgatccctactcaaaggcaggaaacaaactcagagaggtgaagggactgttcaaagtcaagagctaataaggcagagccaggctttaagagaggcgtgtctgatccccacctgacctcatcaccacctgcgatgctgcctgcagatgcagcctgagaaatggttttgttctgcgaataaatgagccaacaaayacttgctgagtgtctgtcatgaggtgacaggttcatgacacacttgaacagaatactgatgacatttataaataaaaggcttatttacacttgaatgtcagttctaataattcatgtgaactatgctttgccaccttctctacatttactagtattaagagtaaataaagaggttcatggatttcaccccatttgaattttgaattgagcttctctaaaaggtttcagtgattacttactactgagtagctgaatatcttccttaaccttacagataattatttttattat

SEQ ID NO: 8136 - DNA, 650 bp, Homo sapiens
tgaaatgaattgatatatgctaagcgcttagaacagggcctggcacataataagcacaatatgaattttttaggtaaaaataaagattgaaagctttctcagtgccgggcactgtgataaggactttaaacgcggtactataatgatgctaggggattggttgctatgatccctactcaaaggcaggaaacaaactcagagaggtgaagggactgttcaaagtcaagagctaataaggcagagccaggctttaagagaggcgtgtctgatccccacctgacctcatcaccacctgcgatgctgcctgcagatgcagcctgagaaatggttttgttctgcgaataaatgagccaacaaacacttgctgagtgtctgtcatgaggtgacaggttcatgacacacttgaacagaatactgatgacatttataaataaaaggcttatttacacttgaatgtcagttctaataattcatgtgaactatgctttgccaccttctctacatttactagtattaagagtaaataaagaggttcrtggatttcaccccatttgaattttgaattgagcttctctaaaaggtttcagtgattacttactactgagtagctgaatatcttccttaaccttacagataattatttttattat

SEQ ID NO: 8137 - DNA, 650 bp, Homo sapiens
tgaaatgaattgatatatgctaagcgcttagaacagggcctggcacataataagcacaatatgaattttttaggtaaaaataaagattgaaagctttctcagtgccgggcactgtgataaggactttaaacgcggtactataatgatgctaggggattggttgctatgatccctactcaaaggcaggaaacaaactcagagaggtgaagggactgttcaaagtcaagagctaataaggcagagccaggctttaagagaggcgtgtctgatccccacctgacctcatcaccacctgcgatgctgcctgcagatgcagcctgagaaatggttttgttctgcgaataaatgagccaacaaacacttgctgagtgtctgtcatgaggtgacaggttcatgacacacttgaacagaatactgatgacatttataaataaaaggcttatttacacttgaatgtcagttctaataattcatgtgaactatgctttgccaccttctctacatttactagtattaagagtaaataaagaggttcatggatttcaccccatttgaattttgaattgagcttctytaaaaggtttcagtgattacttactactgagtagctgaatatcttccttaaccttacagataattatttttattat

SEQ ID NO: 8138 - DNA, 545 bp, Homo sapiens
ccaataggtctgaccccggccccatctcagtggcctatctggttggtgccctttgtgggctcagcctggcctggtactggtattcaaagccatctggaagacactgtcggaaggagatggtgacaggtgagctatttgagagccatgactatagaaaaggccagaaggaaagaggcagagctgagacagtcatgaagttttatgggctgagcccccttgccttcctctggccagcatgggactgtggggyttgctacagggctgctggggtgagagaggccaatgcagcttagagagggctgcaggagtaaccctaaaggttgggaagaaaatgaatgaggacaaaaaggcatcaatggccatagctaaacacatttaatttaaaaatcctggaaatattcattcacccttttaatctgaagagttgagattttcccaaagatagccagtctaccttcagggcatgtggctcatggtaaggtccacgttggtctcatggtctctgttttatcctgattaccaccctcatcatagcgtctttttct

SEQ ID NO: 8139 - DNA, 799 bp, Homo sapiens
ccagcccttagaacagtgcttggtgcttaatagatggctcaagatctatttgttgaatgcatggatgtatgagtgaatgaatgaatgctcaggatctttcagtaaatccgtggctgactcatgcccagagttcaggtcttctatgttcctttcattgatagctgcattgccttccaggatttcccatctttcagatttccagaaattatgtatacatatatactgtgccctctcagctgatggcttccttttcctttcttcacagctctctggcatcaatttttccacttctcagaaacactttggcccacaaattcccaaaggaaccttgttcttcattctggaaaacacgatgccaacatatcagaataaaggacagataggagcttttgcttcaaagtgaatcacttcatggatgttaaagtgtcctgaaagattctaaacttcacaacttttgatagtaackgtactatatttgcaacatatttgcatatattaattgttatatctgaaaagcatgagattgctgttttataaaattaaatgaagtaagttaatattttattgctaggtataagaactgctgatgaggacatctatagaagtagaaaattctaaatgtcctaccatcaccaataagaaacttttgacagtcccgtagatacaatataatcacatggaaaactgtatacagtatattgtatgtgaagatcccacaaaaagaatagggactgtaggaaatataatcatctaagctacgggtaagaagaacatcaagattctttaaagcaatggctct

SEQ ID NO: 8140 - DNA, 804 bp, Homo sapiens
tatttctatcaaaaatgaatttatgcattcaccattagaagcagatgcaagactatagcttaaaagcaaattagaattcaagctggatttgcaaacattccagtttaacatttggatagcaaaggaactcagagtttataaaatttaaatataagatagacagtcacaattctgtgcaagcagtcagggttaattcagatcgtttcctctgctcttgcattccctgatttcaagcacggcgaggctggggctgtaattacggaatgggtagtactcactgttcaccagttgtgtgtaagctttaaactaataactcagcaattacgagaaaaatgagcggtaattacacccattttactcgcggctagacagatgggacattttctcctcgttattggcaaactgtcaccacatttatttcatttttactgtttactatttgttgtgctttgattaagagtaattataggctaggaaaatatgaaaaacatgaatgttgggtatttttaaaaatagaaggaggcccttctccctgttttatattgatagaattctcattttagatcctattaaaatgatatcaacattctcaagatatttccaggcaggcttcagttctgtgacagcttttcagcaggggattcccatgtttgctcattatttgggtcgtcatagacccataaatatcctgcmttttttttttttttacagcagcctctgtgtccctcacactcgtccattttggtccattttggtccattttgtgtctgatgataaagcacaggagaaatccacccgtcgctg

SEQ ID NO: 8141 - DNA, 681 bp, Homo sapiens
gtgtaaaagtcattgtgggccaggcacggtggctcataccaggtgtggtgactcatagcactctgtcacccaggctggagtgcagtggcacaatctctgctcactgcaacctctgcctcctgggtacaagcgattctcctgcctcagctttctgagtagcaaggactacaggtgcacaccatcacgcctggctaatttttgtactattagtacagacggagtttcaccatgttggccaggctggtctcaaactcctgacctcaaatgatctgcccacctcggcctcccaaagtgctggaattacagatgtgagccacaatgcccggccttattttctacaactttggtaactttagcatataccccaaatctgtaagacataatattataattcaaatgcaaygcatggcttctctttgtactctttctctagcttttgaattatttattctaataccagttttaattctgacacaaaatcatgggagttctaatcaaaatccaaccttttatcataaaaactatgaagaaattatgagtagaatttaaaaaggaaaataggcctattaattagatttgtctttgtagcatttaactctataataaataatattttatgcctatgagtccccaacaaagcctccagcttctatttagatataaactgtaaaagtcactact

SEQ ID NO: 8142 - DNA, 681 bp, Homo sapiens
gtgtaaaagtcattgtgggccaggcacggtggctcataccaggtgtggtgactcatagcactctgtcacccaggctggagtgcagtggcacaatctctgctcactgcaacctctgcctcctgggtacaagcgattctcctgcctcagctttctgagtagcaaggactacaggtgcacaccatcacgcctggctaatttttgtactattagtacagacggagtttcaccatgttggccaggctggtctcaaactcctgacctcaaatgatctgcccacctcggcctcccaaagtgctggaattacagatgtgagccacaatgcccggccttattttctacaactttggtaactttagcatataccccaaatctgtaagacataatattataattcaaatgcaatkcatggcttctctttgtactctttctctagcttttgaattatttattctaataccagttttaattctgacacaaaatcatgggagttctaatcaaaatccaaccttttatcataaaaactatgaagaaattatgagtagaatttaaaaaggaaaataggcctattaattagatttgtctttgtagcatttaactctataataaataatattttatgcctatgagtccccaacaaagcctccagcttctatttagatataaactgtaaaagtcactact

SEQ ID NO: 8143 - DNA, 618 bp, Homo sapiens
cagtgggagtctcatgtcctctgtgcgtgtgtgtgtgtgttgtgccgatagtggcagtgggcgtggcccagtgggagtctcttatcctgtgtgtgtgtgtgtgtgtgtgtgtgtgtgtgtgtgtgtgtgtgtggtggcgatcgtggctgtgggcgtggcccagtgggagtctcatatcctccgtgtgtgtgtgtgtgtgtgtgtgtgtgtgtgtgtgtgtgtgtgttgtggggaccgtggctgtgggcatggcccactgggagtctcatatcctctgtgtgtgtgtgtgtgtgtgtgtgtgtgtgtgtgtgtgtgtgttgggattgtggctgtgggtgtggcccagtgggagtctcatatcctctgtgtgtgtgtgtgtgtgtgtgtgcgcgtgtgtgtgttgtggggatcgtggctgtgggcatggcccagtgggagtctcatatcctctgtgtgtgtgtgtgtgtgtstgtgtgtgtgttgtggggattgtggctgtgggcaaggcccagtgggagtctcatatcctctatgtgtgtgtgtgtgtgtgtgtgtgtgttgtggggattgtggctgtgggcgtgacccagtgggactctagctttcagaattccccct

SEQ ID NO: 8144 - DNA, 618 bp, Homo sapiens
cagtgggagtctcatgtcctctgtgcgtgtgtgtgtgtgttgtgccgatagtggcagtgggcgtggcccagtgggagtctcttatcctgtgtgtgtgtgtgtgtgtgtgtgtgtgtgtgtgtgtgtgtgtgtggtggcgatcgtggctgtgggcgtggcccagtgggagtctcatatcctccgtgtgtgtgtgtgtgtgtgtgtgtgtgtgtgtgtgtgtgtgtgttgtggggaccgtggctgtgggcatggcccactgggagtctcatatcctctgtgtgtgtgtgtgtgtgtgtgtgtgtgtgtgtgtgtgtgtgttgggattgtggctgtgggtgtggcccagtgggagtctcatatcctctgtgtgtgtgtgtgtgtgtgtgtgcgcgtgtgtgtgttgtggggatcgtggctgtgggcatggcccagtgggagtctcatatcctctgtgtgtgtgtgtgtgtgtgtgtgtgtgtgttgtggggattgtggctgtgggcawggcccagtgggagtctcatatcctctatgtgtgtgtgtgtgtgtgtgtgtgtgttgtggggattgtggctgtgggcgtgacccagtgggactctagctttcagaattccccct

SEQ ID NO: 8145 - DNA, 672 bp, Homo sapiens
tctttgcatcagctctcccttcactgcaggcctgtgtacggtcagggcaggtccttccacctggaacacttttcttcttgccctctgggtctcgctcattcctacccgttctcaggtctctacacaatgtcacttcctggggaaacccttcttggattccctggtcaagagcgaacgcccttcgtgttcccgaagcccttggcttcacccttgcattgcaacctgtgaactcytccagggcagggctgtgtggggtcttagtagtagcacctaccaaagtagctgggcaaggttcttagttgctggccacagaatttactccaactaggctaagcacacgggggtttattacaggagagagatcaaagaaatgtcaggagggctgaacaaacagactcttgttagattccagaaatggctctcaaagcaccccaactgagttgccaagagttgctgcttctgctataatcaagaagctgcatgattgcggaatgccccgctcagtcatgaagcaaccacagccgctgcccaccacctgcctctctcaaatcagacacaagcctcacacttacatctcaggcaggtgcttggcaaaggccatccattctgacccccagctgcaaggggacttggggaatgtcgctttcagctttccaggctctgcatggatga

SEQ ID NO: 8146 - DNA, 672 bp, Homo sapiens
tctttgcatcagctctcccttcactgcaggcctgtgtacggtcagggcaggtccttccacctggaacacttttcttcttgccctctgggtctcgctcattcctacccgttctcaggtctctacacaatgtcacttcctggggaaacccttcttggattccctggtcaagagcgaacgcccttcgtgttcccgaagcccttggcttcacccttgcattgcaacctgtgaactcctmcagggcagggctgtgtggggtcttagtagtagcacctaccaaagtagctgggcaaggttcttagttgctggccacagaatttactccaactaggctaagcacacgggggtttattacaggagagagatcaaagaaatgtcaggagggctgaacaaacagactcttgttagattccagaaatggctctcaaagcaccccaactgagttgccaagagttgctgcttctgctataatcaagaagctgcatgattgcggaatgccccgctcagtcatgaagcaaccacagccgctgcccaccacctgcctctctcaaatcagacacaagcctcacacttacatctcaggcaggtgcttggcaaaggccatccattctgacccccagctgcaaggggacttggggaatgtcgctttcagctttccaggctctgcatggatga

SEQ ID NO: 8147 - DNA, 672 bp, Homo sapiens
tctttgcatcagctctcccttcactgcaggcctgtgtacggtcagggcaggtccttccacctggaacacttttcttcttgccctctgggtctcgctcattcctacccgttctcaggtctctacacaatgtcacttcctggggaaacccttcttggattccctggtcaagagcgaacgcccttcgtgttcccgaagcccttggcttcacccttgcattgcaacctgtgaactcctccagggcagggctgtgtggggtcttagtagtagcacctaccaaagtagctgggcaaggttcttagttgctggccacagaatttactccaactaggctaagcacacgggggtttattacaggagagagatcaaagaaatgtcaggagggctgaacaaacagactcttgttagattccagaaatggctctcaaagcaccccaactgagttgccaagagttgctgcttctgctataatcaagaagctgcatgattgcggaatgccccgctcagtcatgaagcaaccacagscgctgcccaccacctgcctctctcaaatcagacacaagcctcacacttacatctcaggcaggtgcttggcaaaggccatccattctgacccccagctgcaaggggacttggggaatgtcgctttcagctttccaggctctgcatggatga

SEQ ID NO: 8148 - DNA, 818 bp, Homo sapiens
agaagagaaaaaaagtacttaaaaaggacccaaaagaatactgtaatatcgtaaggccgggtgcggggaagagaaaaaaaaatacttaaaaaggaccaaaaagaatattgtaatattgtaaggccggatgcagtagctcatgcctgtaatcccagcactttgggaggctggggtggaaggatcacttgaggtcagaagttcaagaccagcctgaccmacatggtgaaaccccatctctactaaaaatacaaaaataggctgtgcatgatggcgcatgcctgtaatcccagctacccgggaggctgaggcaggagaattgcttgaacctgggaggcagaggttgcagtgagccgagatcgagccactgaactctagcctaggcgacagagcgagactctgtttcaaaataaaaaaaaagagaggaaaagaatattataatgacattgaaaaggtgttcatatgtgaacagtgggttctgtaaaacaataggtttagtagaaagatgagagattagatagataaatgttatacagatagatagaagttagacagattgatgtcagatagatagttaaaaagataaaagggtccacaccaagatgttacctctgtgtggtggtattggatttatgggtgatttttaaaattttctcctgctaatctaaaattgccttgcaacgtgagtaataatacacttgatccttgaacaacacaggtttgaactgtgccatttcatccacttttatgtatttggatttttttcaataaatacagtcagcccttcgtacctgtgggttctgcatatgcaaatgtggatc

SEQ ID NO: 8149 - DNA, 818 bp, Homo sapiens
agaagagaaaaaaagtacttaaaaaggacccaaaagaatactgtaatatcgtaaggccgggtgcggggaagagaaaaaaaaatacttaaaaaggaccaaaaagaatattgtaatattgtaaggccggatgcagtagctcatgcctgtaatcccagcactttgggaggctggggtggaaggatcacttgaggtcagaagttcaagaccagcctgaccaacatggtgaaaccccatctctactaaaaatacaaaaataggctgtgcatgatggcgcatgcctgtaatcccagctacccgggaggctgaggcaggagaattgcttgaacctgggaggcagaggttgcagtgakccgagatcgagccactgaactctagcctaggcgacagagcgagactctgtttcaaaataaaaaaaaagagaggaaaagaatattataatgacattgaaaaggtgttcatatgtgaacagtgggttctgtaaaacaataggtttagtagaaagatgagagattagatagataaatgttatacagatagatagaagttagacagattgatgtcagatagatagttaaaaagataaaagggtccacaccaagatgttacctctgtgtggtggtattggatttatgggtgatttttaaaattttctcctgctaatctaaaattgccttgcaacgtgagtaataatacacttgatccttgaacaacacaggtttgaactgtgccatttcatccacttttatgtatttggatttttttcaataaatacagtcagcccttcgtacctgtgggttctgcatatgcaaatgtggatc

SEQ ID NO: 8150 - DNA, 818 bp, Homo sapiens
agaagagaaaaaaagtacttaaaaaggacccaaaagaatactgtaatatcgtaaggccgggtgcggggaagagaaaaaaaaatacttaaaaaggaccaaaaagaatattgtaatattgtaaggccggatgcagtagctcatgcctgtaatcccagcactttgggaggctggggtggaaggatcacttgaggtcagaagttcaagaccagcctgaccaacatggtgaaaccccatctctactaaaaatacaaaaataggctgtgcatgatggcgcatgcctgtaatcccagctacccgggaggctgaggcaggagaattgcttgaacctgggaggcagaggttgcagtgagccgagatcgagccactgaactctagcctaggcgacagagcgagmctctgtttcaaaataaaaaaaaagagaggaaaagaatattataatgacattgaaaaggtgttcatatgtgaacagtgggttctgtaaaacaataggtttagtagaaagatgagagattagatagataaatgttatacagatagatagaagttagacagattgatgtcagatagatagttaaaaagataaaagggtccacaccaagatgttacctctgtgtggtggtattggatttatgggtgatttttaaaattttctcctgctaatctaaaattgccttgcaacgtgagtaataatacacttgatccttgaacaacacaggtttgaactgtgccatttcatccacttttatgtatttggatttttttcaataaatacagtcagcccttcgtacctgtgggttctgcatatgcaaatgtggatc

SEQ ID NO: 8151 - DNA, 818 bp, Homo sapiens
agaagagaaaaaaagtacttaaaaaggacccaaaagaatactgtaatatcgtaaggccgggtgcggggaagagaaaaaaaaatacttaaaaaggaccaaaaagaatattgtaatattgtaaggccggatgcagtagctcatgcctgtaatcccagcactttgggaggctggggtggaaggatcacttgaggtcagaagttcaagaccagcctgaccaacatggtgaaaccccatctctactaaaaatacaaaaataggctgtgcatgatggcgcatgcctgtaatcccagctacccgggaggctgaggcaggagaattgcttgaacctgggaggcagaggttgcagtgagccgagatcgagccactgaactctagcctaggcgacagagcgagactctgtttcaaaataaaaaaaaagagaggaaaagaatattataatgacattgaaaaggtgttcatatgtgaacagtgggttctgtaaaacaataggtttagtagaaagatgagagattagatagataaatgttatacagatagatagaagttagacagattgatgtcagatagatagttaaaaagataaaagggtccacaccaagatgttacctctgkgtggtggtattggatttatgggtgatttttaaaattttctcctgctaatctaaaattgccttgcaacgtgagtaataatacacttgatccttgaacaacacaggtttgaactgtgccatttcatccacttttatgtatttggatttttttcaataaatacagtcagcccttcgtacctgtgggttctgcatatgcaaatgtggatc

SEQ ID NO: 8152 - DNA, 745 bp, Homo sapiens
taggactggaaagatggttgagatgtataatcacctggcagtttcttgcctgctgcacagacaaaaccatttcactgagaccatggcgttgcagtaaagaagttgacacaaggccagcccatgtgagagaactgcagttgttcaaattagtctcctgataaaactcctgattggttgggcgtgatggctcatacttgtaatcccagcacttggggaggctgtggtgggtggatcaagagatcaagactgtcctggccaacacgctgaaaccccgtctctactaaaaatacaaaaataagctgggtgtggtgtcgtgyacctctagtcctagctacttgggaggctgaggcaggagaatcgcttgaacccaggaggcagaggttgcagtgagccgagatcatgccactgcactccagcctggtgacacagcgagactctgtctgaaaaaaaaaaacacaacgaaaaaaacaaaactcctgatccctcctgatggcttggaggttagggtttttcaaggatagttgggtgaacaggggactagggaataggtgctgctgattggttggggatgccatgctgggggtatcaaaaatggttctctagcactgagtccaactctgggtggggggccgcaggactggttcagttgagtcttgggtctgagtcttgaatcttgggaccaatagagtcagacagtcatcagaaatgcaaaagtctgaaaagacatttcaaaaggccaacctca

SEQ ID NO: 8153 - DNA, 747 bp, Homo sapiens
ggatcccttataactgaatttttaaaaaaaatgcagttataactctttttgccaacagcttctgcttttccttccacatgcctactttggtttcctaatatattttatgctaataatgacttatttatacatgcagtgcccagygcatgcaaaggtactagaatgattgcagccattccattgggcactcattataaagcatatttgtcctttggataaaagtaattccttcagattactgttggtctcttgcatatttattaaccttaataggaagggagtccatgagggtgataagtagtatgcttagggaactgtggtcatttctaaacactgagcttgatttatcattgactactaatacctacctggcctcagcagtctccttgaagagcctgacttcacaactgtctgcatctgtcttatagcaactgatttgtatttgtgagtcactgattttgaccagctgccaggtccagtatggctaaagtcattttatcctttgttagggagccacaggactctggaccatatatttggcaggtttattggatgaaggtttaggacaatataccagagcaaataaatgagcacttcatccaatactcagggaaaatgcacacacatacactcacagtcaagagttgtagaaaaatgcagacaatgggagtttaaaagatgaagacaccttggcctagaaatagtgcctgctcctgatatatgaaatgtaggaaaaacataagcttc

SEQ ID NO: 8154 - DNA, 747 bp, Homo sapiens
ggatcccttataactgaatttttaaaaaaaatgcagttataactctttttgccaacagcttctgcttttccttccacatgcctactttggtttcctaatatattttatgctaataatgacttatttatacatgcagtgcccagtgcatgcaaaggtactagaatgattgcagccattccattgggcactcattataaagcatatttgtcctttggataaaagtaattccttcagattactgttggtctcttgcatatttattaaccttaataggaagggagtccatgagggtgataagtagtatgcttagggaactgtggtcatttctaaacactgagcttgatttatcattgactactaatacctacctggcctcagcagtctccttgaagagcctgacttcacaactgtctgcatctgtcttatagcaactgatttgtatttgygagtcactgattttgaccagctgccaggtccagtatggctaaagtcattttatcctttgttagggagccacaggactctggaccatatatttggcaggtttattggatgaaggtttaggacaatataccagagcaaataaatgagcacttcatccaatactcagggaaaatgcacacacatacactcacagtcaagagttgtagaaaaatgcagacaatgggagtttaaaagatgaagacaccttggcctagaaatagtgcctgctcctgatatatgaaatgtaggaaaaacataagcttc

SEQ ID NO: 8155 - DNA, 1441 bp, Homo sapiens
tagaatgcaaaaatggggtaagagatcaagcatctatggtcctattcatttacctgaagtcctgatgtcaacagagtcctggtgccaatgcctatttcctcattgttactccatgagtcaacatacatttcccattacttcataaatcttaaagagagagagggaatgttttgaagttcaaaggcttcttttccttggtctgtggctttatggacaatcaataaataaaatcatctattcatttatcaagcatttactaagctcttgttgtgttccaagractgtcctaggcccttgagtgacatcagaaagtaaaatagacaaacacacctgctctgtgggacttgcacatttttacaaatcagtatggccagggatataagacatcagtgataactgcttttccaggttaatagatcctgttatttcatggttctgtttttacacaatgaccagtagatgtgattaataaaggataaagtcttcaaaattattattgaaaatatcttttcaactactcatgataatacttaaacccatactcatcttgggaaatcccattttgaggtatcaatctgttttcatttttcagggtcccttagtctgatgtaaataactctgggaggaataggttcttcagatcacaatcagataattctcattaatgctgagaggtaagcaggctgaaagcaagaagagctgggcgtacaaagaggaagggcttccagaagaaaaaaaaggcagtcactgcagcctcaggaagggatccagcggccagcttgcattcttctcaagtttcatctagagccagactagatttgcagtactcattttcaactagtacttcagtactattgacaatgaagatttattttaaaaagcatgttctgagccaggagagttggctcacacctgtaatcccagcactttgggaggctgaggcaggtggatcacttgaggtcaggagttcgagacctgtctggccaacgtggtgacacactgtctctactaaaatacaaaaattagccaagcatggtggtatatgcctgtaatcccagctactcaggaggctgaagtgagaggatcacttgaatcagggaggcagaagtttcagtgagccaagatctcaccactacactccagccggggcgacaggctcaaaaaaaaaaaaaaaaaaaaaagggtgttctatagacactgtcaaggagatctctctttttcatccttctgatttttcttttataccactaagttgtcatatgtgttgtgcttacatggagagggcaataaggattcatgtgcatatgtgagccattgagaagaggtgataataattttgtttacaaaatttgaattaaaaatggagatatatacaaaacagaataaggcatgtgaacattgcatgcaaatcccacataggcatttgtagcttagtaacctt

SEQ ID NO: 8156 - DNA, 766 bp, Homo sapiens
cctgtaagagagactcggagaatgagagttgcgggtgagaggacagacagtgaggggcagaacagtggggagcggcaggagcgcctgagtgtccgtggaggggtgcaaggtgggggactgcgtgcctgccacccgctcagccgtcgccaccggcagcaggtactgggtgcgcctgggggaacacagcctcagccagctcgactggaccgagcagatccggcacagcggcttctctgtgacccatcccggctacctgggagcctcgacgagccacgagcacgacctccggctgctgcggctgcgcctgcccgtccgcgtaaccagcagcgttcaacccctgcccctgcccaatgactgtgcaaccgctggcaccgagtgccacgtctcaggctggggcatcaccaaccacccacggagyaaggggcccagggccaggggtcaggggtcaggatgggtacaagtctgggatgcagggcgagaggtcgaatcatgacacctcagaggaaggatgggtaaagggtcagggtgtgggatgggacatcaggatcatggtttggggtcagagattatggtggattggggtcttgggagccaaaggggttaaaggactgggtatgaagtcagggatcagaggtcagaggtcagagtgtgtcagaggtcatcacactggagcaaaaggcatatatatatatatatgtatgtataggatatgggcattgtgggtcatgggtctggggttagaggtcaccgtagaattaaggtcatg

SEQ ID NO: 8157 - DNA, 662 bp, Homo sapiens
aaagtatgctgagtatttgcaaaacagtactgatactgtcagtggacttcttaatgttcttgtttccatgtacaatgtgtgacatgtagttaagcttagtaaattttttttcatgtaacctgtgaattggaacaataaatttcaatataagctcaatacatttcaatataacctcrtatggctttatatcatttttgttttccctaatgttttcctccttgacatgaaatatttctaatggttaaacaggtactaaaacaaattttgacttgacaaggtaagttttgaaagatgttttgtcacaagaagaaaggaatctcttgtatcacaacgtcttcttgttgtaataaactaaaggagttcatttattgggtttcccagcttccagcctcagacgtaattaatctcttttccccttctttcctgttctaacaaacttccagacacaaaacagacattttgtgatgatgaatatcacagttgccacacaggccagcaggaacccagtcacatccaaagagtggtactggaaccaggtgaggtcgtgggctgcaacccgaaggtgcttggctcctttatggcgcatgacaaattcaatccagaagactgctcgatcaaggggcttcactggttgatcatgatgaattcttgataatttcata

SEQ ID NO: 8158 - DNA, 830 bp, Homo sapiens
ggatcctgattgtggattgggatgtccaccacggtaatggaactcagcacatgtttgaggatgaccccaggtaagggctgcagtcaggggccgcagtgtgatcagggaggcgggtgagcacctcaggggtactggagcccctaaccagccatggtccgcttcccaccccctccctggcagtgtgctatatgtgtccctgcaccgctatgatcatggcaccttcttccccatgggggatgagggtgccagcagccagatcggccgggctgcgggcacaggcttcaccgycaacgtggcatggaacgggccccgcatgggtgatgctgactacctagctgcctggcatcgcctggtgcttcccattgcctacgaggtacagctcaggatagatcgcaggacgtatgtgacacgcctgtgcaggtggcagcctggacctgcctccttggcatgtgtgtgtgtgactaccatgtggctgatgatatgagacagcgcatgggtgtttaatgaggctaccagggcagttggtggctgtgatcaccttgtgtatttgtgcacagatggctgtacatgactgccttctctgtgtgacactgtgtgagtgactgtcttggctgtgtgtgtgagggccttctgactatgcaccaatggcccgtgtcctggctggatctgtgttgtatgtgcgtgccatcacaagtgcttgagtatgtgcgtgtgcgactctgtgcaggcaggtatttctcaccttttctctgtgtgatgggtgtgatactgtatgtcactaaatgcaaccatctctgtgacagcctgtgtgggaccttctggatgtggaa

SEQ ID NO: 8159 - DNA, 926 bp, Homo sapiens
caggttccaaacctgcactaaaacttgttgctgcatctcacctaatcgtgtagtgagccaggtgagctcatctgtgaaatgcagacctttctggacgtaccacctcgtggggtgaagggaaagaaatgatacaggtgtacatcagggtataagctgtcctagagtctggattctttttatccagaagccattctttcagcctgtgcctttttgtaaataccataccccatctatttccacaaaggatttggggcattagsgaggtaaagggggaatatgttctagaagaagggcgctcacctcagtaaattgatgggtgggccacaaaaatcatgtcacaagatcttgttgatgtgcatgcattcattcattcaacaaatattattgagcatctaacataagccgggtgctttgctagggacagaatgctgtacaaggtccctgtcctcatggggaccgtatgttgggaagacagatgataggcatggaaatgaagagacaaaccactccgacttcagcccaggaaggagctttaatttgagtaattgttttcactaattcatcttcacagaaagaaataatatgatcaccttcggttagtaaacaaaacaaataggcaaacaggtttacaggctgaggtgggctggatcacttgaggccgggagtttgaaaccagcctagctaacacggtgaaacccttctctactaaaaatacaaaaatattatctgggtgtggtggagctttcctgtagtcccagctactctagaggctgaagcatgagaatcacttgaacccaggaggtggaggttgccatgagcagagatcgtgccactgtactccagcctgggtgatggagcaaggctctgtcttggggcggggggcagggcaggggaggggggaaagaagagaaacagctttacttacg

SEQ ID NO: 8160 - DNA, 1319 bp, Homo sapiens
caagctgaccgtgtccacggctgcagcccagcagctggacccccaagagcacctgaaccagggcaggccccacctgtcgcccaggccacccccaacaggtagctgactcctgaaccgtgtgcagcctacgacttggtgggtccctcagtggcttcacgaggctaactcttgagtgtggccggggctgcccctgtggggagccatctcatggtggggactgctcccggttctgcaccccgcagttgtcctgagcagctctccaggagttcctggaggaagggcgggcagggcggtgggactctcagtcctccaccccagcgccactctgagccatgctactcccacaccaggagaccctggcagccamccacagtgggggtctggagtgcccagagcagggaagcagggccagcacgccgtgagcgcctacctggctgatgcccgcagggccctggggtccgcgggctgtagccaactcttggcagcgctgacagcctataagcaagacgacgacctcgacaaggtgctggctgtgttggccgccctgaccactgcaaagccagaggacttccccctgctgcacagcaagtggccctggcgtggggaacagccggtggggtggggggcaggggacaaaatgggggctgtgccgggtctgattgaagctccccgcagggttcagcatgtttgtgcgtccacaccacaagcagcgcttctcacagacgtgcacagacctgaccggccggccctacccgggcatggagccaccgggaccccaggaggagaggcttgccgtgcctcctgtgcttacccacagggctccccaaccaggtagggcacctgcctggctgctcctggcagcgccccaaccgcacgcagccctgggagtgagcagcaaagccccaggcccccctcagactcaagtctctgtctccaggcccctcacggtccgagaagaccgggaagacccagagcaagatctcgtccttccttagacagaggccagcagggactgtgggggcgggcggtgaggatgcaggtcccagccagtcctcaggacctccccacgggcctgcagcatctgagtggggtgagcctcatgggagagacatcgctgggcagcaggccacgggagctccgggcgggcccctctcagcaggctgtgtgtgccagggctgtggggcagaggacgtggtgcccttccagtgccctgcctgtgacttccagcgctgccaagcctgctggcaacggcaccttcaggttggtgcctggccactacagttcctgctgggtgtagccccaggtgatgggctgagggg

SEQ ID NO: 8161 - DNA, 743 bp, Homo sapiens
tgcagagcctggtgagaaaaccccggtgaggccggtgacccaggggggctccctgcagtccccaccacgctccccacggcccgccagcgtccgcactcgtaagcataccttcggacagcactgcgtctccagccggccggcggccccaggcggagaggaggccgaggcctcggacccagccgacgaggaggtcagccacatcaccagctccgcctgcccctggcagcccacagccgagccccatggccccgaagcctctccggtggccggcggcgagcgggacctgcgcaggctctacagcgtggacgctcagggcttcctggacaagccgggccgggcmgacgagcagtggcggccctcggcggagctgggcagcggggagcctggggaggcgaaggcctggggccctgaggccgagcccgctctgggtgcgcgcagaaagaagaagatgagccccccctgcatctcggtggaaccccctgcggaggacgagggctctgcgcggccctccgcggcagagggcggcagcaccacactgaggcgcaggaccccgtcctgtgaggccacgcctcacagggactccctggagcccacagagggctcaggcgccgggggggaccctgcagccaagggggagcgctggggccaggcctcctgccgggctgagcacctgaccgtccccagctttgcctttgagccgctggacctcggggtccccagtggagaccctttcttggacggta

SEQ ID NO: 8162 - DNA, 781 bp, Homo sapiens
tcccttcagcacagggacccaggtttgggtatgcaggtagctgagtttttccagctcagaccataattgaactgtgaattcagtcagaacctatttgtaattcacagatttatatactaccctcagggaatcaagatgttattattgtcacatgtgtagaaatgtatttatatgaaatcgtcttcctcttctccgagttattttccagactattagcaaaatttactcagaagtaaaaggcacatcaattagctgggcgtggctgtgtacacctgtaatcccagctacttaggaggccaaggcaggagaatcgcttgaacccaggaggtggaggcagagtgagactctgtctcaattaaaataaagaaaaaaaggaatatcaattaacttctgagcagtgttcctgtccatatagaaaggaaacctaatcctgagatataagggcaattactcaagaggaagttccatcaaagttgaagtttgaatggaatgaatgagttaggtaaataaagggtgagaagaagctagcatgtgaaaaggagaaaggtttttggcagagaaaatggctaatgagaaagcctagaggaggggaagcatggtgcatttggaaaatggtaaaaaagtcatgctaataaaaatgtagggcatgtcttcaattgtaactgcattaagtggaaracagattggtcatttcaatctcccaatagtttttatccaagaagttgttttggtcattgaggtcaggtttcattttagttgaaataatattcccaagttataa

SEQ ID NO: 8163 - DNA, 852 bp, Homo sapiens
agttcatatgcccgcatataccaccacagaatgtcctatgcccagctggctgcttgcctgtgcatctctgttcttgttgggcctggcagccctcttccaaatgttaacactgaggcacgtgagccttcaggataacaaacttacatgctagagataatcatagagagtgcagtgccagcagttggtgagcagattttgagtcatgtttagacttgccactgaaattctgcaagaaaagaacatcagaagtgaggaaaagacaaataaaaatatcttcaggatttggcattataaactatatacagcctcacatttttaaattttgccatggacttcctgttaccattccattgaaaatacactaatgtgaaaagttcctgaagattccatgttgctttctaactatttgataatcacaaagatggcatctctttttttcctcccattcctcatattcctcttcctctcaattccacggaagggaaaagtagcaaaaggtgtttgagccataagttagtrgagtcccaggtgtcacaataaatgttgtgcattattttctcacacatcacttgagtgaaaactttgtgtatcgaatttaggaaactattgattgcctttcctcctggagaataattatagacaaagttttatttaaaaaatccaatagttactgagggaaacgtagggaaagaggaatagaccagtccagttaaaacaaaacaaaataaaacaaacaaacaaaaaacactagagcaataatgggatgacatctgttgaaaagaaattcagtaccgggccagaagtgagcgggctggctggccaaacattatgcattgtgtaatatattggatc

SEQ ID NO: 8164 - DNA, 481 bp, Homo sapiens
ggcccacgcaggccctgctcttgtgaggaggggtcacctaggcccacgcaggccctgctcttgtgaggaggggtcacctaggcccacgcwggccctgctcttgggcctgcccagctgagccggctcctgagagaagcgctttctgagtcgtttcgaggacagccctggccggtctttccaggctgtgaggggctcctgggactgctgtctcctcttatcctgtacctctgccatgtgtctctgtgtgtgtgtgtgtgtgtgtgtgtgtgtgtgtgtgtgtgtataaattatcctggaggaaaggttaaggtgacacatggagacagagtgtcaccgttatttccgcaggtcctctctgatgacatgaagaagctgaaggcccgaatggtaatgctcctccctacttctgctcaggggttgggggcctgggtctcagcgtgtgacactgaggacactgtgggacacctgggaccctggaggg

SEQ ID NO: 8165 - DNA, 826 bp, Homo sapiens
acttcaaaggttctgtggccccaaagggagtgtgcatgccgttcttatagacgtcttgagctgcaagcctgttatgtgtatcgttaggtgctttggttaggtgttttttaacttcagaagtttaacgtcatttcaaaggcctccttctcataatggagtatttcctccatatgcacatcctgagcaaaggtaaccccaattaaagtagtagctcagagttttaaaagttttaaagtggcatacaacagtagaattggggctcatcaattatcaattctttcacccttcaaataattcttttctttattcaatgcctgtagctattgcattaatgaccacagcggtcatctctacctgcgaccatggtatagtagccaagatcaagagagtgatcatggagagagacacttaccctcggaagtggggtttaggtccaaaggtaagtggtactgggttgcgtgccctgccaggttcttttttttttttttttttttttaaatttatttttttattgataattyttgggtgtttctcacagagggggatttggcagggtcataggacaatagtggagggaaggtcagcagataaacaagtgaacaaaggtctctggttttcctaggcagaggaccctgcggccttccgcagtgtttgtgtccctgggtacttgagattagggagtggtgatgactcttaacgagcatgctgccttcaagcatctgtttaacaaagcacatcttgcaccgcccttaatccatttaaccctgagtggacacagcacatgtttcagagagcacagggttgggggtaaggtcacagatcaaca

SEQ ID NO: 8166 - DNA, 826 bp, Homo sapiens
acttcaaaggttctgtggccccaaagggagtgtgcatgccgttcttatagacgtcttgagctgcaagcctgttatgtgtatcgttaggtgctttggttaggtgttttttaacttcagaagtttaacgtcatttcaaaggcctccttctcataatggagtatttcctccatatgcacatcctgagcaaaggtaaccccaattaaagtagtagctcagagttttaaaagttttaaagtggcatacaacagtagaattggggctcatcaattatcaattctttcacccttcaaataattcttttctttattcaatgcctgtagctattgcattaatgaccacagcggtcatctctacctgcgaccatggtatagtagccaagatcaagagagtgatcatggagagagacacttaccctcggaagtggggtttaggtccaaaggtaagtggtactgggttgcgtgccctgccaggttcttttttttttttttttttttttaaatttatttttttattgataatttttgggtgtttctcacagagggggatttggcagggtcatrggacaatagtggagggaaggtcagcagataaacaagtgaacaaaggtctctggttttcctaggcagaggaccctgcggccttccgcagtgtttgtgtccctgggtacttgagattagggagtggtgatgactcttaacgagcatgctgccttcaagcatctgtttaacaaagcacatcttgcaccgcccttaatccatttaaccctgagtggacacagcacatgtttcagagagcacagggttgggggtaaggtcacagatcaaca

SEQ ID NO: 8167 - DNA, 826 bp, Homo sapiens
acttcaaaggttctgtggccccaaagggagtgtgcatgccgttcttatagacgtcttgagctgcaagcctgttatgtgtatcgttaggtgctttggttaggtgttttttaacttcagaagtttaacgtcatttcaaaggcctccttctcataatggagtatttcctccatatgcacatcctgagcaaaggtaaccccaattaaagtagtagctcagagttttaaaagttttaaagtggcatacaacagtagaattggggctcatcaattatcaattctttcacccttcaaataattcttttctttattcaatgcctgtagctattgcattaatgaccacagcggtcatctctacctgcgaccatggtatagtagccaagatcaagagagtgatcatggagagagacacttaccctcggaagtggggtttaggtccaaaggtaagtggtactgggttgcgtgccctgccaggttcttttttttttttttttttttttaaatttatttttttattgataatttttgggtgtttctcacagagggggatttggcagggtcataggacaatagtggagggaaggtcagcagataaacaagtgaacaaaggtctctggttttcctaggcagaggaccctgcggccttccgcagtgtytgtgtccctgggtacttgagattagggagtggtgatgactcttaacgagcatgctgccttcaagcatctgtttaacaaagcacatcttgcaccgcccttaatccatttaaccctgagtggacacagcacatgtttcagagagcacagggttgggggtaaggtcacagatcaaca

SEQ ID NO: 8168 - DNA, 826 bp, Homo sapiens
acttcaaaggttctgtggccccaaagggagtgtgcatgccgttcttatagacgtcttgagctgcaagcctgttatgtgtatcgttaggtgctttggttaggtgttttttaacttcagaagtttaacgtcatttcaaaggcctccttctcataatggagtatttcctccatatgcacatcctgagcaaaggtaaccccaattaaagtagtagctcagagttttaaaagttttaaagtggcatacaacagtagaattggggctcatcaattatcaattctttcacccttcaaataattcttttctttattcaatgcctgtagctattgcattaatgaccacagcggtcatctctacctgcgaccatggtatagtagccaagatcaagagagtgatcatggagagagacacttaccctcggaagtggggtttaggtccaaaggtaagtggtactgggttgcgtgccctgccaggttcttttttttttttttttttttttaaatttatttttttattgataatttttgggtgtttctcacagagggggatttggcagggtcataggacaatagtggagggaaggtcagcagataaacaagtgaacaaaggtctctggttttcctaggcagaggaccctgcggccttccgcagtgtttgtgtccctggktacttgagattagggagtggtgatgactcttaacgagcatgctgccttcaagcatctgtttaacaaagcacatcttgcaccgcccttaatccatttaaccctgagtggacacagcacatgtttcagagagcacagggttgggggtaaggtcacagatcaaca

SEQ ID NO: 8169 - DNA, 826 bp, Homo sapiens
acttcaaaggttctgtggccccaaagggagtgtgcatgccgttcttatagacgtcttgagctgcaagcctgttatgtgtatcgttaggtgctttggttaggtgttttttaacttcagaagtttaacgtcatttcaaaggcctccttctcataatggagtatttcctccatatgcacatcctgagcaaaggtaaccccaattaaagtagtagctcagagttttaaaagttttaaagtggcatacaacagtagaattggggctcatcaattatcaattctttcacccttcaaataattcttttctttattcaatgcctgtagctattgcattaatgaccacagcggtcatctctacctgcgaccatggtatagtagccaagatcaagagagtgatcatggagagagacacttaccctcggaagtggggtttaggtccaaaggtaagtggtactgggttgcgtgccctgccaggttcttttttttttttttttttttttaaatttatttttttattgataatttttgggtgtttctcacagagggggatttggcagggtcataggacaatagtggagggaaggtcagcagataaacaagtgaacaaaggtctctggttttcctaggcagaggaccctgcggccttccgcagtgtttgtgtccctgggtacttgagattagggagtggtgatgactcttaasgagcatgctgccttcaagcatctgtttaacaaagcacatcttgcaccgcccttaatccatttaaccctgagtggacacagcacatgtttcagagagcacagggttgggggtaaggtcacagatcaaca

SEQ ID NO: 8170 - DNA, 861 bp, Homo sapiens
agtgcttccactgatctggcaggaggcggagctcgggtggtaaagctcactcacctgccactcccctccggctgtaaagctcactcacctgccactcccctccggctgtaaagctcagttcctaacaggccacggctgtagtggtccccgtcccggggttgggaccccctgctatagaacactagaacgtgtcccccctgagcagctgcaattctgtgtcttwcggcaagtctctccctatcctccctgccctgtccttccacactccagcatctcctgccctgttttccttccgtgagatccacgttctctgtcttctatctctgagccaagttcagagccctgagatatgagatgatcctggcttagccagagagaccctaagtgccgtcacacacgttcctatgagagggaggcagggaaacttcacccaggagaggcagcgtccacatgagcacaggggtggagactgaagcgatggagcagagaccaccatccaccccacagagcaaaagctccagaggaacaaaggggcctccctgagccagtgcttccaccaactcctggcaggtggacgactgcccggagagctgctgcgagcccccctgctgcgccgccagctgctgtgccccggccccctgcctgaccctggtctgcaccccagtgagctgtgtgtccagcccctgctgccaggcagcctgtgagcccagctcctgcacgcccttgtgctgccagcagtctagctgccagccagcttgctgcacctcctccccaagccagcagtcctgctgtgtgcccgtctgctgcaagcctgtctgttgcaagcccgtctgctgtgtgcctgtctgctctggggcttcc

SEQ ID NO: 8171 - DNA, 861 bp, Homo sapiens
agtgcttccactgatctggcaggaggcggagctcgggtggtaaagctcactcacctgccactcccctccggctgtaaagctcactcacctgccactcccctccggctgtaaagctcagttcctaacaggccacggctgtagtggtccccgtcccggggttgggaccccctgctatagaacactagaacgtgtcccccctgagcagctgcaattctgtgtctttcggcaagtctctccctatcctccctgccctgtccttccacactccagcatctcctgccctgttttccttccgtgagatccacgttctctgtcytctatctctgagccaagttcagagccctgagatatgagatgatcctggcttagccagagagaccctaagtgccgtcacacacgttcctatgagagggaggcagggaaacttcacccaggagaggcagcgtccacatgagcacaggggtggagactgaagcgatggagcagagaccaccatccaccccacagagcaaaagctccagaggaacaaaggggcctccctgagccagtgcttccaccaactcctggcaggtggacgactgcccggagagctgctgcgagcccccctgctgcgccgccagctgctgtgccccggccccctgcctgaccctggtctgcaccccagtgagctgtgtgtccagcccctgctgccaggcagcctgtgagcccagctcctgcacgcccttgtgctgccagcagtctagctgccagccagcttgctgcacctcctccccaagccagcagtcctgctgtgtgcccgtctgctgcaagcctgtctgttgcaagcccgtctgctgtgtgcctgtctgctctggggcttcc

SEQ ID NO: 8172 - DNA, 755 bp, Homo sapiens
tgggttgcttccacagttttcagctcttgtgaatgatgttgctgtggacattagtgtacaaacaactcttcaagaccctgcttcctattcttttgggtatatactctaaagaggaattgctagatgatgtgaaaattctatttcggttttcaggaactgccatactgtgttctacagagactgtaccattttacattcccaccagcagggcataggtgttcccatttctccacatcctcgccaacacttgtcattttctgtttttttgatcgtagccatcctaatgggtgtgaggtggtatctcactgtggttttggttgccattcccctaatgattagtgattctaagcatcttttcttgtgcttattggcatttgtatatccctttcagagacatgtctattcaagttgtttggattgaactgggttgtttggcctttgttgttgttgagttgtaggagttctctatatattctggatatgaatcccttatcaggtatatgacttgcaaatactttctcccattctataggtttccttttcactgtgttgagaatgtccttcaatgcaccaaagtttttaattttcwtgaagttcggtttgtctatttctttcttttttttgcctgtgccaagtgccttttgaacctctctctacccaccactaccttaacccagtccaggccaatattttcctggactcctgtaattgccttcttactgctccctcatagccctcactgaaaacttttctgt

SEQ ID NO: 8173 - DNA, 755 bp, Homo sapiens
tgggttgcttccacagttttcagctcttgtgaatgatgttgctgtggacattagtgtacaaacaactcttcaagaccctgcttcctattcttttgggtatatactctaaagaggaattgctagatgatgtgaaaattctatttcggttttcaggaactgccatactgtgttctacagagactgtaccattttacattcccaccagcagggcataggtgttcccatttctccacatcctcgccaacacttgtcattttctgtttttttgatcgtagccatcctaatgggtgtgaggtggtatctcactgtggttttggttgccattcccctaatgattagtgattctaagcatcttttcttgtgcttattggcatttgtatatccctttcagagacatgtctattcaagttgtttggattgaactgggttgtttggcctttgttgttgttgagttgtaggagttctctatatattctggatatgaatcccttatcaggtatatgacttgcaaatactttctcccattctataggtttccttttcactgtgttgagaatgtccttcaatgcaccaaagtttttaattttcatgaagttcggtttgtctatttctttcttttttttgcctgtgccaagtgccttttgaacctctctctacccaccactaccttaacccagtccaggccaatattttcctggactcctgtaattgccttcttacygctccctcatagccctcactgaaaacttttctgt

SEQ ID NO: 8174 - DNA, 1701 bp, Homo sapiens
ggtcaaatgagcaaaggcaccatcccaggcacagaatgtgcatcctgtggttgttggggggagtctgtcagagtcttattctggactagagtcaggactgggtcccataaggtcagggcagggtgagtgtgaccttggggctacaggcaaggccaggcatccaaggggtctcaactgccccaaacaaccccatcctgccaggccccactccccctgtccctccctcccattgttcagtcccctcaccccctcaccatgggcacctgcagtctcattcagagacaccctcatcttagagtccctgatagtggggagtttggcccctcagaggccttggttgctttggtcaatccataatgcctgggcctgggacccccaccatttcttgttcatcagggacacagcagctgtgaaggcagctgccttcaccagagcagcgatgtagcccagcaagggcagggacagagacgcaaggtctgggggatttttccacaatgctgcagaaagaaagtccctgtggagctcagtctcagccatccctgccccagctgtgagctgaactgaatttcaggcatctcagagtcccttcacctttgcatgacccatttccaggacatgacaggtcaagcccatgggagaggggatcacccaggtctccctcatctccatggacctcctgggaacattgccagggtccactccacccctggacgctgtccccaagcttcaccctctttttataagttgtacatttttattatgaagatctttgaacacaaaaatagggagatgaaagaataataatgtccccaaggttcccatcaccgagtccccataatttttgattttcaaataatgttgactcacccacaacagagtaaacgattccctcagacaatagtctgaagcagatgcgaaagccatcacaaacttaaatggagagaatcaatgatttcttgacacgaaaaaacagttaacgagggtctcaccaaatgtcttgtgaatttcattgtgtatatttttagttgacttcgtggtgcattacgtatttgtggatttaactttagtttctatgtggagtaaatacttgatgttatcagtggtgaatgtgtttttagacccattctatctacagctgtctcccaaatggctgtcaggcttttcctggcaaggcaggagtggcaggagcagagagctggtcctgagaccctcccacagtcaggatgcagccactgcctccctgagcaggaacccagtgcttcctttagcttctcttttcctgaaaaattgttctagcatcaagaggctcagtggggttcaggctggacattggcataactgcttcctaggacatgtggttacttctagcaaagccacccatgttcrtcattcttttagtgacattagctgtgtttgatgatcgataactttgtgcttcagataaaaaggaagacagagggttgaggcttccattcacctcctcgtgagagctgcagtgtgtcgctgaagggagggcccagcagctgtgctatgaacctaggagtgtgcttcctgctttggaaaaaaggaagaaaagtagtttcttcccttttattcaccactttgataatggacgatctggtgctcggccatactcgagggtgaacagaacaacatagagccagagtgagctccagcatgtgaggacatctgacatgtggg

SEQ ID NO: 8175 - DNA, 1701 bp, Homo sapiens
ggtcaaatgagcaaaggcaccatcccaggcacagaatgtgcatcctgtggttgttggggggagtctgtcagagtcttattctggactagagtcaggactgggtcccataaggtcagggcagggtgagtgtgaccttggggctacaggcaaggccaggcatccaaggggtctcaactgccccaaacaaccccatcctgccaggccccactccccctgtccctccctcccattgttcagtcccctcaccccctcaccatgggcacctgcagtctcattcagagacaccctcatcttagagtccctgatagtggggagtttggcccctcagaggccttggttgctttggtcaatccataatgcctgggcctgggacccccaccatttcttgttcatcagggacacagcagctgtgaaggcagctgccttcaccagagcagcgatgtagcccagcaagggcagggacagagacgcaaggtctgggggatttttccacaatgctgcagaaagaaagtccctgtggagctcagtctcagccatccctgccccagctgtgagctgaactgaatttcaggcatctcagagtcccttcacctttgcatgacccatttccaggacatgacaggtcaagcccatgggagaggggatcacccaggtctccctcatctccatggacctcctgggaacattgccagggtccactccacccctggacgctgtccccaagcttcaccctctttttataagttgtacatttttattatgaagatctttgaacacaaaaatagggagatgaaagaataataatgtccccaaggttcccatcaccgagtccccataatttttgattttcaaataatgttgactcacccacaacagagtaaacgattccctcagacaatagtctgaagcagatgcgaaagccatcacaaacttaaatggagagaatcaatgatttcttgacacgaaaaaacagttaacgagggtctcaccaaatgtcttgtgaatttcattgtgtatatttttagttgacttcgtggtgcattacgtatttgtggatttaactttagtttctatgtggagtaaatacttgatgttatcagtggtgaatgtgtttttagacccattctatctacagctgtctcccaaatggctgtcaggcttttcctggcaaggcaggagtggcaggagcagagagctggtcctgagaccctcccacagtcaggatgcagccactgcctccctgagcaggaacccagtgcttcctttagcttctcttttcctgaaaaattgttctagcatcaagaggctcagtggggttcaggctggacattggcataactgcttcctaggacatgtggttacttctagcaaagccacccatgttcatcattcttttagtgacrttagctgtgtttgatgatcgataactttgtgcttcagataaaaaggaagacagagggttgaggcttccattcacctcctcgtgagagctgcagtgtgtcgctgaagggagggcccagcagctgtgctatgaacctaggagtgtgcttcctgctttggaaaaaaggaagaaaagtagtttcttcccttttattcaccactttgataatggacgatctggtgctcggccatactcgagggtgaacagaacaacatagagccagagtgagctccagcatgtgaggacatctgacatgtggg

SEQ ID NO: 8176 - DNA, 1701 bp, Homo sapiens
ggtcaaatgagcaaaggcaccatcccaggcacagaatgtgcatcctgtggttgttggggggagtctgtcagagtcttattctggactagagtcaggactgggtcccataaggtcagggcagggtgagtgtgaccttggggctacaggcaaggccaggcatccaaggggtctcaactgccccaaacaaccccatcctgccaggccccactccccctgtccctccctcccattgttcagtcccctcaccccctcaccatgggcacctgcagtctcattcagagacaccctcatcttagagtccctgatagtggggagtttggcccctcagaggccttggttgctttggtcaatccataatgcctgggcctgggacccccaccatttcttgttcatcagggacacagcagctgtgaaggcagctgccttcaccagagcagcgatgtagcccagcaagggcagggacagagacgcaaggtctgggggatttttccacaatgctgcagaaagaaagtccctgtggagctcagtctcagccatccctgccccagctgtgagctgaactgaatttcaggcatctcagagtcccttcacctttgcatgacccatttccaggacatgacaggtcaagcccatgggagaggggatcacccaggtctccctcatctccatggacctcctgggaacattgccagggtccactccacccctggacgctgtccccaagcttcaccctctttttataagttgtacatttttattatgaagatctttgaacacaaaaatagggagatgaaagaataataatgtccccaaggttcccatcaccgagtccccataatttttgattttcaaataatgttgactcacccacaacagagtaaacgattccctcagacaatagtctgaagcagatgcgaaagccatcacaaacttaaatggagagaatcaatgatttcttgacacgaaaaaacagttaacgagggtctcaccaaatgtcttgtgaatttcattgtgtatatttttagttgacttcgtggtgcattacgtatttgtggatttaactttagtttctatgtggagtaaatacttgatgttatcagtggtgaatgtgtttttagacccattctatctacagctgtctcccaaatggctgtcaggcttttcctggcaaggcaggagtggcaggagcagagagctggtcctgagaccctcccacagtcaggatgcagccactgcctccctgagcaggaacccagtgcttcctttagcttctcttttcctgaaaaattgttctagcatcaagaggctcagtggggttcaggctggacattggcataactgcttcctaggacatgtggttacttctagcaaagccacccatgttcatcattcttttagtgacattagctgtgtttgatgatcgataactttgtgcttcagataaraaggaagacagagggttgaggcttccattcacctcctcgtgagagctgcagtgtgtcgctgaagggagggcccagcagctgtgctatgaacctaggagtgtgcttcctgctttggaaaaaaggaagaaaagtagtttcttcccttttattcaccactttgataatggacgatctggtgctcggccatactcgagggtgaacagaacaacatagagccagagtgagctccagcatgtgaggacatctgacatgtggg

SEQ ID NO: 8177 - DNA, 1701 bp, Homo sapiens
ggtcaaatgagcaaaggcaccatcccaggcacagaatgtgcatcctgtggttgttggggggagtctgtcagagtcttattctggactagagtcaggactgggtcccataaggtcagggcagggtgagtgtgaccttggggctacaggcaaggccaggcatccaaggggtctcaactgccccaaacaaccccatcctgccaggccccactccccctgtccctccctcccattgttcagtcccctcaccccctcaccatgggcacctgcagtctcattcagagacaccctcatcttagagtccctgatagtggggagtttggcccctcagaggccttggttgctttggtcaatccataatgcctgggcctgggacccccaccatttcttgttcatcagggacacagcagctgtgaaggcagctgccttcaccagagcagcgatgtagcccagcaagggcagggacagagacgcaaggtctgggggatttttccacaatgctgcagaaagaaagtccctgtggagctcagtctcagccatccctgccccagctgtgagctgaactgaatttcaggcatctcagagtcccttcacctttgcatgacccatttccaggacatgacaggtcaagcccatgggagaggggatcacccaggtctccctcatctccatggacctcctgggaacattgccagggtccactccacccctggacgctgtccccaagcttcaccctctttttataagttgtacatttttattatgaagatctttgaacacaaaaatagggagatgaaagaataataatgtccccaaggttcccatcaccgagtccccataatttttgattttcaaataatgttgactcacccacaacagagtaaacgattccctcagacaatagtctgaagcagatgcgaaagccatcacaaacttaaatggagagaatcaatgatttcttgacacgaaaaaacagttaacgagggtctcaccaaatgtcttgtgaatttcattgtgtatatttttagttgacttcgtggtgcattacgtatttgtggatttaactttagtttctatgtggagtaaatacttgatgttatcagtggtgaatgtgtttttagacccattctatctacagctgtctcccaaatggctgtcaggcttttcctggcaaggcaggagtggcaggagcagagagctggtcctgagaccctcccacagtcaggatgcagccactgcctccctgagcaggaacccagtgcttcctttagcttctcttttcctgaaaaattgttctagcatcaagaggctcagtggggttcaggctggacattggcataactgcttcctaggacatgtggttacttctagcaaagccacccatgttcatcattcttttagtgacattagctgtgtttgatgatcgataactttgtgcttcagataaaaaggaagacagagggttgaggcttccattcacctcctcgtgagagctgcagtgtgtcrctgaagggagggcccagcagctgtgctatgaacctaggagtgtgcttcctgctttggaaaaaaggaagaaaagtagtttcttcccttttattcaccactttgataatggacgatctggtgctcggccatactcgagggtgaacagaacaacatagagccagagtgagctccagcatgtgaggacatctgacatgtggg

SEQ ID NO: 8178 - DNA, 1701 bp, Homo sapiens
ggtcaaatgagcaaaggcaccatcccaggcacagaatgtgcatcctgtggttgttggggggagtctgtcagagtcttattctggactagagtcaggactgggtcccataaggtcagggcagggtgagtgtgaccttggggctacaggcaaggccaggcatccaaggggtctcaactgccccaaacaaccccatcctgccaggccccactccccctgtccctccctcccattgttcagtcccctcaccccctcaccatgggcacctgcagtctcattcagagacaccctcatcttagagtccctgatagtggggagtttggcccctcagaggccttggttgctttggtcaatccataatgcctgggcctgggacccccaccatttcttgttcatcagggacacagcagctgtgaaggcagctgccttcaccagagcagcgatgtagcccagcaagggcagggacagagacgcaaggtctgggggatttttccacaatgctgcagaaagaaagtccctgtggagctcagtctcagccatccctgccccagctgtgagctgaactgaatttcaggcatctcagagtcccttcacctttgcatgacccatttccaggacatgacaggtcaagcccatgggagaggggatcacccaggtctccctcatctccatggacctcctgggaacattgccagggtccactccacccctggacgctgtccccaagcttcaccctctttttataagttgtacatttttattatgaagatctttgaacacaaaaatagggagatgaaagaataataatgtccccaaggttcccatcaccgagtccccataatttttgattttcaaataatgttgactcacccacaacagagtaaacgattccctcagacaatagtctgaagcagatgcgaaagccatcacaaacttaaatggagagaatcaatgatttcttgacacgaaaaaacagttaacgagggtctcaccaaatgtcttgtgaatttcattgtgtatatttttagttgacttcgtggtgcattacgtatttgtggatttaactttagtttctatgtggagtaaatacttgatgttatcagtggtgaatgtgtttttagacccattctatctacagctgtctcccaaatggctgtcaggcttttcctggcaaggcaggagtggcaggagcagagagctggtcctgagaccctcccacagtcaggatgcagccactgcctccctgagcaggaacccagtgcttcctttagcttctcttttcctgaaaaattgttctagcatcaagaggctcagtggggttcaggctggacattggcataactgcttcctaggacatgtggttacttctagcaaagccacccatgttcatcattcttttagtgacattagctgtgtttgatgatcgataactttgtgcttcagataaaaaggaagacagagggttgaggcttccattcacctcctcgtgagagctgcagtgtgtcgstgaagggagggcccagcagctgtgctatgaacctaggagtgtgcttcctgctttggaaaaaaggaagaaaagtagtttcttcccttttattcaccactttgataatggacgatctggtgctcggccatactcgagggtgaacagaacaacatagagccagagtgagctccagcatgtgaggacatctgacatgtggg

SEQ ID NO: 8179 - DNA, 764 bp, Homo sapiens
aggaggtgcaggaaacatgtatgcaggcacattgctgcacttggctgggacggaagcagcaagaggcagatagacttccagagacgacctcgcctgtggcgggtcaacccacagacaccatgtgtggaagactgtgccctcctctgtaaacacagcattcacatcttctctgcaagggaatttgtgggagcaacccaggaactggcattgccatgcccctgacagacaaacccagctcccyaggagtgtgtcatctaaatacgaagaggaaggggctttcactcttgtcctctcctgtccacactctctctgcggtatgcttgcaaggataaggatattagcaagtgtgcaagaaaaccacagacatctctacttgcaccctcatagagttctgagtagctcttaggccgaaaacatatccagtttctcaatggctgttggggacagaagacaggaagcatggggtgacccctgcccccacccccaaagctgctacccaggcacttaaacctaagccagccttcttttcctggggagggccattctgatcctacaggaagacttttctctcctcaaactcctggggccttgatattcccatcaaagcaagtatcggccatagacagagctatgcaagaaggcacacgtttgcaatttccacccttgaggaaggagtgaggttgtctctggccccagctgccttctttaccagcccctcctcctcccctgctctctcatggcctctctttgctgtctgattccag

SEQ ID NO: 8180 - DNA, 774 bp, Homo sapiens
cttccttacaccttatacaaaaattaattcaagatggattaaagacttaaacgttagacctaaaaccataaaaaccctagaagaaaacctasgcattaccattcaggacacaggcgtgggcaaggacttcatgtctaaaacaccaaaagcaatggcaacaaaagccaaaattgacaaatgggatctaattaaactaaagagcttctgcacagcaaaagaaactaccatcacagtgaacaggcagcctacagaatgggagaaaattttcacaatctactcatctgacaaagggctaatatccagaatctacaatgaactcaaacaaatttacaagaaaaaaacaaacaaccccatcaaaaagtgggcgaaggacatgaacagacacttctcaaaagaagatatttatgcagccaaaaaacacatgaagaaatgctcaccatcactggccatcagagaaaaatgaacatttcaaagatgtgcttccaaatgccaaatcatcactaaaaagctctgtggcatagaggaaatttcacaaccttttagtgcctcaattttgtggaagaatggttaggaggctattgcaataacaaaagaaaatttgaatagctgtatccaacatgaaaagattgctagtagaattaaatgagttactataggtaaaacaatcagggaagtaattaaagagaatctgcactaacattgttttattaatttaaaatatctgtacacaatcctttgactcatttggaattagttttagtgtattttagaaaa

SEQ ID NO: 8181 - DNA, 570 bp, Homo sapiens
tttttttttttttagctcacacatatgagtgagaacgtgtggtgttgaactttctgttcctgacttacatcacttaatatcttgtccccagttccattcatgtggccacaatgacagggttttattcctttttatggctgaatagtattccgttgtgtatatatactgcattcttcatccattcatctggtggtggacacctctgttggttccatatcttggctattgtgacagtattgggatgaatgtggggcagatgtctctttgatatactgacttccttccctctggatgaacacccaggagtgggttagctggctcatatcgtgattctatttgtggtttttttgaggaatctccatactattttttatagtagctgtagcagtttacattcctaccaatagttttatgaatttctaaaccttgtacaatagtattattcttcccactttaggggcaagagatgtgagaccccggcagtttaggtgacctgctcgaggacacacrctgtgcacagtggctgagcctactcctgccacatccaggagacttcagagtcccgggatc

SEQ ID NO: 8182 - DNA, 807 bp, Homo sapiens
ccccagactacaggtcctagtcctatttgaaccttggacgacccccggggctaccaggagtgagcaggtggaaggaggagacccagcctcctgatcctggggcgggggtgggggtcacaccttctgtgatggaggaactcagtttggatgcgtcacccaggtatgaccttgcaagagtcaccaaaattgccgagaggccccagttagcatcccattcccagatgatggtccatgccggtgagcagtgaggcccgaggacccacagtgcaaaaggtttgaaccgggtcactgcacccccttcatcctcgatttcgtgatttaaacggcactcaggactaactcatcttccattcccaaggcctttccttctggtgtcagcagaagggactttgtactccataacatatgttgcccaatgggcttgcatgcccactgccaagtccagctccacctccaggcccttgccctactcttccttggcctttggaaaatccagtccttcatgccatgtataaatgyccttccccaggacgtcccccaaacctgcttccccttctcagcctggcttctgatccagcctgtggtttaacccaccacccatgtttgctggtggtggggcatcctcaggacctctgccgccctccaggacctcctccctcacctggtcgaagcagtatggtgtgttctggaagtccacatgcagcaaggttgcccagcccgggcagtggcaggggacctggcgggtagcgtgcagcccagcgttggtgccggtgcatcaggtccaccaggagcaggaagatggccact

SEQ ID NO: 8183 - DNA, 807 bp, Homo sapiens
ccccagactacaggtcctagtcctatttgaaccttggacgacccccggggctaccaggagtgagcaggtggaaggaggagacccagcctcctgatcctggggcgggggtgggggtcacaccttctgtgatggaggaactcagtttggatgcgtcacccaggtatgaccttgcaagagtcaccaaaattgccgagaggccccagttagcatcccattcccagatgatggtccatgccggtgagcagtgaggcccgaggacccacagtgcaaaaggtttgaaccgggtcactgcacccccttcatcctcgatttcgtgatttaaacggcactcaggactaactcatcttccattcccaaggcctttccttctggtgtcagcagaagggactttgtactccataacatatgttgcccaatgggcttgcatgcccactgccaagtccagctccacctccaggcccttgccctactcttccttggcctttggaaaatccagtccttcatgccatgtataaatgtccttcyccaggacgtcccccaaacctgcttccccttctcagcctggcttctgatccagcctgtggtttaacccaccacccatgtttgctggtggtggggcatcctcaggacctctgccgccctccaggacctcctccctcacctggtcgaagcagtatggtgtgttctggaagtccacatgcagcaaggttgcccagcccgggcagtggcaggggacctggcgggtagcgtgcagcccagcgttggtgccggtgcatcaggtccaccaggagcaggaagatggccact

SEQ ID NO: 8184 - DNA, 807 bp, Homo sapiens
ccccagactacaggtcctagtcctatttgaaccttggacgacccccggggctaccaggagtgagcaggtggaaggaggagacccagcctcctgatcctggggcgggggtgggggtcacaccttctgtgatggaggaactcagtttggatgcgtcacccaggtatgaccttgcaagagtcaccaaaattgccgagaggccccagttagcatcccattcccagatgatggtccatgccggtgagcagtgaggcccgaggacccacagtgcaaaaggtttgaaccgggtcactgcacccccttcatcctcgatttcgtgatttaaacggcactcaggactaactcatcttccattcccaaggcctttccttctggtgtcagcagaagggactttgtactccataacatatgttgcccaatgggcttgcatgcccactgccaagtccagctccacctccaggcccttgccctactcttccttggcctttggaaaatccagtccttcatgccatgtataaatgtccttccccaggamgtcccccaaacctgcttccccttctcagcctggcttctgatccagcctgtggtttaacccaccacccatgtttgctggtggtggggcatcctcaggacctctgccgccctccaggacctcctccctcacctggtcgaagcagtatggtgtgttctggaagtccacatgcagcaaggttgcccagcccgggcagtggcaggggacctggcgggtagcgtgcagcccagcgttggtgccggtgcatcaggtccaccaggagcaggaagatggccact

SEQ ID NO: 8185 - DNA, 807 bp, Homo sapiens
ccccagactacaggtcctagtcctatttgaaccttggacgacccccggggctaccaggagtgagcaggtggaaggaggagacccagcctcctgatcctggggcgggggtgggggtcacaccttctgtgatggaggaactcagtttggatgcgtcacccaggtatgaccttgcaagagtcaccaaaattgccgagaggccccagttagcatcccattcccagatgatggtccatgccggtgagcagtgaggcccgaggacccacagtgcaaaaggtttgaaccgggtcactgcacccccttcatcctcgatttcgtgatttaaacggcactcaggactaactcatcttccattcccaaggcctttccttctggtgtcagcagaagggactttgtactccataacatatgttgcccaatgggcttgcatgcccactgccaagtccagctccacctccaggcccttgccctactcttccttggcctttggaaaatccagtccttcatgccatgtataaatgtccttccccaggacgtcccccaaacctgcttccccttctcagcctggcttctgrtccagcctgtggtttaacccaccacccatgtttgctggtggtggggcatcctcaggacctctgccgccctccaggacctcctccctcacctggtcgaagcagtatggtgtgttctggaagtccacatgcagcaaggttgcccagcccgggcagtggcaggggacctggcgggtagcgtgcagcccagcgttggtgccggtgcatcaggtccaccaggagcaggaagatggccact

SEQ ID NO: 8186 - DNA, 807 bp, Homo sapiens
ccccagactacaggtcctagtcctatttgaaccttggacgacccccggggctaccaggagtgagcaggtggaaggaggagacccagcctcctgatcctggggcgggggtgggggtcacaccttctgtgatggaggaactcagtttggatgcgtcacccaggtatgaccttgcaagagtcaccaaaattgccgagaggccccagttagcatcccattcccagatgatggtccatgccggtgagcagtgaggcccgaggacccacagtgcaaaaggtttgaaccgggtcactgcacccccttcatcctcgatttcgtgatttaaacggcactcaggactaactcatcttccattcccaaggcctttccttctggtgtcagcagaagggactttgtactccataacatatgttgcccaatgggcttgcatgcccactgccaagtccagctccacctccaggcccttgccctactcttccttggcctttggaaaatccagtccttcatgccatgtataaatgtccttccccaggacgtcccccaaacctgcttccccttctcagcctggcttctgatccagcctgtggtttmacccaccacccatgtttgctggtggtggggcatcctcaggacctctgccgccctccaggacctcctccctcacctggtcgaagcagtatggtgtgttctggaagtccacatgcagcaaggttgcccagcccgggcagtggcaggggacctggcgggtagcgtgcagcccagcgttggtgccggtgcatcaggtccaccaggagcaggaagatggccact

SEQ ID NO: 8187 - DNA, 884 bp, Homo sapiens
gggtggagacaacatttaaatacattataattaggccctatgcttcaaaaggggaagcagggacacaaaggcagtcaagtgcacagcctctgtaaaccgtccagaacccgtccacagccagtgctctcttatcaaggggaagttactgaaatcagtctcttgtccaatcaaagctgtagttatggcttgtgtagggagggctcagtcagtttatggtaatgggtgagctgcaagtgcttcagcattgcttatctcaaggccagtgcttgtttagctagagaaaaaaaggaagaagaaaaaaacctgtggcaattggaacatagtttattctttaagttgaggggcgcatgactccaccttgcctggcgtggccttaggtctcgtttatcataccatatcttactactgcaaggagtctgttctgtcagtcttaggatctctattttaacaataatgctggtcagttgtgtctaaaccacaaagggagagagtataaggagaggtgtctgagattccaactactgggcaggaactcagtakttaagacttctctggggtctccttggccaagaaacagtctgtccagttggttgagtggctttggattttaattttagttctcaaagcatttaatttgatgaaattttgccatattttttctttatttttaaagcctgttatgttctataagaaatctttctactcaggatagtgaatgtattctcttaattttatctctctatgagttccagcgttttagttttaatttttaaattgatgacatctaaaattctactcctaaccaaaacattcctgggggtgaccaaggacaactccaaaaatcttccataaatggaagtaagacttactccttgaagaactta

SEQ ID NO: 8188 - DNA, 884 bp, Homo sapiens
gggtggagacaacatttaaatacattataattaggccctatgcttcaaaaggggaagcagggacacaaaggcagtcaagtgcacagcctctgtaaaccgtccagaacccgtccacagccagtgctctcttatcaaggggaagttactgaaatcagtctcttgtccaatcaaagctgtagttatggcttgtgtagggagggctcagtcagtttatggtaatgggtgagctgcaagtgcttcagcattgcttatctcaaggccagtgcttgtttagctagagaaaaaaaggaagaagaaaaaaacctgtggcaattggaacatagtttattctttaagttgaggggcgcatgactccaccttgcctggcgtggccttaggtctcgtttatcataccatatcttactactgcaaggagtctgttctgtcagtcttaggatctctattttaacaataatgctggtcagttgtgtctaaaccacaaagggagagagtataaggagaggtgtctgagattccaactactgggcaggaactcagtagttaagacttctctggggtctccttggccaagaarcagtctgtccagttggttgagtggctttggattttaattttagttctcaaagcatttaatttgatgaaattttgccatattttttctttatttttaaagcctgttatgttctataagaaatctttctactcaggatagtgaatgtattctcttaattttatctctctatgagttccagcgttttagttttaatttttaaattgatgacatctaaaattctactcctaaccaaaacattcctgggggtgaccaaggacaactccaaaaatcttccataaatggaagtaagacttactccttgaagaactta

SEQ ID NO: 8189 - DNA, 884 bp, Homo sapiens
gggtggagacaacatttaaatacattataattaggccctatgcttcaaaaggggaagcagggacacaaaggcagtcaagtgcacagcctctgtaaaccgtccagaacccgtccacagccagtgctctcttatcaaggggaagttactgaaatcagtctcttgtccaatcaaagctgtagttatggcttgtgtagggagggctcagtcagtttatggtaatgggtgagctgcaagtgcttcagcattgcttatctcaaggccagtgcttgtttagctagagaaaaaaaggaagaagaaaaaaacctgtggcaattggaacatagtttattctttaagttgaggggcgcatgactccaccttgcctggcgtggccttaggtctcgtttatcataccatatcttactactgcaaggagtctgttctgtcagtcttaggatctctattttaacaataatgctggtcagttgtgtctaaaccacaaagggagagagtataaggagaggtgtctgagattccaactactgggcaggaactcagtagttaagacttctctggggtctccttggccaagaaacagtctgtccagttggttgagtggctttggattttaattttagttctcaaagcatttaatttgatgaaattttgccatattttttctktatttttaaagcctgttatgttctataagaaatctttctactcaggatagtgaatgtattctcttaattttatctctctatgagttccagcgttttagttttaatttttaaattgatgacatctaaaattctactcctaaccaaaacattcctgggggtgaccaaggacaactccaaaaatcttccataaatggaagtaagacttactccttgaagaactta

SEQ ID NO: 8190 - DNA, 884 bp, Homo sapiens
gggtggagacaacatttaaatacattataattaggccctatgcttcaaaaggggaagcagggacacaaaggcagtcaagtgcacagcctctgtaaaccgtccagaacccgtccacagccagtgctctcttatcaaggggaagttactgaaatcagtctcttgtccaatcaaagctgtagttatggcttgtgtagggagggctcagtcagtttatggtaatgggtgagctgcaagtgcttcagcattgcttatctcaaggccagtgcttgtttagctagagaaaaaaaggaagaagaaaaaaacctgtggcaattggaacatagtttattctttaagttgaggggcgcatgactccaccttgcctggcgtggccttaggtctcgtttatcataccatatcttactactgcaaggagtctgttctgtcagtcttaggatctctattttaacaataatgctggtcagttgtgtctaaaccacaaagggagagagtataaggagaggtgtctgagattccaactactgggcaggaactcagtagttaagacttctctggggtctccttggccaagaaacagtctgtccagttggttgagtggctttggattttaattttagttctcaaagcatttaatttgatgaaattttgccatattttttctttatttttaaagcctgttatgttctataagaaatctttctactcaggatagtgaatgtattctcttaattttatctctctatgagttccagygttttagttttaatttttaaattgatgacatctaaaattctactcctaaccaaaacattcctgggggtgaccaaggacaactccaaaaatcttccataaatggaagtaagacttactccttgaagaactta

SEQ ID NO: 8191 - DNA, 1054 bp, Homo sapiens
gtctaagttaagatgatgaaaaataggccaggggcgttggctcatgcctgtaatcctagcagtttgggagtctgaggcaagaggatagcttgagcctaggagtttaagagcagtctgggtaacataccaagacccctgtcagaaatgaataaataaaagtaaaatcaaacaagataaattttttttctgagatggattttcactttgatcatccaggctagagtgcagttgtgacatctcagctcgcagcaacttctgcctcccaggttcaagcgattctcctgcctcagcctcctgagtacctgggattacaggcgtgggccaccacacctggctaatttttatattttaagtagagacaggttttcaccatkttggccaggttattctccaacccctgatttcaggtgatccacccaccttggactcccaaagtgctgggattataggcgagagctaccacgcccagccaacaagataatttttaagaagatgatgtgaagtagggaagtgaagtgggcactgaagaggggaatgctcagcaaacctgcacatgtcagaaaatcagctttgtgccccacagtttggtgaacatgaatgatcccatctctaattcccattgtaaaagtttcttttgagctccaggtaaattaattacctaggaaatgtatgattctgaaacagagggtcagggagcaggcacaaagaatgatgaaagtgatagatggtttgctgatgatacaggtgtgtcagggacgcctgcagcctgcccaccccagctgatgttgcaggatcctgtctgggtttgtcctttatgcctgcatctccactgggcttctgtggcccagggatgtggttttctgcctgacagatgaggaaagggagctttagggattctgtgaacttgatccattcctataaatgatggtgaaatgactcagcctgaaatggaattattttttctccttttttttttttttaatagagtatcactctgtcacccaggctggagtgtagtggcatgatctctgctcactgcaacctacacctcctg

SEQ ID NO: 8192 - DNA, 1054 bp, Homo sapiens
gtctaagttaagatgatgaaaaataggccaggggcgttggctcatgcctgtaatcctagcagtttgggagtctgaggcaagaggatagcttgagcctaggagtttaagagcagtctgggtaacataccaagacccctgtcagaaatgaataaataaaagtaaaatcaaacaagataaattttttttctgagatggattttcactttgatcatccaggctagagtgcagttgtgacatctcagctcgcagcaacttctgcctcccaggttcaagcgattctcctgcctcagcctcctgagtacctgggattacaggcgtgggccaccacacctggctaatttttatattttaagtagagacaggttttcaccatgttggccaggttattctccaacccctgatttcaggtgatccacccaccttggactcccaaagtgctgggattataggcgagagctaccacgcccagccaacaagataatttttaagaagatgatgtgaagtagggaagtgaagtgggcactgaagaggggaatgctcagcaaacctgcacatgtcagaaaatcagctttgtgccccacagtttggtgaacatgaatgatcccatctctaattcccrttgtaaaagtttcttttgagctccaggtaaattaattacctaggaaatgtatgattctgaaacagagggtcagggagcaggcacaaagaatgatgaaagtgatagatggtttgctgatgatacaggtgtgtcagggacgcctgcagcctgcccaccccagctgatgttgcaggatcctgtctgggtttgtcctttatgcctgcatctccactgggcttctgtggcccagggatgtggttttctgcctgacagatgaggaaagggagctttagggattctgtgaacttgatccattcctataaatgatggtgaaatgactcagcctgaaatggaattattttttctccttttttttttttttaatagagtatcactctgtcacccaggctggagtgtagtggcatgatctctgctcactgcaacctacacctcctg

SEQ ID NO: 8193 - DNA, 1054 bp, Homo sapiens
gtctaagttaagatgatgaaaaataggccaggggcgttggctcatgcctgtaatcctagcagtttgggagtctgaggcaagaggatagcttgagcctaggagtttaagagcagtctgggtaacataccaagacccctgtcagaaatgaataaataaaagtaaaatcaaacaagataaattttttttctgagatggattttcactttgatcatccaggctagagtgcagttgtgacatctcagctcgcagcaacttctgcctcccaggttcaagcgattctcctgcctcagcctcctgagtacctgggattacaggcgtgggccaccacacctggctaatttttatattttaagtagagacaggttttcaccatgttggccaggttattctccaacccctgatttcaggtgatccacccaccttggactcccaaagtgctgggattataggcgagagctaccacgcccagccaacaagataatttttaagaagatgatgtgaagtagggaagtgaagtgggcactgaagaggggaatgctcagcaaacctgcacatgtcagaaaatcagctttgtgccccacagtttggtgaacatgaatgatcccatctctaattcccattgtaaaagtttcttttgagctccaggtaaattaattacctaggaaatgtatgattctgaaacagagggtcagggagcaggcacaaagaatgatgaaagtgatagatggtttgctgatgatacaggtgtgtcagggacrcctgcagcctgcccaccccagctgatgttgcaggatcctgtctgggtttgtcctttatgcctgcatctccactgggcttctgtggcccagggatgtggttttctgcctgacagatgaggaaagggagctttagggattctgtgaacttgatccattcctataaatgatggtgaaatgactcagcctgaaatggaattattttttctccttttttttttttttaatagagtatcactctgtcacccaggctggagtgtagtggcatgatctctgctcactgcaacctacacctcctg

SEQ ID NO: 8194 - DNA, 792 bp, Homo sapiens
aaggggaaaacagagtgaagaaaagtcagagagagggacaagaagcagggaggggaggagctgctmtccaggatgtggagtttaagttcagaaatgagttctgaaattctcagtctcacctctattttcccacaggaggtggaaacttcaagtgctggatttacaggatgtctgtgagaacttctggatggtttggtctgaagctatggcccatgggtgcttcctcaatgccaagaggaacaaaaaaccagtggaggactgtccaaggatgagaggacggcagcccttgactgtgttcgtagaactttggctcaagaacaggactctggatgaatacctcacctgcctccttctatgggtcaagcagaggaaagatttactacacctgtgctgtaagaagctgaaaattttgggaatgcccttccgcaatatcagaagcatcctgaaaatggtgaacctagactgtatccaggaggtggaagtgaattgcaagtgggtactgcccatcctgacacagtttaccccatacctgggccacatgaggaatcttcagaaactcattctctcccacatggatgtctctcgctacgtttccccagagcagaagaaggagattgttacccagttcaccactcagttcctcaagctgcgctgcctccaaaagctttatatgaactctgtttctttcctcgaaggccacctggaccagctgctcaggtgagggagggtggtgagctttctctgcagaccacagcagagcctgttacagtaaacactagtgggcatctactg

SEQ ID NO: 8195 - DNA, 792 bp, Homo sapiens
aaggggaaaacagagtgaagaaaagtcagagagagggacaagaagcagggaggggaggagctgctatccaggatgtggagtttaagttcagaaatgagttctgaaattctcaktctcacctctattttcccacaggaggtggaaacttcaagtgctggatttacaggatgtctgtgagaacttctggatggtttggtctgaagctatggcccatgggtgcttcctcaatgccaagaggaacaaaaaaccagtggaggactgtccaaggatgagaggacggcagcccttgactgtgttcgtagaactttggctcaagaacaggactctggatgaatacctcacctgcctccttctatgggtcaagcagaggaaagatttactacacctgtgctgtaagaagctgaaaattttgggaatgcccttccgcaatatcagaagcatcctgaaaatggtgaacctagactgtatccaggaggtggaagtgaattgcaagtgggtactgcccatcctgacacagtttaccccatacctgggccacatgaggaatcttcagaaactcattctctcccacatggatgtctctcgctacgtttccccagagcagaagaaggagattgttacccagttcaccactcagttcctcaagctgcgctgcctccaaaagctttatatgaactctgtttctttcctcgaaggccacctggaccagctgctcaggtgagggagggtggtgagctttctctgcagaccacagcagagcctgttacagtaaacactagtgggcatctactg

SEQ ID NO: 8196 - DNA, 792 bp, Homo sapiens
aaggggaaaacagagtgaagaaaagtcagagagagggacaagaagcagggaggggaggagctgctatccaggatgtggagtttaagttcagaaatgagttctgaaattctcagtctcacctctattttcccacaggaggtggaaacttcaagtgctggatttacaggatgtctgtgagaacttctggatggtttggtctgaagctatggcccatgggtgcttcctcaatgccaagaggaacaaaaaaccagtgsaggactgtccaaggatgagaggacggcagcccttgactgtgttcgtagaactttggctcaagaacaggactctggatgaatacctcacctgcctccttctatgggtcaagcagaggaaagatttactacacctgtgctgtaagaagctgaaaattttgggaatgcccttccgcaatatcagaagcatcctgaaaatggtgaacctagactgtatccaggaggtggaagtgaattgcaagtgggtactgcccatcctgacacagtttaccccatacctgggccacatgaggaatcttcagaaactcattctctcccacatggatgtctctcgctacgtttccccagagcagaagaaggagattgttacccagttcaccactcagttcctcaagctgcgctgcctccaaaagctttatatgaactctgtttctttcctcgaaggccacctggaccagctgctcaggtgagggagggtggtgagctttctctgcagaccacagcagagcctgttacagtaaacactagtgggcatctactg

SEQ ID NO: 8197 - DNA, 792 bp, Homo sapiens
aaggggaaaacagagtgaagaaaagtcagagagagggacaagaagcagggaggggaggagctgctatccaggatgtggagtttaagttcagaaatgagttctgaaattctcagtctcacctctattttcccacaggaggtggaaacttcaagtgctggatttacaggatgtctgtgagaacttctggatggtttggtctgaagctatggcccatgggtgcttcctcaatgccaagaggaacaaaaaaccagtggaggactgtccaaggatgagaggacrgcagcccttgactgtgttcgtagaactttggctcaagaacaggactctggatgaatacctcacctgcctccttctatgggtcaagcagaggaaagatttactacacctgtgctgtaagaagctgaaaattttgggaatgcccttccgcaatatcagaagcatcctgaaaatggtgaacctagactgtatccaggaggtggaagtgaattgcaagtgggtactgcccatcctgacacagtttaccccatacctgggccacatgaggaatcttcagaaactcattctctcccacatggatgtctctcgctacgtttccccagagcagaagaaggagattgttacccagttcaccactcagttcctcaagctgcgctgcctccaaaagctttatatgaactctgtttctttcctcgaaggccacctggaccagctgctcaggtgagggagggtggtgagctttctctgcagaccacagcagagcctgttacagtaaacactagtgggcatctactg

SEQ ID NO: 8198 - DNA, 541 bp, Homo sapiens
agactgcactcagcaaggtggtgcactctgaggggcccaaagctcttgaccgctgagaaatrtaagctgtgagggaaacagggtcagggagaggcaagcaaatgtcccatatcagaagcaatggagaagcatataagaccaagtgctatattggctgccggtgttcttgcttactttgaataagcagattatccttactattataatgtgggtgggcctcatccaatctgttcaaggcctgaatatgacaaaaagacttgcctcactgagcaggagggaattctccagcagacttcccttgggcttcatctgcaccataggctctcctgggtatgaagctcgccagcccattttgcagatttggacttggctggtctccacaatggtgtaagacaattcattataataaatctctttctgtatatctactcatcctgttggttctgtttctttgaaaaaccctgactaatatggggggccaaggagagaaatgtttttatgtaattgtctatgaaaaacaaaaatattcttgaatacttca

SEQ ID NO: 8199 - DNA, 805 bp, Homo sapiens
cttcattcctctgtgtagaaccctcctagggctttccattcctttcaggataaaatgcaagttctaggagtcctgccatccctggccctacccaccctttcccccacmcagtctcatcactgtcctctgtgctcaggaggccccagtcactccggtctcctttttactacatttttaagacttgcctaagtcatttccacctcagggcctttgcactcactgtttttattcatatgtcttcatcttcactactttaccttcagagactttggctggcttataggcaagaattaaacaactccaaaaagaggtagaatttttgatttcatgggtttgacatagatttactttccccttcattcttacccagttgaagccaagaacagtctgacaccttcatattagaaacagaggactgaagactggagacagaatgggacttaaagccactcacattttggggggcagaattgtctgaggatggactcagaggctgtgacttggacttgtgcagaaggaaatttaatctgaaccacttggacctgctgtatttaacaataacatagttatagtaatgaaacttccctccttcccctcccttattttttctttgcttgtaactttgctgaggccaaggttgtatatagaaggccacagacaatcctgaatttctcttccatttgcattatcctatttttctttgtaataaaatattctattttgaggccaaaagagggtaatttgtaatttatgaatttctctcttgaaattacaactagaacctaattttaaaaatcaaattggt

SEQ ID NO: 8200 - DNA, 805 bp, Homo sapiens
cttcattcctctgtgtagaaccctcctagggctttccattcctttcaggataaaatgcaagttctaggagtcctgccatccctggccctacccaccctttcccccacacagtctcatcactgtcctctgygctcaggaggccccagtcactccggtctcctttttactacatttttaagacttgcctaagtcatttccacctcagggcctttgcactcactgtttttattcatatgtcttcatcttcactactttaccttcagagactttggctggcttataggcaagaattaaacaactccaaaaagaggtagaatttttgatttcatgggtttgacatagatttactttccccttcattcttacccagttgaagccaagaacagtctgacaccttcatattagaaacagaggactgaagactggagacagaatgggacttaaagccactcacattttggggggcagaattgtctgaggatggactcagaggctgtgacttggacttgtgcagaaggaaatttaatctgaaccacttggacctgctgtatttaacaataacatagttatagtaatgaaacttccctccttcccctcccttattttttctttgcttgtaactttgctgaggccaaggttgtatatagaaggccacagacaatcctgaatttctcttccatttgcattatcctatttttctttgtaataaaatattctattttgaggccaaaagagggtaatttgtaatttatgaatttctctcttgaaattacaactagaacctaattttaaaaatcaaattggt

SEQ ID NO: 8201 - DNA, 1847 bp, Homo sapiens
aaaacctaatttaatcagatcttcagagtaatcctataaggccattttattattaccttgatttttctgataaaagacttaaggttctgagaggccacttgatgtactcaaggtcacagagcaagtaaatgtcagagctgggattcagatctaggctatataggctcaaatgtcaccatccttattttcttaggcctcactagcttttgatacacaagattacactcatgtttatgctcacaatacaatggcctaaatctacaacctccttagctgtctttacagcatcccycaataattttggcatattccgcaaaagtagcctcaaatgcttacaaacaactcaaccagttacaatactctggttccggttctctgcaaattatagcccaagtcacagcgaagaagctacctgaagatgtctttcatcatagttgtctcccatagaatccatgggaatgccaacatccctggcatctggtctctgaaaatccacaaggcatcagattcacacagaagtgagaaggacaacctgctctaatctgtacccacctttgtgcatggggcttcagagagtgcactatataataatgcctcaattgcaggaggttctactcaaacacagagtctaactcacagttgtgtttagacccttgctctccctctgtttctttcttcttgtcatggaattttaatcatgatatttctcatccagtctaatgcatcattctactagaggaaaaagtgtattactctcaaggatccaatctaatgcatcatcctactagaggaaaaagtatattactctcaaggaataatatgtgcagagatatgactccacctgcaacatagccctacagtagtagtttccaaatgcaggtatgtacaaggaccagggcttttccatgacaaagttgccatcaatccagtgcaaaattagaaaaaataatgtgactgtcatgagttagtaaaaaatcataaatttattcaatttgaaggatggacttttattctgaaattatatcctttctatatttttggaattatgtcttttataaaacgatgtaaataaaagatgttgaagtaccctaggttagtcccccaagcctttttaaatgctactggcctgtgaattccaaaagtcttgaacatctggcacacagcgtcttttacataacagtatcaagtaacttaacttcctaaatcatgggtcctttccttctgctttacaaagaaaagtttgccaggcacaacacatctttatttcatgtaaatgtgtgtgtgtgtgtgtgtgtgtgtgtgtgtgtgtgtgtgtgagagagagagagagattgtggtttctgctttacaaagaacatgtagatttgaagtgactggattttgtttcagttaaattttcgaacctctctttcccaaagaagttttgaaaatgtgctaggcaaggtgtattagtatgagtacctgccctcctctcggggtactccccaggaagaaagcttctcccaagcgtgtggcctgagaaaactcataagtgatggggatggatgtctgtttcctccttccatctggtaatcctgagagctgcgccaagctccctgcaacttctaagagggagatgttagctctcctgaggaatgctagttttagtgagataaggtgttttcttaagcaccttgtacatgttggataatcttctccctcagagagttctcaggaccacctgtgactctctagagaggttatcggtctgttagattaatcttgagtacttttccttcatcaaatactccttgactttcctccccagagctcacctttccttatggcagcaatattcttcccccaag

SEQ ID NO: 8202 - DNA, 786 bp, Homo sapiens
ttatcaccttcatagaaaggtactcaccatccatgtcaacagccaagccaacacgctgttgctccaataygtaaaaggcacttctgtagggctggcatgagtcagtcagttcaagacaacctgaaggagttgaataacatctatccagtgagtcctgcaagacttcaggccctttctcatccagcagctccctgctgagcctggaaaagtgggaaaaagtaaagaataagccagggggaatcagaaaccacacagccccagctagatttcatggctaacgtaaggaagagtttgaaaataaaaaggacagatccattaatgaggtaacaaattattgcctttatgttgggatagaacagggccaggtagaaaacaatgaaagagaaagacagagagagagagagacagagacagagagagagacagagacagagagagagaaagtgacctagtgaattggccaggtgacatactggtaagggagtaaaaggacactctgagttagtgccctcatgacacacagcaaactgtgatcatgaaaagagtgagctcaatagttttccataaaatatgctcaaaattcgatgcagtggccatgagagtacagcttttgaagtatggtcaacctgtggtacgttagtaaatgataaggggaggaagaaatggaaacctaaacatctactgcaatgaaaaccaacagcaatgacaggaggagtaattcagccttcgttgaaaacatgacatcaaacacactctggtttccctgaatctgttgcctccaggtgt

SEQ ID NO: 8203 - DNA, 786 bp, Homo sapiens
ttatcaccttcatagaaaggtactcaccatccatgtcaacagccaagccaacacgctgttgctccaatatgtaaaaggcacttctgtagggctggcatgagtcagtcagttcaagacaacctgaaggagttgaataacatctatccagtgagtcctgcaagacttcaggccctttctcatccagcagctccctgctgagcctggaaaagtgggaaaaagtaaagaataagccagggggaatcagaaaccacacagccccagctagatttcatggctaacgtaaggaagagtttgaaaakaaaaaggacagatccattaatgaggtaacaaattattgcctttatgttgggatagaacagggccaggtagaaaacaatgaaagagaaagacagagagagagagagacagagacagagagagagacagagacagagagagagaaagtgacctagtgaattggccaggtgacatactggtaagggagtaaaaggacactctgagttagtgccctcatgacacacagcaaactgtgatcatgaaaagagtgagctcaatagttttccataaaatatgctcaaaattcgatgcagtggccatgagagtacagcttttgaagtatggtcaacctgtggtacgttagtaaatgataaggggaggaagaaatggaaacctaaacatctactgcaatgaaaaccaacagcaatgacaggaggagtaattcagccttcgttgaaaacatgacatcaaacacactctggtttccctgaatctgttgcctccaggtgt

SEQ ID NO: 8204 - DNA, 608 bp, Homo sapiens
ccttccctgttcagatgaggaaatggactattgcagttagaggttgcaaagccaagctggggttgacccagccaggtaggtctctacccaggtgctcaaacgcagctggggcaattgaaacaagtcttgaaatcagttacagagattctttcttttttgtattttaccatttacctaactttacatgcaacttccttagttcagatmcaatgtttcattaaaaaaaaaaaaatctgggctggacatggtggctcacgcctgtaatcccagctctttgggaggctaaggcaggcagatcacttgagatcaggaattcgagaccagcctggccaacatggtgaaaccctgtctctactaaaaaaaatacaaaaattagtcaagcatggtggcacatgcctataatcccagctactctagaggctgaggcagcagaatggcttcaacccaggaggcagagtttgcagtgagccgagatcacaccactgcactccagcctgggagacagagtgagactctgtctaaaaaaaaaaaaaaaaaagtctgctcttctttagagcaagggtccccaacccccgggcctcggatgggtacaggtacatggcctgtta

SEQ ID NO: 8205 - DNA, 813 bp, Homo sapiens
caggccgagtgcagtggtgcaatcttggctcactgcaagctccgcctcccaggttcaggccattctcttgtctcagcctccagagtagctggaactacaggtgcctgccaccacacccagctattttttgttttttttttttcwatttttgtagagacggggtttcactgtgttagccaggatggtctcgatctcctgacctcgtgatttgcccgcctcagcctcccaactgtcttcctgtttttaaggaaaaaaaaaaaaagtgggtagaagatgaaagtttgatatttcgctcatgcatagctttgtctcattaatatattttgtgcttgcctgtcatttcagctttctgctgccagaccaagctcctttgactgccattcctacttctgacactcctcttgtccttttcaggacaactttatgcctattgtgccttggatcttgagaaatatgtggtaaaactggccagtggtgatggcaggcatagcagggaatcagattgaggggggctgccgggtgagagagaaaacaaaagagggaaacaggctacttgatgacggaatcaggctgcttctgcaatgacattacatgaaataatctgaaatacgatcttaactgtatctggtgggtcccgttaaccctgtaagttatggacagaacatttactcaaattgtagccaagtctaggctcatgggaacacgtgaccaattcaggtgaatgaaagggactttaaaacattaatttccagcttaggtcttcctaagactgcctgcatgttccttaacaccactccagcctgagtgtcacgt

SEQ ID NO: 8206 - DNA, 813 bp, Homo sapiens
caggccgagtgcagtggtgcaatcttggctcactgcaagctccgcctcccaggttcaggccattctcttgtctcagcctccagagtagctggaactacaggtgcctgccaccacacccagctattttttgttttttttttttctatttttgtagagacggggtttcactgtgttagccaggakggtctcgatctcctgacctcgtgatttgcccgcctcagcctcccaactgtcttcctgtttttaaggaaaaaaaaaaaaagtgggtagaagatgaaagtttgatatttcgctcatgcatagctttgtctcattaatatattttgtgcttgcctgtcatttcagctttctgctgccagaccaagctcctttgactgccattcctacttctgacactcctcttgtccttttcaggacaactttatgcctattgtgccttggatcttgagaaatatgtggtaaaactggccagtggtgatggcaggcatagcagggaatcagattgaggggggctgccgggtgagagagaaaacaaaagagggaaacaggctacttgatgacggaatcaggctgcttctgcaatgacattacatgaaataatctgaaatacgatcttaactgtatctggtgggtcccgttaaccctgtaagttatggacagaacatttactcaaattgtagccaagtctaggctcatgggaacacgtgaccaattcaggtgaatgaaagggactttaaaacattaatttccagcttaggtcttcctaagactgcctgcatgttccttaacaccactccagcctgagtgtcacgt

SEQ ID NO: 8207 - DNA, 792 bp, Homo sapiens
agcaggtcagttatgacaacttcatcactgtcattaaccccttttgtttgcagtgaacacaaaaagctgttcagtatcaagagagtcaagaaaaagagaaagaagagggggtagagaaagtgagacaaccaaagagacagccagggaacagaaattcatacactatgaacaccagaaaaaaatacccctgggtaattgagtcacctgactcaaatggtgtaggggcctcagttagaggatcaaattttggactccttggtctttctgccaaaacagtaattgctcatacttataaatacaaatgtttttgccatttggtttcctagaaatgccctagayggagatgttatttttggtaaggggtcttcctgcttcaagtataatgactgtgaacaactagtttcagtatcttctctagcatgccagggtaaaatgaagcaaaataaatagaggaagtgcttataatctttattgaggatctaccaggtgccaggaaagatgcatttttctttttcttttttttttttttttttttgtgagacagggtctcactctgtcacccagcctggggtgcagtggtgcaatcttgactgactgcagcttccacttactgggttcaagcaattcttgtgccccagcctgccaagtagctgggattacaggcgtgcaccaccatgcctgtctaatttttgtattttcaatagagacagggttttgccatgttggccaggctggtcttgagctactagcctcaagctatccacctgcctcggcctcccaaagtgcaggatt

SEQ ID NO: 8208 - DNA, 792 bp, Homo sapiens
agcaggtcagttatgacaacttcatcactgtcattaaccccttttgtttgcagtgaacacaaaaagctgttcagtatcaagagagtcaagaaaaagagaaagaagagggggtagagaaagtgagacaaccaaagagacagccagggaacagaaattcatacactatgaacaccagaaaaaaatacccctgggtaattgagtcacctgactcaaatggtgtaggggcctcagttagaggatcaaattttggactccttggtctttctgccaaaacagtaattgctcatacttataaatacaaatgtttttgccatttggtttcctagaaatgccctagacggagatgttatttttggtaaggggtcttcctgcttcaagtataatgactgtgaacaactagtttcagtatcttctctagcatgccagggtaaaatgaagcaaaataaatagaggaagtgcttataatctttattgaggatctaccaggtgccaggaaagatgcatttttctttttctttttyttttttttttttttgtgagacagggtctcactctgtcacccagcctggggtgcagtggtgcaatcttgactgactgcagcttccacttactgggttcaagcaattcttgtgccccagcctgccaagtagctgggattacaggcgtgcaccaccatgcctgtctaatttttgtattttcaatagagacagggttttgccatgttggccaggctggtcttgagctactagcctcaagctatccacctgcctcggcctcccaaagtgcaggatt

SEQ ID NO: 8209 - DNA, 583 bp, Homo sapiens
ggtattatcaatttttatactctctgtcaatgtaattggtagatacgtttcattgttttaatttgcatttaaaagattcatgaaatggggttttctataacatttttattttagtcatgttttacatattgtgacctgtactgtgtcgatatccttagctcagttttctattggatttttctttattctattgattagtaagattgtggtatattastgaaaatagccatttgtcaaatgttggaaatttttttgcttttaaaaaatatacatactctataccgtcatagattttttaaaattataggtagtcagatttttaaatctttttaatggtaacttgattttgttcttatgcttaggaattcctttccctacaagagtattatgaatttgaaagattttctgtcatcagtattattgtctaatttttattataatcaagatttataatatctaggaatgtttatttccttttctcttttttgttttcattgtgttcctagattttggtctctaatttggcatgtacaacataatcaaatagcctgaaaccttggcacattattagttactgtggatc

SEQ ID NO: 8210 - DNA, 992 bp, Homo sapiens
ggctgaggctggagatgtgcttgaaccaagaaggtggaagttgcagtgagtcgagatcatgccattgcacttcagcttgtgcaaaaagagtgatactccacgttagaaagaaaaaagaaagaaaaaaagaaagctatatagtgatatataatggccattccaggaatgccagccaatcacaggaaaatctaagtgtaattcagcatactgacaaactaaagggggaaaagcaaggttcgtacaaaatgcagaaaagaattgcagaaaaatcaaattaaatttatcataacataactgaacagcttaatgagttgacattctagcatcccattccctgtgacatccccagtggatggcacacagtagatgtccactaacgtttactgtgaaaaagaacaaaactatgtgttatggtctgcagagaaagcccaccwtcgtttcctacctgagcaggtgctccaggtgctctttgatattactgacctttcttatataatgcatctgggggtggtacaggcacaggaatggccaatccaagtcaggaatgaactgccattggccgctcacgtataattcaggctcataaccgaaggctaaaaagtgtgcgaagattgctcatctggctcaggtaaggggcaaactttcccgttttattgagagagcactttttccagacttccaactcctggatactgtctgggtatatcctttccaatagatttctgaaacttgaagtgggcattgagtaattctgcaccttactacaacacaggtgcactaggcctcttctgtagtggatccaccttcagaggtagctcaggcattcatccagtgtactttccttcaggcagaggtctatgaacaccttcaagggctggcactctcccatccttggacagtcctccactgtctgcctcttactcatggcctctggggagcaggggaggaccctgactccagaccatatggtccagaaattctcatcaacatcc

SEQ ID NO: 8211 - DNA, 1318 bp, Homo sapiens
tatatatatatatatacatgtgtgtggtgtgagcacctagaaagtgacaactctccaggacagagctggcctcacagattaacatggtytttcacttggcagggaaaagtaaaacgcctcgtgtccctggctgggcaaccccctcaggagtccagcaagaagacatgggatctgtggacaggaggctactgggcgaaacctctcattgaggattatgttaaaatttgcacttgagacgctgagtgccctatgtccttcccactcaccaaagaaccccagctgagccagccctgactcccagacacaagagcccagggagaagctgggagagagggagacccgctgtgacctcagggcatggaaggagccctgacctttttctccatgatgccttccccactcccaagtgcctctggcctgaagcttccagggacccctgcattccatccatgccctcctctgctccctccaacccagccttttctaaagccccatgcatttgtctccatgagagtgccccagtctcaggcgctcacagtgcctcagaagctcggggtccctgtgcctgcctggaggcagtctcactctatgtggccccatgtgtgttcttggatttctttctacacaaggtcacctgtaggtgtacagtagacacatcacttgtagaagagccaatggggatgggtgaggaccaggaaccctctcaggcacacacatggaaagagagagaagtgttcctggaagcacaggcctgggggtgggtgctagccccctgtgtctcctctaatcaaagaggtcagcgactttggccacagaatacacacccacttcccatgggttcacatccaaagaacaaactccttcagactccctggtccatgcactcgagatccccagggtgtcttgagtttttatcccagaaggagagagaaacaagctttcatcagctaaacaagaccactactaatactaatgtaggtattgacactaatactagtactactactaatacaagtgctaacactaccaaaagtactgtactaatatgaatatcaacagggatttttttttctagctgctcaaggaaatgtgtggagtcatcccctattttctttttattggagccactgtgtcagtggcgacagtggttaggagcctcctttgggtaaaaacgaggtaacttcagcccctgcttgctccactgtctgcctctccagggcctctgtgtcctgctgcagagtctagcctgttcttcacaggcacacattccttatggcacagagacacaccaataaaaaaagtcctgagagaaaggaag

SEQ ID NO: 8212 - DNA, 1318 bp, Homo sapiens
tatatatatatatatacatgtgtgtggtgtgagcacctagaaagtgacaactctccaggacagagctggcctcacagattaacatggtctttcacttggcagggaaaagtaaaacgcctcgtgtccctggctgggcaaccccctcaggagtscagcaagaagacatgggatctgtggacaggaggctactgggcgaaacctctcattgaggattatgttaaaatttgcacttgagacgctgagtgccctatgtccttcccactcaccaaagaaccccagctgagccagccctgactcccagacacaagagcccagggagaagctgggagagagggagacccgctgtgacctcagggcatggaaggagccctgacctttttctccatgatgccttccccactcccaagtgcctctggcctgaagcttccagggacccctgcattccatccatgccctcctctgctccctccaacccagccttttctaaagccccatgcatttgtctccatgagagtgccccagtctcaggcgctcacagtgcctcagaagctcggggtccctgtgcctgcctggaggcagtctcactctatgtggccccatgtgtgttcttggatttctttctacacaaggtcacctgtaggtgtacagtagacacatcacttgtagaagagccaatggggatgggtgaggaccaggaaccctctcaggcacacacatggaaagagagagaagtgttcctggaagcacaggcctgggggtgggtgctagccccctgtgtctcctctaatcaaagaggtcagcgactttggccacagaatacacacccacttcccatgggttcacatccaaagaacaaactccttcagactccctggtccatgcactcgagatccccagggtgtcttgagtttttatcccagaaggagagagaaacaagctttcatcagctaaacaagaccactactaatactaatgtaggtattgacactaatactagtactactactaatacaagtgctaacactaccaaaagtactgtactaatatgaatatcaacagggatttttttttctagctgctcaaggaaatgtgtggagtcatcccctattttctttttattggagccactgtgtcagtggcgacagtggttaggagcctcctttgggtaaaaacgaggtaacttcagcccctgcttgctccactgtctgcctctccagggcctctgtgtcctgctgcagagtctagcctgttcttcacaggcacacattccttatggcacagagacacaccaataaaaaaagtcctgagagaaaggaag

SEQ ID NO: 8213 - DNA, 797 bp, Homo sapiens
cttgagcycaggagttcaagaccaacctgggcaacatagtgagaccctgactctaccaaaggggaaaaaaaaataaagaaaaaaataataattaaaaaaaaactcttgttttgcttattctgttaaaaaaaaaaaaaaaaagggaggcagtggtcaaataatttggtaaacctcacatcctgtactgcatcttaaagattcacatgcctgttaatatataaaggatttttgggtgtacttcaatcccttctctttctcttattctctctctgcctgattccaatttaggacccttcatctgatacctgcaggtgagggatgggtcacagcagctgtaacaccatataaatgacagccccacagttctcttgctcacttatttcttaggttcatctattggagatgggaccctatgggaactgaatagctcagcttcaaaatgcatttcaaaactttttcccccctttttctcttttctctccagtctcaagatgtaaccttgaagcctactgcagaaacccttttttcctccttagtattaggacgtagccttgaaatgtactttatttgaaacaccgcgtctctccctttcttaccatacactcccttacaccatgcacatttatctaattgtacttggatctaattatgtgcttacttagaagttccagggtctaatcttgacataaaccagacatggaggcccagctgcaaaatgccagagattacctcaaggctgttagtctacaacccggccatcgttcagatgacatcagatcaccctgacagtcaccagg

SEQ ID NO: 8214 - DNA, 644 bp, Homo sapiens
ttaagtcacataggcagtaagcagtagagccaggttttgaatttaatctgatttggaagcccaggctcttctctgctactctgcttttctttatctacccttctaccatatctttcagtattgttttacacactctttagtgtaactatgactatctcaaatctatctcatcagtttggtctactgttcttyccactttagtttcctcaaatattgttttttatgctcttttcttttcttttgagacagtttcactcttgtcgcccaggctggagtgcaatggtgcgatcttgactccctgaaacctccgcctcccgggttcaagtgattctcctgtctcagcctcctgagtagctgggattacaggcgacccaccatgccccgctaatttttgtatttttagtagagatggggtttcgccatgttggccgggctggtctcgaactcctgacctcaggtgacccacccgcctcggcctcccaaagtgctgggattacaggcatgagccaccgtgcctggcccaattggctttatagcatcctgcctacaaaacagtcaccattcccttttatcttagcatatttgccactgctacatgctgttgctgcttttatctattgacactggctttcagggaggatcca

SEQ ID NO: 8215 - DNA, 816 bp, Homo sapiens
tgtggccacccagatcctccaggatactctcktgggttaaggttgctggtgagcggccgtgcccctgtgccatgtggcataacgcagtcacagcttctggggattgagacatgcagctcttcttgggaagtgagggtgagacattattttgtctaccacacatggccatggccaagatttataaaagtcagccgggtgcagtagctcatgtctgtgatcccagcactttgggaggctgaggctggtggatcacctgagctcaggagttcgagaccagcctgtccaacatggcgaaaccccatctctactaaaaatacaaaaattagccaggcttggtggcacatgcctgtaatcccagctactcgggaggctgaggcaggagaatctcttgaacccgggaggcagaggttgcagtgagctgagatcacgccactgcatgggcaacagagtgagactctgtttcaaaaaaaaaaaaaagatttagaaaagttcaaataactggggcagcacagggttgccactggggagctgcagcagctgcgggtgcaggaggtggtggactccatggtgaagagtctggagagagagaacatctggaagatgcattgtctcatgttctggtgcagcaccagctgttgtgaggacagtcaggcctccacggagcaggtgcaccagtgcatcgagtgccaccatgtgcctctggcttaagcccaggctttgatcaccagtgagctggagaagttccaggaccacctggtccggtgcaccacgcattgcaacgacaaagccaaagattcaatagatgctgggagtaag

SEQ ID NO: 8216 - DNA, 828 bp, Homo sapiens
gaaggctggagtgcagtggcacgatctcagctcactgcaacctccacctcccaggttcaagccatttttctgcctcagcctcctgagtagctgggactacaggcatgcmccaccatgcccaagtaatttttgtatttttagtagagacagggtttcaccatgttggtcagactggtctcaaactcctgaccttgtgatccacccgcctcagcctcccaaagtgctgggattacaggcgtgagccaccggacccggccggaattttagtcttttaagcaaagtttatgaatgaagaaatgaaggatggtcgtaagtgtaaagcatatgtcacttgcctctggacactggttcttttatgttttagtcctaaaaaatgaaacggaaaaaagtggtgctaaattgggtcagagatattacaggagagttttagagcttatatttcctgtggccagtgcttgtcctggcagtaaggatctcccctgtaacaagccagagcccccaaggcaccagactcttcttactacacaggtaccaacaggctggcaggttagagttggtggagtttgcagagagatatttcctcttcgttgccaacatcctgtttaccagaagtgtttctgcatcactttccataagctgtgaaacaaaatccatgaggtcactcacttagaagggaaaaaatgttttctgtgtctttgttttcctggttttgtgtaatttatacaagggcatacaagttgattttaagatgtggaattgggagggaaactcatttggataagaactttgaaaggttccttatcatttggataagaactttgaaaggat

SEQ ID NO: 8217 - DNA, 828 bp, Homo sapiens
gaaggctggagtgcagtggcacgatctcagctcactgcaacctccacctcccaggttcaagccatttttctgcctcagcctcctgagtagctgggactacaggcatgcaccmccatgcccaagtaatttttgtatttttagtagagacagggtttcaccatgttggtcagactggtctcaaactcctgaccttgtgatccacccgcctcagcctcccaaagtgctgggattacaggcgtgagccaccggacccggccggaattttagtcttttaagcaaagtttatgaatgaagaaatgaaggatggtcgtaagtgtaaagcatatgtcacttgcctctggacactggttcttttatgttttagtcctaaaaaatgaaacggaaaaaagtggtgctaaattgggtcagagatattacaggagagttttagagcttatatttcctgtggccagtgcttgtcctggcagtaaggatctcccctgtaacaagccagagcccccaaggcaccagactcttcttactacacaggtaccaacaggctggcaggttagagttggtggagtttgcagagagatatttcctcttcgttgccaacatcctgtttaccagaagtgtttctgcatcactttccataagctgtgaaacaaaatccatgaggtcactcacttagaagggaaaaaatgttttctgtgtctttgttttcctggttttgtgtaatttatacaagggcatacaagttgattttaagatgtggaattgggagggaaactcatttggataagaactttgaaaggttccttatcatttggataagaactttgaaaggat

SEQ ID NO: 8218 - DNA, 828 bp, Homo sapiens
gaaggctggagtgcagtggcacgatctcagctcactgcaacctccacctcccaggttcaagccatttttctgcctcagcctcctgagtagctgggactacaggcatgcaccaccatgcccaagtaatttttgtatttttagtagagacagggtttcaccatgttggtcagactggtctcaaactcctgaccttgtgatccacccgcctcagcctcccaaagtgctgggattacaggcgtgagccaccggacccggccggaattttagtcttttaagcaaagtttatgaatgaagaaatgaaggatggtcgtaagtgtaaagcatatgtcacttgcctctggacactggttcttttatgttttagtcctaaaaaatgaaacggaaaaaagtggtgctaaattgggtcagagatattacaggagagttttagagcttatatttcctgtggccagtgcttgtcctggcagtaaggatctcccctgtaacaagycagagcccccaaggcaccagactcttcttactacacaggtaccaacaggctggcaggttagagttggtggagtttgcagagagatatttcctcttcgttgccaacatcctgtttaccagaagtgtttctgcatcactttccataagctgtgaaacaaaatccatgaggtcactcacttagaagggaaaaaatgttttctgtgtctttgttttcctggttttgtgtaatttatacaagggcatacaagttgattttaagatgtggaattgggagggaaactcatttggataagaactttgaaaggttccttatcatttggataagaactttgaaaggat

SEQ ID NO: 8219 - DNA, 863 bp, Homo sapiens
ttttcattactctgaccataaaagttacatgaatgttaaaactatgttaaggattttggactttattatctggacagtgaggggggttttgtgtgatatataagcaaatttagttttgcctaataaattcaaattccatttaaagaaggttgttctgggaagtgcattaattggatggacttggatttgccaaatataacttgtgtgatcttagatcttcagtcacgaaactcttcacatacatttaatctcttgaaaaatgcagagcattaatgctgctttggccttccccacaaagggctatgtgaggttttcaagtgagatctgtgaaagtattctgtaatgtgttaagtacaatatgtatatcagtaagtcatgaatattagagaatattgccatagtaaggttgtgagtacatttattagatttttttttgctgaacttgtgaatcagatagacttttttatgaggatttatcataatttggctgacaacatacaaatctgctttacctaaaattaaaagagaaaaaagaatgggatggaaacaggaaaagaaaacaacaaaaaaactatggccaaatttgttagtgtggatgcacctgttagaagagctgmagagttttgatgatataagatcacagttagcagcagcgtgaactggtagaaagaagagtcaagggaggagacttcaaattccaagtatgtttttgactcattgtgtgactatgggaagacattccttagccttcaagaatctaaatgttgagctttatcctcagaattactggaatcctaacgatctgtgggattctttctgcaacctcaatatcacaaagtggaatctggcaatactggaaaatt

SEQ ID NO: 8220 - DNA, 863 bp, Homo sapiens
ttttcattactctgaccataaaagttacatgaatgttaaaactatgttaaggattttggactttattatctggacagtgaggggggttttgtgtgatatataagcaaatttagttttgcctaataaattcaaattccatttaaagaaggttgttctgggaagtgcattaattggatggacttggatttgccaaatataacttgtgtgatcttagatcttcagtcacgaaactcttcacatacatttaatctcttgaaaaatgcagagcattaatgctgctttggccttccccacaaagggctatgtgaggttttcaagtgagatctgtgaaagtattctgtaatgtgttaagtacaatatgtatatcagtaagtcatgaatattagagaatattgccatagtaaggttgtgagtacatttattagatttttttttgctgaacttgtgaatcagatagacttttttatgaggatttatcataatttggctgacaacatacaaatctgctttacctaaaattaaaagagaaaaaagaatgggatggaaacaggaaaagaaaacaacaaaaaaactatggccaaatttgttagtgtggatgcacctgttagaagagctgaagagttttgatgatataagatcacagttagcagcagcgtgaactggtagaaagaagagtcaagggaggagacttcaaattccaagtatgtttttgactcattgtgtgactatgggaagacattccttagccttcaagaatctaaatgttgagctttatcctcagaattactggaatcctaacgatctgtgggattctttctgcaacctcaatatcacaaagtggaatctggmaatactggaaaatt

SEQ ID NO: 8221 - DNA, 814 bp, Homo sapiens
gaggctgctacagcagcattgctgggggactctttctaaggtccaagtgctctaagaactctgagtagaatatggaaaactgttcttgactgcctggcatgttgactcttcctgttctatagactctgtgtttctggtcataggcatagtcatatgaagctcattccccaggacatgcagatgaatccttgcatgggcctttgatcctaacaaggcaagttaaattccttccctaaattgatgttatgaaaggaatgatctctctggtctcaaggaggcatggaaaaagtcatttgcaatgggaaagcctgagaatgacacatggagaaaagtagatttgaacaatggaaaaggtgactacatagtgaccacactgttcaagtgccctgatgcagctgtatcttaacccctggattttctttttctttttcttctcaaatccttagcttacttgctggctgtttacctactctgagttacagttctaagagctttgacagatacagtgtttctacaaaaaattctayggctagtggagcctgtatagacttaggtaacagtgaatgagccctgactccacccattttatatcaggataagttctctaacttatgtgactctgatcacgaagagcgtccactaggaaagacttgattatcttccaaaattgtctgcaaataaaggtacacaggtaatcccaaatttatcaaagttgctgtagccagggcaacactccttgcctttgcctgcctcaagctaggaggtgatggggactacaacccctaaggtgtcatctgcctttcaggggcaccag

SEQ ID NO: 8222 - DNA, 784 bp, Homo sapiens
cctgcccctccgtgggcctcagtttcctcatccagaaagtgggtttaacaaggccttcttcaagggttatttcaaggatgacacgaggtcataataagagagagtgttatgaattggaaaatcctgcacagagatcaagattaatcaacagatggattccttgttttatcccagaaacatttaaggtggcaaaatacgattattttccattcttataaatgatactaattgtgataggaggggtttggaggaagccaatcaggctggattccccccgcctcccagtcaccctagcatagtggtttgcaaaccttgctacaggctgatcctctggagctgtttwaaaaaaaaaaaaaaatcactgaccaagctttgggcatcggtgtttttaaaggctctccaggtgattgtgatgtacagctgtgctggagacccactgccacaagggcaatggcagtggcaatgggtactgacctggggccagccaatgagctctgggattccatgccagccctaaattcaggaattcctagaataagatatgcagatggcaatttaggggtcactcagctgccccacctcttaggtctgagactctcactcatgccaaggacattagggctttctcacaaggtgacctgtgacattttaaaagaagaggtaagagaggccgagcatagcccaaagcaaaggtgctataatgggggtctcatctgcagtgagcatccaggagcggatcactcactcagcagtccatcctgctgtaccttcgacatggcccata

SEQ ID NO: 8223 - DNA, 781 bp, Homo sapiens
cctcctcagctgccctggtcggcgagtgggggcacaggtggctcccggtttggaggaggagcaattaatttcggtctcctcccggcagcgggaggtgatttctccgtcaaacacggaagcctgccgtggccgcactgagggtgtgagtgctcggcttcccgtctgggtcttggtgtcctgtgagtcgcacagatcaggggctgcaagggagggactctgaacgctgccagggcagagcagggtccagcggggtccggctgggcggggacgtggctcggaggacttgggaatggcactgatcactgcccgctgcctgtcttagaaagcccagggagccagggcagtgtgggagacccaggagccccctgggaggtggcggggtgcagctggaccctggacccccgccgagagcgccctgggacgcgggctgtggtcacgtcccctgaggccctgggctgtgtccagcaggtctcaccctgggtttagagcagccggcaacctggcctggggctccccgctttctcccaggaagggaagcatgaggagtgtcagaggcagccagctccccgggaaagaaagggcagtgccctacccgtccacaccccgggagtctttcccccactgccttgaagtgcagtgactcccccagctggggcgccccaactgctctgctctgccccactctggaaagaccaggggcgtgggagaaagtataaacccagatgtggtttctgcgcrgaggctcagagcctgggtttgccctgaagcccttgccctgtgg

SEQ ID NO: 8224 - DNA, 829 bp, Homo sapiens
cttgaacccgggaggctgaggctgcagggagctgtgattgtgccaccgcactccagcctgggcgacagagcaagacctcgtctcaaaaccaaaccaarcaacaacaaaaaagaaaccttgttaggattagacttgagttgttttttccagcagcaaaaggggtcagtgaatggaagtggaacggcgcagaggggagtgagcaaccgggccaggaagtctgtgtctcacggagctgacctttcagccctgagggagagccactgccaaggagctttcctgtgaattctggaggctgcagcccagcgagcccgacacggtcgccagcatgtttcccaagctcatttctcgatactcagtttgtgagtcccgggaactatctaatagggcaacacaactggtgggtgcagaggccctgcaggcatcggcatagctgcagggtctgacggatgcaggcgcgtgcaattctctatgttggctacaacagaattatggttgaaaaagaggccgggcgcggtggctcacgcctgtaatcccagcactttgggaggccgaggtgggcggatcacgaggtcaggagatcaagaccatcctggctaacacggtgaaaccccgtctctactaaaaaataaataaataaatacaaaaattagctgggcgtggtggcgggaacctgtagtcccagctacttgggaggctgaggcaggacaattgcttgagcccaggaggcggaggttgcagtgagccacgatcatgccactgcactccagctgggcaacagagcaagactgtctcagaaaagaaaaaagaatgagaagagaggcttctgaca

SEQ ID NO: 8225 - DNA, 801 bp, Homo sapiens
aagttttattaccttttgtgtccagaattcccagcacagaatctgacacagtgggcacttattaaatatttattaagcaagcgagtgactgattgcttctcctcccaaactcaggccactcttgctcaggacttcaagggatttcctagaggaccagcccatcattctctagagttcagcccaaaccctctggtgttctgcctccatccctgactggtgggtgagattcttggtgtcctggtgtccccgggctcactgttgcccgcaccccatcactggtatgtaacttccccctatctgcagctgctccagcgggaactaccatatgattgcttcatttccagggggtccacacccctttcctgtgctcccctcctatccactccctgctggtggagggggaaccacaggacttgctggaagacmctgggaggaaagggctctttgctaaaccggcttagtggagggctctcacctcatgtctcctacctggcacatctcgctgagcctgcaattgtacacaccaggtacatacagtgagtctttgcaaaaggaaggaaggccagggctgatttggcaatgcttgtcaagagacactcatatcctttgacctaataattccactcctgggaattgcttccagagaaataattcaaaagaaggaaaaagatacatgtactgtttatagctatgttatttgtaataaggagaaagtaaaagcaaatgctgtgttccaaaatagaaaaatgattaaataattatgatatatttgtataacagagtgtcgtgaagacatttaca

SEQ ID NO: 8226 - DNA, 2285 bp, Homo sapiens
tttattttatttatttaattaatttagttagttattttagagatgaggtctcactatgttgcccaggctggtcttgaacttctaggctcaagcaattctcctgccttagcctcctgaataactgggactacaggtagaccaccatgcactgctattttttttttttttgtagcgatggggtctcactatgttgcccgggctgatcttgaactcctgggctcaagtagtccaccctgcctcagccttcaaagtgctgagattacaggtgtgagccactgtgcttggccccttgttttaaaaataagaacatgcctcatgcaggccttcccaatgcatggctgtgggttataaattgcttgctgtggaacctgcagcctgattaacactaaaagcacttaaagacatgtgcctaatggacaagtaattctgttgcctctacccccttctctctctctttttttttgagatggagtttcactctttttgcccaggctggaatgcaatggtatgatctcggctcactgcaacctctgcctcccaggttcaagcgattctcctgccacagcctcccaagtagctgggattacaggcatgcaccaccatgccaggctaacttttgtatttttagtagagatggggtttcaccatgttggtcaggctggccttgaactcctggcctcaggtgatccaccctccttgtcctcccaaagtgctgggattacaggcatgagccaccgcagtggcctctacctgcttctctacctggctaacactaccccaggttttgggcgatgccccrgaagttccgaggatcctatttctcttgaggcatctactccctgagcttgagaaagagctctggaaaggagggggtcacacaaaggagagtcctggggatgacgcctaggcaggattagaaactcgagcatcaggacaatagctaatgcatgtggggcttaaaacctagatgatgggttgatagatgcagcaaaccaccatggcacatgtatatctatgtaacaaacctgcacgcatgtatcccggaacttaaagtaatataaaaagaaaaagaaaaagaaaaagaaaaaaaactctaagtctcacacaaaattgagtctttctacttcttttttttttttttttttttagaaaagtgttagcttatggtcggctataactcccaagccctctttcactgtccttagtcttcctggcattcctcaaatgtgagggctgtcccgagctgtctttggcctgcttctctccttatagccgctgctcaccacccaggcctgtggtgaaccactgctgcgcgaatgaccacccagctgcgccttggcccaaagccctccaaactccacttctgaatttccaacagggtgtcctgtcaatgcctcaaccaaaactcagcctcttccgcacccccaacgagtaaaattctccatgctcctagatggaaaacacagtcattctgatcactttctctctaactctgcccctgtgacagtctccaaccaaataccaaatctgcactgtggattcttcccgcagttggtttcgcagcttcattgcctttccattctcaaggccacctctcaccggtgccttggcctctcaactggtatttcggcttctagattaattaatggccctccagtgctccttccatcccttccatcccgtgagccccactctgcaaggaccctcatgacagactgagggaagcaggcagcatcagtgctgtctccctaacgtgtgcaccacctcactgcatccagtccttccaacagtgtttacccaccctctccccatctgctgtgcacacacatgtgcacccacacccacacatgtgggttaagaggtcttccactctagtcgcttagggcactcacagttccccgtgggcatccttcatttcttctcatcacactagcttctcaccaccatccccttctttgccccttcattattaccatctgtttaaaaaaaattcttcctagtttttggtggccactctgatgtcaccctctcccaataagccttcttcagttgaataagttgagaatgttctttctctgtgaaattccccagcctcgtggtcttgttgcttatataacactttagcatatcctgtgtcctgctttatctggggacatatcttatctcttggcaccaccaccactaaacctccagcttattgagatactgtctttatattttactccctccaggaatccagacagcatctgtcatacagtaggcccaataaatatttgtggaacaaa

SEQ ID NO: 8227 - DNA, 794 bp, Homo sapiens
  misc_feature (1)...(794): n = A,T,C or G
tcccgagctcaggccgggcagaggccacggaggaagcagcccccgagggtcccggcagccccgagaccccgctgcagctgctacgcttttcagagctcatcagcgacgacatccggcggtactttggccgcaaggataaggggcaggacccagnnnccnncgacgtctacgccgacagccgcccaccccgcagcactgcccgggagctctactatgcggacctggtgcgcctggcccgtggcgggtccctggaggacgaggacaccccggagcccagggtmccccaagggcaggtgtgcaggccgggcctcagcggggacagggcgcagcccctgggacccctggccgagctcttcgactacgggctgcagcagtactgggggtccagggcagcggccggctggagcctgacgctggagcggaagtacggccacatcacccccatggcccagaggaagctgcccccatccttctggaaggagccgacccctagccccctgggcctgctgcaccctggcacgccggacttcagcgacctgctggccagctggtcaaccgaggcctgtcctgagctgcccggcaggggaaccccagccctggaaggggcacggccagccgaggcctagcgaagcgccggggtcagagctagctggcggcagcagggccacccctaaggcactggactctcctcccatcctcctgggaagagcctcctccgtccctcgcggccaccacagggcaaacccagaggtcaccagggctgggctgcagtgggagcagcaagggtggtgccc

SEQ ID NO: 8228 - DNA, 772 bp, Homo sapiens
gttttgctcctattccccaattcactaagagtcaccaccatccacccacaccctcaagccaaaacctaggagtcctcctagattcccctctcctccctccacatcagcaagttctgttggttccactcccagatagagccttttctctccatcacaagctccctggtccaaaccattattgtctctctcaaatcttccaaagctccccctccattcccwttaccgtccctatccccactcactgtccacatgcagacagaatggactttctgaaatgtgaatcagattctggcatcgcctccagtttactagactccagccagcagaccaaacctcatctttgaccatgtcaagcccttgtgcacatactacggactgtcccctgtcagaatgaatggtggttacatcctcttcctttagatctcaactcaaaggtcgcacttccatggactttttcaaattaggcacccatatctaaacaaacccagccaactactctatcacatcaccatgtttttttttccttcttagcatttctgtaagataattggagagtctgatatttatttattgttcgtctcttccaccagtataagttacataaaagcagagattgtgtttatcttgatcacagccaaatccctagcatctggcatagtgtcagctcagagaagacattcaaaagatatttttgaatgaatagataaaaccatttcttctttaaaaaaattactgtaaatgtggctactacaccatgaaaatagaccaagaa

SEQ ID NO: 8229 - DNA, 772 bp, Homo sapiens
gttttgctcctattccccaattcactaagagtcaccaccatccacccacaccctcaagccaaaacctaggagtcctcctagattcccctctcctccctccacatcagcaagttctgttggttccactcccagatagagccttttctctccatcacaagctccctggtccaaaccattattgtctctctcaaatcttccaaagctccccctccattccctttaccgtccctatccccactcactgtccacatgcagacagaatggactttctgaaatgtgaatcagattctggcatcgcctccagtttactagactccagccagcagaccaaacctcatctttgaccatgtcaagcccttgtgcacatactacggactgtcccctgtcagaatgaatggtggttacatyctcttcctttagatctcaactcaaaggtcgcacttccatggactttttcaaattaggcacccatatctaaacaaacccagccaactactctatcacatcaccatgtttttttttccttcttagcatttctgtaagataattggagagtctgatatttatttattgttcgtctcttccaccagtataagttacataaaagcagagattgtgtttatcttgatcacagccaaatccctagcatctggcatagtgtcagctcagagaagacattcaaaagatatttttgaatgaatagataaaaccatttcttctttaaaaaaattactgtaaatgtggctactacaccatgaaaatagaccaagaa

SEQ ID NO: 8230 - DNA, 790 bp, Homo sapiens
ctccgtgccacatggattcccaggtcatgagggtaacttgctgtgagtcccctgtccactgaggagctgagggatagcactcggagaattcataactgggccctgccctggtcctgacagagggttgtggctcaaggcttcctttctctgggccttcatttcctaatctgccataccttcaayacctttctgctttgctgggtgggaaatctggatctacccgtgttcttcctatgtttcctgtacaggcggtcaaacagtgagcaccactgattcctcaaccagcaaccgggaaagcgtcaagtcggaagatggggatgacgaagagccgccttaccgaggcccgttctgcgggcgtgccagggtgcacaccgacttcacccccagtccctatgacacagactcactcaagctcaaggtatctctctccctggcctcagagcagctaactgggctcttccatttctctaggaggctttctttcctcctcactgttgaatgctgggctactatggtacagactggacagtatcttggctacctcgatcactggtctcctctgtagtgaaaaacagaacaagaaccagccagccctcgaggcagagggagggtctcgtgttaatccctgggttagcatcacttcacccctctgacctcagcttccctctagaattcctgttgcacaccctccctctccccacctggctcctgctccacacacctggtttctgtgttttctccatctgaagaaagatttctgccttctgtgtgctcagaggtacctttatgg

SEQ ID NO: 8231 - DNA, 699 bp, Homo sapiens
ccaccaggaggcgtcggaaaggacgaccaccccagcccaagtctgtggaggatctcctggatcggattaacctaaaagtcagtcgcttctgattcttgtcacacgctactacctcactgcctttttctctcctacactaagcaagtgagggcatttttagggtagggttggggctgatctgtgtggtccaataagggcagctcgttactatgatgagcattcattattctacagaaagagttagttagttaccagttttccaacactgcccttgacctcagctgtgggtgatagcgtaagccccgggtcaaaccttgctgctggaagagctgtaggcagaaactcctggcaccttgatcgcagctagctccacaggggccacaaggaaactctgcgcccacctctctcccaccatcactccargcatctactagcatgagtctgcaatgagagattatgtttcctctttgcaaaactcttgatcctgaggacttaaaagctggattttaatagctctgtaagtggaggaggagtctcctctgttgtgggctctgtggaggtaaaggaattagctcttatcaagagtacaattatagtgcaagccagcagaatccatcacagcctgcaatgtacatcttcctaacccatgattaataaaacaccctgcttgcctactaagccagagggctgggatgtaca

SEQ ID NO: 8232 - DNA, 807 bp, Homo sapiens
taagagttcatgtttctctgtggccagcttagggttagggcttcatgaaagggtacaccaaaagctcctctcaggtttccccttgaagaaatatataaattaagaaactgagaaagcctcacaatgggaaaattgtgactcttccatcacgaatttttcagatctgttgaactgcatgacttccactcagccctgacgttcgtggatgctgacatcgtttttacaagcatttgctgcctgracatagagacaatcattgacatctacatggcatagcccatttttgttccagaaagagccaaagttacgatgttttactcatccatatgtaacctatgtgaaaatagagtatcctaagactgatggagtggactctgtggcaataagataccaaattataaataagatccaaggccatgcacacgcctctacacttaaacagtaagctctgttctgactgccacaaggttcttcttcttctctagcagctaaacagcactggccacgagataagcaatatcgaaacaattgcagctcatctgctgccggacgctgactagttgactccctgttccaccagccagaactaaagctttgactggacaagaggctgatttcagtcactttctccttcatgtgccttcatgtgtttgcttcaccttttgatgtgtaggtcctaattgcaatgcatttaaatgtttgatctccaccccaaagcgaggatgcccatgtgacacgcacgttagcttactatgcatgtgcacgcccaccttcatgaccgtccgtacctcctcctataacctgctg

SEQ ID NO: 8233 - DNA, 807 bp, Homo sapiens
taagagttcatgtttctctgtggccagcttagggttagggcttcatgaaagggtacaccaaaagctcctctcaggtttccccttgaagaaatatataaattaagaaactgagaaagcctcacaatgggaaaattgtgactcttccatcacgaatttttcagatctgttgaactgcatgacttccactcagccctgacgttcgtggatgctgacatcgtttttacaagcatttgctgcctggacatagagacaawcattgacatctacatggcatagcccatttttgttccagaaagagccaaagttacgatgttttactcatccatatgtaacctatgtgaaaatagagtatcctaagactgatggagtggactctgtggcaataagataccaaattataaataagatccaaggccatgcacacgcctctacacttaaacagtaagctctgttctgactgccacaaggttcttcttcttctctagcagctaaacagcactggccacgagataagcaatatcgaaacaattgcagctcatctgctgccggacgctgactagttgactccctgttccaccagccagaactaaagctttgactggacaagaggctgatttcagtcactttctccttcatgtgccttcatgtgtttgcttcaccttttgatgtgtaggtcctaattgcaatgcatttaaatgtttgatctccaccccaaagcgaggatgcccatgtgacacgcacgttagcttactatgcatgtgcacgcccaccttcatgaccgtccgtacctcctcctataacctgctg

SEQ ID NO: 8234 - DNA, 807 bp, Homo sapiens
taagagttcatgtttctctgtggccagcttagggttagggcttcatgaaagggtacaccaaaagctcctctcaggtttccccttgaagaaatatataaattaagaaactgagaaagcctcacaatgggaaaattgtgactcttccatcacgaatttttcagatctgttgaactgcatgacttccactcagccctgacgttcgtggatgctgacatcgtttttacaagcatttgctgcctggacatagagacaatcattgacatctacatggcatagcccatttttgttccagaaagagccaaagttaygatgttttactcatccatatgtaacctatgtgaaaatagagtatcctaagactgatggagtggactctgtggcaataagataccaaattataaataagatccaaggccatgcacacgcctctacacttaaacagtaagctctgttctgactgccacaaggttcttcttcttctctagcagctaaacagcactggccacgagataagcaatatcgaaacaattgcagctcatctgctgccggacgctgactagttgactccctgttccaccagccagaactaaagctttgactggacaagaggctgatttcagtcactttctccttcatgtgccttcatgtgtttgcttcaccttttgatgtgtaggtcctaattgcaatgcatttaaatgtttgatctccaccccaaagcgaggatgcccatgtgacacgcacgttagcttactatgcatgtgcacgcccaccttcatgaccgtccgtacctcctcctataacctgctg

SEQ ID NO: 8235 - DNA, 808 bp, Homo sapiens
taatgtactccaagccaattctaaatgaagcatgatgcagccaaatatgaaaggagctcattattgatacattttatggaccgaattgtgttctctggaaaaggtagttgaagtcccttaatatgtgaccttatttggaggaataggatcttaaagaagtaatcaagttaaaatcacgtcattcaagtgggctctaatccaatataactgatgtctttattagaaggttaaatttgaacagagacagatgtgcatagagagaaggttgtgtgaagagacacaggaaggagacggccatctatttggaacagagcttcccttatagacctcagaaggaaccaactctgataccttggttttgggcttccagactccagaactgtgagacaataaattcctgttatttaaggctcaccagtctgcggggctttgccatggcatcctaagaaagtgagcgtgaaacttaattcatcagtacggaaaacatcttggcagtttaaccrctattgtaatactcatgtattgatacgtgtttcagaatttttctgctctcttcctcagtatgtatgtacagcaaaagcttcagagagaaactccaggccatgcaaactcatgaactaaactctgggagaggtgctggtgatgacctggaagggaaagatgagtgtttggcacaggacgggaccgaccgaaagtggttgtgtgggagggtttgatggggtggctgctggttgttgttgggagaggaggggcaggtgggttctctcctctggcaaggccacgggtgtggtctggcttggagcaggat

SEQ ID NO: 8236 - DNA, 639 bp, Homo sapiens
ttgaaaaaaaaaatgggcaagttgcttaacctgattatgctttagtttcattactggcaaaatggcaatcataatatcctactgcaggggttctagtaaagactgagatgccacatggaaagcatttagatttgtgcaataaatgtccactggtatgattatatgagtacagacttcatctggtacaattacaccgtctcctgaatgtgatcaacaaaactttgccatctctaaaaccactggcttcctaaccctgcctccatgataaactctttaatggtgggaacatttgtacctctttatacgttctcgtgcctgtataattacctttttaaaattaaacttttaattttgaggtaattctaggtttatatacagttataagaaataatacagaatgatcccatgtactcttcacccaatttttttccagtggaaacagtttgaagaactrtagtacagtatcacaaccaagatattggcattgacaagatcgacccatcttattcagtttctcctgttttacttgtatgcatttgtgtgtgtgtgtgtgtatttagttctatacaattttatcaccattgtaggttcatgtttccacttgacagtcaagacaccaaacagttctatctttcatga

SEQ ID NO: 8237 - DNA, 813 bp, Homo sapiens
ttaaaaaaatgatctttaaaatttgggtgaagaaagtcaacataaaagagttctaaatgaaaatgtgttgtcagatgagttgatgaagtagacaaaagtgtatcagtactcagcaggttctcctttggcagcctaataagtgccccaggattttccaaaacacaaaaatatcatttgtttatgtacctgtgtgtatccctctatttccaaaagtctaaagagaacaaaatagcatggatgggtaatgytgaagaagaggatgcttcatcctagtctagattgtaggaaaaattgttcagaatcaatttattctttataaagataaacctccacgtgctgccactgtcaaggtcttcttgaatagtctgcctaaatggtgtttcatctatcttgttttgaaaaacaattttttaaattaggatggtatttttgtctgaatgcctctacttttggtcatgttagtgatactatttttcgttgtatcttggaaatgttttaaaaagtgaacaaattttccatatagcaacttcacgctccctatagtccatgaagacaagactcttgttaatggaaattgatttttgtgtaggttacatacaagagttgtgtacttccctccatacagttactcacttctgagtataacctgagagactcatatccagatgtgtgcgtagaactacatggaaatgctaatagcaactgatatttgaaatgctagcaggctaatttcactcagattgaatgtgattcacaaacacctttctgtatcattgcctgctcccacccccaacaaacaccttaactgtattc

SEQ ID NO: 8238 - DNA, 787 bp, Homo sapiens
acccacaggccatcctcgagatgaactgtagaacaagcccgggtcaagcgagcctccttggaagacatttgttagcctagaagatgttgaatcccttgggagcccacgatgggcatttcactcctacagatccgtgagtgagaaccaggccacaagatcacccatgtgacctatgatgcaatgaggagacaggctccactgtgcttaagtgtcccttgcaaatagaagccagaggagccgcactcagtgctatttattcaccctatgcctaaggtcattggggaaggtcccagacaccttgtactggcatacttgatgccttggaggggctggctggagggctgagctcagctgggcctctgcacctctccaaggcccctcagagcatatcactgtggtgtctccagcaggagaggtgggcttctttcgtggcagctcagagctctcagacagccaggcagaggccattctagtcctctgaaaggttacctctgggacaggctaacgtccaccattctccatgtgtcaaagccatcacaggcttgtcgggagcccagagggaggggcaaacagatgcgaccaatgggccaacgggaagagcattcaggaatgagcagtctttctgagatgcggcctattcagcatacaattcttgagatgctgctgggtggtacacatggagcatgtgcataaaagaagaggtgmtttactctctgggtcaaagcggtaggctctctaatggttttaggttggacctatcactatagggtgacctctcccatttagt

SEQ ID NO: 8239 - DNA, 2043 bp, Homo sapiens
cttggtagcccaaccagataagagtcatgaattgattccacattagcatgcagcaggcatgggaaaatgataaactcctattaccactgtcatggcaactgaaaaaatggctgctttggggggaacaaggtccacaggagaagaaaagcgaagccccgtctctttcttctgtttgacatctgttgtttaacatacaaaattgtattatcgtgacgcaagcgagtcagccagggctaaagcctggctaggaattgtcaaaaccatactgccccaactcccattcccctctctctaccatgagagtatataatttgaccccggacatttccacgaagggcagtaaattcccctcccttttcatcccaggtacaaaaagcgtgaagtgccttgggaaggtggaatagagggaggagggtctttttggggggtagtggagaagggagacatgctatcaattatgaagcaaaaataaagctcttctccgtttgcagttgcttctctaaatgattcattcctccctcctcccttcccccaaccttccctcaagaacattttagatttttcttttatttatttatttatttatttttgagacagagtctcactctgtcacccaggctggagtgcaatggcccagtctcggctcagtgcaacctccgcctcccaggttcaagcgattctcctgcctcagcctccctagtatctgggattacaggcacatgactggctgatttttgtatttttagtagagatggggtttcaccatgttggccaggctggtctcaaactcctgaccttgtgatccgcccacctcagcctcccaaagtgctgggattacaggcgtgagtcatcgcagccagccctagatttttctaaaacagcaatttgagcggggcttgtgaacacagacaaaacatgagcagataggctacaagcagggatggcagccttaggcgcagggctgaaggttgaaaatcctgattgcaggtcattgagaaaaggctagaaggaaacacacctgagtgctaaccaggagttggacaagaggtggatttttatttccttcttaatatagcccttttcaaaatgtttaataaagtacctgtgtcagtcactctcatactcagcagaaatatccaataagctttcggaggtccaggaatgggtctcaaaggagctttcaaagggtctcaaagatctcaaagtttctctcaaaggaggattgaggtgtagatgctcacacaaaaattctgttcggcaaatttccatatgatccaaacatatcacttgaagcaaatcctttgcatataaatataaatatatacaaatttatttgtatattatatataatatttatatatcatgcattatatttatacattatatattatattatattatatttatatatttatattatatattatatattatatttatatatttataatatataatatataatatataatatattatattatatttatatatwttatattatatattatatattatatattatatttatatattatatttatatattatatattatatttatatattatatatatttatatagtatatacatattatagatttatattatatataaatttatatatttcatgaaatttatataaatatataaatataaataaatatatatatttcatgaggacatttaaatgagtgactttcaaacacgcttcacttcccacctccccacagttgtgtaaccagaacaaacctagtaccattttgggttgttttcacaacacagcctttaaacagctgtgaaagattggggccatcctaaaatggactaaattgtaatttccagtaagagtgagattaagccccttgataggacaagatcagataagtgcaaacaaaagcaagaacatttatataatcaatctcggccattagcaaagttagcattttaaggtggtaaaacaaaaaaggaacctcttggccaaacccgcaccccatgtgcagtttggaacttcccagtttaaagactatcatctttaaata

SEQ ID NO: 8240 - DNA, 870 bp, Homo sapiens
tagggtaatagaggttgctctctgtgtcttctgaaccctttgttcatcttcctaggcaggacagcatctctctttcactataaatggattttcttattctaggtgaatttgtagagattttatgatgaagaaattatttattacaaaagttactatttatartaaatacttactacaggccaagcattgtactaagtgctttacatatattacttcacatttaaaacaactatttagtgttactcatctcatttttgaaggagaaaatcaagcttacgagaagttagatctttcaaaatgtgactggtgaactaggaattgagctcaagtttttcttttgcctaaatttagtataatcatcgtgctcactgcttaatccaaactaccattatccctcaactaataagaggcttccaagaatattcagctcagctgttcactccagcaaatttcttcctgacatctaagaatactttttctctcatctgtaggtatggagcccaggagtaagagaatgtataaaagaacagatgaacagatttgaggtaggttggcaagaaggcagtaattgaaaaattaaggattggctgaggtatcttagggcaagaaaataaacccaaaatacacagacaaagcaatataaacattaaaagatctggtagaggaaaagatattggcaaagctacctggaaaagacacatcaaggaagccacagagtttcatcaaagaggaaatgatatagcaatatacagactgaaaatatgcatttggatggtttctatcagcaccattggtgacatgtaaacaggatttctgttgaaggaatggaccaaaaaccacataggcgtaacacacctccatgacctcctt

SEQ ID NO: 8241 - DNA, 788 bp, Homo sapiens
agcgatgccccaggcctgagcccccaggagaggaggctgcaggaagagggggcaggcaaagtctgtgtgcaggaggctcccttgccattcccaggagggcaagccgcagcctgggtggctagggagtttgagagcaggaagatctgaggatgtacatccctgcaatttgctttaaaattgaccagctggaagtgggagattcaggagaccmcccccccccacagggcccaggctggagatgacaaggacctgcattaagctgtaaggaaacaaagtaccccagggtgcagggggaagtgggagagggacagaggagcatagggaacattggcaaggagagcatatttgaggaggaagttggagtgctgtttgtgatgctgggcagagaggcttataacaggagcctgtgcgttcccccaaacttcatccctaactacttgttccagctcttctgtgactcctgaactatgactctagccttggcaccccaagcaaggctcataaatgtttcctagcatctcagaatcccaggggttttcagcagaaatcctgaagtagtccagctgttgctcatctcatttttggggggtacctcccactgtttgttttttttgaatgttctggttttgcttttgtctttacctggtctggccctgtcatccccagccccgagaaaaggtctccagaaccgctgagaggtcagggctggcccaggaccctcacagctcccagtgagatctgagcctggtacctgtgtcagcagcccatgtggggccccagccaagctg

SEQ ID NO: 8242 - DNA, 879 bp, Homo sapiens
taaggctgccatggctctggagagggagctccccaatgctggggcagccagcacatgggacagtgaaaccggtgcctggcccttcccctcccagcctgcaggccgattccaccggaccagccctccacacatccatgctgccagaaccatcagcacaccaggcaggcggcagggagcctatgagaggtcccacacagcctctgcatrttatttgtgagggtcttgagtcccggagagggggacaggacttgcccaaggtcacgcagctgggtggtgcataccgatgcaggtcttccagtcccactctggccttaggtaggcttttgtgctgggcctgtggaggctgagagagtccttgcaaaacagactcatctcagagagtcagagcttgtgggccccaagtccacaatggcatgaactgaccaatcagatagagtcttaggcctcaccttccctggggagggacctcattgaccacataggctgacgtagcatccatgaaaactttagctgatctttcctgcaggggacatgagcaggttcgctggggtgggccagagggtacttggggcaagtggagtttcagtctctaaacccctctatcgccctcaggcccctttcctgtcctaggagccatctatggctgagtcccactcctcccccaacccttaccaccctcacctcactatggtctggtgccagatctctgatccctggaatcacatttctgtctgaccaactcatatagcctccccttccgccccctccgacccaggctctcaggcgggctaaccgtctcagcgagattcagatttgtcaccctctgagcctcctgggcatggatgtcttggctatttagcaaaaagcatctgtgggtgg

SEQ ID NO: 8243 - DNA, 843 bp, Homo sapiens
atttgtgagcaagctcagttgttgtgggctrcattcagctacttttggactgttgaactaagggtctcaggttgttgccaactgttggccagaggccgccctctattccttgcaggtgggcctctcccatagggccactcacagcctggcaactagcttcaacaaagagagcaggtgatggaacaggagagggcaaacaagatggaagtcactgtctttactaacctgatctcagatgtgacatcccctcactcttgcccattctgtttgttagggacaagtcactaggtccagcacacactcaaagggtaggcgattataccagaatgtgagttccaggaggggccacatcagaggctgcacaacccagtttgtgacgtggacagttggccagcagcaggagggaggcagttttcaggccatttttgtcccatctcttagctctagggggaatttacattttgcataagattctcagtttgagggttgcaaactcaaatgcctacaggggcctggcagttaatgcaaatgaacaaacaggttgtgattttgagcagagttgcactttgcgtgtaaaacgtgctggagtgttcttcacttgacacctccacttcctgggaacacgtggaggccactgctcctcagccatcattgattgtggttatttgggaaaatgcacctggttttgtcagatgctcagtttttccacccattcagcagtccagatttgtgtgtgagaccgcacaatgttgacttaaatttggaaacatacatgtgctagttgaagacgacctgtgggtgggctgtgtttggctcaccggctgcctctctgcaacttcccct

SEQ ID NO: 8244 - DNA, 811 bp, Homo sapiens
gaccctgtgggaggggcacatccacttgggcactggtccttccccagtgaggtcaggagctctcagcaccgctcccactcgaccgtggtctatttttcagtgtggcaacatggcccgagaagggctgcgggtgctcgtggtggcaaagaagtctcttgcagaggagcagtatcaggactttgaagtaagttgttctgggacctttccattgcctttgcagccccacctgcctcccagtcactccttccaccatccctcatcctatgcgagccattctgatgtcatttctgggcacactgggttcactgttgttgaaggcctttgcacttgccgttctgtctgcctggaactctcttcacccacagagccccatggcccattycctcgcttcttttgggtctcagctcaaaagccacgtcctccaagaagtcttcctggaccacctgtctaaggctccttctcactttccatccatcataccatttcactttgttcattgcatttgtcactgtcatcgcgtgctaccatttggggccaaaaaatatgtctaggagttgaatctggagaggccagaagaatataaacttgaccctgttcatatatttttttttaacattcatcttatccatctcctttcgggaataaaatatttttgaagacagggactttacaagtctggtttgttcttcttattcttgttcttcttcttcttttttttttttttttgagacagagtttcgctcttgtcgcccaggctggagtgcagtggtgtgatcttggctcactgtaacctccgcctcccaggttcaag

SEQ ID NO: 8245 - DNA, 811 bp, Homo sapiens
gaccctgtgggaggggcacatccacttgggcactggtccttccccagtgaggtcaggagctctcagcaccgctcccactcgaccgtggtctatttttcagtgtggcaacatggcccgagaagggctgcgggtgctcgtggtggcaaagaagtctcttgcagaggagcagtatcaggactttgaagtaagttgttctgggacctttccattgcctttgcagccccacctgcctcccagtcactccttccaccatccctcatcctatgcgagccattctgatgtcatttctgggcacactgggttcactgttgttgaaggcctttgcacttgccgttctgtctgcctggaactctcttcacccacagagccccatggcccatttcctcgcttcttttgggtctcagctcaaaagccacgtcctccaagaagtcttcctggaccacctgtctaaggctccttctcactttccatccatcayaccatttcactttgttcattgcatttgtcactgtcatcgcgtgctaccatttggggccaaaaaatatgtctaggagttgaatctggagaggccagaagaatataaacttgaccctgttcatatatttttttttaacattcatcttatccatctcctttcgggaataaaatatttttgaagacagggactttacaagtctggtttgttcttcttattcttgttcttcttcttcttttttttttttttttgagacagagtttcgctcttgtcgcccaggctggagtgcagtggtgtgatcttggctcactgtaacctccgcctcccaggttcaag

SEQ ID NO: 8246 - DNA, 811 bp, Homo sapiens
gaccctgtgggaggggcacatccacttgggcactggtccttccccagtgaggtcaggagctctcagcaccgctcccactcgaccgtggtctatttttcagtgtggcaacatggcccgagaagggctgcgggtgctcgtggtggcaaagaagtctcttgcagaggagcagtatcaggactttgaagtaagttgttctgggacctttccattgcctttgcagccccacctgcctcccagtcactccttccaccatccctcatcctatgcgagccattctgatgtcatttctgggcacactgggttcactgttgttgaaggcctttgcacttgccgttctgtctgcctggaactctcttcacccacagagccccatggcccatttcctcgcttcttttgggtctcagctcaaaagccacgtcctccaagaagtcttcctggaccacctgtctaaggctccttctcactttccatccatcataccatttcactttgttcattgcatttgtcactgtcatcgcgtgctaccatttggggccaaaaaatatgtctaggagttgaatctggagaggccagaagaatataaacttgaccctgttcatatatttttttttaacattcatcttatccatctcctttcgggaataaaatatttttgaagacagggactttacaagtctggtttgttcttcttattcttgttcttcttcttcttttttttttttttttgagacagagtttcgctcttgtcgcccaggctggagtgcagtggtgtgatcttggctcaytgtaacctccgcctcccaggttcaag

SEQ ID NO: 8247 - DNA, 791 bp, Homo sapiens
tgagggacattcggagtgtggatacaggaaggtcccggggaaggagtccagccccttaccttccagggctgagtgaggagcataaacaccagacagaaacttcaggaaaactcaagagcgcttagccattgaagctgcaaaaccgaaagagaattcccaggcccacagggcacctgagtggttgggtagcagcagtcctgaggtacatgctctggtagatgggcttgagagaagcttcgcagggtgsggggatcagggcggcaaggacatggctacagtagcttgggggccagtggtcccgaaggggctctcccgactgggatgaagaggactaacaaagttgccccaataataatgtatgtcttgcagggcagtgcacgtcttcagaggtatcagcctaaaataatcaaaaaggtcagaatctggttttaaaagtttattcaagcacaatggttgagaatggacacccaggagcatagcttcaagttgccctgaatacgaacacacaaaggtggttctctcacagtacaaagtgatccctggtaccctagaagccaaagagatcaggtcatgcaatgcaaaagaaagccgagctttaggcctgagaggaagctacctgtccacgactcctcagactccacgggaagacagaagatcccagaaagggggtggatggcacttttttctgtgtttttttaggggcctgagtcactagaattcctctctagattccttcatatgctactaaagacagcaagaagaagcaggggcttgaaaatcagcttttaatt

SEQ ID NO: 8248 - DNA, 734 bp, Homo sapiens
ttagtcgagcatggtggcaggcacctgtaattccagctacttgggaggctaagtcagggagaattgcttgaacccaggagatggaggttgcagtgatctgagatcgcaccactgcactccaggctgggtgacagagtgagactctgtctcaaaaaaaaaaaaaataaaaatggtatatcttataactggaattgtatttatttatttttaactggcactttagatttgatgagtatagcaataacaatgacaatcacagttacggcttaagggatgcttattgatgccaaggccttcagtttttcacactactctatgaggcaggtgctacaactgttcccattttatagatgaagaaaccgaggcacaggtttgttaagcgatttagcctaggttgcaaagctgcaagtggtggaggggagaktcaggccccgagtctagcctagaagtatgctgacaggggtactgacctgaatgctggcacttgacatgaacctgcagcaaggctggcgtggggaagagctccttacactggtcacattcatggaacttcatatctgtgaagtgcataaagaaagacgtgctgggaaagaacaaatggttggctctccaaggctgaagagtaacagggctggggttggggcgatggccaatacttagcaagcatctaccaagtgccaggaatcttataacctatggtatatttgtacaatctagtggtaaagagcatgaga

SEQ ID NO: 8249 - DNA, 838 bp, Homo sapiens
agagatgagcaagacrtggtccctggcctcaggaaatccacatccttaaagaagatggacaggtatattaggacaataggtgggaggggagacaatttggacccacaacccctggctgggacatctgggaagtctccccagcagaggtggcacttgcgctgagtcttgaacgatgagtaggacactgcaagacaagtgaggaaagggtatttcagacaggggcaacagtgcttgcaaaaactcaagagtgtccatggaaggtagagttgctagataaaatagaagacacatgattacatttgaattttttaaaaataaatgttttagtacaaatatgtcccaaatattgcacggggcgtacttataccaaaatgtatttgttgttcatctgaaatttaaatttgactgagcagcatcctatatttgtgtttgctaaatctggcagctctaccaaggaagggggaaagagttagggatggcaggaacctaggaaacattagggatgttgcaggagagactgcaaaatggtgggtcatgaagggtctggaatgccaggctaaggagtcggccttcaccctgtgggcactggagaaggactttgtgtgagggaccccaaacttggtacaggggaacaaacacaagccctccctcatgggcttagagttaagggggcgagaggagcctcagctggaagttgagggggcatagcagaaaccccctcctgtggcacccacagcaagtgctctgggactgagaaggaagaggtgcatctggctgggatgtcaaggaggcttcctggaggaggaggcagatgatctggcttggcaaaagagacttc

SEQ ID NO: 8250 - DNA, 640 bp, Homo sapiens
gaggcctctgtcccatgagagggagcctctttggaagttgatcctccagccccagttgagcctcatctgactgcagccccagatgacagctcaacagcaatctcaacagatcctgatccagaaacacccatgctgctcccaaattcctgacccacagaaactgtgagataagaaatgtttgcttttaagctgctaagtgtcaggtcatttatcatgcagcaacagataactaatatacagataaataaacaccatcatttaaaattcagttcagtgcaactaacaaaagatgatatggaagcaagtagtggaggtaggagggataaaactgggaggttggtgaccttgtgggtgacattgagytgagggcagagtggtgggaagggggcagccatcagtgctttccaaccctagcagatactacacacccccttttataactgcaaggcctttgttagctgttctgaaatgaaattcataggtaataaaatcttcccacacacagttttaataagactacgaaggtgaaacaaaaggaatgcaatgtataatttgcaaattttatttcaatagataaatgctcagatacaattacactagaaggtgtaatgaagcaggcggatgctggaacctaaaagtg

SEQ ID NO: 8251 - DNA, 792 bp, Homo sapiens
ttcctgaagagggagcagatcttaagatctggggtaagatcttctctcccccagaagcctccctcaggctgtggaagccctcttactacaacctccacttcacagtctcccttaggctgggggagccccctcactacaaccccaccacttcatggtctccctcaggctggaggaaactcccagaccactgcccctccctgcctctacgtgcccctctggaggagaagggcctccctagcatctctgacttgaattttggctgctgcctcttgctgaagtcctccaagatcttctccccattcacccggagcaccttggtggtgatggcagccatatctcctggctggagcttgaccacggtgtggtcacaaggccctgtgaaaaggggagagcagggcagacattgccatggacccaggcatcctgcttatactgctggcagaaaacagacatctgccacactctcaccttcaggcaggaacagcttgaatcccacgaggtcatctggatagggcacctctgcagtggctggccccctgtyctgtgggtcctgggacaagggcttatcacacaagaccagggttgtgaatactctgctggtggagttcgaggagacctgggggtggtcagagaggccaggagaggggggtgtgatgagtagacatcaaaggcagagaccagatacccacccttgggcaggaatcaggaagcaaccatgcagagctcaccagtagagaggggcaaccaagtcaagcgatcagagcagacttcttggggtggtgggaggaagga

SEQ ID NO: 8252 - DNA, 657 bp, Homo sapiens
gcagcttgaggctattattttaagctaagtaacacagggaaagaaaatcagatacttcatattctcacttataagtgggggctaaacgttggataatcatggacataaacatggaaacaatagacactgaggactactagaagagggagaaagggaagggaataaaggttgaaaaactaactattggatactatgtgcaacctgggtgatgggacgaagcctcagcatcacagaatgtacccatttgtgtcctaagactcagcatcacagaatgtacccatgtgacaaacttgtacatgtaccccccaaatcaaaaagttgaaactatttaagaaataatatttgttatcttttaaatctcagttttaatttttataaatagtctggtttctgcatatggcctgaacataggtgaccaaatctgctctgtaaatctccayataccattttgataatctatttcttattctcctcattctttctccttagtctgaatgaggaggtttgtgaactagcccaagagctcctcagggtcaagcctgctaagtaattgaggtatctcagtttggtatactggaagatttctcttacttggttgttgttttgttctgagtgtcagggaagataactcagtctcctagctagaacagagaacca

SEQ ID NO: 8253 - DNA, 756 bp, Homo sapiens
  misc_feature (1)...(756): n = A,T,C or G
ggaggtaggagatgaggacccaggccgcgcaccccctccgagaacacctgcacctgtctgtagctgctccccctttgctcagccttccccacccaccctcctaaacaaaacccaaaaaccaccttagagtgagaagacscccagccagggcgcagagagagcgctgggcgaagaggggtcgatggcccgcgggaacagggctggggttcctgtttggggaccggccggctgccaggcccctcgccctactgcttctccggagcgccgttgaccataggcccgtacaggccgccgccgtaggtcggctccttgtgcaccgccgcagcagcggcggccgagcggtcacgcatgagatcgctaaaggcgtagtccatgggtgggcggaagccgagcgtgggcaccaagccggcagtggagtagggcgccatgaaggccagaccgcggctgtgcgccgccgccgcggagtaggccaggcgcagggggctgaggccgagcggcgcgcccagcgggtaggcgcccgcgtcggcaccgaagtgactggcgttgggctgcagcggcgagaaggccgagcggctgctcagcgagcccagcgccccaggcgccatggccccggccagcaagggtctgtggtgcggaggtgcggcgggccccgcctnnnnnnnnnnnnnnnnnnnnnnnnnnnnnnnnnnnnnnnnnnnnnnnnnnnnnnnnnnnnnnnnnnnnnnnnnnnnnnnnnnnnnnnnnnnnnnnnnnnng

SEQ ID NO: 8254 - DNA, 846 bp, Homo sapiens
caattgctgaaagtcacctggggcatggtgggttttgatcttcttccccttcttttcttccccttcttctttccttctttgatcttcttccccttcttttcttccccttccccttcttttcaatttctgcaataaattcagacatggacagacacattaagctgattcccctacacacataacaatccactgtctaatcctcacacagggacctcaggctcctcagcataagaataggacactgtgagagatatatttcaggaggcctgaaggctggtcatgatagaaattcctcggtttttctcccagaaactgtgggtaaaatgtccctattctagtagatcgttatcccaatatcatttgtcccaagtttgtgcaaacagttacgccatatttttccaatcaacttaaagcaaataccctcaaatgatttctaggagaaaaactgcaatatttagccctgtctcawcaaatactcagattgttcatggttgtgaggactttagacactgaaattagagtgaaaaaggaaatctacaaacccttgagtcaaaatcatagttctctgaatttgtcacatctgcccaggtccaatgtcatgagaataggatcagggcgccacaggtatggcctgagactaggaagagagtcttgctcactgacccatcccttgtctgggcttccaggtagaactagagtttcattcaacctacatgtgcctataggtcctccctgtggcaatgacatctctcagctcagtaatggccacttggagcaggaatatgatctttatatggaagactcagtggatccttatcaccttcatagaaaggtactcacctccca

SEQ ID NO: 8255 - DNA, 796 bp, Homo sapiens
accacaaaaacaaggttcgaggtgcctcaactcagagctgaaagcactgccagtagctcagactctgataagagtgaggcagaatgtggccagcgtgccaggtaaccgtctgcagttgcaataacagaattagaaggtgggggtgtcatggaatcttaggagctctgcattccaattgcccaggctttgctgaaacacaggcaccctactctcacctgagggtcaccaccaatggggatcattccttcagcattcactctcagtattcgtgtacccttgtgacaatgccacagacccgtgtctttcccamtacatctaagcatattcctcactgtttatctcttgtctgtacaacatcatcaaggcagaaacagtttcccaacaggttatattttcttaatggtagtcatgaagtcaccccacctgctctcagttaaaacagagcttaaggcttttccacaggtgtaagatatcaaacttttagcctgccctgatatcctccgggtcttctgcagttttttctgtatccactagaaagtgaatgaataattcatttttttaaaatattttctttcctgtctcagtattcttgctgctgcatcccattgttagattgatttcttctttcttactggggcaccttcttgggttttcattacattctagaccagtttgacatccctacgtccaaagctcttcctctatgtgggttgatttgttttttaatgtcactgagcactacattttatacttgtcacttatagatgtcattctagtgccccaagacctcttttca

SEQ ID NO: 8256 - DNA, 797 bp, Homo sapiens
tccaagagagcaagtcttcaagactgaccactgggttttaagtcctcactctgtagctgtgcagccttggggcaagcatgtaacctctcaaacccttggttttctcatctgtaaaatggggatcgttaccgttactaccccagaagattttgtgagatgaagtgagataagaccggtgagtaatttaaccagacatatgggaagtgttcaaaagtgctcaggggaaggtcatgtgtctcatctgcataccatgcactttatgaccagggctgccttttttaacttctctgagtctctctctctctctctctctctctctctctctctctctctctctctctctgtctgtctctgtctctstgtgtgtgtgtgtgtgtgtgtgtgtgtgtgtgtgtgtgtgtgtgtgttttataagcctgccccaacaagcctatttactcagaatgtaaaacaaatttactgtagtatatcgactaaatacacatcgggtatcaattttatttgttgcaggaatgagtatactgtgtgagtctcttaaaaggttgatactctggtttcagcctaacctcagccttgatctgaatccaaggtttctaagcctctctttcttatcccctggctctaccctttaattccgcatcaaatcgttctcttcggcagtcttaccccgaatcagcggtgttgacctcacatggaatcacagaaccattcccctcatttcctctccctgtttttcgtattcaacctctgttgacccttcccaggtgttactcatgtgatgtattctgtaggctaag

SEQ ID NO: 8257 - DNA, 797 bp, Homo sapiens
tccaagagagcaagtcttcaagactgaccactgggttttaagtcctcactctgtagctgtgcagccttggggcaagcatgtaacctctcaaacccttggttttctcatctgtaaaatggggatcgttaccgttactaccccagaagattttgtgagatgaagtgagataagaccggtgagtaatttaaccagacatatgggaagtgttcaaaagtgctcaggggaaggtcatgtgtctcatctgcataccatgcactttatgaccagggctgccttttttaacttctctgagtctctctctctctctctctctctctctctctctctctctctctctctctctgtctgtctctgtctctgtstgtgtgtgtgtgtgtgtgtgtgtgtgtgtgtgtgtgtgtgtgtgttttataagcctgccccaacaagcctatttactcagaatgtaaaacaaatttactgtagtatatcgactaaatacacatcgggtatcaattttatttgttgcaggaatgagtatactgtgtgagtctcttaaaaggttgatactctggtttcagcctaacctcagccttgatctgaatccaaggtttctaagcctctctttcttatcccctggctctaccctttaattccgcatcaaatcgttctcttcggcagtcttaccccgaatcagcggtgttgacctcacatggaatcacagaaccattcccctcatttcctctccctgtttttcgtattcaacctctgttgacccttcccaggtgttactcatgtgatgtattctgtaggctaag

SEQ ID NO: 8258 - DNA, 797 bp, Homo sapiens
tccaagagagcaagtcttcaagactgaccactgggttttaagtcctcactctgtagctgtgcagccttggggcaagcatgtaacctctcaaacccttggttttctcatctgtaaaatggggatcgttaccgttactaccccagaagattttgtgagatgaagtgagataagaccggtgagtaatttaaccagacatatgggaagtgttcaaaagtgctcaggggaaggtcatgtgtctcatctgcataccatgcactttatgaccagggctgccttttttaacttctctgagtctctctctctctctctctctctctctctctctctctctctctctctctctgtctgtctctgtctctgtgtstgtgtgtgtgtgtgtgtgtgtgtgtgtgtgtgtgtgtgtgtgttttataagcctgccccaacaagcctatttactcagaatgtaaaacaaatttactgtagtatatcgactaaatacacatcgggtatcaattttatttgttgcaggaatgagtatactgtgtgagtctcttaaaaggttgatactctggtttcagcctaacctcagccttgatctgaatccaaggtttctaagcctctctttcttatcccctggctctaccctttaattccgcatcaaatcgttctcttcggcagtcttaccccgaatcagcggtgttgacctcacatggaatcacagaaccattcccctcatttcctctccctgtttttcgtattcaacctctgttgacccttcccaggtgttactcatgtgatgtattctgtaggctaag

SEQ ID NO: 8259 - DNA, 797 bp, Homo sapiens
tccaagagagcaagtcttcaagactgaccactgggttttaagtcctcactctgtagctgtgcagccttggggcaagcatgtaacctctcaaacccttggttttctcatctgtaaaatggggatcgttaccgttactaccccagaagattttgtgagatgaagtgagataagaccggtgagtaatttaaccagacatatgggaagtgttcaaaagtgctcaggggaaggtcatgtgtctcatctgcataccatgcactttatgaccagggctgccttttttaacttctctgagtctctctctctctctctctctctctctctctctctctctctctctctctctgtctgtctctgtctctgtgtgtstgtgtgtgtgtgtgtgtgtgtgtgtgtgtgtgtgtgtgtgttttataagcctgccccaacaagcctatttactcagaatgtaaaacaaatttactgtagtatatcgactaaatacacatcgggtatcaattttatttgttgcaggaatgagtatactgtgtgagtctcttaaaaggttgatactctggtttcagcctaacctcagccttgatctgaatccaaggtttctaagcctctctttcttatcccctggctctaccctttaattccgcatcaaatcgttctcttcggcagtcttaccccgaatcagcggtgttgacctcacatggaatcacagaaccattcccctcatttcctctccctgtttttcgtattcaacctctgttgacccttcccaggtgttactcatgtgatgtattctgtaggctaag

SEQ ID NO: 8260 - DNA, 797 bp, Homo sapiens
tccaagagagcaagtcttcaagactgaccactgggttttaagtcctcactctgtagctgtgcagccttggggcaagcatgtaacctctcaaacccttggttttctcatctgtaaaatggggatcgttaccgttactaccccagaagattttgtgagatgaagtgagataagaccggtgagtaatttaaccagacatatgggaagtgttcaaaagtgctcaggggaaggtcatgtgtctcatctgcataccatgcactttatgaccagggctgccttttttaacttctctgagtctctctctctctctctctctctctctctctctctctctctctctctctctgtctgtctctgtctctgtgtgtgtgtgtgtgtgtgtgtgtgtgtgtgtgtgtgtgtgtgtgtgttttataagcctgccccaacaagcctatttactcagaatgtaaaacaaatttacygtagtatatcgactaaatacacatcgggtatcaattttatttgttgcaggaatgagtatactgtgtgagtctcttaaaaggttgatactctggtttcagcctaacctcagccttgatctgaatccaaggtttctaagcctctctttcttatcccctggctctaccctttaattccgcatcaaatcgttctcttcggcagtcttaccccgaatcagcggtgttgacctcacatggaatcacagaaccattcccctcatttcctctccctgtttttcgtattcaacctctgttgacccttcccaggtgttactcatgtgatgtattctgtaggctaag

SEQ ID NO: 8261 - DNA, 739 bp, Homo sapiens
ctttctcttcctcactctgagcccttcattctccgtgttgagtaaacattcttggcctcaaggagctttcatcggcaatgctaatattttaaatattatgattacttttctctctgccataaaaatctcccaaaacatccatatgatcagtgtagaacactgattctcagtcagggaggggtgattttgcccactaagagacatttatagttgtcacaactggtgggggtccttctgtcttctggtggggagagaccagggatgctgcggaacaatactccaaagcccagtacagccccacaacaaaggaatattcaaatgccaataatgctaaggttgaaaaactctggtatagattagaaagtgtatttatcttaaaaagctaaaatagaactaagacacaatgcaagcataaggatagttaataataaaacaataataactcaaatgtatttggcatttgtcatgtagcaggcaccgtgccaacagttttcccttctttgccttatttgatcctcatgattaccctataaggtaggaactattatgatcccccttgcaartgataaaactgtggcccaaataagttaaattatgtaactaaggtcacacagctgattaaggactaagctgagatccaatcccaggcagccaaatgggaagggcttctttattttgaactgctgtgatgagcactgatacatctagaaacagatgtgccatatactgcagagcgagg

SEQ ID NO: 8262 - DNA, 814 bp, Homo sapiens
ttaaaacaatctgtaatctctattgaatccagaagttagaaatctaaacagattataacagccagactttggaaatatttgtatgctacctacattttcaattttttttttttgagacggaktctcactctgtcgcccaggctggagtgcagtggcatgatcttggctcaccacaacctccgcctcccaggttcaatcaattctcctgcctcagcctcctgagtagctgggattataggcatgcgccaccacacccggctaatttttttttgtatttttagtagagacagggtttcaccatattggccaggctggtctcaaactcctgaccttgtgatccgcctgccttggcctcccagagtgctgggattacaggtgtgagtcacctcgcccagcctgtatgctacctaccttttcatattgctaattgaagttattctttcttcccatagattaaacccaacctcactaaacttcgcaaaatggcccaggcctggcgtctctttggaaaagcagagtgtgatacaaggcagagcctgcagcaatccatgcctccctgtgagccaccatgagaacagaatcactggtctaaaaggaacaaagggatgttcactgtatgcctctgagcagagagcagcagcagcaggtaccagcacggccctgactgaatcagcccagtgtccctgagcagcttagacagcagggctctctgtatcagtctttcttgagcagatgattcccctagttgagtagccagatgaaattcaagcctaaagacaattcattcatttgcatccatgggcacagaaggttg

SEQ ID NO: 8263 - DNA, 814 bp, Homo sapiens
ttaaaacaatctgtaatctctattgaatccagaagttagaaatctaaacagattataacagccagactttggaaatatttgtatgctacctacattttcaattttttttttttgagacggattctcactctgtcgcccaggctggagtgcagtggcatgatcttggctcaccacaacctccgcctcccaggttcaatcaattctcctgcctcagcctcctgagtagctgggattataggcatgcgccaccacacccggctaatttttttttgtatttttagtagagacagggtttcaccrtattggccaggctggtctcaaactcctgaccttgtgatccgcctgccttggcctcccagagtgctgggattacaggtgtgagtcacctcgcccagcctgtatgctacctaccttttcatattgctaattgaagttattctttcttcccatagattaaacccaacctcactaaacttcgcaaaatggcccaggcctggcgtctctttggaaaagcagagtgtgatacaaggcagagcctgcagcaatccatgcctccctgtgagccaccatgagaacagaatcactggtctaaaaggaacaaagggatgttcactgtatgcctctgagcagagagcagcagcagcaggtaccagcacggccctgactgaatcagcccagtgtccctgagcagcttagacagcagggctctctgtatcagtctttcttgagcagatgattcccctagttgagtagccagatgaaattcaagcctaaagacaattcattcatttgcatccatgggcacagaaggttg

SEQ ID NO: 8264 - DNA, 814 bp, Homo sapiens
ttaaaacaatctgtaatctctattgaatccagaagttagaaatctaaacagattataacagccagactttggaaatatttgtatgctacctacattttcaattttttttttttgagacggattctcactctgtcgcccaggctggagtgcagtggcatgatcttggctcaccacaacctccgcctcccaggttcaatcaattctcctgcctcagcctcctgagtagctgggattataggcatgcgccaccacacccggctaatttttttttgtatttttagtagagacagggtttcaccatattggccaggctggtctcaaactcctgaccttgtgatccgcctgccttggcctcccagagtgctgggattacaggtgtgagtcacctcgcccagcctgtatgctacctaccttttcatattgctaattgaagttattctttcttcccatagattaaacccaacctcactaaacttcgcaaaatggcccaggcctggcgtctctttggaaaagcagagtgtgatacaaggcagagcctgcagcartccatgcctccctgtgagccaccatgagaacagaatcactggtctaaaaggaacaaagggatgttcactgtatgcctctgagcagagagcagcagcagcaggtaccagcacggccctgactgaatcagcccagtgtccctgagcagcttagacagcagggctctctgtatcagtctttcttgagcagatgattcccctagttgagtagccagatgaaattcaagcctaaagacaattcattcatttgcatccatgggcacagaaggttg

SEQ ID NO: 8265 - DNA, 557 bp, Homo sapiens
cttccttacaccttatacaaaaatcaattcaagatggattaaagacttaaacgttagacctaaaaccataaaaaccctagaagaaaacctaggcattaccattcaggacacaggcatgggcaaggacttcatgtctaaaacaccaaaagcaatgccaacaaaagacaaaattgacaaatgggatctaattaaactaaagagcttctgcacagcaaaagaaactaccatcagagtgaacaggcaacctacaaaatgggagaaaactttcccgcttttttaatggacagcttttcatgtattcactgcaagtcaatcacaaatgacttgcatttcaaatctacagcaagcacacagtcactcttgcactttttggtgggaatagatatcttgtcgacaygattacttgcaggcctaacaggatgtaaactctaaatattcttttagattacctctttttcttttttcccctttttcttttttcccctgggtatgcaagttaatttagatcaaactaattaaatgtagacaactgaagtcaccaatatgagagtactaca

SEQ ID NO: 8266 - DNA, 889 bp, Homo sapiens
cacttgaagagcatacttaatcttggctcaacagtttttggtattaaaggatgcattttcgtccctgtgattaccatagatcactgtgttttatagtaatgaatatggtatcattttaatagatagtctagttttactaagatttagtatgcagtatattccacctcatcttaagttattcttttgcttcattcccgtcctatcagttaacacattaaaagcttcttaagggtagtgcacatcagccaaacatcctatttagcaacctcaccaactgctacagatccaattccagtttcacaaaagatactctataccagggtaatctagaactcagcagattttctggacacaggaagaaatcttaggctctaagctgtaaacaatccctgagacaactacagttgaccacaagttatcttggagcctactacttcatcaactagccttaagtatagtcgtatacacagcagaagaaatggctttgtgtcatcataaaagtttttatatgtagttcctcaagtaatttccaagactctaactgatgtccgagtgctgcacttatggtaggagaggaagagtagaagagggttgggatatagataaatagatatatcgcttcaatgtcacaaggagctagtaaacttaccatagttttcctttgtgatatccttactgmctcagctttcctatctttcaccatctcttgagcaatttagaagcttgttccctgtgaaatgaggaagagaattatattttattggcagacacttagctccaattttacagccagtatctagttattcccataaaccctgcaattaactcagagcccagaaaagagcaccacacagagcattttgagggtgaaaagggtcagcccacagaa

SEQ ID NO: 8267 - DNA, 889 bp, Homo sapiens
cacttgaagagcatacttaatcttggctcaacagtttttggtattaaaggatgcattttcgtccctgtgattaccatagatcactgtgttttatagtaatgaatatggtatcattttaatagatagtctagttttactaagatttagtatgcagtatattccacctcatcttaagttattcttttgcttcattcccgtcctatcagttaacacattaaaagcttcttaagggtagtgcacatcagccaaacatcctatttagcaacctcaccaactgctacagatccaattccagtttcacaaaagatactctataccagggtaatctagaactcagcagattttctggacacaggaagaaatcttaggctctaagctgtaaacaatccctgagacaactacagttgaccacaagttatcttggagcctactacttcatcaactagccttaagtatagtcgtatacacagcagaagaaatggctttgtgtcatcataaaagtttttatatgtagttcctcaagtaatttccaagactctaactgatgtccgagtgctgcacttatggtaggagaggaagagtagaagagggttgggatatagataaatagatatatcgcttcaatgtcacaaggagctagtaaacttaccatagttttcctttgtgatatccttactgcctcagctttcctatctttcaccatctcttgagcaatttagaagcytgttccctgtgaaatgaggaagagaattatattttattggcagacacttagctccaattttacagccagtatctagttattcccataaaccctgcaattaactcagagcccagaaaagagcaccacacagagcattttgagggtgaaaagggtcagcccacagaa

SEQ ID NO: 8268 - DNA, 1892 bp, Homo sapiens
ctccaagcatacaattaaaaatacaaacaataataaaccaaaataagtttaaggaaggctaacagagtttgaggaagtaaacaatataacatctcacccaccaccacacaaaactagttttctaatcaagagaaaacttataaaatgggaatcatggcctttatcttaagagccatactggatgtaaaaatctctctaaagtacatgatacatatttaaatatacacatatacatacacacatacacatacgcatatataagtttttgaaaaacaaaattatgaaaaatttttcttttttatgcatttttgcttgtatcaataaatcctacagtcaacttacaatgaaggccagttcttctcaaatgccataatgctctgcctaaatcattcattttaaaaatgatgggtaaaactttacaaataaaatgaagtatactttatgttaaataattttgaattctctatatttaaaaataatattgagattatgactccagtaaacaaaactgaaatgctaaagattacatttaaataacacattctttattattattattttcttattttaagttttactttaagttctgggatatgcgtgcagaacatgcaggtttgttacataggtatacatgtgccgtggtggtttgctgaacctaacaaactgtcatgtaggttttaagcctctcatgcattaggtatttgtcctaatgctcttcctctctccccttgccccccaccccccgacatagtgcattaaaacatcaaatattgtaatttgcagtttgtgatacaccatttaggctagaataagaaaccttttaagtatgaaataggaagatataaagaaattaattaatttttaaatttaattttaaattttcaattaatgtttatattttaataataatgcttatagtttaatattagctattgatgttttatctataaaggtagactatgaaattaatttactttttacatatttcaactttcttagttttcaagatttttcaaatcatgtacatatttgatgatttttatgattcattgaggtaactatttgataatattgttcaaaatgaccacattaattatgtttttagtaacgatttactccccaaaaggtatatgtttccaccttaaattcctgtaaataaaattcttgtgatagcttcttaaaaagtaagagaaaggaaagacggagaaaactgattcctttctacttggagcttgatttcccaatatgtaaaccccaactacgtaattctgtacacagggatctcattatttattttcatagttgctgctttgtttaaaattttggctctaaagtttatatttggcaagacaaatagaaataagctggtttataatttttcttattctaagatgtgcatgtgtatatgtgtaagtatgttttaatttctaatggcctgtccagatgatggtatcactcctggagacatggcaacccatatgagaatgtttatatacactggggtggagaagaacaaccatgcccaaatsctaatttaaatcaccttcacctttgaaatgttaaaactgtatgtgtctttttcaatttctctctgctcctccttttctcctatgctcttgctcagaaaacatttaatttcaactcaggtgtatttattagcaagaatccttccattttaattttttaaaagtcattggaagcagatcctgtgtccttataaaattccacaataaaacatttacttttgtaagctatgtgtatctagatggtgatattattgttaggaaataaaatgagagcatttggtaactatggcaacatgatatgtttcaaaagaaatatgaactctttttccttgaagaaattagatattttccttgactggtacttag

SEQ ID NO: 8269 - DNA, 1892 bp, Homo sapiens
ctccaagcatacaattaaaaatacaaacaataataaaccaaaataagtttaaggaaggctaacagagtttgaggaagtaaacaatataacatctcacccaccaccacacaaaactagttttctaatcaagagaaaacttataaaatgggaatcatggcctttatcttaagagccatactggatgtaaaaatctctctaaagtacatgatacatatttaaatatacacatatacatacacacatacacatacgcatatataagtttttgaaaaacaaaattatgaaaaatttttcttttttatgcatttttgcttgtatcaataaatcctacagtcaacttacaatgaaggccagttcttctcaaatgccataatgctctgcctaaatcattcattttaaaaatgatgggtaaaactttacaaataaaatgaagtatactttatgttaaataattttgaattctctatatttaaaaataatattgagattatgactccagtaaacaaaactgaaatgctaaagattacatttaaataacacattctttattattattattttcttattttaagttttactttaagttctgggatatgcgtgcagaacatgcaggtttgttacataggtatacatgtgccgtggtggtttgctgaacctaacaaactgtcatgtaggttttaagcctctcatgcattaggtatttgtcctaatgctcttcctctctccccttgccccccaccccccgacatagtgcattaaaacatcaaatattgtaatttgcagtttgtgatacaccatttaggctagaataagaaaccttttaagtatgaaataggaagatataaagaaattaattaatttttaaatttaattttaaattttcaattaatgtttatattttaataataatgcttatagtttaatattagctattgatgttttatctataaaggtagactatgaaattaatttactttttacatatttcaactttcttagttttcaagatttttcaaatcatgtacatatttgatgatttttatgattcattgaggtaactatttgataatattgttcaaaatgaccacattaattatgtttttagtaacgatttactccccaaaaggtatatgtttccaccttaaattcctgtaaataaaattcttgtgatagcttcttaaaaagtaagagaaaggaaagacggagaaaactgattcctttctacttggagcttgatttcccaatatgtaaaccccaactacgtaattctgtacacagggatctcattatttattttcatagttgctgctttgtttaaaattttggctctaaagtttatatttggcaagacaaatagaaataagctggtttataatttttcttattctaagatgtgcatgtgtatatgtgtaagtatgttttaatttctaatggcctgtccagatgatggtatcactcctggagacatggcaacccatatgagaatgtttatatacactggggtggagaagaacaaccatgcccaaatcctaatttaaatcaccttcacctttgaaatgttaaaactgtatgtgtctttttcaatttctctctgctcctccttttctcctatgctcttgctcagaaaacatttaatttcaactcaggtgtatttattagmaagaatccttccattttaattttttaaaagtcattggaagcagatcctgtgtccttataaaattccacaataaaacatttacttttgtaagctatgtgtatctagatggtgatattattgttaggaaataaaatgagagcatttggtaactatggcaacatgatatgtttcaaaagaaatatgaactctttttccttgaagaaattagatattttccttgactggtacttag

SEQ ID NO: 8270 - DNA, 1892 bp, Homo sapiens
ctccaagcatacaattaaaaatacaaacaataataaaccaaaataagtttaaggaaggctaacagagtttgaggaagtaaacaatataacatctcacccaccaccacacaaaactagttttctaatcaagagaaaacttataaaatgggaatcatggcctttatcttaagagccatactggatgtaaaaatctctctaaagtacatgatacatatttaaatatacacatatacatacacacatacacatacgcatatataagtttttgaaaaacaaaattatgaaaaatttttcttttttatgcatttttgcttgtatcaataaatcctacagtcaacttacaatgaaggccagttcttctcaaatgccataatgctctgcctaaatcattcattttaaaaatgatgggtaaaactttacaaataaaatgaagtatactttatgttaaataattttgaattctctatatttaaaaataatattgagattatgactccagtaaacaaaactgaaatgctaaagattacatttaaataacacattctttattattattattttcttattttaagttttactttaagttctgggatatgcgtgcagaacatgcaggtttgttacataggtatacatgtgccgtggtggtttgctgaacctaacaaactgtcatgtaggttttaagcctctcatgcattaggtatttgtcctaatgctcttcctctctccccttgccccccaccccccgacatagtgcattaaaacatcaaatattgtaatttgcagtttgtgatacaccatttaggctagaataagaaaccttttaagtatgaaataggaagatataaagaaattaattaatttttaaatttaattttaaattttcaattaatgtttatattttaataataatgcttatagtttaatattagctattgatgttttatctataaaggtagactatgaaattaatttactttttacatatttcaactttcttagttttcaagatttttcaaatcatgtacatatttgatgatttttatgattcattgaggtaactatttgataatattgttcaaaatgaccacattaattatgtttttagtaacgatttactccccaaaaggtatatgtttccaccttaaattcctgtaaataaaattcttgtgatagcttcttaaaaagtaagagaaaggaaagacggagaaaactgattcctttctacttggagcttgatttcccaatatgtaaaccccaactacgtaattctgtacacagggatctcattatttattttcatagttgctgctttgtttaaaattttggctctaaagtttatatttggcaagacaaatagaaataagctggtttataatttttcttattctaagatgtgcatgtgtatatgtgtaagtatgttttaatttctaatggcctgtccagatgatggtatcactcctggagacatggcaacccatatgagaatgtttatatacactggggtggagaagaacaaccatgcccaaatcctaatttaaatcaccttcacctttgaaatgttaaaactgtatgtgtctttttcaatttctctctgctcctccttttctcctatgctcttgctcagaaaacatttaatttcaactcaggtgtatttattagcaagaatccttccattttaattttttaaaagtcaytggaagcagatcctgtgtccttataaaattccacaataaaacatttacttttgtaagctatgtgtatctagatggtgatattattgttaggaaataaaatgagagcatttggtaactatggcaacatgatatgtttcaaaagaaatatgaactctttttccttgaagaaattagatattttccttgactggtacttag

SEQ ID NO: 8271 - DNA, 398 bp, Homo sapiens
agcaggctgggaatgagtaacggcaccaaaaacccatccgtgctttgtctccagaatttggccagactgccrtcttcttttcccttcttttatgctacaacactcttggtttcttgatttgccagcacctatcccaactcagcccttgtttgtggtccaaacattgcttcaatctgctcctccaggacatgatttctgtgatttgtcccactgtttcacatactgcaaatgtaacccatccctcatgggtggatttgacccatccagataaggggggagtagaatcctgttgacagggagaggaagttgtcaagattggctctgctgaacataaaactcccctgttctcagaatcccccaaatcaacttaagctcttatttttcctacatttcccaca

SEQ ID NO: 8272 - DNA, 398 bp, Homo sapiens
agcaggctgggaatgagtaacggcaccaaaaacccatccgtgctttgtctccagaatttggccagactgccatcttcttttcccttcttttatgctacaacactcttggtttcttgatttgccagcacctatcccaactcagcccttgtttgtggtccaaacattgcttcaatctgctcctccaggacatgatttctgtgatttgtcccactgtttcacatactgcaaatgtaacccatccctcatgggtggatttgacccatccagataaggggggagtagaatcctgttgacaggragaggaagttgtcaagattggctctgctgaacataaaactcccctgttctcagaatcccccaaatcaacttaagctcttatttttcctacatttcccaca

SEQ ID NO: 8273 - DNA, 827 bp, Homo sapiens
gatcctgctgcttttcagtactacagggaatatcaggccaagttttttattgtttctggttgtgcaaactggaccaactatatacactgaaacaggtgatgcctaagtaccagacccttgaactggatgaggaaaagccaagatgggaaaccactggaaaacatcgcagtctattgattctgtgtatcatttcgcccaataccrttgtcgttatcaagggctaactcttatttgtcaagtaaagaaagactacaggttcaactgacttctaagttagcaaacattttggttcctccctatctagttaaataaatgagtttctttttctaaagcctcaactcacctaaggacagggttctttgtttttctctgcttaattgcgtcatattcctccataccaactacacaaaccccagcacacactcagctgcagattaccatcctgtgttcttgtcacctcatgcattttacctgctggaaataaatgctcacactctgcccaatcccatctttccctgcacctggacatgcttcagaactccttttgtctgttcctctctctcatgtgcctgaactcttctgtgacttagaatctctagcacatgattcagaaccttaggatctgtccagtggcttcttgtctgttagtaatttttgttctctcaatgatatggtgtggctgtgtccccacccaaatctcatcctgaattgtagctcccataattcccgcgtgtcgtgggagggacctggtgggaggtcattgaatcattggggcaggtttttcctgtactgttctcatgatagtgaataaatctcatgagatctga

SEQ ID NO: 8274 - DNA, 777 bp, Homo sapiens
gcctggccttaattggatctcatacatttaaaggagtaggaattagtcaggtaagaaggaagaaaagcgtcttccagaaagaggcaactatgggagtaaagagacaggaggaatagcaaagtgctcagtattgctcaaggggctcgctgtggagaggttggagaggtggggtgctcaggcatcaccttgcaagtcagaaacaggccagtccgtgtgattgttcagcttcccaggtgtgccctgacacccatgtgcagaagagatgattatgggacatttcagagatgaaggctcatgggagagatggggtgggacaagagagcaaggtgctggctggggagccagcatcaaatcttagccctgctgcttgctcagcgatgtggccttgrctgccttcacctccccaatcctcaagctcctcccctgtcaaccgaggacaagaagaactcttactcttaggcttgtgatgagaaccatatgagacgatgtgtggcacgtgcttagcaccaggcagggtatggtgcatgagctgaattgtcatgtgtcacatcatttccatggggctcagtttagaaagaaggaaggccaaagtggtgctgatgaattgggagaaagtggaagagtcaggttcagggggcctcttgaggtgaaaaagcatgtttcctggaagcaaaggaagaaggaggctacggagagagagaaggagagagagagagagagagagagacaagacagagagagaggggggatttggaggctgcaagatgaagcaattca

SEQ ID NO: 8275 - DNA, 806 bp, Homo sapiens
aacgtcacgcttatttcccgaacgcaactcacttccagctccaggttattgatccctgttgaggagggtggtctggctttgatgcagaggcccctcgtctggctccagagttttccaacttggggcattaatgtttttcaagtgcctctctggaaccagaggctaggaaagccaatgtgaagcggaggcaaccccagggccctggtggggtgtgtggagaaccgtggctgtgaatgggcaggtagaccgtcttgctagaagcagagagggaggagcctcctgtggcagcaggaggggacacagttgctgggaggctggtggtggggctccccaaacttgcctgggggaggaacccctaagctggagcttctgattcttcgggcacccactcgaatgcttctctgggatacctctgtggacccacaactgctgggctgcagtaactacacgtttcaagttttcctggattttgttacactgctccatgacggctggtgggaygtgtgaccccagaaagaagcagtgagatgtctttcccactcttctttgtccacaccaggtattatcgacattgacagctccttgccaatctcatgggtgcagagtgccactgccttgtcattttaatgtgttttttgttttgtttttgagatggagtctcactctgtcacccaggctggagtgcagtggtgccatctcggcccactgcaacctccacctcccagattcaagcaatcctcctgcctcggcctcccaagtagctgcgattataggctcccaccaccagacccggctaatttttgtat

SEQ ID NO: 8276 - DNA, 715 bp, Homo sapiens
tgaaacagttctgcttacctggtctgagcttttctttttctttttttttttttttgagatggagtcttgctcttgttgcctagactggagtgcaatggacgatctcggctcactgcaatctccgcctcccaggttcaagcgattctyctgccgtagcctcccgagtagctgggattacaggcactcgccaccatgcctggccaattttttgtatttttagtagaaacggggtttcactatgttggtcaggctggtctcaaactcctgacctcaggtgatccacccgctttggcttcccaaagtgctgggattacaggcatgagccaccgtgcccagactggtctgagcttaataactgggctgtatggcacttattccgcagtccccgctgttgatgggcctgtctgtcccccaaattccagcctctttaagggcagagctgtattttccctgttttgtccccagccccaagcagagggcctttgtcttgtaggaattcaataaaatgggaatcataataaccagaaattcaaatacttcctgaccaggcttctttctgttgcaagtgccagaaatctaaatcaaacggacttaaaccaaaaagggatttgttagtttatcgaactgggatggcaaagcatgaactggaggccagagtctcagttaatgtcatctctccgactcccagctgtttgtctctacttggctttcttcc

SEQ ID NO: 8277 - DNA, 715 bp, Homo sapiens
tgaaacagttctgcttacctggtctgagcttttctttttctttttttttttttttgagatggagtcttgctcttgttgcctagactggagtgcaatggacgatctcggctcactgcaatctccgcctcccaggttcaagcgattcttctgccgtagcctcccgagtagctgggattacaggcactcgccaccatgcctggccaattttttgtatttttagtagaaacggggtttcactatgttggtcaggctggtctcaaactcctgacctcaggtgatccacccgctttggcytcccaaagtgctgggattacaggcatgagccaccgtgcccagactggtctgagcttaataactgggctgtatggcacttattccgcagtccccgctgttgatgggcctgtctgtcccccaaattccagcctctttaagggcagagctgtattttccctgttttgtccccagccccaagcagagggcctttgtcttgtaggaattcaataaaatgggaatcataataaccagaaattcaaatacttcctgaccaggcttctttctgttgcaagtgccagaaatctaaatcaaacggacttaaaccaaaaagggatttgttagtttatcgaactgggatggcaaagcatgaactggaggccagagtctcagttaatgtcatctctccgactcccagctgtttgtctctacttggctttcttcc

SEQ ID NO: 8278 - DNA, 715 bp, Homo sapiens
tgaaacagttctgcttacctggtctgagcttttctttttctttttttttttttttgagatggagtcttgctcttgttgcctagactggagtgcaatggacgatctcggctcactgcaatctccgcctcccaggttcaagcgattcttctgccgtagcctcccgagtagctgggattacaggcactcgccaccatgcctggccaattttttgtatttttagtagaaacggggtttcactatgttggtcaggctggtctcaaactcctgacctcaggtgatccacccgctttggcttcccaaagtgctgggattacaggcatgagccaccgtgcccagactggtctgagcttaataactgggctgtatggcacttattccgcagtccccgctsttgatgggcctgtctgtcccccaaattccagcctctttaagggcagagctgtattttccctgttttgtccccagccccaagcagagggcctttgtcttgtaggaattcaataaaatgggaatcataataaccagaaattcaaatacttcctgaccaggcttctttctgttgcaagtgccagaaatctaaatcaaacggacttaaaccaaaaagggatttgttagtttatcgaactgggatggcaaagcatgaactggaggccagagtctcagttaatgtcatctctccgactcccagctgtttgtctctacttggctttcttcc

SEQ ID NO: 8279 - DNA, 744 bp, Homo sapiens
gctgctgctggaaggaccacattctaagaacattgctctaaattttgttcttaagcagaccgcagcaatgacatcacttggaaactatttagaaaccaaaataaataaacagactggatcttaggctccacttcacacctacagaaaagaatttarcaagatcccaagtgtatttgtatgaatgttagattaagaaaaaacccaagaggagagacctaagagcacaattatagacatgaagggacccaacttccaatcccaaacccctcccgcttcaggcttgcacaaccaaccagctgctaacagacctgaaggagttgggtgcaaggttggagcacatctggatgctgcttatctaccttggagatcttcctgaagggctttgtgggggccctatcacttcaacctactcttccacctgccgacccttgtggggacccagctggtcagcaggggtgtttcctcctaggggctcaaagactggagccttcatcaggccaggggaaagaggcagcccaaggggctgggggctccctgggggatatgcagcaggaggcgactgtgcccccttggaggtggagctccaccggggacctgggctagagcctggagaccagagctcagacctgagtcctgccagggaaggggcttttttcctggctgtctccccaggccctggacctgcttagggtgacctaagcattcttcttcaggacagaacatgggtggctgtgtgttgggatc

SEQ ID NO: 8280 - DNA, 649 bp, Homo sapiens
tccagtctagtctggtggctgggcccataagctctggaaccagactgcctgggattggattttgtctccactgccctggctgtgtggccttttacaagttgcctaacwtctctgggcctcagcttcctcatctgtgaagtggggataataacagcacctgccttctggtgttgatgtgggaattaaataagatgattcatgtagaggactcagctcagacgtacaccaataagtgtcctataagttcgtgctttcatttatcaccattcattcattcattcattcactcattcactgctgtgactgcagggcctcacgcatgactggtgttctataagtatttaatatcttataataataatagttactatacatttatataataaaaataaatagtttattattattattcattagagacaggacctgactctgtcaccccaactggagtgcagtagtacaatcgtagctcactgaagcctcaacctcctgggctcaagtgatcctcccacctcagcctccgtagtagccaggactacaggcatgtgccaccacacctggctaatttgtttttattttttatttttatttatgtagagacggggtttcactatgttgcccaggctggtcttgaactcttggccttgag

SEQ ID NO: 8281 - DNA, 649 bp, Homo sapiens
tccagtctagtctggtggctgggcccataagctctggaaccagactgcctgggattggattttgtctccactgccctggctgtgtggccttttacaagttgcctaacttctctgggcctcagcttcctcatctgtgaagtggggataataacagcacctgccttctggtgttgatgtgggaattaaataagatgattcatgtagaggactcagctcagacgtacaccaataagtgtcctataagttcgtgctttcatttatcaccattcattcattcattcattcactcattcactgctgtgactgcagggcctcacgcatgactggtgttctataagtatttaatatcttataataataatagttactatacatttatataataaaaataaatagtttattattattattcattagagacaggacctgactctgtcaccccractggagtgcagtagtacaatcgtagctcactgaagcctcaacctcctgggctcaagtgatcctcccacctcagcctccgtagtagccaggactacaggcatgtgccaccacacctggctaatttgtttttattttttatttttatttatgtagagacggggtttcactatgttgcccaggctggtcttgaactcttggccttgag

SEQ ID NO: 8282 - DNA, 711 bp, Homo sapiens
taccctcctcactggagcagctcagacgcctgcacatgagaagcctggtgtcccaggcccacgactggagcaagggtgctgaygccagcagctgcccacaggtcaggccccactgtccggagagaagcgccacccgaagagaagctctgtggggatggctgggggctgcagtaggcggggaaggtgaccaggcaccaggccaggcgaggcagcagcagccagactgccacagccagccatgcaccctccaggagcacccatgggtgctcagccacactggcctctcccacagtgccatagcttcgggcactttgcagcccgcctgctcctgcagccccacacgggagccagaggccatctccctgcacctcctgagcttgtggggcggcttcaatccatcagcagcagcggccccgaggcctgcggctgtgagccagccccggggggcccccgtgggggcatgggatggtggcagcaggagggcccctcagaaaagggatgggcttgtggtcccctctgccctcacacacctgggagggtggcctcgtgccccctcgggacccccgccatcatcgctccagcagcaccccccgcaccacctgccactgctctgtccctatacgcccttccaaaatctcctccaattatcccccatccatccaactccacagttccccgctccaggaaccatggacaaaactgtttcactgc

SEQ ID NO: 8283 - DNA, 801 bp, Homo sapiens
atcagccagccccagatttcaagagctttaacaaagcacaggcttctgaccatgttggatcactgcaggggcagtgtcgtccacccctggttggtcatcccgagggccaacctccttcccatgcagcccgggctcctcgccatccctggagttctcggggctcagccagcagatggaaagagacggagctgaaagctcctggtgagacttaggggtcagggttggggatggcactgactccttgttcgcattcaccagccaagtaagatctgcaaagcaagctggaaaaagtcagtccactaaggcccaggaggaaaaaggaagggccagtggctgaggccaccaaaaggtttgagcaggctgagtgaccagggcctgggctttgacccccagctcacagctctgtgaactcatctatttctgttattatcatgtatattcataactaatactttagttctgcacctaatttacaaaggtcttccttcggtatctcatatattaatacaactaataaaaattaaatgtcggtaagrgctttgcaggttacagagcaactgcacctccgggatctcctctaagtgttcctttatctatctggccttattaattccagcctttatgaactgggggactttggagagtcactttccgcctctgagctgtgttttctattagcaaatggggatcgatacctgccagcctctcccagggcggtgatgagtttcccgctgcctgggatgggatacctgagagaattcagacaacagcgtgccctcctcggagctcccctccgctcca

SEQ ID NO: 8284 - DNA, 801 bp, Homo sapiens
atcagccagccccagatttcaagagctttaacaaagcacaggcttctgaccatgttggatcactgcaggggcagtgtcgtccacccctggttggtcatcccgagggccaacctccttcccatgcagcccgggctcctcgccatccctggagttctcggggctcagccagcagatggaaagagacggagctgaaagctcctggtgagacttaggggtcagggttggggatggcactgactccttgttcgcattcaccagccaagtaagatctgcaaagcaagctggaaaaagtcagtccactaaggcccaggaggaaaaaggaagggccagtggctgaggccaccaaaaggtttgagcaggctgagtgaccagggcctgggctttgacccccagctcacagctctgtgaactcatctatttctgttattatcatgtatattcataactaatactttagttctgcacctaatttacaaaggtcttccttcggtatctcatatattaatacaactaataaaaattaaatgtcggtaagggctttgcaggttacagagcaactgcacctccgggatctcctctaagtgttcctttatctatctggccttattaattccagcctttatgaactgggggactttggagagtcactttcygcctctgagctgtgttttctattagcaaatggggatcgatacctgccagcctctcccagggcggtgatgagtttcccgctgcctgggatgggatacctgagagaattcagacaacagcgtgccctcctcggagctcccctccgctcca

SEQ ID NO: 8285 - DNA, 777 bp, Homo sapiens
ttgggaagcagcactctgagtgggagcgaacgtcttatttactggggagggaaggaatgcggcgcagtgttcggggtggggcagcctctcccagcccccgccctggccctggaggtccctgtccagaaggcgcccgcaaggcaccgtccccagggctcagcgtgcctctctagaggccgtcccactcatccccctgctcattcattcactcccaggttacctagagcttattaccaactgtgcacagcactcactgctgagcatacagtgaccagcaaataagggttcacctgtcaaaagttcacggaagggaggcacgcagtgagtgagggttcggtccaggacaaagcattgagctgcgcaggagaagacggcctctgkgtgctgctctaagggagccactgtctggtgggggaggcaggcagaagccaggcagtgacatccaggaagccccgaggcccaggaagcacagcctgaggcagggtggtcagggaagcctgcctggaggaggtggcagcctagctgaggatgagtccctccagggaagaactgggggaagcagacacacagagggggccctgccatgagaagggctccctgccacaactctcctggtgctcaggcacatggttggagtccttcagagggtccagctcaccagaggacgcccagagtcccagagtaggtcaggcctcttaccgccagtagcgcctccgctgtgccatgctggtctaagtaatttcgggcttactgtgtaggtggcactaagattggatc

SEQ ID NO: 8286 - DNA, 777 bp, Homo sapiens
ttgggaagcagcactctgagtgggagcgaacgtcttatttactggggagggaaggaatgcggcgcagtgttcggggtggggcagcctctcccagcccccgccctggccctggaggtccctgtccagaaggcgcccgcaaggcaccgtccccagggctcagcgtgcctctctagaggccgtcccactcatccccctgctcattcattcactcccaggttacctagagcttattaccaactgtgcacagcactcactgctgagcatacagtgaccagcaaataagggttcacctgtcaaaagttcacggaagggaggcacgcagtgagtgagggttcggtccaggacaaagcattgagctgcgcaggagaagacggcctctgtgtgctgctctaagggagccactgtctggtgggggaggcaggcagaagccaggcagtgacatccaggaagccccgaggcccaggaagcacagcctgaggcagggtggtcagggaagcctgcctggaggwggtggcagcctagctgaggatgagtccctccagggaagaactgggggaagcagacacacagagggggccctgccatgagaagggctccctgccacaactctcctggtgctcaggcacatggttggagtccttcagagggtccagctcaccagaggacgcccagagtcccagagtaggtcaggcctcttaccgccagtagcgcctccgctgtgccatgctggtctaagtaatttcgggcttactgtgtaggtggcactaagattggatc

SEQ ID NO: 8287 - DNA, 777 bp, Homo sapiens
ttgggaagcagcactctgagtgggagcgaacgtcttatttactggggagggaaggaatgcggcgcagtgttcggggtggggcagcctctcccagcccccgccctggccctggaggtccctgtccagaaggcgcccgcaaggcaccgtccccagggctcagcgtgcctctctagaggccgtcccactcatccccctgctcattcattcactcccaggttacctagagcttattaccaactgtgcacagcactcactgctgagcatacagtgaccagcaaataagggttcacctgtcaaaagttcacggaagggaggcacgcagtgagtgagggttcggtccaggacaaagcattgagctgcgcaggagaagacggcctctgtgtgctgctctaagggagccactgtctggtgggggaggcaggcagaagccaggcagtgacatccaggaagccccgaggcccaggaagcacagcctgaggcagggtggtcagggaagcctgcctggaggaggtggcagcctagctgaggatgagtccctccagggaagaactgggggaagcagasacacagagggggccctgccatgagaagggctccctgccacaactctcctggtgctcaggcacatggttggagtccttcagagggtccagctcaccagaggacgcccagagtcccagagtaggtcaggcctcttaccgccagtagcgcctccgctgtgccatgctggtctaagtaatttcgggcttactgtgtaggtggcactaagattggatc

SEQ ID NO: 8288 - DNA, 777 bp, Homo sapiens
ttgggaagcagcactctgagtgggagcgaacgtcttatttactggggagggaaggaatgcggcgcagtgttcggggtggggcagcctctcccagcccccgccctggccctggaggtccctgtccagaaggcgcccgcaaggcaccgtccccagggctcagcgtgcctctctagaggccgtcccactcatccccctgctcattcattcactcccaggttacctagagcttattaccaactgtgcacagcactcactgctgagcatacagtgaccagcaaataagggttcacctgtcaaaagttcacggaagggaggcacgcagtgagtgagggttcggtccaggacaaagcattgagctgcgcaggagaagacggcctctgtgtgctgctctaagggagccactgtctggtgggggaggcaggcagaagccaggcagtgacatccaggaagccccgaggcccaggaagcacagcctgaggcagggtggtcagggaagcctgcctggaggaggtggcagcctagctgaggatgagtccctccagggaagaactgggggaagcagacacacagagggggccctgccatgagaagggctccctgccacaactctcctggtgctcaggcacatggttggagtccttcagagggtccagctcaccagaggacgcccagagtcccagagtrggtcaggcctcttaccgccagtagcgcctccgctgtgccatgctggtctaagtaatttcgggcttactgtgtaggtggcactaagattggatc

SEQ ID NO: 8289 - DNA, 794 bp, Homo sapiens
tggaaaacacaccacaagaatttcataatgcaatcacaagtattaacaacagaatggaccaagttgaggaaaggacctcagagcttgaaaactggctctcaggaataagacagtcgggcaaaaataaataaaattttacagagctcattgtattagattaggtacacttggataatcttcctgttttcacatcaactgattattaacattaattacatctgcgcaatccattttgccatgtaatacaatataatcatcaaagtaacactgggaggctaaggtcatgaccatctaatattctgtataccacacaattgtattgctttctgaggtcattgaacactttcagaattcatgaaagttggatactcactataaataagatagatatggctagcaagaagaaaaatatagggattctatacttaaaagatacagctatttccatttatataattgtcacaataaaaatttaaatgtgaataagtgaatagcaagtatagaaagtttagcaaaataatgagaattagatatataaatgaatttttaagatagtctcagaaaaagtgtaatatttgtcatttatcctgaaatgtcaaaaattttcctaagcagaactactcaccaccaatttctcagtttcatccctgaaaaaaaaatcattcaagtggatttattttggcaaagtgaaactgtgaattgcttggctccagaacagctgcccatactcagcaggactgcattcccacactccattcacccttaccccatcccttccaggaacacttggwcta

SEQ ID NO: 8290 - DNA, 813 bp, Homo sapiens
gttataaaatgtttcaaacatacaaaaaatatagagaagcagttttctatagttattaaatattcttaaaatattcttaatgggtagtcatagaaattatcatccaaagtgggatattcttgagaraaaaaggaggttctatttataattatggtgggataacaaacttaagatgaacagctctagacaaactgggttgtatggtccctggaaaacaaggattactgtaaatgtgagtcccgccttgtgcttctctctgtcccaccaagaaaatatgatcttgatacagatgttcattgtgtcaaggcaaccatggcaaccatgatctagatacactgttcaagttttatgctgatcctacctatatatgtctcaggagctttccagagtttcctttgagtgcttctaaattttgcataaatggtatgttgtcccttgtctctttttaaaaccagtaagccattttcccttattttcttggaaaattaaaggaacaaggaccaggaaataacaatgtattagctaaggttctgttgattgaaagcaacagaacctaattctggctagcttaaaccatgctaggatttaatgaagaatactgcagaatcttagatatcttatgactgggaaagaggaggttcaggcagttcctgagatgtcagcaacaggtagctgtcaattaactgcccccacaccacccactgctgccgtcatcaatatagcacaccacaatggctcccagcctctgtacgtctgggttccggtgttcaaattctagagacagcaagagaaatcccattgagtcagggatcc

SEQ ID NO: 8291 - DNA, 1832 bp, Homo sapiens
atccaatgccatgcaaaccatgacacagtgaatacctcagagctaaacatccagccctgggcaaacatgtggagaccctgaattaactgaaattaaattatactttattgtggcatagggtcttataatagaaattaactagagttgcagaaaataaagacagctgaattcttatgcactcgagtttgtgagcttggattggtaccggctgaccttgactggatgggaaaccgagtttggaaaaagtacctattttaagtgttctttttgagttcattttaccatttgccatatgaggaacaggtatatgcctgttgcttccaagggccaggttgataataggttgtattaattgacctagaggttatgccagtgaggggtgcctatatgctaaagggactttcaagggacagaattttggaaaaatgaaagtgcattacaactttctcatgtcttgtctaacatccaggaatcattctcatgccaggataatgtctatcccagacaccaacatactgaaagaaacctacattttttccctctctctaacttctgtgaaatattgtattattttacagatattcattgccaatctgtgagagaggattctgtttgcctactgggttgacacctgacttggccacatgacttgctctaccaaagaaatgtgagagaagtgatgtgcttatgtttcctttgccatcatgaccagcaatgctccaggttttagaacactgatgcaaaaatgactgtcacttctcacttctccctttgtaatatgattctatagcaacttccaccaaatttggagatatggagatcgctgtccctagaagctgggctagcctgagacatgatttggtcaatagaatgtggtagaagcagtaatgtgcctttttgttaactaatttgcaggagggtttacactcttccattcactgttttggaattctgataccatcgtgtaattcagcacgggttagctgaaagaggagagaccagtggaccagggatgcattgtcttagctgaggtcatcctagaccagcctatgccagtccatccccaaataggtgagtgagccaagctgagctcagccaagccaggcccagatcagcagaactttccagctgccatgtagactcacgagaaaaaaataaatgtttattcctgagtgctgctgaagtttcatggtggtttggaattacaggattaatgtggcaagaaataactaatacacagattgaagctgctctgttggcctgcacctggagtacagaagatgtaggacagagctacagcaagcaggcacaaggcacaaagcattaacaagaaagaaacattcatgtaagccactgagatatggagtctatttgttacccagagtaacctagcccatagtgactgatataccaactgacatgcctaactgtgcttgattcctcaatttctcatttctttttttctygctggttgatttcttttctatgctttctatttcatagaaactgcggttgcacagatctcctgtgacatggacatgcaacctcttctttcttggttattcatcctgaattttccctgactttggtcctatttctttaatttttttaaattttaatttttttaagcgatgaggtctcactatgttgcccagactggagtgcagtggtgcaatggtgaaatcacagctcactgcagactcgaactcctgggttcaagtgatcctcccacctcagcctcccaaagtgctgggattacaggaatgagccaccacatctggcccctgaccttagtgttaagattcatttctttcccttatattcgaggatcc

SEQ ID NO: 8292 - DNA, 1832 bp, Homo sapiens
atccaatgccatgcaaaccatgacacagtgaatacctcagagctaaacatccagccctgggcaaacatgtggagaccctgaattaactgaaattaaattatactttattgtggcatagggtcttataatagaaattaactagagttgcagaaaataaagacagctgaattcttatgcactcgagtttgtgagcttggattggtaccggctgaccttgactggatgggaaaccgagtttggaaaaagtacctattttaagtgttctttttgagttcattttaccatttgccatatgaggaacaggtatatgcctgttgcttccaagggccaggttgataataggttgtattaattgacctagaggttatgccagtgaggggtgcctatatgctaaagggactttcaagggacagaattttggaaaaatgaaagtgcattacaactttctcatgtcttgtctaacatccaggaatcattctcatgccaggataatgtctatcccagacaccaacatactgaaagaaacctacattttttccctctctctaacttctgtgaaatattgtattattttacagatattcattgccaatctgtgagagaggattctgtttgcctactgggttgacacctgacttggccacatgacttgctctaccaaagaaatgtgagagaagtgatgtgcttatgtttcctttgccatcatgaccagcaatgctccaggttttagaacactgatgcaaaaatgactgtcacttctcacttctccctttgtaatatgattctatagcaacttccaccaaatttggagatatggagatcgctgtccctagaagctgggctagcctgagacatgatttggtcaatagaatgtggtagaagcagtaatgtgcctttttgttaactaatttgcaggagggtttacactcttccattcactgttttggaattctgataccatcgtgtaattcagcacgggttagctgaaagaggagagaccagtggaccagggatgcattgtcttagctgaggtcatcctagaccagcctatgccagtccatccccaaataggtgagtgagccaagctgagctcagccaagccaggcccagatcagcagaactttccagctgccatgtagactcacgagaaaaaaataaatgtttattcctgagtgctgctgaagtttcatggtggtttggaattacaggattaatgtggcaagaaataactaatacacagattgaagctgctctgttggcctgcacctggagtacagaagatgtaggacagagctacagcaagcaggcacaaggcacaaagcattaacaagaaagaaacattcatgtaagccactgagatatggagtctatttgttacccagagtaacctagcccatagtgactgatataccaactgacatgcctaactgtgcttgattcctcaatttctcatttctttttttctcgctrgttgatttcttttctatgctttctatttcatagaaactgcggttgcacagatctcctgtgacatggacatgcaacctcttctttcttggttattcatcctgaattttccctgactttggtcctatttctttaatttttttaaattttaatttttttaagcgatgaggtctcactatgttgcccagactggagtgcagtggtgcaatggtgaaatcacagctcactgcagactcgaactcctgggttcaagtgatcctcccacctcagcctcccaaagtgctgggattacaggaatgagccaccacatctggcccctgaccttagtgttaagattcatttctttcccttatattcgaggatcc

SEQ ID NO: 8293 - DNA, 1832 bp, Homo sapiens
atccaatgccatgcaaaccatgacacagtgaatacctcagagctaaacatccagccctgggcaaacatgtggagaccctgaattaactgaaattaaattatactttattgtggcatagggtcttataatagaaattaactagagttgcagaaaataaagacagctgaattcttatgcactcgagtttgtgagcttggattggtaccggctgaccttgactggatgggaaaccgagtttggaaaaagtacctattttaagtgttctttttgagttcattttaccatttgccatatgaggaacaggtatatgcctgttgcttccaagggccaggttgataataggttgtattaattgacctagaggttatgccagtgaggggtgcctatatgctaaagggactttcaagggacagaattttggaaaaatgaaagtgcattacaactttctcatgtcttgtctaacatccaggaatcattctcatgccaggataatgtctatcccagacaccaacatactgaaagaaacctacattttttccctctctctaacttctgtgaaatattgtattattttacagatattcattgccaatctgtgagagaggattctgtttgcctactgggttgacacctgacttggccacatgacttgctctaccaaagaaatgtgagagaagtgatgtgcttatgtttcctttgccatcatgaccagcaatgctccaggttttagaacactgatgcaaaaatgactgtcacttctcacttctccctttgtaatatgattctatagcaacttccaccaaatttggagatatggagatcgctgtccctagaagctgggctagcctgagacatgatttggtcaatagaatgtggtagaagcagtaatgtgcctttttgttaactaatttgcaggagggtttacactcttccattcactgttttggaattctgataccatcgtgtaattcagcacgggttagctgaaagaggagagaccagtggaccagggatgcattgtcttagctgaggtcatcctagaccagcctatgccagtccatccccaaataggtgagtgagccaagctgagctcagccaagccaggcccagatcagcagaactttccagctgccatgtagactcacgagaaaaaaataaatgtttattcctgagtgctgctgaagtttcatggtggtttggaattacaggattaatgtggcaagaaataactaatacacagattgaagctgctctgttggcctgcacctggagtacagaagatgtaggacagagctacagcaagcaggcacaaggcacaaagcattaacaagaaagaaacattcatgtaagccactgagatatggagtctatttgttacccagagtaacctagcccatagtgactgatataccaactgacatgcctaactgtgcttgattcctcaatttctcatttctttttttctcgctggttgatttcttttctatgctttctatttcatagaaactgcggttgcacagatctcctgtgacatggacatgcarcctcttctttcttggttattcatcctgaattttccctgactttggtcctatttctttaatttttttaaattttaatttttttaagcgatgaggtctcactatgttgcccagactggagtgcagtggtgcaatggtgaaatcacagctcactgcagactcgaactcctgggttcaagtgatcctcccacctcagcctcccaaagtgctgggattacaggaatgagccaccacatctggcccctgaccttagtgttaagattcatttctttcccttatattcgaggatcc

SEQ ID NO: 8294 - DNA, 1832 bp, Homo sapiens
atccaatgccatgcaaaccatgacacagtgaatacctcagagctaaacatccagccctgggcaaacatgtggagaccctgaattaactgaaattaaattatactttattgtggcatagggtcttataatagaaattaactagagttgcagaaaataaagacagctgaattcttatgcactcgagtttgtgagcttggattggtaccggctgaccttgactggatgggaaaccgagtttggaaaaagtacctattttaagtgttctttttgagttcattttaccatttgccatatgaggaacaggtatatgcctgttgcttccaagggccaggttgataataggttgtattaattgacctagaggttatgccagtgaggggtgcctatatgctaaagggactttcaagggacagaattttggaaaaatgaaagtgcattacaactttctcatgtcttgtctaacatccaggaatcattctcatgccaggataatgtctatcccagacaccaacatactgaaagaaacctacattttttccctctctctaacttctgtgaaatattgtattattttacagatattcattgccaatctgtgagagaggattctgtttgcctactgggttgacacctgacttggccacatgacttgctctaccaaagaaatgtgagagaagtgatgtgcttatgtttcctttgccatcatgaccagcaatgctccaggttttagaacactgatgcaaaaatgactgtcacttctcacttctccctttgtaatatgattctatagcaacttccaccaaatttggagatatggagatcgctgtccctagaagctgggctagcctgagacatgatttggtcaatagaatgtggtagaagcagtaatgtgcctttttgttaactaatttgcaggagggtttacactcttccattcactgttttggaattctgataccatcgtgtaattcagcacgggttagctgaaagaggagagaccagtggaccagggatgcattgtcttagctgaggtcatcctagaccagcctatgccagtccatccccaaataggtgagtgagccaagctgagctcagccaagccaggcccagatcagcagaactttccagctgccatgtagactcacgagaaaaaaataaatgtttattcctgagtgctgctgaagtttcatggtggtttggaattacaggattaatgtggcaagaaataactaatacacagattgaagctgctctgttggcctgcacctggagtacagaagatgtaggacagagctacagcaagcaggcacaaggcacaaagcattaacaagaaagaaacattcatgtaagccactgagatatggagtctatttgttacccagagtaacctagcccatagtgactgatataccaactgacatgcctaactgtgcttgattcctcaatttctcatttctttttttctcgctggttgatttcttttctatgctttctatttcatagaaactgcggttgcacagatctcctgtgacatggacatgcaacctcttctttcttggttattcatcctgaattttccctgactttggtcctatttctttaayttttttaaattttaatttttttaagcgatgaggtctcactatgttgcccagactggagtgcagtggtgcaatggtgaaatcacagctcactgcagactcgaactcctgggttcaagtgatcctcccacctcagcctcccaaagtgctgggattacaggaatgagccaccacatctggcccctgaccttagtgttaagattcatttctttcccttatattcgaggatcc

SEQ ID NO: 8295 - DNA, 1832 bp, Homo sapiens
atccaatgccatgcaaaccatgacacagtgaatacctcagagctaaacatccagccctgggcaaacatgtggagaccctgaattaactgaaattaaattatactttattgtggcatagggtcttataatagaaattaactagagttgcagaaaataaagacagctgaattcttatgcactcgagtttgtgagcttggattggtaccggctgaccttgactggatgggaaaccgagtttggaaaaagtacctattttaagtgttctttttgagttcattttaccatttgccatatgaggaacaggtatatgcctgttgcttccaagggccaggttgataataggttgtattaattgacctagaggttatgccagtgaggggtgcctatatgctaaagggactttcaagggacagaattttggaaaaatgaaagtgcattacaactttctcatgtcttgtctaacatccaggaatcattctcatgccaggataatgtctatcccagacaccaacatactgaaagaaacctacattttttccctctctctaacttctgtgaaatattgtattattttacagatattcattgccaatctgtgagagaggattctgtttgcctactgggttgacacctgacttggccacatgacttgctctaccaaagaaatgtgagagaagtgatgtgcttatgtttcctttgccatcatgaccagcaatgctccaggttttagaacactgatgcaaaaatgactgtcacttctcacttctccctttgtaatatgattctatagcaacttccaccaaatttggagatatggagatcgctgtccctagaagctgggctagcctgagacatgatttggtcaatagaatgtggtagaagcagtaatgtgcctttttgttaactaatttgcaggagggtttacactcttccattcactgttttggaattctgataccatcgtgtaattcagcacgggttagctgaaagaggagagaccagtggaccagggatgcattgtcttagctgaggtcatcctagaccagcctatgccagtccatccccaaataggtgagtgagccaagctgagctcagccaagccaggcccagatcagcagaactttccagctgccatgtagactcacgagaaaaaaataaatgtttattcctgagtgctgctgaagtttcatggtggtttggaattacaggattaatgtggcaagaaataactaatacacagattgaagctgctctgttggcctgcacctggagtacagaagatgtaggacagagctacagcaagcaggcacaaggcacaaagcattaacaagaaagaaacattcatgtaagccactgagatatggagtctatttgttacccagagtaacctagcccatagtgactgatataccaactgacatgcctaactgtgcttgattcctcaatttctcatttctttttttctcgctggttgatttcttttctatgctttctatttcatagaaactgcggttgcacagatctcctgtgacatggacatgcaacctcttctttcttggttattcatcctgaattttccctgactttggtcctatttctttaatttttttaaattttaatttttttaagcgatgaggtctcactatgttgcccagactggagtgcagtggtgcaatggtgaaatcacagctcactrcagactcgaactcctgggttcaagtgatcctcccacctcagcctcccaaagtgctgggattacaggaatgagccaccacatctggcccctgaccttagtgttaagattcatttctttcccttatattcgaggatcc

SEQ ID NO: 8296 - DNA, 641 bp, Homo sapiens
tctcctgggccttcagagggagcgtggccctgctgacgcgtggacccagccttctggcctgcagaactgcgagtgaataaatgccttttgttgaagccacgggtgtgtggggctttgtcacagcagcggcaggacacagtcatgccaccctgcatccttcactcctcctgtcctagctccttcccctcctccacctttgcttcatgggcgctgcctggcaccttctctctttaacgcctcccctcctcgctgggatgcccctctctcaggcatccttcttgccccgtagctctgcacacccttctaggtgtgcggtgtgtgtttagcgtgcagcttctgcctcccyacagcgtgctccctgctgtgtgccggagacacagcccagtacctgccacacagtgagcctgcccattgtccagtgagaagagggggcttcgcatgtctgttaatcagtgaaatcagcctgcggttttctttagtatcctgctgcgaggttttgattcaaggttaaatgctgttataaaacaaatggggagatttgtcttaatggcctggaactgtttatctggcactggagggatctgttatttgaaaccatctgagcctggaacaacttagagatttctaaattaaattttaaa

SEQ ID NO: 8297 - DNA, 886 bp, Homo sapiens
atattttatttatttaacattacacacaacacatatgttacaggtattttctttaacaccacgtgtaacatatctgttctaggcgtttgacaaatttcgactcaatcctcagaacaaccccattttacagattaggaaattgaggtttacatagactaagcaactttcccaggtttattaagtgatgaaacggaatctgaaatctagacatttttgttccagaacccatgctcttaaccagtgcattgagctgcctattttctcacacctatagcaacatgaaattgacaaatattttgatcatagccaacttggtaagtaaaaaaagaaaaaaatctaattttagtttgcattttctgtactatgaccaaggttgaacatttcttcaaatgtttaagaaatatgtttttcccttatgtgaactgtttttaattgttgtctttttttccttttatctattgactttcttattggtttatagaagctctttacatattaagcagtccttctgtgatatggaatgcatgcatttttctattcttttatgtctttcaactttatgggttttttaacatcacataattaaaaaacatttatgtagtcaaaatgtgcacattttttggtatgtatttgtgtctatgtgtgtgtgcatatttaacatgctgagaagttctggccrtcctgagatttaaataattctcttttgtcttcttctagtacttttatcagtccattgaagtctttcatccatctggagattttttttttctgtaaaatgtgagggagggattccgttttttcccatacaccattaattgtataatctatcttctcctttcactggacatttttcctttataatatagtaaatgtcctcatgtgtttg

SEQ ID NO: 8298 - DNA, 886 bp, Homo sapiens
atattttatttatttaacattacacacaacacatatgttacaggtattttctttaacaccacgtgtaacatatctgttctaggcgtttgacaaatttcgactcaatcctcagaacaaccccattttacagattaggaaattgaggtttacatagactaagcaactttcccaggtttattaagtgatgaaacggaatctgaaatctagacatttttgttccagaacccatgctcttaaccagtgcattgagctgcctattttctcacacctatagcaacatgaaattgacaaatattttgatcatagccaacttggtaagtaaaaaaagaaaaaaatctaattttagtttgcattttctgtactatgaccaaggttgaacatttcttcaaatgtttaagaaatatgtttttcccttatgtgaactgtttttaattgttgtctttttttccttttatctattgactttcttattggtttatagaagctctttacatattaagcagtccttctgtgatatggaatgcatgcatttttctattcttttatgtctttcaactttatgggttttttaacatcacataattaaaaaacatttatgtagtcaaaatgtgcacattttttggtatgtatttgtgtctatgtgtgtgtgcatatttaacatgctgagaagttctggccgtcctgagatttaaataattctcttttgtcttcttctagtacttttatcagtccattgaagtctttcatccatctggagattttttttttctgtaaaatgtgagggagggattccgttttttcccatacaccattaattgtataatctatcttctcctttcactggacatttttcctttataatatagtaaatgtcctcrtgtgtttg

SEQ ID NO: 8299 - DNA, 607 bp, Homo sapiens
atcttgaattgatttttgtataagatgagagaggagaatccagtttcattcttctacttgtggattgccaattatcccagcaccataaactctgaaatccctggagaccaacacagtgactagcatgtagtagtaggcacttgataactatttgtcattacatttctagtgaattttaccagttgtggcactgggacaaagtgtcctataagatgagatattcaatctaaagccagattttaagggagaaacttggccttcaggcccaaggttgaagttgatctgcattacctgatgtagtagctaaacaatgttccccaaaagacatccatgtcccaattcccagaacctttgaatatctcagaatgaaacaytgaggtttgcttggccaaacagccagtcaacaacccaccccagggttggggtagctgtgacctaggtgtaaaggcctgaactccaatttttaagtgcttgtctcagaagaagtctgaactgcagaaggcacagcatccactaaagcccaaataaagccagcagaagaacctttgtgattacatttacggcccactggataatccaggatagtccccccatctcaaggctcttt

SEQ ID NO: 8300 - DNA, 884 bp, Homo sapiens
tatatcatgattcaatctttgctattcttttatgtgtagaagtccatgactcctctctcctcttgggtttaaaccttgcagacctggtcaaggaaaaataacaaaatagmcaaggtttgtgtgtgtttcctcatttgaaaagctcagggctaatattgtttttcagcttctcaaagacaatatgctcttcatcattgtgtttctggctcaatgtcctgacacataacagttaaggaataaatgattaatgagtttcagaaggatcttgatttaaactaactgttcattcattctagtcaagttagagggtagttggagctagcattacatctcagtactttgaacaacaactgaaggatagatgagttattaagaaagaacaatttaaacttatgtaagttgtcagactagaagaacctagtgggtgtagaattctctttatgtgtcatttcaattcaattccctttgtttatagtatttatgtatagttaaaactaatgtgtatgtacctgcttgtgttctgcttttcttagtgcagctattttctgttatcttacagagatatatttatattttatccgtttaataaaatttatggggcatctattaaatgtcaggcattgctagactttgggtatatgatatgaaaaactattcatgggctttccttcttggacgtcgtaaaaggggtgatgcttaatgagaaccagccttttaaagaacagaaggaagagtatgccaggaggaaggaacagtatgtgggatggcccagagggaggaaacagcctacatgttcagagaatagaaagattacggtggttgctgctcagtgaatggggacaacggatcgagcttgaaaaggcaggcaggggccatatcataca

SEQ ID NO: 8301 - DNA, 1019 bp, Homo sapiens
attttttacacaaaagagagcatactgaacatactgttctgcatctttctttttcacttaaccttggacgtctttccatttcatttcatagagagtttcattgttgttcttttggattttttgttttgttttggttcggtttgtttgtttgtttgtttgggacagggtctcactctgtcacccaggctggaatgcaatggcgccatcatggctcactgcagccttaaccttctgggctcaattgatgctcccacctcagcttcccaagtagctgggactacaagtgtgcaccaccacacctggctgatttttgtattttttgtagagacagggtttccccatgttgcccagactggtctctaactccttggctgaaacaatcctcctgcctcatcctcccaaagtgctgggattacaggcatgagccactgtgcccagtctccttgttagttttaacaactgcatagtatcccatcctgcggttattccatgatttccttcaatcaatcccttatggttaggcatttgggttgttttcagtctttggcttttctagcaatactgcagcatacacacttgtctacatgtcattttctatgagtctctgctttaaccaactccctagaaagggaattctgagggcagtagttcagcctggccaaactgacacataaaaagcatcacaccttcctctactcctgggtatgtatcctaaagaaattctcacagatgttcctaaggggatgcatctgagaatgttcattgcaaggtgtcattgggaggttggtaaggtagttaaaggtgatgsatgcacttaccaccatgtggggttattgggaggggcttctgagggacttggcactgtgcctagcctggggttagcgcccaatgcacgttagccatcgttgctgttcttccttcctgtttgcgtagcagcatcttaatccagctcatcgatgccacgctgggtgtccctcctacagccacccctctgtgacccgcctccacacagggctgga

SEQ ID NO: 8302 - DNA, 1019 bp, Homo sapiens
attttttacacaaaagagagcatactgaacatactgttctgcatctttctttttcacttaaccttggacgtctttccatttcatttcatagagagtttcattgttgttcttttggattttttgttttgttttggttcggtttgtttgtttgtttgtttgggacagggtctcactctgtcacccaggctggaatgcaatggcgccatcatggctcactgcagccttaaccttctgggctcaattgatgctcccacctcagcttcccaagtagctgggactacaagtgtgcaccaccacacctggctgatttttgtattttttgtagagacagggtttccccatgttgcccagactggtctctaactccttggctgaaacaatcctcctgcctcatcctcccaaagtgctgggattacaggcatgagccactgtgcccagtctccttgttagttttaacaactgcatagtatcccatcctgcggttattccatgatttccttcaatcaatcccttatggttaggcatttgggttgttttcagtctttggcttttctagcaatactgcagcatacacacttgtctacatgtcattttctatgagtctctgctttaaccaactccctagaaagggaattctgagggcagtagttcagcctggccaaactgacacataaaaagcatcacaccttcctctactcctgggtatgtatcctaaagaaattctcacagatgttcctaaggggatgcatctgagaatgttcattgcaaggtgtcattgggaggttggtaaggtagttaaaggtgatggatgcacttaccaccatgtggggttattgggaggggcttctgagggacttggcactgtgcctagcctggggttagcgcccaatgcacgttagccatcgttgctgttcttccttcctgtttgcgtagcagcatcttaatccagctcatcgatgccaygctgggtgtccctcctacagccacccctctgtgacccgcctccacacagggctgga

SEQ ID NO: 8303 - DNA, 787 bp, Homo sapiens
gcgggtaaggtccaggcttcgtgtcagtgtgtccaggagcatctggtccttctggacgccctctataaactcttccagggagagttcccctggggtagagagaaagggaatcagggggaggagggtgttcatttctgcagtccagagcacagaaccgggttcttgccaggggcagggacagagcccacgtgaggagaagtcagagcccctgctgcgggtgcagcaagcagaggaacccagagcccagattctggtccaggggcccctaaaagccaactttgtggctggggcagaggcaggtggaggaagtgaccagcacgggggcctttgggcctctcctcccttcctcaccctctcctttagtgaccttccacccctggtgaccccacatccatggtgacccctccgctggggagcccctcctcggccccctcaccatccccgttgacgtcaatcttggagaacactgtatcggtgaactcctctgcagtcatggtggtatcgctgcaggggttaatggcgcgaatggcctgggagggaagaaggggcagaagtgagaggggcccatccttatcctatctcaggggtaggattggggacggtcagagcttgtccggctcccaagagcagtgaggagtagagtgcagggtacccgggggcctaggcagagctgggactcaagagtcaaacttctatcgtcttttggtattgatgaggaaactgaggccaaggaagggaaggaacgtggcctgggtcacgcagctggtgaggsctacagctgccacca

SEQ ID NO: 8304 - DNA, 862 bp, Homo sapiens
ttaaggatcatgagcccagattgcaaacctaggacctcatgctaatctgagatcctttctattgacaagagtttagtcatcgccagaacccgaaatccagaccgttccaagcccctttggcaaaataggtgcctctgttacaggtaatttgtgctttaaggtttcatcttggtcattactgctgctgcagctgatttaaatattttaatgaatgatgttattgtctctgtgcctgggggtcttttcagcagaggtcgcaatttgaagaaggaaaaaaatacataaaaatagctctaaataagtcagtgatgatggatgacttgttgttgggtagcaaaacctaktctataatttcaccacgcacgaggctcacttgctaggaagggatgccccagtcttggaggggaggggcactgaggcacagaagtgagtcattggaggaactagggccatcttccaagagcatcttcaccagattgagccaaaactaagggcatggggcaggtaaatttttaagaataatcacaggggtatagcatcatgtgtaaagttactatcaacatgtggcttcaggggcaggtaaaatgttaagaataagcacaggggtatagcatcatgtgtaaagttactatcaacatgtggcttcaggggcaggagaaaatgatcacagtgttgatagttagatcaaatagcttgggagggtttgtctatgatttcactcgaagagaatgtgtcccaaggtgtgcatgacttgggcattgtggcttcttttactaaatgggtcccagttccaacacatgtgaccatcttaccaaggaggatgtgattctggtgcttatcgatgggcatgtctcaagcaatg

SEQ ID NO: 8305 - DNA, 862 bp, Homo sapiens
ttaaggatcatgagcccagattgcaaacctaggacctcatgctaatctgagatcctttctattgacaagagtttagtcatcgccagaacccgaaatccagaccgttccaagcccctttggcaaaataggtgcctctgttacaggtaatttgtgctttaaggtttcatcttggtcattactgctgctgcagctgatttaaatattttaatgaatgatgttattgtctctgtgcctgggggtcttttcagcagaggtcgcaatttgaagaaggaaaaaaatacataaaaatagctctaaataagtcagtgatgatggatgacttgttgttgggtagcaaaacctatkctataatttcaccacgcacgaggctcacttgctaggaagggatgccccagtcttggaggggaggggcactgaggcacagaagtgagtcattggaggaactagggccatcttccaagagcatcttcaccagattgagccaaaactaagggcatggggcaggtaaatttttaagaataatcacaggggtatagcatcatgtgtaaagttactatcaacatgtggcttcaggggcaggtaaaatgttaagaataagcacaggggtatagcatcatgtgtaaagttactatcaacatgtggcttcaggggcaggagaaaatgatcacagtgttgatagttagatcaaatagcttgggagggtttgtctatgatttcactcgaagagaatgtgtcccaaggtgtgcatgacttgggcattgtggcttcttttactaaatgggtcccagttccaacacatgtgaccatcttaccaaggaggatgtgattctggtgcttatcgatgggcatgtctcaagcaatg

SEQ ID NO: 8306 - DNA, 862 bp, Homo sapiens
ttaaggatcatgagcccagattgcaaacctaggacctcatgctaatctgagatcctttctattgacaagagtttagtcatcgccagaacccgaaatccagaccgttccaagcccctttggcaaaataggtgcctctgttacaggtaatttgtgctttaaggtttcatcttggtcattactgctgctgcagctgatttaaatattttaatgaatgatgttattgtctctgtgcctgggggtcttttcagcagaggtcgcaatttgaagaaggaaaaaaatacataaaaatagctctaaataagtcagtgatgatggatgacttgttgttgggtagcaaaacctattctataatktcaccacgcacgaggctcacttgctaggaagggatgccccagtcttggaggggaggggcactgaggcacagaagtgagtcattggaggaactagggccatcttccaagagcatcttcaccagattgagccaaaactaagggcatggggcaggtaaatttttaagaataatcacaggggtatagcatcatgtgtaaagttactatcaacatgtggcttcaggggcaggtaaaatgttaagaataagcacaggggtatagcatcatgtgtaaagttactatcaacatgtggcttcaggggcaggagaaaatgatcacagtgttgatagttagatcaaatagcttgggagggtttgtctatgatttcactcgaagagaatgtgtcccaaggtgtgcatgacttgggcattgtggcttcttttactaaatgggtcccagttccaacacatgtgaccatcttaccaaggaggatgtgattctggtgcttatcgatgggcatgtctcaagcaatg

SEQ ID NO: 8307 - DNA, 862 bp, Homo sapiens
ttaaggatcatgagcccagattgcaaacctaggacctcatgctaatctgagatcctttctattgacaagagtttagtcatcgccagaacccgaaatccagaccgttccaagcccctttggcaaaataggtgcctctgttacaggtaatttgtgctttaaggtttcatcttggtcattactgctgctgcagctgatttaaatattttaatgaatgatgttattgtctctgtgcctgggggtcttttcagcagaggtcgcaatttgaagaaggaaaaaaatacataaaaatagctctaaataagtcagtgatgatggatgacttgttgttgggtagcaaaacctattctataatttcaccacgcacgaggctcacttgctaggaagggatgccccagtcttggaggggaggggcactgaggcacagaagtgagtcattggaggaactagggccatcttccaagagcatcttcaccagattgagccaaaactaagggcatggggcaggtaaakttttaagaataatcacaggggtatagcatcatgtgtaaagttactatcaacatgtggcttcaggggcaggtaaaatgttaagaataagcacaggggtatagcatcatgtgtaaagttactatcaacatgtggcttcaggggcaggagaaaatgatcacagtgttgatagttagatcaaatagcttgggagggtttgtctatgatttcactcgaagagaatgtgtcccaaggtgtgcatgacttgggcattgtggcttcttttactaaatgggtcccagttccaacacatgtgaccatcttaccaaggaggatgtgattctggtgcttatcgatgggcatgtctcaagcaatg

SEQ ID NO: 8308 - DNA, 862 bp, Homo sapiens
ttaaggatcatgagcccagattgcaaacctaggacctcatgctaatctgagatcctttctattgacaagagtttagtcatcgccagaacccgaaatccagaccgttccaagcccctttggcaaaataggtgcctctgttacaggtaatttgtgctttaaggtttcatcttggtcattactgctgctgcagctgatttaaatattttaatgaatgatgttattgtctctgtgcctgggggtcttttcagcagaggtcgcaatttgaagaaggaaaaaaatacataaaaatagctctaaataagtcagtgatgatggatgacttgttgttgggtagcaaaacctattctataatttcaccacgcacgaggctcacttgctaggaagggatgccccagtcttggaggggaggggcactgaggcacagaagtgagtcattggaggaactagggccatcttccaagagcatcttcaccagattgagccaaaactaagggcatggggcaggtaaattkttaagaataatcacaggggtatagcatcatgtgtaaagttactatcaacatgtggcttcaggggcaggtaaaatgttaagaataagcacaggggtatagcatcatgtgtaaagttactatcaacatgtggcttcaggggcaggagaaaatgatcacagtgttgatagttagatcaaatagcttgggagggtttgtctatgatttcactcgaagagaatgtgtcccaaggtgtgcatgacttgggcattgtggcttcttttactaaatgggtcccagttccaacacatgtgaccatcttaccaaggaggatgtgattctggtgcttatcgatgggcatgtctcaagcaatg

SEQ ID NO: 8309 - DNA, 862 bp, Homo sapiens
ttaaggatcatgagcccagattgcaaacctaggacctcatgctaatctgagatcctttctattgacaagagtttagtcatcgccagaacccgaaatccagaccgttccaagcccctttggcaaaataggtgcctctgttacaggtaatttgtgctttaaggtttcatcttggtcattactgctgctgcagctgatttaaatattttaatgaatgatgttattgtctctgtgcctgggggtcttttcagcagaggtcgcaatttgaagaaggaaaaaaatacataaaaatagctctaaataagtcagtgatgatggatgacttgttgttgggtagcaaaacctattctataatttcaccacgcacgaggctcacttgctaggaagggatgccccagtcttggaggggaggggcactgaggcacagaagtgagtcattggaggaactagggccatcttccaagagcatcttcaccagattgagccaaaactaagggcatggggcaggtaaatttttaagaataakcacaggggtatagcatcatgtgtaaagttactatcaacatgtggcttcaggggcaggtaaaatgttaagaataagcacaggggtatagcatcatgtgtaaagttactatcaacatgtggcttcaggggcaggagaaaatgatcacagtgttgatagttagatcaaatagcttgggagggtttgtctatgatttcactcgaagagaatgtgtcccaaggtgtgcatgacttgggcattgtggcttcttttactaaatgggtcccagttccaacacatgtgaccatcttaccaaggaggatgtgattctggtgcttatcgatgggcatgtctcaagcaatg

SEQ ID NO: 8310 - DNA, 1814 bp, Homo sapiens
ccttgagctcaggagttggagaccagcctggacaaccgagcaaaattccttctstacaagaaatacaaaaattagccagacatggtggtgcactcctataatcccagctacttgggaggctgaggtgggaggactgcttgagcccaagaggtggaggttgcaaccagccaagattgtgccactgtactccagcctggatgacagaaccagaccctgtatcaaataataataataataattttatttaaaaagaatcagctgggcttggtggctcatgcctgtaatcctagcactttgggaggcccaggcaggtggatcacttcaggccaggagttcgagaccagacttgctaacacagtgaaaccccatctctactaaaaatgccaaaaaatagctgggcgtggtggtgcataactgtaatcccagctacttgggaagctgagacacaagaatcacttaaacccaggaggcagagtttgccatgagccgagattgcaccactgcactccagcctaggtgacagagcaagactctgcttcaaaaaaaaaaaaagaaagaaagaaaagaaaaaaaagattctattgaatgagaactgtgggcatcatcctgcaaagttataactattagtagtaaaagaaatagtttctaaacccatattatgccttaaatcatactaacaattctagctgatctaccacagatttttacagctagaagtaatctaatgggtcacttaattaaagcccctaaattttggataaagagcctgaggttcagcgacaacctaggacttgttacaggcggtggcaggtgacaatgagaacctcatcttgctggctccccacctaatgattttgcaggactccacgatgcctctctttgggtgaaacaaaagtttattcgagttcaggcaagaaatctagggtttgaaaaaggcaagagtggccgggcgcggtggctcacacctgtaatcccagcactttgggaggccgaggagggcagatcacgaggtcaggagatcgagaccaccctggctaacacggtgaaaccccgtctctactaaaaatacaaaaaattagccaggcatggtggcaggcacctatagtcccagctactcgggaggctgaggcaggagaatggtgtgaacccaggaggcggagcttgcagtgagccgagatcgcgccactgtactccagcctgggcgatagagcaagactccgtcccaaaaaaaaaaaaaagcaagagtttcaacattttttatttccttgagtagatcttaaaacacaaaagagaagcatgaatcatattccacctttatttacaacatcttgtgtcttccaatttctacaaataattgagagttctgcagcattgagaatggtcagcaaaaagggcaaatttttgctccatatcaaatgctgctgccccttaactaggtgcctgtctggaaggctggcccaggagttccccacgctggtcccaaggaggggcacaagctcagggtttgtttctgccacctggaaggcaatcgtcagagcctgccatgtgtgcatgtggatgcctctgtgtatttttagaacgtttttaaaagggaggcagccaaaatatttttactacacagcaggcactgtttcatgttggagtgttggaaagaaaagcaagagaaagaaaagacagggaggagaagatttaagaccagcgcacagattgaaatggttaatgccttctagggctgcagaacaagcactttgagtgctgaagacttctcccatctccacgtccctaactgtccccatgcagattccaggatccac

SEQ ID NO: 8311 - DNA, 1814 bp, Homo sapiens
ccttgagctcaggagttggagaccagcctggacaaccgagcaaaattccttctctacaagaaatacaaaaattagccagacatggtggtgcactcctataatcccagctacttgggaggctgaggtgggaggactgcttgagcccaagaggtggaggttgcaaccagccaagattgtgccactgtactccagcctggatgacagaaccagaccctgtatcaaataataataataataattttatttaaaaagaatcagctgggcttggtggctcatgcctgtaatcctagcactttgggaggcccaggcaggtggatcacttcaggccaggagttcgagaccagacttgctaacacagtgaaaccccatctctactaaaaatgccaaaaaatagctgggcgtggtggtgcataactgtaatcccagctacttgggaagctgagacacaagaatcacttaaacccaggaggcagagtttgccatgagccgagattgcaccactgcactccagcctakgtgacagagcaagactctgcttcaaaaaaaaaaaaagaaagaaagaaaagaaaaaaaagattctattgaatgagaactgtgggcatcatcctgcaaagttataactattagtagtaaaagaaatagtttctaaacccatattatgccttaaatcatactaacaattctagctgatctaccacagatttttacagctagaagtaatctaatgggtcacttaattaaagcccctaaattttggataaagagcctgaggttcagcgacaacctaggacttgttacaggcggtggcaggtgacaatgagaacctcatcttgctggctccccacctaatgattttgcaggactccacgatgcctctctttgggtgaaacaaaagtttattcgagttcaggcaagaaatctagggtttgaaaaaggcaagagtggccgggcgcggtggctcacacctgtaatcccagcactttgggaggccgaggagggcagatcacgaggtcaggagatcgagaccaccctggctaacacggtgaaaccccgtctctactaaaaatacaaaaaattagccaggcatggtggcaggcacctatagtcccagctactcgggaggctgaggcaggagaatggtgtgaacccaggaggcggagcttgcagtgagccgagatcgcgccactgtactccagcctgggcgatagagcaagactccgtcccaaaaaaaaaaaaaagcaagagtttcaacattttttatttccttgagtagatcttaaaacacaaaagagaagcatgaatcatattccacctttatttacaacatcttgtgtcttccaatttctacaaataattgagagttctgcagcattgagaatggtcagcaaaaagggcaaatttttgctccatatcaaatgctgctgccccttaactaggtgcctgtctggaaggctggcccaggagttccccacgctggtcccaaggaggggcacaagctcagggtttgtttctgccacctggaaggcaatcgtcagagcctgccatgtgtgcatgtggatgcctctgtgtatttttagaacgtttttaaaagggaggcagccaaaatatttttactacacagcaggcactgtttcatgttggagtgttggaaagaaaagcaagagaaagaaaagacagggaggagaagatttaagaccagcgcacagattgaaatggttaatgccttctagggctgcagaacaagcactttgagtgctgaagacttctcccatctccacgtccctaactgtccccatgcagattccaggatccac

SEQ ID NO: 8312 - DNA, 800 bp, Homo sapiens
gctgtctagctgtgccctccccacatgcccactttcctccctataacctgtctattccctgttttccagggaaacagtgctgctgagagcccacactgggaccttaacccccaggttccgtggccaggcgtggtgactcacgcctgtaatcgcagcactttgagaggctgaggcaggtggatcacctgaggtcaggagtttgagagcagcctggtcaacatggtgaaaccctgtctctactaagaatacaaaaattagccgggcgtggtggcacatgcctgtaatcccaactactcgtgaggctcaggcaagagaatcgcttgaacccgggaggtggcggctgcagtgagcagagactgtgccattgcagtccggcctgggcgacaagaacaaaactctgtctcaaaaaaaaaaaaagaaagaaaaaaaaagccgggcacggtggctcatgcctataatcctagcactttgggaggccaaggcaggtggatcatgagrtcaggagttcaagaccagcctggccaacatggtgaaaccccatctttactaaaaatacaaaaattagctaggcatggtggtgggcgggagcctgtaatcccagctactcgggaggtggaggcagagaactgcttgaacccagggggcagagattgcagtgagccgagataatgccactgcactctagcctgggtgacagagcaagtctccatctcaaaaacaaaaacaaaaaacaaaaaaccaaacaaacaaaaaaaactcccgggttccttgggccacgcagagcctgcctctctggttga

SEQ ID NO: 8313 - DNA, 807 bp, Homo sapiens
attaaatatttctctttatcagttggcaatcatgttttgtcggtggggacgttagaaagacattgcaggaggaaagggttttgcttccyggttaacttgtgctcacacagcagtttctgcagtgcaggacatatagatttcccagctcctggctcctgaagtgcatacatacccacatcttctccaaagcccagctgctgcaataaagctagcttttccagtgccaggctcctgaagcaccggtagccagaagtttcccccagcaccctcccctcctgggctgtttgtagcagtgtggctctggtgaggcaactccgtgtgaacagccttccccagcaccctagagagcagatctgcagcaagctctactagcacaacttctctgccacccagggagccaaggctgtgcagggtctggattcagccttggttgagaagaggggaggactcttactttgttgctgtatttcagccctgagggtagtggatgctgttattcctgtattctttagagttatttttagttcttcctagccaattccttgtttctccaatcctctgttatagtcaataattcttcacattaaacttttcttattcaaattactatatggtttctctgtcctcattggacttagactgatatgctaaggtttccattttctgatccccaagacatgcctattcatagtggtttccattttggatcactccactggggtaattataagatgaggatttccaacaccatatcacatctattaaatgatttatctcttcctaattataagcctataattagaggac

SEQ ID NO: 8314 - DNA, 807 bp, Homo sapiens
attaaatatttctctttatcagttggcaatcatgttttgtcggtggggacgttagaaagacattgcaggaggaaagggttttgcttcctggttaacttgtgctcacacagcagtttctgcagtgcaggacatatagatttcccagctcctggctcctgaagtgcatacatacccacatcttctccaaagcccagctgctgcaataaagctagcttttccagtgccaggctcctgaagcaccggtagccagaagtttcccccagcaccctcccctcctgggctgtttgtagcagtgtggctctggtgaggcaactccgtgtgaacagccttccccagcaccctagagagcagatctgcagcaagctctactagcacaacttctctgccacccagggagccaaggctgtgcagggtctggattcagccttggttgagaagaggggaggactcttacttkgttgctgtatttcagccctgagggtagtggatgctgttattcctgtattctttagagttatttttagttcttcctagccaattccttgtttctccaatcctctgttatagtcaataattcttcacattaaacttttcttattcaaattactatatggtttctctgtcctcattggacttagactgatatgctaaggtttccattttctgatccccaagacatgcctattcatagtggtttccattttggatcactccactggggtaattataagatgaggatttccaacaccatatcacatctattaaatgatttatctcttcctaattataagcctataattagaggac

SEQ ID NO: 8315 - DNA, 1310 bp, Homo sapiens
cagatgtgtagtggaagttaggtcatgcttaggtgagcaaaccatcattccgagcatttccccaggtgagacgtgtgattcacagcttctcggctttgcacgtgctgggactgcgctgcccccagggccttctggggaagctagttgagcatcttctctcccagtgctttccctgaccctcccacaggcagagccacttcctttcctcaccccatcgcgtgacccaaggagtcatagggcagcatttcccccactggggtgtgggttaatttgcatgtcgatctcccccagtagactgtgagcccctcgagggaggatagtatcttgatcagtatattaccttgcctggcatatattttggcctgagtgaatgtttcttgaaagaaccaaagtaactcgctctcgaccttgctggatcacccaggacacgcttttccaatggtataaagaagtgttgtctaccgggctgtgcagcaagtcttccatgattgttcttgccacacattactggatcctcagacccggaaaccacaagtcaggccgactagggagacctcattagagcacccagtggactctcactgctatggccacaactcagctgtggctgttttagcagcagcaggagcagaagacaggagctggcatatcccaggcaggcaaaggggtggctctttcatgtcaggaatgcccaggtgcaaagagggtggctttaggagcagaggctcccactgctcatcagaagaacrtaaatgggacaaacttcacataaactcccttcagtaaaaggtacataccaggctctggggatattctttgttacagcatctttgtctattgaaggaaatatcctaaaatgagagaaataacccagcatcagagaacttaaggaaacctctgcctggagcctcatgtgccatcacttccactgtagtttcttcgtctcctgcaatagtaaactgcctgtgaccacctgcttctcacctctctgtctttggttaaaccattgcctctagctggaatattcttgctcctgttcttctgcagtctctttctacctttgtctgattataccaaccaccacccctcaaacaggattgtgcccatatcctgttttccataggactctggattttccatatcaggagtccacaaacttgtttttttgtttgtttgtcttttttttttagacatagtcttgctctgtcgcccaggttggagcacagtggcatgatctcggctcactgcaacctctgtctcctgggttcaagcgattcttgtgcctcagcctcccgagtagctgggattac

SEQ ID NO: 8316 - DNA, 773 bp, Homo sapiens
aacgaatcatattatgtaaagtgcttggcacatggtggtttaaagcttgggctctgtctgcttgcaatcagacagaactgggttccacttctacctcttctgcctggtagctagtgaggccttgagcaagttacttaacctctttaatctcagctgcaaaatgcgaaggttaaatgacaaaagacatgtaaagcagtcagaacwgcgcttggctcatggtaggtactcaataaatattagtcatcaccgtcatcatctacctaagacgaagctggccaagaatatttatgcaattctttctacagttaattaccgaatgcttattatgtgccaggcattgttccaggcactgggaattcatcagtgtacaaaaatccctgcctcgtgaagcttaagtcttcttagcaagtatttagtgaatactcagtacgtgccaatgaactacacagcaatttccacgagactcccattttacagataagttaactacgcaaggtgaagaagctccaaccttgcgccaccaccccagaggtattctcccagcaattaggaaggctgggcggcggtcaactcccgggctggacttcggaagtggaaatgagcggccacctagtcccgagtggggcttcacccaagagctgctcactcggaccagcccggcctccagcagatactcggcgcggcagccacgcccccaggcgctccctctcctcgccggctgccgcagcgcccgaagtctcgctgacgccgcaagcgggcgaggcagggtgaaa

SEQ ID NO: 8317 - DNA, 943 bp, Homo sapiens
gcagtacttaatctgtgccaggcactgttctaggcacttcacaaatactaactcatttatcttcacaactctatgaggggagtactattacctccatgttgcacgtggggacactcggggccaatgacagtttggcacattggtcagccgactgaaagctgtgatttggctcctgccttcctgactcactctgcccccaccaggcttcactcgggctaactgcggttctcagaactcccttggaggccttgttctctccagcyctgtgcttttgcgcatgctgtcttcctggactgatcttttccgcctgggctccgtcttctagaccagatcaggcccctctccttagcaatgccttttctggttaaggcagtcaggccaggcacacctgtctagcacccagcccttctctcctcaccctatttgcttacagatctgtctccaacaccagagactgtggttctgggcctggctgtctcctcattgttgagtccctggggcttgctactatgtctggcctataataggcactcaaagttttgctgaatttatgcataagctctccgaattttgctttcttgtctcccccatactgtctgccaccacatattgtagacacttagtcaatggaagtgggagtctgattttcctgccaacagcctaacttaataagaacaaagcaaaacaaaaaccgcccccttcccctttctcccatctccacatcataattaagatcccgaaaatttgggatccttccaagccctccgatcagtggaacccggcaggacatgagaagtcagactccctccactggccggctgggttgagggcagcccacaggactcagggcgccgcctcccgcaccctctctcagttcttgcctattaaggtaagcctcccccgaggaggggggaggggccggagggagggtcccctagaagct

SEQ ID NO: 8318 - DNA, 626 bp, Homo sapiens
caccagtgacagcatggtcacagggagcctctgcagaggtggctcactcactgacagctctgtgagtgtgggcatgcctttggtgtgtatgtgtgcgtttctaccaccacaacactgtcaggatggtctagaccctgctcgcagtcttgttctgccggggtgtgttgggcgcccccaaggctgccgtcatgcttgggggttttctgaaagacttgagacttagcatatggttgtattcaactaacattcactgcagcagcgtggtatggatgcacagctgggtgttaagggaaaaggcgcatgtagcagagtctggaggaatccacgtggggcttccttacgcgcactccctccctcaaggggttgyacgaagtgaatacttccccccgcaacgaaactgcaacacgtgtgatgtttttgcccagggaagcaaatgagagactcagtacccagagttttggctgagggctggctttataccctcggcccagcatgttccagaattccacactcccataagcaggtaggtgtcagcatagaccacgttgttcatacaaaagggtctaggcacggtgagccaagctactcttgtcagttaaaaaatggcgggaaccctcccaaaatcc

SEQ ID NO: 8319 - DNA, 802 bp, Homo sapiens
actataggcatgtgccaccacgcttggctaattttgcattttttgtagatggggttttgccatgttcgggcacaagtgatccacctgcctcagcctcccaaagtgttgggattacaggcgtgaaccaccttgtctagcctggagtcactgttaatttcttctgttggtccatggcaaggtttacagatgactttgtttggaaagcctgaatctgtttttaaaagcagggatggggagtgggaaatcacagtagttactacttgagtctatttagtggactataaaaattactatagcttcagtttaacctaatcagagcttgccatgaattcgagcctgcttgcctctcttcaggaaattaatctgggtcatttgactgtcccagttaagcaggtacatgttttaacagttttaaaggcaattgctgcctgtatttggtttttcagagtatatacccrgttatccttgccaatacatttaaacctcttagcctacagatcttttctttttaccagcctcagtgttttgtgtttttcatttttttgtggagacagggtctctatttcccaggctggtctcgaactcctggcctcaagcagtctgtctgcctcagcctctgaaagcattgggattaaaggcgtgagccaccatgcccaggccagccttgatgtttattaatccttttcagtgacagtctcactctccctctttctttctctagtgattccttcctctgacgcctgctcttacaataggcgtccctgcgagaagagtcacccagtggcatcaagagctctgggca

SEQ ID NO: 8320 - DNA, 733 bp, Homo sapiens
ctggggctctgaaattgcttaggaccattttaagcaccctcaaggccataaatttctcacctcctcctgtcacccacctccacctctgagttcggcttggccactgttatagcagcacaagcattctaggacccttttggcaaaagaattattctgaggagaaagtaaaaatctgtttagtcttatgagaaatgcagatagcacagtaagaatcacagcataaagcaggtcagtgcaatccagatttaagtctttaagtttgaatgagttcatatttttgcaamctggcatttattatgtaatacatacttgaatatttagtttgttacacaagactcagatgttgaatttttattcttactgattaggtttcacatatttccaccagatcttacattttaaaaaagtatcgggaggtcgaggcgggccgatcatgaggtcaggagatcgagaccatcctggctaacatggtgaaaccccatctctactaaaaatacaaaaaattagcggggcgaggtggctggcgcctgtagtcccagctactcgggaggctgaggcaggagaatggcgtgaacccggaaggcggagcttgcagtgagccgagatcgcgccactgcactccagcctgggcgacagagcgagactccgtctcaaaaaaagaaaaaaaaagtatcaattttattatagatgtcatatttttaaattctactcgtattgaaataaaagcgagatt

SEQ ID NO: 8321 - DNA, 733 bp, Homo sapiens
ctggggctctgaaattgcttaggaccattttaagcaccctcaaggccataaatttctcacctcctcctgtcacccacctccacctctgagttcggcttggccactgttatagcagcacaagcattctaggacccttttggcaaaagaattattctgaggagaaagtaaaaatctgtttagtcttatgagaaatgcagatagcacagtaagaatcacagcataaagcaggtcagtgcaatccagatttaagtctttaagtttgaatgagttcatatttttgcaaactggcatttattatgtaatacatacttgaatatttagtttgttacacaagactcagatgttgaatttttattcttactgattaggtttcacatatttccaccagatcttacattttaaaaaagtatcgggaggtcgaggygggccgatcatgaggtcaggagatcgagaccatcctggctaacatggtgaaaccccatctctactaaaaatacaaaaaattagcggggcgaggtggctggcgcctgtagtcccagctactcgggaggctgaggcaggagaatggcgtgaacccggaaggcggagcttgcagtgagccgagatcgcgccactgcactccagcctgggcgacagagcgagactccgtctcaaaaaaagaaaaaaaaagtatcaattttattatagatgtcatatttttaaattctactcgtattgaaataaaagcgagatt

SEQ ID NO: 8322 - DNA, 800 bp, Homo sapiens
agagaaagaaggagaagaaggaaaaggaaccacaactccaaactcctagttcccagtgtgagaagtcagtctggaagtagaggccagatgggattttttcctttgtgggaggtgggatggtggtaaactatagcaagtcagcatgtctgggatgaaatctggctttcctcattactagctaagtgactttgcgcaaatcattttatcactttcttcatctgtaaaatggggacagtagtatcatgtatggttgtttccagaatgaaacgtgatgtgcatgagaggtgtctggaacacagaaggtgctaaataaattgatgcaatgatattaagatcagaatggtaataataatacaagtattattattattatttagttcctaaaaattgcactgctaaaatgatactggtcatgatagctcttaaacatcattaatttatctatcgtaagaaaagggtatattactgcattctacctcaaaatgtaaattcacaaaaatgtatagagcatagtcaagagaactgtaactccaaggatatacaataaaatggaataattgtccatcatcatattcaacagagtgtgttttcaaatctaatattcaggccggwcatggtggctcacgcctgaaataccagcattttgtgaggccaaggcaggaggatcgcttgagccacagagttcgagacaagtttgggcaacaaaatgagactctgtctctaaaagagatttaaaaaaattagccaggcactgtggcctgtggcctgtcgtcccagctactcgagaggctaaggcagga

SEQ ID NO: 8323 - DNA, 800 bp, Homo sapiens
agagaaagaaggagaagaaggaaaaggaaccacaactccaaactcctagttcccagtgtgagaagtcagtctggaagtagaggccagatgggattttttcctttgtgggaggtgggatggtggtaaactatagcaagtcagcatgtctgggatgaaatctggctttcctcattactagctaagtgactttgcgcaaatcattttatcactttcttcatctgtaaaatggggacagtagtatcatgtatggttgtttccagaatgaaacgtgatgtgcatgagaggtgtctggaacacagaaggtgctaaataaattgatgcaatgatattaagatcagaatggtaataataatacaagtattattattattatttagttcctaaaaattgcactgctaaaatgatactggtcatgatagctcttaaacatcattaatttatctatcgtaagaaaagggtatattactgcattctacctcaaaatgtaaattcacaaaaatgtatagagcatagtcaagagaactgtaactccaaggatatacaataaaatggaataattgtccatcatcatattcaacagagtgtgttttcaaatctaatattcaggccggtcatggtggctcacscctgaaataccagcattttgtgaggccaaggcaggaggatcgcttgagccacagagttcgagacaagtttgggcaacaaaatgagactctgtctctaaaagagatttaaaaaaattagccaggcactgtggcctgtggcctgtcgtcccagctactcgagaggctaaggcagga

SEQ ID NO: 8324 - DNA, 782 bp, Homo sapiens
gggcgcctgtagtcccagttacttgggaggctgaggcaggagaatggcgtgaacccgggaggcggagcttgcagcgagccgaggtcgcaccactgcactccagcctgggcaacagagtgagactccgtctcaaaaaaaaaaaaaaaaaaaaaaaaaaagagggtggagctgaggaataaagtatcagctgaagattgcggggtgtagctttagtttgaaactttgttatagagaaactaaaagtgatttgtggtttaatttgttaatccttggaattggtggggggcagtgtaataatgtaaggagttactttataattccttatgcttttagtattcagtgcacactttcatttgttctccaaatatggatttatatagtgtttttaattaagtaaatgtaaattatcattttttcatctagtcatttattcaagggrtattttattgagcatcaactgtatgccaggctcttacaactcaggaaaagggagagagagggatgtatattaattgctgtctgttctattgctgggcaaacagaggaatgaatttagtataatgtacaagttacattggttttatatgtagcttttcccaggctaatctttggaagcacagagtagcaagctttctcctatttaaaaagaaagtcataagaatagctggaaattatcctgaaatgtattcttttggaggaagtagtatagtgtagtaattaagaacacaagttcttaatttgtcaaatttatacatcttttcctttgtgattaatgttgtttt

SEQ ID NO: 8325 - DNA, 724 bp, Homo sapiens
aggtagggaggggagacacaaggacaagggtgagcagcgcccacagggactcacctagatcctgcctttggggcttagcgggcctgtggcccttcctgtgggcaggaatcttgctgtacgtactggagccatccttgatgaactctggcaaggtcttcgccttgggtttgggcagccgagcgtgttgctgcaatcctaagacttgagaagactttgggagaaaaagcagaaatcatcagggtctcaagaaatggggaagcagagtccatgaaaaacggtcattcacgttaagtgtcacttcctctgcttctctctctacttccttttcaggctatgacctctcaaracccctggtgtttttgctacatgcatgtgaaatattctctggcaagggagaaagggatcagggtagaaaatgaggatagggttgggggttggagacagggtgttcctgggattttccacttaggaatttggtcaatgtcctttaattctcttgctgaaggggaaaaaagcaaagtggggataccgtaagaaaggagccacaaagccttgtgacgacgcctgagctgaggtggcccagaagaaagaggacttccattgcgttcccccatgtgccagatgctacatgacgtctgctctttaatcctcaagttaccctctgagtggtttcaattcccagtttatgtaggagagaaagtgtgccttgtcaaaggtcacacgg

SEQ ID NO: 8326 - DNA, 724 bp, Homo sapiens
aggtagggaggggagacacaaggacaagggtgagcagcgcccacagggactcacctagatcctgcctttggggcttagcgggcctgtggcccttcctgtgggcaggaatcttgctgtacgtactggagccatccttgatgaactctggcaaggtcttcgccttgggtttgggcagccgagcgtgttgctgcaatcctaagacttgagaagactttgggagaaaaagcagaaatcatcagggtctcaagaaatggggaagcagagtccatgaaaaacggtcattcacgttaagtgtcacttcctctgcttctctctctacttccttttcaggctatgacctctcaagacccctggtgtttttgctacrtgcatgtgaaatattctctggcaagggagaaagggatcagggtagaaaatgaggatagggttgggggttggagacagggtgttcctgggattttccacttaggaatttggtcaatgtcctttaattctcttgctgaaggggaaaaaagcaaagtggggataccgtaagaaaggagccacaaagccttgtgacgacgcctgagctgaggtggcccagaagaaagaggacttccattgcgttcccccatgtgccagatgctacatgacgtctgctctttaatcctcaagttaccctctgagtggtttcaattcccagtttatgtaggagagaaagtgtgccttgtcaaaggtcacacgg

SEQ ID NO: 8327 - DNA, 724 bp, Homo sapiens
aggtagggaggggagacacaaggacaagggtgagcagcgcccacagggactcacctagatcctgcctttggggcttagcgggcctgtggcccttcctgtgggcaggaatcttgctgtacgtactggagccatccttgatgaactctggcaaggtcttcgccttgggtttgggcagccgagcgtgttgctgcaatcctaagacttgagaagactttgggagaaaaagcagaaatcatcagggtctcaagaaatggggaagcagagtccatgaaaaacggtcattcacgttaagtgtcacttcctctgcttctctctctacttccttttcaggctatgacctctcaagacccctggtgtttttgctacatgcatgtgaaatattctctggcaagggagaaagggatcagggtagaaaatgaggatagggttgggggttggagacagggtgttcctgggattttccacttaggaatttggtcaatgtcctttaattctcttgctgaaggggaaaaaagcaaagtggggataccgtaagaaaggagccacaaagccttgtgacgacgcctgagctgaggtggcccagaagaaagaggacttccattgcgttcccccaygtgccagatgctacatgacgtctgctctttaatcctcaagttaccctctgagtggtttcaattcccagtttatgtaggagagaaagtgtgccttgtcaaaggtcacacgg

SEQ ID NO: 8328 - DNA, 704 bp, Homo sapiens
actgagtcttccatataaagatcatrttcctgctccaagtggccattactgagctgagagatgtcattgccacagggaggacctataggcacatgtaggttgaatgaaactctagttctacctggaagcccagacaagggatgggtcagtgagcaagactctcttcctagtctcaggccatacctgtggcgccctgatcctattctcatgacattggacctgggcagatgtgacaaattcagagaactatgattttgactcaagggtttgtagatttcctttttcactctaatttcagtgtctaaagtcctcacaaccatgaacaatctgagtatttgatgagacagggctaaatattgcagtttttctcctagaaatcatttgagggtatttgctttaagttgattggaaaaatatggcgtaactgtttgcacaaacttgggacaaatgatattgggataacgatctactagaatagggacattttacccacagtttctgggagaaaaaccgaggaatttctatcatgaccagccttcaggcctcctgaaatatatctctcacagtgtcctattcttatgctgaggagcctgaggtccctgtgtgaggattagacagtggattgttatgtgtgtaggggaatcagcttaatgtgtctgtccatgtctgaatttattgcagaaattgaaaagaaggggaagggg

SEQ ID NO: 8329 - DNA, 704 bp, Homo sapiens
actgagtcttccatataaagatcatattcctgctccaagtggccattactgagctgagagatgtcattgccacagggaggacctataggcacatgtaggttgaatgaaactctagttctacctggaagcccagacaagggatgggtcagtgagcaagactctcttcctagtctcaggccatacctgtggcgccctgatcctaytctcatgacattggacctgggcagatgtgacaaattcagagaactatgattttgactcaagggtttgtagatttcctttttcactctaatttcagtgtctaaagtcctcacaaccatgaacaatctgagtatttgatgagacagggctaaatattgcagtttttctcctagaaatcatttgagggtatttgctttaagttgattggaaaaatatggcgtaactgtttgcacaaacttgggacaaatgatattgggataacgatctactagaatagggacattttacccacagtttctgggagaaaaaccgaggaatttctatcatgaccagccttcaggcctcctgaaatatatctctcacagtgtcctattcttatgctgaggagcctgaggtccctgtgtgaggattagacagtggattgttatgtgtgtaggggaatcagcttaatgtgtctgtccatgtctgaatttattgcagaaattgaaaagaaggggaagggg

SEQ ID NO: 8330 - DNA, 704 bp, Homo sapiens
actgagtcttccatataaagatcatattcctgctccaagtggccattactgagctgagagatgtcattgccacagggaggacctataggcacatgtaggttgaatgaaactctagttctacctggaagcccagacaagggatgggtcagtgagcaagactctcttcctagtctcaggccatacctgtggcgccctgatcctattctcatgacattggacctgggcagatgtgacaaattcagagaactatgattttgactcaagggtttgtagatttcctttttcactctaatttcagtgtctaaagtcctcacaaccatgaacaatctgagtatttgatgagacagggctaaatattgcagtttttctcctagaaatcatttgagggtatttgctttaagttgattggaaaaatatggcrtaactgtttgcacaaacttgggacaaatgatattgggataacgatctactagaatagggacattttacccacagtttctgggagaaaaaccgaggaatttctatcatgaccagccttcaggcctcctgaaatatatctctcacagtgtcctattcttatgctgaggagcctgaggtccctgtgtgaggattagacagtggattgttatgtgtgtaggggaatcagcttaatgtgtctgtccatgtctgaatttattgcagaaattgaaaagaaggggaagggg

SEQ ID NO: 8331 - DNA, 877 bp, Homo sapiens
ttccttagataaattcctgccttcctgcaccttacttgccccgggagaagctttggccaccaccttccaagtccttgcttaatttctcaaattgtttagaaatataactgtgaagaatactatttattgaggcctttctggggatctcaacattaagtacaaaattaaatatattcttttctccaaaagaataaaatacaacttaatttaaccacaccagaaacataattcagaatttgaagcaaatttctcatttaaccgaaaaccaagatgaaggataattcaagacaagaaactggcacctattttcagggtaagagtccagctttccctttccagtggcagtcttcccaaaataaaagaaaaaaagtaattattcagagaagacaagcactgcaggacaaccattgggcgggttataaacacctttcattatatggcatgacctgcaaggaatgcttccatcattccaagatttaaagccacctagaaatacagcaacttcatgttcatcagaatcagaagtttgtacagtagccagagatctttaaaagctcaaagcgcttcctagcgcacacttyatgtaacagttcactcagcaagcccatgatgcctgtagtataaaagcaaatgttgcagaacttcatcatgtgatcaaagctgcagaaggagaaagagaccttgcatcaggctgtgtcatgcctcagtcacctttgactactccgaagaggaaagaactctaagaaggccaccctctgtctctcagatccaaaactacacatgcagagaacctggagacatttagggaggcatgccacaccctcggggctcgtcacacaggcatggctctacactgctctctggggcaggtgtcagg

SEQ ID NO: 8332 - DNA, 1383 bp, Homo sapiens
ccttaaaagagcactactgaatcttcataacaagattatgtatttgttatgtggaaagcaaaaataggtatcaaattcatattcgaattttgcattttgagacttacagaggaatgggttgacaaatagctgacgattaattggatctgctaaatatgggcaccaatgaagtgtacccaccagaatgcatctctacacctccgttcacacaaatcacttcctctggaaaggcgcccgtggtaaaagtaggcatatgggaatgattcacttggggaaagttgtacccagaatatcaaaacagtttgctttctgtcgctatattcttgccataatttttctacccaaaggaaccacctgctattatggctgtgacacctgaaaagctttctgtatattgcaggagattgctcatgtgtgggtgggttttcaggctgttcagtggtattttaaaaaatagttctttggggaaaatattctcagagactggaacattgccttgtcttatcaaaattgctctgtagtcatgttcacaaataccttcaaacattgagctacagatggaattcagtagaagacatactgagctaatttcctttgtgtgacattacccagagaaatcaagctgtcagtatcctgaagaacaagccctcaaagtgagatggtggccaaagccataggaagcagaaatgaytgaagggcttgcccttcaaaaccttcttcccattctcccaaattcatcttttccaattaaaatttattacaaaaaaaaaccaaatagactcagcttgtctgacttgggatggttgtacacttatagtaaagatggtaaatattgggctgaaaaaaatcctgaatcctagatctttcttgatattccagaatatattcataaaagagaattactgaaagagagttttaggcatacagaatttcatactttgggcgaactagagacagtcatttctaagttatgcctttgctttatcaaactttagttcaatcatttaacaaatatttaatgagcatctcttttgtgtgaacactattgtgagcgttacgcagtgaacaaagcatttttaaaaaaattctttcttctatgcctacccacagtgcctaggccaaaaagctaaaagtgggctgggtgcggtagctcatgcctgttaatcccacactttgggagtccaagacaggaggattgcttgagcccaggagttcgagaccattcagggcaacaaagtgagaccccagtctctagaaaaaatcaagaaattagcggggcatggtgacatgcacatgtggtcccaactacatgggaggctgaggtgggaggaaggtctgagcccagaagctcaaggctgcagtgagccatgtttgcaccaatgc

SEQ ID NO: 8333 - DNA, 679 bp, Homo sapiens
aatcagattgagccctggcgtcaccccatggcaggatctaatcagatcacacctcctggcatcacckgatgggaacagccaatcagatcacacctcattatcctatgcttataaaacctgacctagcccccagccgggagacagatttgagtgtttcctcctgtctccttgccactcacagtaaacctttctcgctgcaaaaacgcagtgccttggtgtttggctttctgctgcatgtgggcaatagacccagttcggttcagtgactgacctagttggcagtgagctcagcacatgacgcagtggctcaggactccactcagcaagttccctgggactgcatccctttattgtcccattttccagggaggaaaccaaggctcaccatggcgaaggggatgcccgtggtcacagcgagtgagtggaggagcgagatctctaacccaggcgtgtggcatactcgaccctgagcaccaaaacatgcttgctagaaccatgacaacaacgtcaacaacgacaaataacagtgactgggtgtttgccgtgtgccaggcattgttctaagtgctccgtgggaactacgctgaccaccccatgaaggaagtgctctttcagatcccattttgcaaatgaggaaaccgaggctagcaagcagtcagactggaatgggagcccagga

SEQ ID NO: 8334 - DNA, 614 bp, Homo sapiens
ccttagtccactctactatttttccacagcacttgctacattctrtcatgctacataatttctttactgtgttcatggtctattttctgtttccaccattggccccgaactagaatataagtgtcacaagaacaggcatctttgttttgctcattgctgtatcctgagaacctagaatagaacttggcacacactatatactcaataaatatttgttgaataaatgaatgtagatctgatcagtgtagattgccagtttctaattaagcttaaattaatgtataagtattcatctagacccatgtttctagccgattggtaagtacattgagcaagacaaaagtacacgtctaaactaaaaataaacatttattgtgttacaatataaatgaaagcaaatgggttacgtagtaatactgctctttaaaaagtgttattcttcagtatcaaagattggggatactgattacttctgacttattcccatatttttctagttataaatgctgaatccacaagtctagaatgttcaatcatgttcacccacttctcaatttaaatataagtattaaatatcaaatctattttaggctcctgattgacatcattatttg

SEQ ID NO: 8335 - DNA, 614 bp, Homo sapiens
ccttagtccactctactatttttccacagcacttgctacattctgtcatgctacataatttctttactgtgttcatggtctattttctgtttccaccattggccccgaactagaatataagtgtcacaagaacaggcatctttgttttgctcattgctgtatcctgagaacctagaatagaacttggcacacactatatactcaataaatatttgttgaataaatgaatgtagatctgatcagtgtagattrccagtttctaattaagcttaaattaatgtataagtattcatctagacccatgtttctagccgattggtaagtacattgagcaagacaaaagtacacgtctaaactaaaaataaacatttattgtgttacaatataaatgaaagcaaatgggttacgtagtaatactgctctttaaaaagtgttattcttcagtatcaaagattggggatactgattacttctgacttattcccatatttttctagttataaatgctgaatccacaagtctagaatgttcaatcatgttcacccacttctcaatttaaatataagtattaaatatcaaatctattttaggctcctgattgacatcattatttg

SEQ ID NO: 8336 - DNA, 803 bp, Homo sapiens
aggtaaattcacatacacaactgcaggtaaaaacatgtaaaataatataaaaataaattgaaggctacttttatatatttactgaattaagtagtgtaataaatactatgataagcaaaaagcttcaatcgcacaattcagtttcactgaagttacagtagtgtttgtaaatacgagttttaaaatttaagttacaaatattaaagcactgaaaaactagtataaaagtgaattttggcacgtaagtgagctcttatgtcattagtatttgacatcctgggacaatgaggaagccagttctcacctacttttttgaggtacaactatccaactagatcagcaacacggctggaatacttcgtagtttacaatctttgaattgaacttttcccttttgagaagcccaaggagcaacccagagcttcttactgtgcaaaaattctccaaaatcctaatagaatttaggagggaactttttcttgcgacctgaagggcccagtgtccaggcttcaggtcagatagcccccagggctcagaggggccggctcaactccttgccarcggcccttccctaggataataatcccatttcctccaatttctgtctccttcttccaatcaaaaacagaaaaatcccatgtaaaaacataaaataacccgtaacttcagcgacttcaacattatcccacgcactctgggtgatataaactgaagctgctaataggaaagttagcaaaaagcatgtaagccccgggaggactgcctgtccctgggaacccacccccgctctttgctgggtccct

SEQ ID NO: 8337 - DNA, 680 bp, Homo sapiens
gtgaccagcctgaccaatatggtgaaataccttctctactaaaagtacaaaaaacaaaaaattagctggacatggtggtagatgcctgtaatcccagctactcttgaggctgaggcaggagaatcgcttgaacacaggagactcaggttgcagtgagccaagattgagctattgcactctagcctgggtgacagagcgagactctacctcaaaaaaaaaaaaaaaaaaraaaaaaagaaaaagaaaaaagtttctcttttaaaaaacaatcattttacaatgtgtcatattacaaataattaagataaaattaaatgagataaaatgtaatttggggagcttagtggatatcccaccagagcagccagcacacttttgagagctttagacagggactaagttcatttctgaacatgtagacttctagggcaacttggagaaatggctgattccagagctggcacagggaaagttcaagatgagcctggaacatcttatggtgccataagaaaagggcaaattctaaaaaggttggaaacattgaaaggatgcaggagctaatctgaaggggcttccacttaccacatttgagacaatatgaacattaacataagccaaaataaggccgggctcagtgggtcatgcctataatcccagtactttgagaggctgaggtggga

SEQ ID NO: 8338 - DNA, 759 bp, Homo sapiens
aacaatgagtgttttcccacatttgtttttatctcttgctatatctatgcctatatttgtataactctctacaatataaatactttcattgctaggtcatttgaaattaagttgtagacatcaagaactttacccataaatactccagcacacagctcctaagaatgaggacatttttctaagtaaccacaatagcaatatcacagctaaaaaattaataataactccaaaatataatctaataccccttcatttattcttaaattagaaaagcttgccttttgatcagacaatgactttgctttccaaagtggaattgtggtcctagttccctacagatccattaggatttataggtatagtcaagatgtacagttcacataagatagttgcattctctggttctgggatgacaaagggatgttcaggcccccagaatgggctgtttctagggtagaccaggtccatcatcaagtgggaccagggagatgttgctttgggactctgagggttgccatgagccctacatacctgttagagtttytaaccccacagctccacaatgtatgcttgctctgtctctttctaaaatccctgtttctactctcctttgtctacttgcattggcaaatggaaacactatacactagtcagctccactcttggcagttctgattcagtaggtctgggatgggaatctcgagaaattttatttttaaaaagctctccaagatctgcaatctggcagggggagggggg

SEQ ID NO: 8339 - DNA, 594 bp, Homo sapiens
taagggacaaacacacagaagggcytgtaggagtttggaaaagagttgtcttccccacccccccacaactgaaagaggaaagacatttcaaggaaacagtcacttgccagttttgggtatcattgaacatggaaccagaggtccaggaattacacgatggcccaagacaagcatctaaagggcaagaccaaaggaagagcttcccttccctgcacccattttccctctcaaatgatctttccctgatctttattctctgtcaccaccaaacttcttgcctctgtctagacaggcatacaagggccaaccaacccgctgtgaataggtgcctcaggcaactgaagtccaaatagaatgaggcaagggcgccctcactcaactcatccaaaacgagaaaaaactaagaagtcccaaccagagtcatgtttcttctacaccatgacactgcatgtgtaagcccaccctacatccttttaagaatgcaacattttacaaaagaataacttaactgcacatcatatgccaccgttttatgctaaagatcacacgtactgtgttgaattacttcagaaatgactttaacatcgacagcca

SEQ ID NO: 8340 - DNA, 1179 bp, Homo sapiens
ccgagacttcaaaatggtgctggtggcctcacacccaccaggttcttcgtcactgttcacactgtccgtcctttttttttttttttttttttttttctccgaaacagggtcgcccaggctgaatgcagtggtgtgctcttggctcactgcaacctccacctctcagattcaagtgatcctcccacatcagcctctcgagaggctgggattacaggcatgtgccaccatgcccagctaatgtttgcatttttagaagagagagcctttcaccatgttggccaggctggtctcaaactcctgacctcaagtgatctgcctgcctcggcctcccaaagtgctgggtttacaggtgtgagccactgcaccttgcccacattgttcttttcaggggcctctgagccactcaataccttcttcatatattaaaggagggacgaatcttcatctttcaaaagggagggcgatggttttaaaagcaaagctctaacctatgagcttttactccaggacacaaacactggcctatggagctctgtggcccaagcacagggcagggtactcagtgggggcacaacacagaggacactgaaggctgggaaggggaagaatggatgggagcgagattcattaaaggttacaaaattacagctagataagaggagtaagttctactccataccactgtaagatggctgtacttaactaaaatattctagtttcraagagttagaaggaggatacggaacatttccaacacaaataaatgatcaatgttgagacgatggatatgctaattacctggatccaaccactacacattatactgaaacatcactatgtgctccataaatatgtacagttattatgtgccaattaaaaaaatttaaacctgttggttcaacttgactgaactgcaatctgatcagtagtcaacatgaataataccatcttagttcaagagtaaaacaatctcactgagaaaatttctcagaaaaagactcccaaaatgttatattgtgttaggttttgttttgctttggggtgtgtgtgtgtgtgtgtgtgtgtgtgtgtgtgtgtgtgtgtgtgttgaaaactggctctgaaagcatttctaaaagtggagtttccaacatcatcgtgaatccactcctgcacctcctcattgtacaaatatttact

SEQ ID NO: 8341 - DNA, 1179 bp, Homo sapiens
ccgagacttcaaaatggtgctggtggcctcacacccaccaggttcttcgtcactgttcacactgtccgtcctttttttttttttttttttttttttctccgaaacagggtcgcccaggctgaatgcagtggtgtgctcttggctcactgcaacctccacctctcagattcaagtgatcctcccacatcagcctctcgagaggctgggattacaggcatgtgccaccatgcccagctaatgtttgcatttttagaagagagagcctttcaccatgttggccaggctggtctcaaactcctgacctcaagtgatctgcctgcctcggcctcccaaagtgctgggtttacaggtgtgagccactgcaccttgcccacattgttcttttcaggggcctctgagccactcaataccttcttcatatattaaaggagggacgaatcttcatctttcaaaagggagggcgatggttttaaaagcaaagctctaacctatgagcttttactccaggacacaaacactggcctatggagctctgtggcccaagcacagggcagggtactcagtgggggcacaacacagaggacactgaaggctgggaaggggaagaatggatgggagcgagattcattaaaggttacaaaattacagctagataagaggagtaagttctactccataccactgtaagatggctgtacttaactaaaatattctagtttcgaagagttagaaggaggatacggaacatttccaacacaaataaatgatcaatgttgagacgatggatatgctaattacctggatccaaccactacacattatactgaaacatcactatgtgctccataaatatgtacagttattatgtgccaattaaaaaaatttaaacctgttggttcaacttgactgaactgcaatctgatcagtagtcaacatgaataataccatcttagttcaaragtaaaacaatctcactgagaaaatttctcagaaaaagactcccaaaatgttatattgtgttaggttttgttttgctttggggtgtgtgtgtgtgtgtgtgtgtgtgtgtgtgtgtgtgtgtgtgtgttgaaaactggctctgaaagcatttctaaaagtggagtttccaacatcatcgtgaatccactcctgcacctcctcattgtacaaatatttact

SEQ ID NO: 8342 - DNA, 831 bp, Homo sapiens
cccacatttctcaccacatggacgcctctgtttttaagctaaccacaatctccttcacatggtagccctttcaaacttcaaatatcttctaccaagaaaagcccaatccctttaaagggctcatttgattaggtcaggctcttagaggataatctccctatcttaaaatcaattgatttggggccttaactacatttgcaaaattccttcacagcggcacctatattggtgtttgctgaataacagggagggcgtgtgtgaacaccagaggctttaatcttgagggccatcttagaattctgcctgtgacaggattatttagtaaatattgatttaccctcttcatagaaaatttataatcaataagggaggcagatatggtgctttccttattgattacttacaaggtccagcaggcaatacaaagtagttaaatgggccatgtgtaagacaatatggtgaaacagaaggctcagtggcttcttgtaactagtcatactcaactaagttgatggctgctctgtgacaatatactctctatattgccaaatcttctcatttttaagagaagtaaaaattcttttgggttttttttttctttcttgaaataaggtctcactatgtcactcaggctggagtgcagtgacctcatcatagctgactgcagcctccaacttctgggctcaagtgatccttccacttcrgtcttctttgttgctgggatggcaggcatgcaccaccatatacctaggtaaaattttaattatttttttgtagagatgggatagctctatgttgcccatgctggtcttgagctcctgaccacaaggg

SEQ ID NO: 8343 - DNA, 649 bp, Homo sapiens
tgttaagaattcattcttccttctctactaaaaatacaaaaaaattagcccggcgtggtggcgggcgcctgtagtcccagctactctggaggctgaggcaggagaatggcgtgaacccgggaggcggagcttgcagtgagccgagatcgcgccactgcactccagcctgggcgacagagcgagactccgtctcaaaaaaaaaaaaaaaaaaaaaaaaaaaaaaaaaaaargaattcattcttcctgtaacacaaagaggaatgcagcaaatccagcagatggaggaaagaggaggaaccagaactgatgcacaggactctgtctgtatgccctaagaatgacttactcttctcatcagcacgtggttgccccacgattatcacaaaacttgttcaataacatctgcatctctgttccagaggaactggttactgccacttagcatagcaattagtatattacgcagtttgtatcgattaaatgaacctgctccgtcaagcagaacgagccccccaaaatgcagctaatgtgtttttctcaataaattatgcccctcaccaaaccatacaagatgcatttgtgagaactttaggaaggtattttataaacctcagaaataccgacttttcagacttggtaaatagattac

SEQ ID NO: 8344 - DNA, 816 bp, Homo sapiens
ccctacatgattcatataaatatttaagtttgagtagtactgctctggtagacactgatctctaacatctatcaaatacaccatattaatattactcatactatattatgtactacaatacagctcaatctctaacggagggttttttttcaatgccttatgcaggtttttgtagtagtagtggaggatttcctcgaataggaagaactgagttcctcagaatgttttatttgtgaacaggaattatttcctatctgtgagtaactgctaaaatgtgtgatattgataatgagaccacaggagaacaatggaagatgcaatttcttcaggctaaaggattcagagaaggtgtcacggggaagatggaacagaaatgagcattaaaaggtggttagatttaggaaattaaataaataaataaataaataaataaacaaacaaacatttcaaataggaaaacaatagcaaaggcaaaagccctgactagagtaggaggggttaggatggtgtggctccaagatggtgtcagtcattctcaccccctgktattcatgctcctgtgtcattaccactttaattaagactgatctgtgtcaaaaatataatattgctgaaataatagagtgtgatttctggggctatatcttaaaagacactgtaaagtaaattttaaaaatttacaaaataagacatcgtggcttatgttttcttttcttgcctcacttgctctgtgaggagtagcctccgtggcatgaggtgaggtccaaagcaataccagcaccaatttgccagctcaacggtgcattcactgtatga

SEQ ID NO: 8345 - DNA, 646 bp, Homo sapiens
tggtttcactagggcaggttccaagggtgaaaagaggctttaaagcaaagcacctggcattcgcttcttaggccagatccaacccatctaagcctgtgacatgatctgatgctcacacaccaatctcccttcacctacttctctttcctctctacctgcttggatcagcctgggcccccagcctgctgggaactccctgactgatcacccttttgccctcagccagattcttggcaatcccaacagctgtaaaccttgtctttctcctctcctgcttcaagcctgactgtaatggccacatcctgaggggtgggagaagggtcaacaaggaagtcacacacgtgctgctatggaccacaagccattcattcattcagcgaaaagtagtcattataaatagcatttactgagcacttagtctatgaaggcattgtcctaagcactttccatgacttaacacaacaaatatgtattgggcatccmtgaggcactgtgccaggtgctagagaatcagcagtgagcaagagagatgaggacccagccctcatgaggctggcagactcgtggagtcacaggcagaggaagggagaaatgagggaagggaagggaaggggaaaagggaaggaaggagggaggaagaaaggac

SEQ ID NO: 8346 - DNA, 755 bp, Homo sapiens
tctgccatggttattgggtttaagtgaaattctaaatttctttactttctttttttttttgaaatggagtttcactcttgttgcccaggctggaatgcagtggcactacctcagctcactgcaacttctgccttttgggttcaagcgattttcctgcctcagcctgctgagtagctgggactgcaggcctgcaccactgtacccagctaatttttgtgtttttagtagagatggggtttcatcatgttggccaggctggtctcgagctcctgacctcaagcgatccacccaccttggtcccccaaagtgctgggattacaggcgtgagccaccatgcccggctgaaattctaaatttctaatgcccactgcctttcaatgacccggattaaatgggactctcaaaagaaatggctttttgttgagtattgccatcagagaacccgggtttctgcagtttccttttatcctgtgagaaagatgctagtgattctttacttttgaacaagcatgattgaatagcctgttttagttactgtaacaatgctgtgtagcaattgtattatttggaaataatatgccatatacaataatataatatcaaaggacagtaaggctcctgtcttggttttagataaagagaaagcagatgctgttttattctcttggtggatggtttaaattgccatcagcggatcagtggttaattgatcrtcgatcagtggatcagtggttaattgatcattgaggactttt

SEQ ID NO: 8347 - DNA, 825 bp, Homo sapiens
tcggccccatcccggagacaaggcaagtgagagccagagaggcgatgggagggggataaagccagcagcatctggcctgacaaggatcatgacctggggaaccrgacagccctgagttcaatcctggctcagccacagcctggctgggaggacttggcaggttaagtatctcttggcaggttaagtgcctctgtgtcctgggctgtaaggtgagagtcctgtgagtgatgtctgtgattatgcctcgcacaggcagagtgtttggccctgtccctgcttctggaaaaagaattttcgacatctgcacacagacagttgtgaaaaaggaggagaagcagctactggctaaggggcacctggatagtgacacaaaacagcttctataatcctctacatggtcctatggggtgagggtcattactacccccgtttctcagatgagaaaaccaaggcacagggaagtacaagtgttctgtttatggacacctagtggtatggtttggctctgtgtttccacccaaattgcatctccaattgtaatccctgcgtgttgaaggaaggacttggtaggaagtgattgacttatggaggcagttttccccatgctgttctcgtgatggtgagtgagttctcacgagatctgatggtttaaaagtgtttggcagtccccctcctctctctctctcccgctgctatgtaagacatagcttgcttccctttggtctctgccatgattgtaagtttcctgaggcctcctcaggcatgtggaactgtgagtcaatgaaacctctttccttcataaattacccagtctcaggtagttct

SEQ ID NO: 8348 - DNA, 825 bp, Homo sapiens
tcggccccatcccggagacaaggcaagtgagagccagagaggcgatgggagggggataaagccagcagcatctggcctgacaaggatcatgacctggggaaccggacagccctgagttcaatcctggctcagccacagcctggctgggaggacttggcaggttaagtatctcttggcaggttaagtgcctctgtgtcctgggctgtaaggtgagagtcctgtgagtgatgtctgtgattatgcctcgcacaggcagagtgtttggccctgtccctgcttctggaaaaagaattttcgacatctgcacacagacagttgtgaaaaaggaggagaagcagctactggctaaggggcacctggatagtgacacaaaacagcttctataatcctctacatggtcctatggggtgagggtcattactacccccgtttctcagatgagaaaaccaaggcacagggaagtacaagtgttctgtttatggacacctagtggtatggtttggctctgtgtttccacccaaattgcatctycaattgtaatccctgcgtgttgaaggaaggacttggtaggaagtgattgacttatggaggcagttttccccatgctgttctcgtgatggtgagtgagttctcacgagatctgatggtttaaaagtgtttggcagtccccctcctctctctctctcccgctgctatgtaagacatagcttgcttccctttggtctctgccatgattgtaagtttcctgaggcctcctcaggcatgtggaactgtgagtcaatgaaacctctttccttcataaattacccagtctcaggtagttct

SEQ ID NO: 8349 - DNA, 825 bp, Homo sapiens
tcggccccatcccggagacaaggcaagtgagagccagagaggcgatgggagggggataaagccagcagcatctggcctgacaaggatcatgacctggggaaccggacagccctgagttcaatcctggctcagccacagcctggctgggaggacttggcaggttaagtatctcttggcaggttaagtgcctctgtgtcctgggctgtaaggtgagagtcctgtgagtgatgtctgtgattatgcctcgcacaggcagagtgtttggccctgtccctgcttctggaaaaagaattttcgacatctgcacacagacagttgtgaaaaaggaggagaagcagctactggctaaggggcacctggatagtgacacaaaacagcttctataatcctctacatggtcctatggggtgagggtcattactacccccgtttctcagatgagaaaaccaaggcacagggaagtacaagtgttctgtttatggacacctagtggtatggtttggctctgtgtttccacccaaattgcatctccaattgtaatccctgcgtgttgaaggraggacttggtaggaagtgattgacttatggaggcagttttccccatgctgttctcgtgatggtgagtgagttctcacgagatctgatggtttaaaagtgtttggcagtccccctcctctctctctctcccgctgctatgtaagacatagcttgcttccctttggtctctgccatgattgtaagtttcctgaggcctcctcaggcatgtggaactgtgagtcaatgaaacctctttccttcataaattacccagtctcaggtagttct

SEQ ID NO: 8350 - DNA, 623 bp, Homo sapiens
agtaaaattcatctcagagctaaagtatcagctgcacttcaccagataacagcaccagtatgtcctgggagcagagtccatcagttcccatgctatgagacagatagcctacacacacaaaaggcctgacggatcaacctattccataaaactgcctgctccaactcatgttcacagtctccttccttccctaggagtagaggagactttgaggaaagcagtcaaatactccacggaaaagagttatccctgttcaatggtttttgctgaaatggtgtcaaaataaaggaaagtccctggaaggccaagwggggtgacttagaaaagtaaaatgcagtgacttttgttaagatgactcagctgacctgatcctaccccgcaaagtaggctggatttggggaaagaaatgaatccctggaactcagagctgcgggtagaggatttcaaacagaaccattgctaaatacaggttccagcaccaatgtctcccaaagagaaagcagtagtgtttttttgtttttttggtgttttttttttcagctaaatcacacacacattccctctctttcttcccctctctcattgttcattagccttcttatttgatgaaaccagaagcacct

SEQ ID NO: 8351 - DNA, 623 bp, Homo sapiens
agtaaaattcatctcagagctaaagtatcagctgcacttcaccagataacagcaccagtatgtcctgggagcagagtccatcagttcccatgctatgagacagatagcctacacacacaaaaggcctgacggatcaacctattccataaaactgcctgctccaactcatgttcacagtctccttccttccctaggagtagaggagactttgaggaaagcagtcaaatactccacggaaaagagttatccctgttcaatggtttttgctgaaatggtgtcaaaataaaggaaagtccctggaaggccaagaggggkgacttagaaaagtaaaatgcagtgacttttgttaagatgactcagctgacctgatcctaccccgcaaagtaggctggatttggggaaagaaatgaatccctggaactcagagctgcgggtagaggatttcaaacagaaccattgctaaatacaggttccagcaccaatgtctcccaaagagaaagcagtagtgtttttttgtttttttggtgttttttttttcagctaaatcacacacacattccctctctttcttcccctctctcattgttcattagccttcttatttgatgaaaccagaagcacct

SEQ ID NO: 8352 - DNA, 623 bp, Homo sapiens
agtaaaattcatctcagagctaaagtatcagctgcacttcaccagataacagcaccagtatgtcctgggagcagagtccatcagttcccatgctatgagacagatagcctacacacacaaaaggcctgacggatcaacctattccataaaactgcctgctccaactcatgttcacagtctccttccttccctaggagtagaggagactttgaggaaagcagtcaaatactccacggaaaagagttatccctgttcaatggtttttgctgaaatggtgtcaaaataaaggaaagtccctggaaggccaagaggggtgacttagaaaagwaaaatgcagtgacttttgttaagatgactcagctgacctgatcctaccccgcaaagtaggctggatttggggaaagaaatgaatccctggaactcagagctgcgggtagaggatttcaaacagaaccattgctaaatacaggttccagcaccaatgtctcccaaagagaaagcagtagtgtttttttgtttttttggtgttttttttttcagctaaatcacacacacattccctctctttcttcccctctctcattgttcattagccttcttatttgatgaaaccagaagcacct

SEQ ID NO: 8353 - DNA, 623 bp, Homo sapiens
agtaaaattcatctcagagctaaagtatcagctgcacttcaccagataacagcaccagtatgtcctgggagcagagtccatcagttcccatgctatgagacagatagcctacacacacaaaaggcctgacggatcaacctattccataaaactgcctgctccaactcatgttcacagtctccttccttccctaggagtagaggagactttgaggaaagcagtcaaatactccacggaaaagagttatccctgttcaatggtttttgctgaaatggtgtcaaaataaaggaaagtccctggaaggccaagaggggtgacttagaaaagtaaaatgcagtgacttttgttaagatgactcagctgacctgatcctaccccgcaaagtaggctggatttggggaaagaaatgaatccctggaactcagagctgcgggtagaggatttcaaacagaaccattgctaaatacaggttccagcaccaatgtctcccaaagagaaagcagwagtgtttttttgtttttttggtgttttttttttcagctaaatcacacacacattccctctctttcttcccctctctcattgttcattagccttcttatttgatgaaaccagaagcacct

SEQ ID NO: 8354 - DNA, 793 bp, Homo sapiens
agggttttgcatagaatggaatgtgcagcactgaaggttcagaaccagggatcatgtttgctcagttttccaaactagcacttagggattgttatgggaatttggtttcagtcagttggccatgtgctagggtgagaggttgtggaaaagctacaagttttttgctggtcactgaatttcagcaaggcgtgtaccccgtgtgcctctgtgtctgcacrtggcgggtaagggaactgagatttaaaacagtgcatgagagttctgcctgtgctcagcaactgaagggcacctgggaaaggttcatttccttccctttctaacagatgaggtgctggaattacaggtttatttgttctagaaaatgtactgaggaccttctgtgtgccatactattggctaggaaaaggtggaatctactagtagaaagatgtttcggtgcccaactagatgaggaaggatgagaagtggcaggcggtgctgctgttgataggacacagtggaagcagagcattcggtttgttgttcagtgtttattaagtagattcagtcttatatatgatatacagattcaaaaggaaaaggattccacatacttatgaaatcagtgcatttagcaagtaataccatggagataacagctcgattaacagctcattggtcttttgttaagtgagggagagagggagtcggcctgtgctagtcattccacaaacaaaacagaatttagtcacatcacgtagagaagacacattctaagaattaaaatattaagccacatttactggtaaaactc

SEQ ID NO: 8355 - DNA, 836 bp, Homo sapiens
ttcacttagaataatggcctccagctccatttaagttgctgcaaaagacattatttcatccctttttatgtctgagtactatttcagggtgtatatttaccccattttctttatccacctatattggtcaatgggcacttagattggttccatatctttacaattgtgaattgtgctgttataaacacgtgtgtgtctttttcatgcaataacttctaagaattcatttctttccccattgttccccttgagacattcttagagaatatatgaaattactgcttcagacacctccctagatccttcagtaaaatagaaaaaaaagattcactgaatattccattgagagcctactgtgttctcaggtgcctgttctagcccctgatggaaggaatataggtgggggaagagtcagcagtgacatttgagcaccatccctatgtgtcttttctaattcaaacctcctgtcaaccctgaaggaatatcatagcaagacatatacaaatactattccgtattacagaggatgagactgaggcacacagaggctgataacttgcagagggttgcatcgtttgaggaaaccaaagcagaattgagacctaggcagtgtgactccagagattgcacacttaacagctgtaatgccttggctcagagggatgatagaagatgaggccaaggcagggaacaggaggcactgagtatcacaaagagaggagaastcctcctatttggcatgtgaatggctttttagtacctacattccaaaaaaggaattgtgagccaatccagggcaagagactattagaggacatctgggcatcaacctcaat

SEQ ID NO: 8356 - DNA, 836 bp, Homo sapiens
ttcacttagaataatggcctccagctccatttaagttgctgcaaaagacattatttcatccctttttatgtctgagtactatttcagggtgtatatttaccccattttctttatccacctatattggtcaatgggcacttagattggttccatatctttacaattgtgaattgtgctgttataaacacgtgtgtgtctttttcatgcaataacttctaagaattcatttctttccccattgttccccttgagacattcttagagaatatatgaaattactgcttcagacacctccctagatccttcagtaaaatagaaaaaaaagattcactgaatattccattgagagcctactgtgttctcaggtgcctgttctagcccctgatggaaggaatataggtgggggaagagtcagcagtgacatttgagcaccatccctatgtgtcttttctaattcaaacctcctgtcaaccctgaaggaatatcatagcaagacatatacaaatactattccgtattacagaggatgagactgaggcacacagaggctgataacttgcagagggttgcatcgtttgaggaaaccaaagcagaattgagacctaggcagtgtgactccagagattgcacacttaacagctgtaatgccttggctcagagggatgatagaagatgaggccaaggcagggaacaggaggcactgagtatcacaaagagaggagaactcctcctatttggcatgtgaatggctttttagtacctacattccaaaaaaggaattgtgagccaatccrgggcaagagactattagaggacatctgggcatcaacctcaat

SEQ ID NO: 8357 - DNA, 767 bp, Homo sapiens
acacccccctgccccacctccagcccctggtgaccactattctgctttctgtctctatgaatctatggtgggcacctcacatacgcagactcacacgatatttgtcctttgtgtctgcctgcctgtcttttcctccctcaagttctatcattcttcaattgcctaagaatactccccagcaaatagaattggtgattggcaggctgctccaagaaggtttctgagctgttgttcttcagtattattattattttttccttttttaatgagacagggtcttgctatgttgcccacactggtcttgaactcctgggctcaagcgatcctcctgcctcccaaagtgctaggattacaggtgtgagccaccacactcagtctcttcagtattattttttcaggcatttctgttttgttccttaaaatttgtaaatacagaaaataaaataaaaataaccaagaaagacaaacaccatgctcctgcttctcagatatgattattgtgaacattatatgtcatttgccttgtcattctttttttgtagacaggcacagtggttcatacmtgtaatctcagagctttgggaggccgaggcaggaggatcgtttgaggccaagatttcaaggctacagtgagctatgattgcaccactgcactccagcctgggtgacagagcaagactcggtctcaaaaaaaaaaaatcaataaaatcaaaaaagcaaataaatacaagaaatgaaacactacaagtcaaattgtagtctccttt

SEQ ID NO: 8358 - DNA, 653 bp, Homo sapiens
ctcagagaaactcatctttaccccagggaaagacccagcgctgggcacggggctttcccaaggctgtcaatcttctgcttgcagttacaaatgccaccaatgtctcactttgtgacccaggatgagtccttgccttctccagcttcactttgcaggtcaccaaaatgtgcttaacttttgacccaataataaaataaaaagcactttaacacacacattttacccagcacgtttcagtagagcaaacaccatcaacaatctacatgcccagcacaagtggattgtatatgttacctggagtcctggtgtgttctgaaaactttgcaattatagatgattatacaatccctaaaatatacatggtatgtatatttttctctattttttttttttttttttttttggagacagggtcttgckctgtcatgcaggacggagtgcaatggtgagatctcggctcaccgcaaccttgacctctcgggctcaagtgaccttcccatctcagcctccttagtagctgcgactacaggtgcatgccaccacgcctcactaatttttgcattattattattattttttttttgtagagacggggtcttgccacattgcccaggctggtctcaaactcctgagctcaagtgatcctcccacct

SEQ ID NO: 8359 - DNA, 666 bp, Homo sapiens
ttagttcacaagcaagcagtcaatagtcccacggacaaactcgattgtcacacattgccttgagaaggtgctgacaggcagaaaaagcagtttgccaagcagcctgaaaaaatgatatggccccatttcttttcttttctttttttttttttttttgagagagtctcactccgtcayccaggctggagtgcagtggcacgatctcagctcactgcaacctccgccttctgggttcaagcaattctcccaccttagcctcccaagtagctggacctacaggtgcatgccactacacctggctaatgtttggtagagatgaggtttcaccatggtgctcagctggtcttgaactcctgagctcaggcgatccacatacctcagcttcccaaagtgtgggattgcaggcgtgagccactgcgcttggccaaggccccatttctgtaaaattttacctctagctttacccatccttgccttcacacagagggaagcgcctgtctgccctgggggtcaacagtggttctgtctggatagtggggtggctggggttaagttttcttttttataggtctctgaatttctgtaatgagcatgcaccaggcatgggttttgggtttttacaggctcacacctttaactccagcactttgggaggctcaggcagga

SEQ ID NO: 8360 - DNA, 818 bp, Homo sapiens
tcccctctcagcctcctgagtagctgagtaggtgcaagccaccacgcccagctaatttttgcatttttagtagagacagggtttcaccatgttggccaggctgatctccaactcctggcctcaagtgatctgcccacctcagcctcccaaagtgctgggattacagaagtgagccactgtgtccggcccacacctggctattaaattttttttttttttttttttttttttagagccagagtctctccatgttgccctggctggttttgaactcctgcgctcaagcgatcctcctgcctcagcctcccacagtgctgggattataggtgtgagcccctgctcccaggctgattttgtgggcaagaaattccagttgtttctaactctgtgggggtcaaacaagtctcctctgtccctctgtgggtctggttggtccgagcaccccccgtttgtagtctctgcctgttcactgaggccagaggctgggtgcttgctgtgtgccctagggaagggcctgggcttctctgtgttcaatttcctcatggccagaccctggggaggacacacatggtagagagctgagactctccaggggagagccagacctggacagcagaggaaggaccgtcatgcctgaaaaagtcatttctytcctcatccctactctgcccgtctcctgctatccgcagggaacttaatggagaaaacaccctgccagtgcctgttttcctttccatcctgcggtgggtgccagctccagatgagtgactcagggcttcccatggcagcagataaacactcgctctgatgccccggga

SEQ ID NO: 8361 - DNA, 816 bp, Homo sapiens
cccacgggaaactctggcctccttaggcttaatgggtggagccgggtggatagaggggtagggtgtcagaattggcttaagaatttcagagtgggccgggcattgtggctcacgcctgtaatcccagcactttgggaggctgaggcaggtggatcacgaggccaggagatcgagaccatcctggctaacacggtgaaaccccgtctgtactaaaaatacaaaaaattagccaggcatgctggcaagcgcctgtagtcccagctaatcgggaggctgaggcaggagaatggcgtgaacctgagaggcagagcttgcagtgagccgagatcgcaccattgtactccagcctgggcaacagagcgagactccgtctcagaaaaaaaaaaaaaaaaaatttcagagtgaggcaggtcccagcaggccagggtcattatggcagmcttcctggaggagggggctgaaagtagctctgtggctgctagccttgaagtcaggatacctgggctcacactagatggttggaaagcatgaaggcagtgactatgtcatctcagtcacttgtgtcctcagctcccagaccagagtctggtatacagcaggcactcaataaagatctataggccaggcatggtggctcacgcctatattcccagcactttgggaggccaaggcaggaggattgcttgctgccaggagtttgagaccaagcccaggcaacatagcctgtctctccagaataaaaaacaaacaaaaacatttagccgggtgtggtggcactcacccatagtgccagctcctcagaaggctgatggggaa

SEQ ID NO: 8362 - DNA, 850 bp, Homo sapiens
tatctgctaacaacagggttgtctgacagtggcacccacccctcaccgtaccatccttgttccttacttgatagctgcttagcaactgttctctgctcctaagatggtgtcagatgcaattgtttggggtattggaagtaactaaaactttggatactgtgattatgcatgacattctagaaggagcaaagagggggctggggaagggcatscctttgtctatgtggcctgtatggtgtcggggatgatggaggtggatgaatgacagtgaggctagaagacccaggctaggagaccctggtcggctggggccacaggacgtcaggcttcagcaaatcttaggcacaagaatcttggtatcaaggaaaatgggaaggaagatactcgctagtcccttactaagaaaagcacccctaacaactaaagcagatttagtctatattctgcaaaattggaattaaatgcagcataattttagggccaaggaaaagactatccccctctctttacctcccaacaatgttcttctgacttcctgaatttgtgtcaaattcctctatcaggagatagaaacttttatttcataataggaaactcctattccttaaataggaatttaagagttaaaacagaaaactcttaaaagactgaatgtattcatgaaaattaattttcaagtagaaataatatgtcacattttgctgtttttatttggaggagttagaaattaagaaggcaaataataacctgagtttgggaaaggggagaggactttcagaaatgctgaaggagaggctagaggcagaaagacaaatttttcaaaagttataattttgccaaccctattatt

SEQ ID NO: 8363 - DNA, 850 bp, Homo sapiens
tatctgctaacaacagggttgtctgacagtggcacccacccctcaccgtaccatccttgttccttacttgatagctgcttagcaactgttctctgctcctaagatggtgtcagatgcaattgtttggggtattggaagtaactaaaactttggatactgtgattatgcatgacattctagaaggagcaaagagggggctggggaagggcatccctttrtctatgtggcctgtatggtgtcggggatgatggaggtggatgaatgacagtgaggctagaagacccaggctaggagaccctggtcggctggggccacaggacgtcaggcttcagcaaatcttaggcacaagaatcttggtatcaaggaaaatgggaaggaagatactcgctagtcccttactaagaaaagcacccctaacaactaaagcagatttagtctatattctgcaaaattggaattaaatgcagcataattttagggccaaggaaaagactatccccctctctttacctcccaacaatgttcttctgacttcctgaatttgtgtcaaattcctctatcaggagatagaaacttttatttcataataggaaactcctattccttaaataggaatttaagagttaaaacagaaaactcttaaaagactgaatgtattcatgaaaattaattttcaagtagaaataatatgtcacattttgctgtttttatttggaggagttagaaattaagaaggcaaataataacctgagtttgggaaaggggagaggactttcagaaatgctgaaggagaggctagaggcagaaagacaaatttttcaaaagttataattttgccaaccctattatt

SEQ ID NO: 8364 - DNA, 850 bp, Homo sapiens
tatctgctaacaacagggttgtctgacagtggcacccacccctcaccgtaccatccttgttccttacttgatagctgcttagcaactgttctctgctcctaagatggtgtcagatgcaattgtttggggtattggaagtaactaaaactttggatactgtgattatgcatgacattctagaaggagcaaagagggggctggggaagggcatccctttgtctatgtggcctgtrtggtgtcggggatgatggaggtggatgaatgacagtgaggctagaagacccaggctaggagaccctggtcggctggggccacaggacgtcaggcttcagcaaatcttaggcacaagaatcttggtatcaaggaaaatgggaaggaagatactcgctagtcccttactaagaaaagcacccctaacaactaaagcagatttagtctatattctgcaaaattggaattaaatgcagcataattttagggccaaggaaaagactatccccctctctttacctcccaacaatgttcttctgacttcctgaatttgtgtcaaattcctctatcaggagatagaaacttttatttcataataggaaactcctattccttaaataggaatttaagagttaaaacagaaaactcttaaaagactgaatgtattcatgaaaattaattttcaagtagaaataatatgtcacattttgctgtttttatttggaggagttagaaattaagaaggcaaataataacctgagtttgggaaaggggagaggactttcagaaatgctgaaggagaggctagaggcagaaagacaaatttttcaaaagttataattttgccaaccctattatt

SEQ ID NO: 8365 - DNA, 850 bp, Homo sapiens
tatctgctaacaacagggttgtctgacagtggcacccacccctcaccgtaccatccttgttccttacttgatagctgcttagcaactgttctctgctcctaagatggtgtcagatgcaattgtttggggtattggaagtaactaaaactttggatactgtgattatgcatgacattctagaaggagcaaagagggggctggggaagggcatccctttgtctatgtggcctgtatggtgtcggggatgatggaggtggatgaatgacagtgaggctagaagacccaggctaggagaccctggtcggctggggccacaggacrtcaggcttcagcaaatcttaggcacaagaatcttggtatcaaggaaaatgggaaggaagatactcgctagtcccttactaagaaaagcacccctaacaactaaagcagatttagtctatattctgcaaaattggaattaaatgcagcataattttagggccaaggaaaagactatccccctctctttacctcccaacaatgttcttctgacttcctgaatttgtgtcaaattcctctatcaggagatagaaacttttatttcataataggaaactcctattccttaaataggaatttaagagttaaaacagaaaactcttaaaagactgaatgtattcatgaaaattaattttcaagtagaaataatatgtcacattttgctgtttttatttggaggagttagaaattaagaaggcaaataataacctgagtttgggaaaggggagaggactttcagaaatgctgaaggagaggctagaggcagaaagacaaatttttcaaaagttataattttgccaaccctattatt

SEQ ID NO: 8366 - DNA, 850 bp, Homo sapiens
tatctgctaacaacagggttgtctgacagtggcacccacccctcaccgtaccatccttgttccttacttgatagctgcttagcaactgttctctgctcctaagatggtgtcagatgcaattgtttggggtattggaagtaactaaaactttggatactgtgattatgcatgacattctagaaggagcaaagagggggctggggaagggcatccctttgtctatgtggcctgtatggtgtcggggatgatggaggtggatgaatgacagtgaggctagaagacccaggctaggagaccctggtcggctggggccacaggacgtcaggcttcagcaaatcttaggcacaagaatcttggtatcaaggaaaatgggaaggaagatactygctagtcccttactaagaaaagcacccctaacaactaaagcagatttagtctatattctgcaaaattggaattaaatgcagcataattttagggccaaggaaaagactatccccctctctttacctcccaacaatgttcttctgacttcctgaatttgtgtcaaattcctctatcaggagatagaaacttttatttcataataggaaactcctattccttaaataggaatttaagagttaaaacagaaaactcttaaaagactgaatgtattcatgaaaattaattttcaagtagaaataatatgtcacattttgctgtttttatttggaggagttagaaattaagaaggcaaataataacctgagtttgggaaaggggagaggactttcagaaatgctgaaggagaggctagaggcagaaagacaaatttttcaaaagttataattttgccaaccctattatt

SEQ ID NO: 8367 - DNA, 793 bp, Homo sapiens
ttgatccttctcctcatagcacaataagcgctgaactgagaactttagaaacacacaaaaagtatgtgggtataaagttattccatacccacagggagctttaagtttaagtaagggcaaaatgcaaaggaaagaacaaaagaacagaagcagaggaatcttcagaaaaatataaacatctgcagcatacagaaccattttcccaagcgatttctcctgtcaatgtgcaaacaggattgttgaagtgattctggttgagtagagccatatgggtttagtttgggagatgattsctggcagcattctgaagaaggagggacatgatttgacatcaatgatctgcgaagacttctgggctggggaatgtagaggtacaagcaagagactaaaatgctcctcaaatgtgaaatatgtaaagaataagatactgctgaaatgtgtcagggagggcagggtcagaacataagcaagaaaaaaggggagaaatcaaattcaccactgaagtttggtgaaaaaaattttttaaataggataaaagaaaacaatgaatataaatagcatgaaaaagagagagagaaaacaggaggaattccaaactcaattgataaatttcaagtaatggcttcttccatatgaaagcaaccctggtgatgttaagcttttctcgtgtagaggattcaggtgaaactcagaatcaagttgaaagaatgcttttttaaaaagactgatcattaatagcaaaagtaagaatcatggtgatgcttccaggaaactcaatagtggatactgaaga

SEQ ID NO: 8368 - DNA, 793 bp, Homo sapiens
ttgatccttctcctcatagcacaataagcgctgaactgagaactttagaaacacacaaaaagtatgtgggtataaagttattccatacccacagggagctttaagtttaagtaagggcaaaatgcaaaggaaagaacaaaagaacagaagcagaggaatcttcagaaaaatataaacatctgcagcatacagaaccattttcccaagcgatttctcctgtcaatgtgcaaacaggattgttgaagtgattctggttgagtagagccatatgggtttagtttgggagatgattcctggcagcattctgaagaaggagggacatgatttgacatcaatgatctgcgaagacttctgggctggggaatgtagaggtacaagcaagagactaaaatgctcctcaaatgtgaaatatgtmaagaataagatactgctgaaatgtgtcagggagggcagggtcagaacataagcaagaaaaaaggggagaaatcaaattcaccactgaagtttggtgaaaaaaattttttaaataggataaaagaaaacaatgaatataaatagcatgaaaaagagagagagaaaacaggaggaattccaaactcaattgataaatttcaagtaatggcttcttccatatgaaagcaaccctggtgatgttaagcttttctcgtgtagaggattcaggtgaaactcagaatcaagttgaaagaatgcttttttaaaaagactgatcattaatagcaaaagtaagaatcatggtgatgcttccaggaaactcaatagtggatactgaaga

SEQ ID NO: 8369 - DNA, 793 bp, Homo sapiens
ttgatccttctcctcatagcacaataagcgctgaactgagaactttagaaacacacaaaaagtatgtgggtataaagttattccatacccacagggagctttaagtttaagtaagggcaaaatgcaaaggaaagaacaaaagaacagaagcagaggaatcttcagaaaaatataaacatctgcagcatacagaaccattttcccaagcgatttctcctgtcaatgtgcaaacaggattgttgaagtgattctggttgagtagagccatatgggtttagtttgggagatgattcctggcagcattctgaagaaggagggacatgatttgacatcaatgatctgcgaagacttctgggctggggaatgtagaggtacaagcaagagactaaaatgctcctcaaatgtgaaatatgtaaagaataagatactgctgaaatgtgtcagggagggcagggtcagaacataagcaagaaaaaaggggagaaatcaaattcaccactgaagtttggtgaaaaaaattttttaaataggataaaagaaaacaatgaatataaatagcatgaaaaagagagagagaaaacaggaggaattcyaaactcaattgataaatttcaagtaatggcttcttccatatgaaagcaaccctggtgatgttaagcttttctcgtgtagaggattcaggtgaaactcagaatcaagttgaaagaatgcttttttaaaaagactgatcattaatagcaaaagtaagaatcatggtgatgcttccaggaaactcaatagtggatactgaaga

SEQ ID NO: 8370 - DNA, 793 bp, Homo sapiens
ttgatccttctcctcatagcacaataagcgctgaactgagaactttagaaacacacaaaaagtatgtgggtataaagttattccatacccacagggagctttaagtttaagtaagggcaaaatgcaaaggaaagaacaaaagaacagaagcagaggaatcttcagaaaaatataaacatctgcagcatacagaaccattttcccaagcgatttctcctgtcaatgtgcaaacaggattgttgaagtgattctggttgagtagagccatatgggtttagtttgggagatgattcctggcagcattctgaagaaggagggacatgatttgacatcaatgatctgcgaagacttctgggctggggaatgtagaggtacaagcaagagactaaaatgctcctcaaatgtgaaatatgtaaagaataagatactgctgaaatgtgtcagggagggcagggtcagaacataagcaagaaaaaaggggagaaatcaaattcaccactgaagtttggtgaaaaaaattttttaaataggataaaagaaaacaatgaatataaatagcatgaaaaagagagagagaaaacaggaggaattccaaactcaattgataaatttcaagtaatggcttcttccatatgaaagcamccctggtgatgttaagcttttctcgtgtagaggattcaggtgaaactcagaatcaagttgaaagaatgcttttttaaaaagactgatcattaatagcaaaagtaagaatcatggtgatgcttccaggaaactcaatagtggatactgaaga

SEQ ID NO: 8371 - DNA, 793 bp, Homo sapiens
ttgatccttctcctcatagcacaataagcgctgaactgagaactttagaaacacacaaaaagtatgtgggtataaagttattccatacccacagggagctttaagtttaagtaagggcaaaatgcaaaggaaagaacaaaagaacagaagcagaggaatcttcagaaaaatataaacatctgcagcatacagaaccattttcccaagcgatttctcctgtcaatgtgcaaacaggattgttgaagtgattctggttgagtagagccatatgggtttagtttgggagatgattcctggcagcattctgaagaaggagggacatgatttgacatcaatgatctgcgaagacttctgggctggggaatgtagaggtacaagcaagagactaaaatgctcctcaaatgtgaaatatgtaaagaataagatactgctgaaatgtgtcagggagggcagggtcagaacataagcaagaaaaaaggggagaaatcaaattcaccactgaagtttggtgaaaaaaattttttaaataggataaaagaaaacaatgaatataaatagcatgaaaaagagagagagaaaacaggaggaattccaaactcaattgataaatttcaagtaatggcttcttccatatgaaagcaaccctggtgatgttaagyttttctcgtgtagaggattcaggtgaaactcagaatcaagttgaaagaatgcttttttaaaaagactgatcattaatagcaaaagtaagaatcatggtgatgcttccaggaaactcaatagtggatactgaaga

SEQ ID NO: 8372 - DNA, 793 bp, Homo sapiens
ttgatccttctcctcatagcacaataagcgctgaactgagaactttagaaacacacaaaaagtatgtgggtataaagttattccatacccacagggagctttaagtttaagtaagggcaaaatgcaaaggaaagaacaaaagaacagaagcagaggaatcttcagaaaaatataaacatctgcagcatacagaaccattttcccaagcgatttctcctgtcaatgtgcaaacaggattgttgaagtgattctggttgagtagagccatatgggtttagtttgggagatgattcctggcagcattctgaagaaggagggacatgatttgacatcaatgatctgcgaagacttctgggctggggaatgtagaggtacaagcaagagactaaaatgctcctcaaatgtgaaatatgtaaagaataagatactgctgaaatgtgtcagggagggcagggtcagaacataagcaagaaaaaaggggagaaatcaaattcaccactgaagtttggtgaaaaaaattttttaaataggataaaagaaaacaatgaatataaatagcatgaaaaagagagagagaaaacaggaggaattccaaactcaattgataaatttcaagtaatggcttcttccatatgaaagcaaccctggtgatgttaagcttttctcgtgtagaggattcaggtgaaactcagaatcaagttgaaagaatgcttttttwaaaagactgatcattaatagcaaaagtaagaatcatggtgatgcttccaggaaactcaatagtggatactgaaga

SEQ ID NO: 8373 - DNA, 822 bp, Homo sapiens
acttccaaactttctcgtggttattgtcaggattcagtttcttgtgggcaccagcttccaacaaaccaagtgagatagagagagcaagatggggtgagcaacatggacccagcgtagttaggtaaccttacttcgaacagacatyccatcactttcactatattctatttgttagaagtgagttggtaggttcagctcatactcaaggggtgggacttgcacaaagctgtgaacgctagcagggcaaggaccattgagggacatcctagagctacctgctaccctgattcttcaactgagttagctacctgctaccctgattcttcaactgagtagttcttttttttttttgagtcagagtttagctctgttgcccaggctggagtgcagtggcgtgatcgctgctcactgcaagctccgcctcccgggttcatgctattctcctgccttagccttctgaccagctgggactacaggcgtccgccaccacacctggctaatatatatatattttttgtatttttactagagatggggtttcaccgtgttagccaggatggtctcgatctcctgacctcgtgatccgcccgcctcggcctcccaaagtgctgggattacaggcgtgagcactgtgcccggcctcaactgagtttttatgcatgaccaggagttcatcagatgagtaaggataataagtggttctgggtggcaagaagccagccagcgggagcccagacatggaagaaaacacgcagcatcaggggaagacagtgtggctatgtgggttgtgcgtgtgtgcatgtttgtggcatgtggtgtgct

SEQ ID NO: 8374 - DNA, 822 bp, Homo sapiens
acttccaaactttctcgtggttattgtcaggattcagtttcttgtgggcaccagcttccaacaaaccaagtgagatagagagagcaagatggggtgagcaacatggacccagcgtagttaggtaaccttacttcgaacagacattccatcactttcactatattctatttgttagaagtgagttggtaggttcagctcatactcaaggggtgggacttgcacaaagctgtgaacgctagcagggcaaggaccattgagggacatcctagagctacctgctaccctgattcttcaactgagttagctacctgctaccctgattcttcaactgagtagttcttttttttttttgagtcagagtttagctctgttgcccaggctggagtgcagtggcgtgatcgctgctcactgcaagctccgcctcccgggttcatgctattctcctgccttagccttctgaccagctgggactacaggcgtccgccaccacacctggctaatatatatatatwttttgtatttttactagagatggggtttcaccgtgttagccaggatggtctcgatctcctgacctcgtgatccgcccgcctcggcctcccaaagtgctgggattacaggcgtgagcactgtgcccggcctcaactgagtttttatgcatgaccaggagttcatcagatgagtaaggataataagtggttctgggtggcaagaagccagccagcgggagcccagacatggaagaaaacacgcagcatcaggggaagacagtgtggctatgtgggttgtgcgtgtgtgcatgtttgtggcatgtggtgtgct

SEQ ID NO: 8375 - DNA, 842 bp, Homo sapiens
agggcttatggagaaagtagcttttccctccctcagctctgccttccactctgctggcttcattcccaggcaggctcttcttaggacgctccagaagctccagtcctaccccctacagcttccagtggaaagacaggacctcttttccaatagttcccggaaaagttctaagtggattgacttaggtcacatgcccacccctgaaccaatcactggggaccgggaagggaggagatgagctgattggccagacctaggtcaggtgtttccctttggagtcagaagcgagttcagcatctcccagtccccacagactaagagatggaggaatgtttctaaagtggagaatcagaaggtggaggcagctaaaagggggatggatgtgatccaggcaccagttggtcattccagtgactgattccaaatggctgaagaggacccatttgaccatattctcaaattagggggctggtccttaaaagcttgcttyatcccagctggacagagagagggagctgaccagttagggcttccctttcccatcacttcatttttctaattaatctgttaccagctccacctcaagaatatacttcaaacaagatttttttcccccttctaaagggagttgaaaaaaatcagaatacatttgcatgctgcctaaaacattctgaacccgtgtcttatcagtaccactgaacaaccttgtcttttcagggctggtagctatataattatagctaccttcagcctcgccagctctctcttgaaaaggttatcgtgaacaggggatgaaaaatcatttggaaacatagcctaggtctgtttttcaattgtctttt

SEQ ID NO: 8376 - DNA, 836 bp, Homo sapiens
gggacagcggaagccagcctcagatgactgaaacccccaagtcagtagctctcctcaaaatttccggcgggttattatagataatgacttttcccaccgccctaagcagccgaagcttgactcagtgatgattctctctatcccgtaactgcgaggaagtgggcgatcagcaaattgcccttttgcaggaggctggggacgcccctggaagttcgctttcattctccaggttttctgccttttcccttcccccttcctgcaacgcccccgcgcctcctcagcctggggatttcctggcgcttcgccggccctctccgcamccccctgataaatcggttcagaaccagtctggctgggaggcccgagggctgacagcagcggagcggccccggccggggtctcacggactctcggggtctggccgacacggccgctcccgtcactgcagcgcgggctgagctcacggccgcgcgcccgccgccgccgccgccgccgccttcatgctgcagcgcagggctcagttccacgcggccaggaggccgccgttgcccacacgcgacgctttgggaagcccagctcccgggtccgccccggccgcggccgcagccccggacctcggctgcttgcctcgcgcctgaactgcggactcgccccagcgcggtggccagcgggcggggcgctgtgttccgcggcgcgcagggaggcggtgagcgtgtgcagagctgcccgaacggaggactatgtatgtgtgtgcgcgtgtttgcgtgtgtttgagcgtgtttttccttcttcccttgaggatgtgaattgtttagcagctggctgctcccttagga

SEQ ID NO: 8377 - DNA, 784 bp, Homo sapiens
tcctgctgcacctggagtcagagctggcacagacccgggcagagagacagtgccaggcccaggagtaatgaggccctgctgaacatcaaggtcaagctggaggctgagatcgccacctaccgccgcctgctggaagatggcgaggacttcactcttggtgatgccttggacagcaggaactccatgcaaaccatccaaaagaccaccacccgccggaaagtggatggcaaagtggtgtctgagaccaacaacaccaaagttctgaggcattaagccagcagaagcagggtaccctttggggagcaggaggccaataaaaagtacagagttaaaaaaaaaaaagatttaaacaatgaaaactataaaacattgatgaaagaaattgaggcagatacaaaaaaattgaaagacatttcatattcatagattkgaaaaatctatattgttacaaagtccatactacccaaagccatctacaattcctatcaaaacaccgatgacattcttcagagaaatggaaaaaataatcctaaaatttatatggaaccacaaaagacccagaataaccaaagctatgctaagcaaaaataactacactgggggaatcatagtacctgacttcaaattatactacagagccatagtaaccaaaacagcatggtactggcataaaaatagacacatataccaggggaacagaatagagaacccacaaacaaattcacatacctacagtgaactcatttttgacaaaggcgccaggaatataaactgaggaaaagag

SEQ ID NO: 8378 - DNA, 811 bp, Homo sapiens
aagggggggaaatatttgtaaactactcatctggcaaggaattaataaccagaatatatgaggagctcaaacaactcaataggaaaaaaggtgattaataaatagacaagagattgtaatagacatttctcaaaataatatatacaaatggcctaccttcaagtgtttaagtaaaagttgtttcctgatatcatgtccatttacttatgcaatatagagactttaattacctactgttttctttatagtacagcaaatttttaaattagtttgtaatagagcaaacaggttggtgaaaatgtgaagaaaaagttttgaaattttttattctaaaaaacttcaattatattctctctctagatatgattgagttttatccctgttttatttctatgtgcacaactcaaaaaggtttgttgacaaaccagtcaaagcttcgaaattgggtaaattgcttagaagaaacttattttcaatttcacaaggaagraattttaaaacttaagtcttttagcaatgtacagattgtacattattaccttggaggcatgtattttgtctgcattaaaatcatgcaaaggaacacgctttacaaatcaatttcactgtggacctaaagaccagatacaccaccaagtcccatttaaaaatggccttaatttagaattcaccctctcaagaacagattgagtattaaaaggtatgaaatgtttgagagctaaaattgtttcaaacattttggatagcttaaaggcatactttagaaatactgatttcttagtattttctttgccaaactgaagaaaataat

SEQ ID NO: 8379 - DNA, 811 bp, Homo sapiens
aagggggggaaatatttgtaaactactcatctggcaaggaattaataaccagaatatatgaggagctcaaacaactcaataggaaaaaaggtgattaataaatagacaagagattgtaatagacatttctcaaaataatatatacaaatggcctaccttcaagtgtttaagtaaaagttgtttcctgatatcatgtccatttacttatgcaatatagagactttaattacctactgttttctttatagtacagcaaatttttaaattagtttgtaatagagcaaacaggttggtgaaaatgtgaagaaaaagttttgaaattttttattctaaaaaacttcaattatattctctctctagatatgattgagttttatccctgttttatttctatgtgcacaactcaaaaaggtttgttgacaaaccagtcaaagcttcgaaattgggtaaattgcttagaagaaacttattttcaatttcacaaggaaggaattttaaaacttaagtcttttagcaatgtacagattgtacattattaccttggaggcatgtattttgtctgcattaaaatcatgcaaaggaacacgctttacaaatcaatttcactgtggacctaaagaccagatacaccaccaagtcccatttaaaaatggccttaatttagaattcaccctctcaagaacagattgagtattaaaaggtatgaaatgtttgagagctaaaattgtttcaaacattttggatagcttaaaggcataytttagaaatactgatttcttagtattttctttgccaaactgaagaaaataat

SEQ ID NO: 8380 - DNA, 794 bp, Homo sapiens
ttccacatttttggatatctttataggagcactccactcctggtaccaatttcctgtattagtccattctcatgctgctaacaaagacatatctgatagtgggtaatttataaagaaaagaggtttaactgactcaccattctgcattcggcctcaggaaacttacaattatggtggaaggggaagcaaacacatccttcttcacatggtggcagggagaagaagactgagtgcccagtgcagggggaagccccttataaaaccatcagatctcctgagagcaggatgggagaaaccgcctgcatgattcatttgtcttcacctggtcccacccatgayatatggggatttggggaactataattcaaaatgggatttggggaactataattcaaaatgagatttgggtgaggacacagacaaatcagcctctatctattgtttagacaaactcagactctgagttggattcaggtaatactaaccctaattttcaactctagcttcaaggagtttctttttccttactcccttaactttccttaaaaatcaatgaaatctacttttttcctggcttctttacttaattacagctgtaaactgcatcctggtcattactttcattgttctgcacttcaactgcctttttacatctggatgcaataatattctcctttctccttgaacttcactctttaagaataagcatgccaatgactcaaccaccataacatagtctggctactgtagctaacaattaaagctattactgagtcctctgaaatttctggtgg

SEQ ID NO: 8381 - DNA, 794 bp, Homo sapiens
ttccacatttttggatatctttataggagcactccactcctggtaccaatttcctgtattagtccattctcatgctgctaacaaagacatatctgatagtgggtaatttataaagaaaagaggtttaactgactcaccattctgcattcggcctcaggaaacttacaattatggtggaaggggaagcaaacacatccttcttcacatggtggcagggagaagaagactgagtgcccagtgcagggggaagccccttataaaaccatcagatctcctgagagcaggatgggagaaaccgcctgcatgattcatttgtcttcacctggtcccacccatgatatatggggatttggggaactataattcaaaatgggatttggggaactataattcaaaatgagatttgggtgaggacacagmcaaatcagcctctatctattgtttagacaaactcagactctgagttggattcaggtaatactaaccctaattttcaactctagcttcaaggagtttctttttccttactcccttaactttccttaaaaatcaatgaaatctacttttttcctggcttctttacttaattacagctgtaaactgcatcctggtcattactttcattgttctgcacttcaactgcctttttacatctggatgcaataatattctcctttctccttgaacttcactctttaagaataagcatgccaatgactcaaccaccataacatagtctggctactgtagctaacaattaaagctattactgagtcctctgaaatttctggtgg

SEQ ID NO: 8382 - DNA, 794 bp, Homo sapiens
ttccacatttttggatatctttataggagcactccactcctggtaccaatttcctgtattagtccattctcatgctgctaacaaagacatatctgatagtgggtaatttataaagaaaagaggtttaactgactcaccattctgcattcggcctcaggaaacttacaattatggtggaaggggaagcaaacacatccttcttcacatggtggcagggagaagaagactgagtgcccagtgcagggggaagccccttataaaaccatcagatctcctgagagcaggatgggagaaaccgcctgcatgattcatttgtcttcacctggtcccacccatgatatatggggatttggggaactataattcaaaatgggatttggggaactataattcaaaatgagatttgggtgaggacacagacaaatcagcctctatctattgtttagacaaactcagactctgagttggattcaggtaatactaaccstaattttcaactctagcttcaaggagtttctttttccttactcccttaactttccttaaaaatcaatgaaatctacttttttcctggcttctttacttaattacagctgtaaactgcatcctggtcattactttcattgttctgcacttcaactgcctttttacatctggatgcaataatattctcctttctccttgaacttcactctttaagaataagcatgccaatgactcaaccaccataacatagtctggctactgtagctaacaattaaagctattactgagtcctctgaaatttctggtgg

SEQ ID NO: 8383 - DNA, 695 bp, Homo sapiens
tggactattttattattaccacccatttcctcttcagaacaccaggcataagtcaccaggagctggaagcccatgagaagcagtgacagtgcccagggcatagccttcctcctctgcggactcgacatgatgcaggctccagcagcccttgcctttgcccttcagatccctggcgtccactggagycttccagggctcaggtctggcctttaaattcacctgctggggcagaaactcctccctccaggcctcacctctgcagttacaccctgtctctcccacacatggcctcccttcttccaaaggcgtttaaatcatctcctgtttaggggagaggaacagcacccaggcaggtgggttggaaaagactagcaatgggagagatagtgccctgaacatgaggcccagccccagctgccccagcacctccgcaggctaaaggagacctctactgggcgccccagagtcagagcccggcacaggaacacaagtgtgagaggtatgagtggaaggtgagccctggactcagcagtgggggtgggctgggagggggaggttaggtggaaaggcagagacaaaaggatggaaagggatgacagtggatgctagtatcatgggtgagcaggtacagcgccccgagaaagcactgggcctcttgagagagaggcggggagcccgggaggattggcgggatg

SEQ ID NO: 8384 - DNA, 581 bp, Homo sapiens
ctatgctactagctgcagcacctgaggacacatctctctcatctaccctcgccttcatccccaagctccgtgggtatgcaacctgtccatctgggggacttggtctcccttgcttcttggcctgagctggccagccctatgtggtctcatgagcagcccatggaggaaggtgttctttgctgagccctgacagtgtgattgaacattggagggacctgggtcttcacatgtcccgggctgcttgtttccatcatactcataccccatgttgtcttagggcataccaaaccctactgcccacatctaaggtcagttttgttaatgtgatctgtgcatgggttcaggtttagctcttcaaaaccatctggcctctgttgacccaytgagtcagagtcaggatgaagaattaagatcaagacagtttcactgactcatggaatttttgagtttattgactaacagcaatatttttatatgagcatgaaaggaaatggaatgtgtggacatagaggctcctgagacacctctaaattgtctccttctctaccaaggccgtgttagccttggccacaccaggaagg

SEQ ID NO: 8385 - DNA, 581 bp, Homo sapiens
ctatgctactagctgcagcacctgaggacacatctctctcatctaccctcgccttcatccccaagctccgtgggtatgcaacctgtccatctgggggacttggtctcccttgcttcttggcctgagctggccagccctatgtggtctcatgagcagcccatggaggaaggtgttctttgctgagccctgacagtgtgattgaacattggagggacctgggtcttcacatgtcccgggctgcttgtttccatcatactcataccccatgttgtcttagggcataccaaaccctactgcccacatctaaggtcagttttgttaatgtgatctgtgcatgggttcaggtttagctcttcaaaaccatctggcctctgttgacccactgagtcagagtcaggatgaagaattaagatcaagacagtttyactgactcatggaatttttgagtttattgactaacagcaatatttttatatgagcatgaaaggaaatggaatgtgtggacatagaggctcctgagacacctctaaattgtctccttctctaccaaggccgtgttagccttggccacaccaggaagg

SEQ ID NO: 8386 - DNA, 629 bp, Homo sapiens
tggattaaagggaggcagctctggatgtggagtcactcatctgccatccttctgccctatactctctaggscagcacaagccacaggcaggaggggagctaccctctgccactagctttgaaggctgctccttcagaacccacaggttctggttgtcctcaggtgcttggtgtccttggatgattctgtgccttcgcctcccacagcgaactgagataagacctggggacatctcgactctcactctcccctccttcaccccgtcgaagagaggatctccgttgttcagaaaaataactaagatatcagtttgttcttttgttgtataatacctcaacagttgtactctgtgaaccaagggaaaaaatgaaaaaaataaatggcaatttttatcaaccattttgacctgggatggacaatgagtattgtgagaaaagggcaggaaagacagagacccaagtcctgaggccccagcctggtcatgcccagcccagccctgcttgcatttctaaaccttgtcagccctggttccagctgagccagagccaaggtttctacagggcccaccgccctacatctgcagccccaccacacacactcatgttttattagactggaatatcattcta

SEQ ID NO: 8387 - DNA, 629 bp, Homo sapiens
tggattaaagggaggcagctctggatgtggagtcactcatctgccatccttctgccctatactctctaggccagcacaagccacaggcaggaggggagctaccctctgccactagctttgaaggctgctccttcagaacccacaggttctggttgtcctcaggtgcttggtgtccttggatgattctgtgccttcgcctcccacagcgaactgagataagacctggggacatctcgactctcactctcccctccttcaccccgtcgaagagaggatctccrttgttcagaaaaataactaagatatcagtttgttcttttgttgtataatacctcaacagttgtactctgtgaaccaagggaaaaaatgaaaaaaataaatggcaatttttatcaaccattttgacctgggatggacaatgagtattgtgagaaaagggcaggaaagacagagacccaagtcctgaggccccagcctggtcatgcccagcccagccctgcttgcatttctaaaccttgtcagccctggttccagctgagccagagccaaggtttctacagggcccaccgccctacatctgcagccccaccacacacactcatgttttattagactggaatatcattcta

SEQ ID NO: 8388 - DNA, 763 bp, Homo sapiens
ccaggtcaagacagctgcaggtgaagagagtcatgctgcctgacccaacactggggtggtcccgagtgtctcctcacaggagacttcacccatcacagacagaagaaagtagctagtgtgtggggagctgctgcccaggagccatgtgcatcttgatcttctgccttgactccaggaagtgggtgacacagagtagctgaaacctgtgtcctgattagcaatgataacaggtgaaatctggcccattgcgttgtttcatgggttgtttttttttttttttttgacggaatctctgttgcccaggcttgagtgcggtggtgtgatcttggctcactgctgcaacctccrcctcccaggttcaagagattctcctgcctcagcctcctgagtagctgagattacaggcgtgttgcaccatgcccggctaattctttgtgtttttagtagagatggggttttgccatgtaggccaagctggtctcgaactttcctggcctcaagtggtcctcccacctcagcctcctaatgtgctgggattacaggcatgagctactgtgtccagcccccattgcactgtcgaaatgtcactggtcttctggatcacacccagctgacccattcttctcatatttatttaaccttggcaaacaaacagctcaaccacacaactatttgcaaaattatttgtgagatctactgggttgtgaaagattttcacatgagaaagattttcaatcaaacacaactcacaagtcaagggatc

SEQ ID NO: 8389 - DNA, 794 bp, Homo sapiens
aggtgcttcagatatttttcttggcttctcttgctcttgtctctcagctcagcttccttctgtgttgggctcatcctcatttcaggtacgagggctttctgtgacggggatgatgacccctagtagatctaactgagagtcctctagagccacagctctaaaagcaagtggggtccttttgcgccttcttgaagaagcatcccagggaagatgccaggtggcctagctagagttgtgtgtctgtcccggtgagtggaaggatggggtraggtactgtgattggcagtcccaccaaagatgacagggagcagaaaaagttgtcctgaaagcaaaggaggcctgacatcagaaaagaggtgaacagaaatggactatgaaatctaaaataacagcaacccttattgtaggggcctttagtgcaaggacagagaggaggggggaatcttccaatcaatgaccttccaagtatggacatgcagaatcttgagcagacgattctagtccctgagaagcaataagaaaaacactccgctccaccagactctgacacccagagccagccacgtatgtggttcttctgactgcaaatgccgggaggggtcaggaaggtttgtgagaagcccttgatgtccaaggaggggatgaggatggaggtgtgaggcagcatgctaggacttaataggagaggaaaaatcgaggacagatgtgaggcatgaaaggtggcagtggtcctggagcaggtggggctgaggaaacatgattttgactatggcaaaataaaaaataaaaaaaaa

SEQ ID NO: 8390 - DNA, 727 bp, Homo sapiens
aggcctgttgcttggcaacagccagcatcacacaccgtgggcagcaagggctctggtggtgacccacgcctccagcccagcccagatctgcctgggtgctggagagggccggcgagtgtccttggaggcttggaagaaaagcttccgtctgcaggagcacttgcatgtggtcctgccgacctccagctttctagaagggccggcgactgtgtagttattattatctttaatcctgatgagaactccgcaaataaggtcatcctgccctctttataggtcagggaaccgagacagcctggtgaatgtcttgccaggatcaggtgttgattctgcagcacagcccctccactgtggctggaagaggggtggagggtctgtagctcctaggtagggttcagaatgggttcagtgggaattggaaggtaagcagaaggtgattagaaacagcgtttgtgggcctgataccccctgagtcctcctsatatgaggactgcaagtccaggggtccagggtgtgaccgcaatggtggtggtggtcccaggggtgacgttttcaaggccccgagctccttgcagtgggatgagcctgcatggcacatgggccctggcttggggaggcaggccctttggtgaaccggctcaggatcatgggccgggaagcactaagcctctggatactgactatctcttcagacaccaccacatccaacaccacgacaacccggctt

SEQ ID NO: 8391 - DNA, 1429 bp, Homo sapiens
ttgtctgcttcctttctaatatgtataattattaatttggggaaagtgtgcagaaaatattaagcatattgtcagagctgaagctcaacatctaaagtgaggttacttttcctctgaaatgtattctttgggggtttcctttttggcagaatttgttacttgttggccaatgacttttagggaaattccatcctctatctcatatgacaagccaatggctagaaaatatcaatggaaatatcatcagaattttttgtttataaaaacgttgtggggtaggttttctttttgttgtgaataggactgcaccatcttctaatttggtttgccaggctatatatctagctaaaaatagaaagtgcacctgcttcttttcattctttaaatattatatatgcatcctcagagaatccttctccattttggctgaacatttttgatggtgtccttctgccatcatctcagatggcaggaggagatgagctgtctgcctctttctagttttttctttgaattgtgctttgtttataacttttacatacataaattttcatgtgtagtatttctatagcattctttaattggaggtggattcagtgacaagcactgtggacataagtgggtttgggtgggggctctggcaggctcttctctgttgtagtatagtaagaaattacagggtacaactttcagtgtgatttcagcaaagttcgaggaggcacaagactattagagctgttaaatgtggctgtttgccaaacccgtagacccaggcatgttctcgggatccctccctaatcctgttagcacacagcctgcctatatttgcaggggccagctaacctccagtttccaggaatgttctgggcaatccacttccctctcttccaggctgcctctgagtgctgatctctctcttccaccttctctctccttcttctttctcttccaccctcatttctcttttctagaatgtgggatttgggactagtgtgagtgcttaaggtgaactctgtgggtgtagcagcaggttctcatttattataattttggctgctgtgcatatctttatttctttctttctttttttttttttgagatggaatctcgctctgtcgcccaggctggagtgcagtggtgcgatctcggctcactacaacctctgtctcctgggtttaagtgattctcctgcctcagcctcctgagtagctgggatttcaggtgcgtgccaccatgcctggctaattttttttgtatttttagtagagacggggtttcaccatattggccaggctggyctcgagctcccaatcttgtgatccgcccgcctcggcctcccaaagttctgggattacaggcgtgagccagcgcgcccatccagctgctgtgcatttcatggccagaacatagcacaaggacgtggccggcc

SEQ ID NO: 8392 - DNA, 691 bp, Homo sapiens
gggttttcaccatgttgggcaggctggtctcaaattcctgacctcagatgatccacctgcctcggcctctgaaagtgctgggattacaggcgtgagccaccacgcccagcccttccattcttacctatccaaaaaaacagagttattccctgagttattagaactggtatcatagtattttatagatattagtcctcaacctttatctacttagactaggcactatcagttatacctaagggggrgaaaaaacattactgacatactaacatattggtgcatcatttcagttttccttacctctcattaaagtcagttaaaagacaaaattcagtatttaatcttttggctttattactattaggatgaacaacttcaaactgtattatattgcttgtctatttatcaaatacagttgacccttgaacaatgtgggggttatgggcatcaatccccctgcacaatcaaaattctacatataagttttgactcctctaaaacttattagcctactgttggccagaagtcttaccaataacagtcaattaacacacatttcgtatgttacattatatatagagtgttttttgttgtttttttttttttgagacatgatctcgctctttcacccaggctgaagtgcagtggcataatcatggttcaatgctgtttcaacttcccaggctcaaat

SEQ ID NO: 8393 - DNA, 691 bp, Homo sapiens
gggttttcaccatgttgggcaggctggtctcaaattcctgacctcagatgatccacctgcctcggcctctgaaagtgctgggattacaggcgtgagccaccacgcccagcccttccattcttacctatccaaaaaaacagagttattccctgagttattagaactggtatcatagtattttatagatattagtcctcaacctttatctacttagactaggcactatcagttatacctaaggggggraaaaaacattactgacatactaacatattggtgcatcatttcagttttccttacctctcattaaagtcagttaaaagacaaaattcagtatttaatcttttggctttattactattaggatgaacaacttcaaactgtattatattgcttgtctatttatcaaatacagttgacccttgaacaatgtgggggttatgggcatcaatccccctgcacaatcaaaattctacatataagttttgactcctctaaaacttattagcctactgttggccagaagtcttaccaataacagtcaattaacacacatttcgtatgttacattatatatagagtgttttttgttgtttttttttttttgagacatgatctcgctctttcacccaggctgaagtgcagtggcataatcatggttcaatgctgtttcaacttcccaggctcaaat

SEQ ID NO: 8394 - DNA, 691 bp, Homo sapiens
gggttttcaccatgttgggcaggctggtctcaaattcctgacctcagatgatccacctgcctcggcctctgaaagtgctgggattacaggcgtgagccaccacgcccagcccttccattcttacctatccaaaaaaacagagttattccctgagttattagaactggtatcatagtattttatagatattagtcctcaacctttatctacttagactaggcactatcagttatacctaagggggggaaaaaacattactgacatactaacatattggtgcatcatttcagttttccytacctctcattaaagtcagttaaaagacaaaattcagtatttaatcttttggctttattactattaggatgaacaacttcaaactgtattatattgcttgtctatttatcaaatacagttgacccttgaacaatgtgggggttatgggcatcaatccccctgcacaatcaaaattctacatataagttttgactcctctaaaacttattagcctactgttggccagaagtcttaccaataacagtcaattaacacacatttcgtatgttacattatatatagagtgttttttgttgtttttttttttttgagacatgatctcgctctttcacccaggctgaagtgcagtggcataatcatggttcaatgctgtttcaacttcccaggctcaaat

SEQ ID NO: 8395 - DNA, 691 bp, Homo sapiens
gggttttcaccatgttgggcaggctggtctcaaattcctgacctcagatgatccacctgcctcggcctctgaaagtgctgggattacaggcgtgagccaccacgcccagcccttccattcttacctatccaaaaaaacagagttattccctgagttattagaactggtatcatagtattttatagatattagtcctcaacctttatctacttagactaggcactatcagttatacctaagggggggaaaaaacattactgacatactaacatattggtgcatcatttcagttttccttacctctcattaaagtcagttaaaagacaaaattcagtatttaatcttttggctttattactattaggatgaacaacttcaaactgtattatattgcttgtctatttatcaaatacagttgacccttgaacaatgtgggggttatgggcatcaatccccctgcacaatcaaaattctacatataagttttgactcctctaaaacttattagmctactgttggccagaagtcttaccaataacagtcaattaacacacatttcgtatgttacattatatatagagtgttttttgttgtttttttttttttgagacatgatctcgctctttcacccaggctgaagtgcagtggcataatcatggttcaatgctgtttcaacttcccaggctcaaat

SEQ ID NO: 8396 - DNA, 691 bp, Homo sapiens
gggttttcaccatgttgggcaggctggtctcaaattcctgacctcagatgatccacctgcctcggcctctgaaagtgctgggattacaggcgtgagccaccacgcccagcccttccattcttacctatccaaaaaaacagagttattccctgagttattagaactggtatcatagtattttatagatattagtcctcaacctttatctacttagactaggcactatcagttatacctaagggggggaaaaaacattactgacatactaacatattggtgcatcatttcagttttccttacctctcattaaagtcagttaaaagacaaaattcagtatttaatcttttggctttattactattaggatgaacaacttcaaactgtattatattgcttgtctatttatcaaatacagttgacccttgaacaatgtgggggttatgggcatcaatccccctgcacaatcaaaattctacatataagttttgactcctctaaaacttattagcctactgttggccagaagtcttaccaataacagtcaattaacacacatttcgtatgttacattatatatagagtgttttttgttktttttttttttttgagacatgatctcgctctttcacccaggctgaagtgcagtggcataatcatggttcaatgctgtttcaacttcccaggctcaaat

SEQ ID NO: 8397 - DNA, 691 bp, Homo sapiens
gggttttcaccatgttgggcaggctggtctcaaattcctgacctcagatgatccacctgcctcggcctctgaaagtgctgggattacaggcgtgagccaccacgcccagcccttccattcttacctatccaaaaaaacagagttattccctgagttattagaactggtatcatagtattttatagatattagtcctcaacctttatctacttagactaggcactatcagttatacctaagggggggaaaaaacattactgacatactaacatattggtgcatcatttcagttttccttacctctcattaaagtcagttaaaagacaaaattcagtatttaatcttttggctttattactattaggatgaacaacttcaaactgtattatattgcttgtctatttatcaaatacagttgacccttgaacaatgtgggggttatgggcatcaatccccctgcacaatcaaaattctacatataagttttgactcctctaaaacttattagcctactgttggccagaagtcttaccaataacagtcaattaacacacatttcgtatgttacattatatatagagtgttttttgttgtttktttttttttgagacatgatctcgctctttcacccaggctgaagtgcagtggcataatcatggttcaatgctgtttcaacttcccaggctcaaat

SEQ ID NO: 8398 - DNA, 591 bp, Homo sapiens
tcccgggaccttaaatcttaaatctgttccattttgatataaataatctgatttaagatattcaagaaaagaaactgggaacaaggattttacatgcagtgaaactgactttcaagtataaagaacacagagaaactattaataacatgcaagaagaaggaatactgttctgtgaggcattcatgaggaayctactaggcaacaagtctcagaaaaacaaaactgttgagaaactgacataaggactggtgataaacataactatatggttacttgtagaagtaaaaccaaatgcagttaaaaggaaaaggtcatagtgtgaaatggtgaaatgttttaacaatgtagatatagtccaactattcaaaaaaatacaataactcggatagtacaggcaaaaccatttttaaaattgttttcagtaatcagaattaatgatggtggtatatacaactgtcattctgagactgcttcatgtgtaaagagggataaagcaaatgagtatttatagaactttctaatgctagcatcttctctgtactacgtagccaggattcctgttgtggaaaaaaggatacgcaccacaataga

SEQ ID NO: 8399 - DNA, 795 bp, Homo sapiens
gcagacaygccgtgaacagaaagaggcccgggccacagcccttccagcccactgcccacagtgtcatgcagagtgagaactcaccctcatttcccactgtgattttagaaagatattttttctgtggtcaataccttctttgccataattaaaaacagccaatatacacatgactgaggctgaaattctgtgatttacaatgttctttgtaggagtggacgcaaggaggattttgcttttatttccttcatcgaaagaatagatatacagaactcccccagcacacatcatctcaaatgttttgaaaaaatctttcccttttgcaaacgagagcctaatttgcatggccacagcattcatggagagggggatgcctggtccctggggcgtgagaaccccagtccccctccaacacccactgccctctctgagcaagctctggactttagctcacctctccgcccctgtagatctgtgcaagagatcagcttcccacagcccctcccgccttctagtaacatcaataagaagactcaccttaatttccgaggtctcacattcatcactgactggacacaactgctttgtcagtcttgtagataaaggcggggaaactctttgggaggggtcccccatcactcaggtaggagtggcaacaaccaactcatagccagttcaaggcagacatggctcccttctggatggtgcctgcctcagggcctggggtcagtggagggagctgggctgggtgtgcccctctctgtacctcaccccatagggatgtcctgttggagc

SEQ ID NO: 8400 - DNA, 795 bp, Homo sapiens
gcagacatgccgtgaacagaaagaggcccgggccacagcccttccagcccactgcccacagtgtcatgcagagtgagaactcaccctcatttcccactgtgattttagaaagatattttttctgtggtcaataccttctttgccataattaaaaacagccaatatacacatgactgaggctgaaattctgtgatttacaatgttctttgtaggagtggacgcaaggaggattttgcttttatttccttcatcgaaagaatagatatacagaactcccccagcacacatcatctcaaatgttttgaaaaaatctttcccttttgcaaacgagagcctaatttgcatggccacagcattcatggagagggggatgcctggtccctggggcgtgagaaccccagtccccctccaacacccactgccctctctgagcaagctctggactttagctcacctctccgcccctgtagatctgtgcaagagatcagcttcccacagcccctcccgccttctagyaacatcaataagaagactcaccttaatttccgaggtctcacattcatcactgactggacacaactgctttgtcagtcttgtagataaaggcggggaaactctttgggaggggtcccccatcactcaggtaggagtggcaacaaccaactcatagccagttcaaggcagacatggctcccttctggatggtgcctgcctcagggcctggggtcagtggagggagctgggctgggtgtgcccctctctgtacctcaccccatagggatgtcctgttggagc

SEQ ID NO: 8401 - DNA, 620 bp, Homo sapiens
tatgatgcccaagctggtctcaaactcctgcgctcaagccatccacccgtctcagcctcccaaaatgctgggattacagggatgagccaccaagcccagcccaaagatttaatttttaaaaagaactaggccaggcaaggtggctcacgcctgtaaggcaggtggatcacttgaggtcaggagttcaagaccagcctggccaacatggtgaaaccccatctctactaaaaaacacaaaaattagctgggcgtggcagcggcagcacgtgcctgtaatcccagctactcaggaggctgagccaggagaaactcttgaacttgggaggtggaggttgcagtgagcagagatcacgccattgtactccagcctgggtgacaaaatgagactccatctcaaaaaaaaaaaagaactaatgaactgagtttcaaaactgtaatgtttataactgaatcctcagaattaaaagaagattgaagtgtgacctttcatattttcttccaaaactgttattacttgatacttcattcattaaaaaagcttytacctaggccataaaaaatatccactaataaaattcttataggcaaaatctgtacattgcttattgctctcgagtgtg

SEQ ID NO: 8402 - DNA, 857 bp, Homo sapiens
agagrtatggaagtcagtggcgggtctgtgacagcggcaaacagcagtggtggatggcgagcgaaagctcagttcgagccgtaacaaacacggaatggaagagtgtgcaggtgcaagatttaatagagtgaagacagagctcccataaaatgggagggaacctaaagggggttaccggtgggggctcgaatgcctgggtttatatgccgatcattgtccctcctgctgtgctctcaggcaatagatgattggctatttctttacctcccgtttttgcctaattagcatcttagtgagctctctttactacctgattggtagagcgtgagctaatttgcaagccccatgtttaaaggtggatgcagtcacctttccagctaggcttagggattcttagtcggcctaggaaatccagctagtcctgtctctcagtgacaggggtcggaggacagccagtgtacctggatcaaattcttttatattgactcatggttaaatataatatagacaaagccagcataaatttagtcctgtttaacagcttattgcaaaaaagcctgaagtaaaagtacgagcagcttcgccagcagacatagagttaaaaagggagtccaagaaacagcaagagaagccagttttgcaggagccaacagagataatagaaattcttttatgtcccagcctacgccactttaccgaggccaacagccccctcagaaaccagattcaggagctaatacgccccaggtctcacctcgaaggggaggattggagcctcaataggccaaggaaggaagtcaagatagtcaagtgggccctctcaggtctggtcttgctggagctatgcaaatgcctca

SEQ ID NO: 8403 - DNA, 857 bp, Homo sapiens
agaggtatggaagtcagtggcgggtctgygacagcggcaaacagcagtggtggatggcgagcgaaagctcagttcgagccgtaacaaacacggaatggaagagtgtgcaggtgcaagatttaatagagtgaagacagagctcccataaaatgggagggaacctaaagggggttaccggtgggggctcgaatgcctgggtttatatgccgatcattgtccctcctgctgtgctctcaggcaatagatgattggctatttctttacctcccgtttttgcctaattagcatcttagtgagctctctttactacctgattggtagagcgtgagctaatttgcaagccccatgtttaaaggtggatgcagtcacctttccagctaggcttagggattcttagtcggcctaggaaatccagctagtcctgtctctcagtgacaggggtcggaggacagccagtgtacctggatcaaattcttttatattgactcatggttaaatataatatagacaaagccagcataaatttagtcctgtttaacagcttattgcaaaaaagcctgaagtaaaagtacgagcagcttcgccagcagacatagagttaaaaagggagtccaagaaacagcaagagaagccagttttgcaggagccaacagagataatagaaattcttttatgtcccagcctacgccactttaccgaggccaacagccccctcagaaaccagattcaggagctaatacgccccaggtctcacctcgaaggggaggattggagcctcaataggccaaggaaggaagtcaagatagtcaagtgggccctctcaggtctggtcttgctggagctatgcaaatgcctca

SEQ ID NO: 8404 - DNA, 857 bp, Homo sapiens
agaggtatggaagtcagtggcgggtctgtgacagcggcaaacagcagtggtggatggcgagcgaaagctcagttcgagccgtaacaaacacggaatggaagagtgtgcaggtgcaagatttaatagagtgaagacagagctcccataaaatgggagggaacctaaagggggttaccggtgggggctcgaatgcctgggtttatatgccgatcattgtccctcctgctgtgctctcaggcaatagatgattggctatttctttacctcccgtttttgcctaattagcatcttagtgagctctctttactacctgattggtagagcgtgagctaakttgcaagccccatgtttaaaggtggatgcagtcacctttccagctaggcttagggattcttagtcggcctaggaaatccagctagtcctgtctctcagtgacaggggtcggaggacagccagtgtacctggatcaaattcttttatattgactcatggttaaatataatatagacaaagccagcataaatttagtcctgtttaacagcttattgcaaaaaagcctgaagtaaaagtacgagcagcttcgccagcagacatagagttaaaaagggagtccaagaaacagcaagagaagccagttttgcaggagccaacagagataatagaaattcttttatgtcccagcctacgccactttaccgaggccaacagccccctcagaaaccagattcaggagctaatacgccccaggtctcacctcgaaggggaggattggagcctcaataggccaaggaaggaagtcaagatagtcaagtgggccctctcaggtctggtcttgctggagctatgcaaatgcctca

SEQ ID NO: 8405 - DNA, 789 bp, Homo sapiens
ttayatgaatgaatgagagatctcaggtttgctaaaactagtaaatacatctagaagaagagtataacattttgtttacaggtgaagagacagaaaacatgcaatttggccggagaatgtcaagtaagtcttgtttaagctaagactgattaaaattctttaatatcatgcttttaatattcaaaacgtgacagctaaaaagtcaaagagtaattcactttgtcgttcattaatttgacatatacttatctcttactatatgcttagcaaaagtataggttaacaatggataacattaataaattagttgcaaaatcacaaacaaacaatgaccatctcaggatgcctaggaatttagtttatcttgatggaaatcagagagctaataacaatttaataaaaatcaaaagtctatagtaagttttaatattttacttcattaagctatgaaaatttattacttttgaccctatcatcaacataataaatatttaccatgagtctacatatttcctttttaaaatgaatgcccttgcattaatgtgttaaactagtgtgccttttaaagtgtctccggacatattttcccaatgataagcaatccgggacatcttaggagcatagcaaattgattaagacaccatatttctagccaatatttatagattagggaagtacaggaaaggataaagttgttccctttagctacagagctcccatgggggcaacttaccaggcaggaaaatggtaccgtggtacctggtgtcagggcagatgttctctcctttg

SEQ ID NO: 8406 - DNA, 631 bp, Homo sapiens
aaacttaaagtatgattaaaaaaaaaaagtactgtaaccaaatggtggggtccctaggctatcgtttaataagtaatgattttaaaatattgaaaaaaaaatttccaaaccaacaatgagtttacaatttttgaaaacatgaaggcttggtgcagtggctcatgcctgtaatcccagcactgtgggaggctgagacaggagggtcacttgagaccaggagttcaagaccagcctgggcaacatagccagacactgacaccccgtctctacaaaaaatttaaaaattagccggatgtggtgctcaggaggctgagatgagaggattccttgagaccaggagtctgaggctgcagtgagctttgattgtaccactgcactctagcctgggtgacggagtcaccggaagggagaccctgtctctaaaaaaaaaatttaaaaagagcatataaaatggtgaacaaactaacwttttgttaaatcatcaaaaatttgtattctaattctcatattcttgtatcttaggaaacatcatttttgaaaaggtggcaaatgtaataaggttttaaatttaatttcggccgggcagggtggctgaggcctgtaatcccagaactttgggaggcctaggtgg

SEQ ID NO: 8407 - DNA, 732 bp, Homo sapiens
ccccacctgcggacagcccctgcgggcagccagggcccgaggtgagtccccccacccggggctggtccagaggagatccccctacctaaggccgggcccagatggggggccccccaaccctgcccagttccggtgccgccagcagactctgggctggagcggcttsggcacgctccattcgcgaaggcgaactccctcctggctcctagctgctctcccctggttcttgttgcttggtctctttctgctgggcagggagtgctggcagggctgtgctgtccgccctggacttcgcattgcccggtaagggcggttggaggcccggagagccgaactctggcggagccggggagagcatctcggttgtctttgtagccagttcagcaaacacctgttatgcactttgtagctgtcgcgatggcggttctatggtattgaacttagaaagtcaggcatcgttgaattcgttttggacattttgacaaaataggaaaactgacagcacttgacgttcttgttctctgcagtagagtgaaggataacttaatttctaaaatgaaaacgtcttaacgttcctttttactataacttttaggaaactcaaagccaagtttacccagtttaatagtaactgtaggtgtttggtatgtttgctacccccgagatttcatggttttttgttttctatttttagtcttttccttgtgcaagtatctcttgtagagtcttttt

SEQ ID NO: 8408 - DNA, 567 bp, Homo sapiens
agctcactttgcttggatttctcaccagtgctttcttccaaataaagaacaagtaagtttaatgtgaaactcatatttttacagtctgtcaagataattatcacttttataatttggatattgacaattggttaaaataaaaaaatagagaaaaagttggggagggaactttgttggaagttaaatgtaatgtcaatgaaaaaagtaatgagtcaggtacttcattaatacattttttttttctgttaaaaaacctcatttaggtcggggacagtggctcatgcctgtcatctctattttgggaggccaaagcgggggatcgcttgaggccaggagttctagaccagactggacaacataatgagatcccatctcttaaaaaaattatatatattatatatgtatatatatgtatatatacatatataatatatatataatatatatagtatatgtatagtatatatgtatataatatatataatatatatgtatatatattatacatatacatattatatatgtatatatattatacatatacatattatatatgtatatawatta

SEQ ID NO: 8409 - DNA, 769 bp, Homo sapiens
agcctccctttccttttcttgagaactcacatgcagaactcccgtttattcctttccttttcaacctgtggccaacaaactgttgttgggggatacccccaaaatatacatttagccacttactcccagaacaaccagtaaacgtgagattgcttggaaaggggcctttttccagatgcggggctagaagctgccgtgggttgttcagagttaggagcatgcgccatggcagcagcacagcagggccgggattggggaaggggccaatgacctggcctgcacgacaggctcatgagggtccgccagatgccgcttgcagggtggagccctgtgcttctccaagacacaggacaggagggtggggtgagcatgggacarggacaagaaaggaagaggggatgagcagtctattttcaatggtgtggcattcagtggggaaaaataacacccagaggaaaagattttcatctaggcgattcaaactggtggtgtttttcattcctaggttagaacaggacaaaggaaagattcttctagccatggttctagaagagcaatctaaaatctatactctgttcattgtggtagtttgagtcctgaaaatacctgttcacaggggcatgttaaaaagtctgaagagttcaaatctctttggaaaatcctctcagtctagttcaggccatgatgggatataaaacctctgtaaggagccctccagcaggcgttccatccataaagagagcttgctcaactttcctttgatgggcct

SEQ ID NO: 8410 - DNA, 769 bp, Homo sapiens
aattccttactcatttggtgtgggagttggttatgaagacgaatttctcacaaggcaaggagctgtctctctgctctgtatacatggggtgtagccctcgtgcaatcagactggaggaggataaccaggttgctatgtagccttgatttccaaaaaggtgatgggcttctggtaccaacccgtgtcagtatttagaagaggcctgttggaaagctcttaatgagaaagctccttctctgaaaacatttcaatttatgactcctgtgctaagcatttctaggagatcaaactgaatctctagtgcataacagaaaagcatttgccctgcagcaaaagggtcaactttaaaagaatgcttttccatgttaaaaaaaaaaaagtcaaaaaaacaaagcaatgactcccaaaataggaacagaggggaaggaaaagttcatggccttagcggactggatattctggatatttggtccctccagtccygccagatgaaagcccatttatttagagtagaaagagggaattttaaaaaaaataaaggaataacaatacctacaaatgttttcaggattgaaataaatccagggaagaagatggtatgttaccactggaactgcattctcgttcatatctcttgtcctcacgtcctgaagcacattccatgtaatgcatgatagcctgtggccagctgctggctagaaagcaggaccctgcagttctatttctgactccgtctgggcttttgatgagaccaggtgggagaaggaga

SEQ ID NO: 8411 - DNA, 769 bp, Homo sapiens
aattccttactcatttggtgtgggagttggttatgaagacgaatttctcacaaggcaaggagctgtctctctgctctgtatacatggggtgtagccctcgtgcaatcagactggaggaggataaccaggttgctatgtagccttgatttccaaaaaggtgatgggcttctggtaccaacccgtgtcagtatttagaagaggcctgttggaaagctcttaatgagaaagctccttctctgaaaacatttcaatttatgactcctgtgctaagcatttctaggagatcaaactgaatctctagtgcataacagaaaagcatttgccctgcagcaaaagggtcaactttaaaagaatgcttttccatgttaaaaaaaaaaaagtcaaaaaaacaaagcaatgactcccaaaataggaacagaggggaaggaaaagttcatggccttagcggactggatattctggatatttggtccctccagtcctkccagatgaaagcccatttatttagagtagaaagagggaattttaaaaaaaataaaggaataacaatacctacaaatgttttcaggattgaaataaatccagggaagaagatggtatgttaccactggaactgcattctcgttcatatctcttgtcctcacgtcctgaagcacattccatgtaatgcatgatagcctgtggccagctgctggctagaaagcaggaccctgcagttctatttctgactccgtctgggcttttgatgagaccaggtgggagaaggaga

SEQ ID NO: 8412 - DNA, 769 bp, Homo sapiens
aattccttactcatttggtgtgggagttggttatgaagacgaatttctcacaaggcaaggagctgtctctctgctctgtatacatggggtgtagccctcgtgcaatcagactggaggaggataaccaggttgctatgtagccttgatttccaaaaaggtgatgggcttctggtaccaacccgtgtcagtatttagaagaggcctgttggaaagctcttaatgagaaagctccttctctgaaaacatttcaatttatgactcctgtgctaagcatttctaggagatcaaactgaatctctagtgcataacagaaaagcatttgccctgcagcaaaagggtcaactttaaaagaatgcttttccatgttaaaaaaaaaaaagtcaaaaaaacaaagcaatgactcccaaaataggaacagaggggaaggaaaagttcatggccttagcggactggatattctggatatttggtccctccagtcctgscagatgaaagcccatttatttagagtagaaagagggaattttaaaaaaaataaaggaataacaatacctacaaatgttttcaggattgaaataaatccagggaagaagatggtatgttaccactggaactgcattctcgttcatatctcttgtcctcacgtcctgaagcacattccatgtaatgcatgatagcctgtggccagctgctggctagaaagcaggaccctgcagttctatttctgactccgtctgggcttttgatgagaccaggtgggagaaggaga

SEQ ID NO: 8413 - DNA, 746 bp, Homo sapiens
ccttggcctcccagagtgctaggattacatgtgtgagccaccacgcctggctttacattytctttttaactggtctcacaggtgttgctcttctgtttcccagtttttatgcagctgttgggggaaacctgatgccagcctttttttccccacttttataggtgactttatctttttgttcagtgacttaaaatattatttctctttcatctgataacattactaggttttgactcttttattgcattaaagttttcttgattgacatctttaaacattttctttgctgtgtggttttggttttgttctttgggagattacagctatacatatattgtaacttctttgctcatcttctatgtctctcatttctcttctactttttaactcttaaaatctagttttcattttgttaattttattctccctattcctttagtttgtatgttttccacaatgcctgtgctgccatgagctccttccaattttattttttgtttttgtgatcaatagggaattttttccttttcctgtttctttcctgaatttcatagctcacatttcatcttcacttgttgttccatttttccactgatttcttgaatttctactttttggcttctctgtgaagattcttagagatgattatttcatacttggtcacaatttttgtctgattttggaaacatttttctggtgagcctctttccatccattggtaagttttgctactcttttcacatttt

SEQ ID NO: 8414 - DNA, 746 bp, Homo sapiens
ccttggcctcccagagtgctaggattacatgtgtgagccaccacgcctggctttacattttctttttaactggtctcacaggtgttgctcttctgtttcccagtttttatgcagctgttgggggaaacctgatgccagcctttttttccccacttttataggtgactttatctttttgttcagtgacttaaaatattatttctctttcatctgataacattactaggttttgactcttttattgcattaaagttttcttgattgacatctttaaacattttctttgctgygtggttttggttttgttctttgggagattacagctatacatatattgtaacttctttgctcatcttctatgtctctcatttctcttctactttttaactcttaaaatctagttttcattttgttaattttattctccctattcctttagtttgtatgttttccacaatgcctgtgctgccatgagctccttccaattttattttttgtttttgtgatcaatagggaattttttccttttcctgtttctttcctgaatttcatagctcacatttcatcttcacttgttgttccatttttccactgatttcttgaatttctactttttggcttctctgtgaagattcttagagatgattatttcatacttggtcacaatttttgtctgattttggaaacatttttctggtgagcctctttccatccattggtaagttttgctactcttttcacatttt

SEQ ID NO: 8415 - DNA, 746 bp, Homo sapiens
ccttggcctcccagagtgctaggattacatgtgtgagccaccacgcctggctttacattttctttttaactggtctcacaggtgttgctcttctgtttcccagtttttatgcagctgttgggggaaacctgatgccagcctttttttccccacttttataggtgactttatctttttgttcagtgacttaaaatattatttctctttcatctgataacattactaggttttgactcttttattgcattaaagttttcttgattgacatctttaaacattttctttgctgtgtggttttggttttgttctttgggagattacagctatacatatattgtaacttctttgctcatcttctatgtctctcatttctcttctactttttaactcttaaaatctagytttcattttgttaattttattctccctattcctttagtttgtatgttttccacaatgcctgtgctgccatgagctccttccaattttattttttgtttttgtgatcaatagggaattttttccttttcctgtttctttcctgaatttcatagctcacatttcatcttcacttgttgttccatttttccactgatttcttgaatttctactttttggcttctctgtgaagattcttagagatgattatttcatacttggtcacaatttttgtctgattttggaaacatttttctggtgagcctctttccatccattggtaagttttgctactcttttcacatttt

SEQ ID NO: 8416 - DNA, 746 bp, Homo sapiens
ccttggcctcccagagtgctaggattacatgtgtgagccaccacgcctggctttacattttctttttaactggtctcacaggtgttgctcttctgtttcccagtttttatgcagctgttgggggaaacctgatgccagcctttttttccccacttttataggtgactttatctttttgttcagtgacttaaaatattatttctctttcatctgataacattactaggttttgactcttttattgcattaaagttttcttgattgacatctttaaacattttctttgctgtgtggttttggttttgttctttgggagattacagctatacatatattgtaacttctttgctcatcttctatgtctctcatttctcttctactttttaactcttaaaatctagttttcattttgttaattttattctccctattcctttagtttgtatgttttccacaatgcctgtgctgccatgagctccttccaattttattttttgtttttgwgatcaatagggaattttttccttttcctgtttctttcctgaatttcatagctcacatttcatcttcacttgttgttccatttttccactgatttcttgaatttctactttttggcttctctgtgaagattcttagagatgattatttcatacttggtcacaatttttgtctgattttggaaacatttttctggtgagcctctttccatccattggtaagttttgctactcttttcacatttt

SEQ ID NO: 8417 - DNA, 1623 bp, Homo sapiens
tttattttttgttcatatggcttctgtccaatctccgcttcttttggtagttcttacacatatgctggaatctctggattatatccttcttccagctctgctgaaaatgagtttgaggattttctgcccacatacaattgtgaagtagcactgcaacaaaaatcttcattcagaagcaggagagacacccagcagtcactggtccacagcaatgagggacaggcattgagaggctcccccgccctcctggtgggggaaattccttcattcaaacttgtttatactctctaggaggaactccctgccttattgctctctgaagcccagctatgccttttgagaggttctttcctctgaggcacagttttgacaatcaacttcctataggygcaaatttcagaggctaacgattggtttagcggcacaggtttttgcttttgttttaagatctagccttcaggacctatgttgtttctaggtgaaatccagaaagtcatatgcaacaagaacattttggatgaaggaaaattgccattgttatttagaaacactcttaatctaattatatgacatgctaggtttacacttgcaaatctgcaaatatattggtgttagctattaaaagtattcaagatgcccatgacaccagtgggtctggggcttagaagccttttctggcactctaggccaggttaggtcagcttaatccacagactcacagcgtccaacaaaggaagctgggtggcctgacaccatttagtatacgggcaaaaagtgttagcaacctgaacaacaccagagggcgttgctgtagtggatccaagaagaccaatgtcaggtttcattgtgttcagcagattgttaacctgggaaaaagtgtcacgcattgtaggaggatctattgtacaccaattaaaattgagaaagtctgggccacttcaagaagtacattttggaaaatgctctctgatacccggtattggattcatgagacattagtgtgtatattgaaggaaactcctaattttcttgtttcatgacatggctaaatgaatgatctgtctgctgcattgaaaaacactatggctacattggaaggtgcattaatggtatttattgtgttagcttgttaggaatccaggaacttggtttattgaacaactatgtttattgatccacataatattatgtgactgaggaatggtggctccatctgcctaatgaagaacgtttgatatgcgatggtttttgcccttttttgtgtgtgtgcttacaccggaatctttgagtttgagcaaatggctcttagcccttggattctgttgcctggattccattcacttactcacccatgtcctcattgtcatatccccagtggttcccttccccatgctttgtccccaggcctcaggtgaacaatcaccttgtctagactaagaaatccagtgcttggccacaattattagttcaaagatggacatatgatctggattaggggcttttgccggagctttggaggaaatgacctctctttcttactaaaggtaagtctggaaagagacaggcctaaggcactgccagtcatttttttccccttgggttgttctgcctagaattcatcaa

SEQ ID NO: 8418 - DNA, 826 bp, Homo sapiens
atttggaatactgagagtctaaatagatatttttggtcagaattatcccaattatcagcacattaatgcaatgacctggataatgaccaaatctctacctagtttcttgatatatcaatttaactctgctaagacaagaccatacagctggggaaagacattcaagaaaatgccatgctagccgggcgcggtggctcaagcctgtgatctcagcactttgggaggccgaggcgggcagatcacaaggtcaggagtttgagatcagcctggccaacatggtgaaacctcatctgtactaaaaatacaaaaattagatgggcgtggtggcaggcacctataatcccagctactcgggaggctgaggcaggagaatcatttggacccgggaggtggaggctgcagtgagctgagatcaggccattgcactccagcctgggcgacagggcgagactccgcctcaraaaaaaaaaaaagaaaagaaaatgctatgctacagaccactccaaggaagctccaggaaaacactgccttctccttgcgactgtatttggttcatctgtgaatttgtttcagcacatttttctcttcttgacttgaagcaatacaatcagctgagagatcaatgatttctttccccttctcagtgttctgtaattcatctttgatcaatatggtatatatactgcatgactgctctgttccatttgatatatacaaaaagtgatcatacacaaacttgcatcagaagtaattacatcactaaatcgcataaagtaatgagaagcacagattgcttgtttctacctaaaacttcataataacttca

SEQ ID NO: 8419 - DNA, 769 bp, Homo sapiens
agagaagatgagttaaattggaatggacttgaaaamactgatttagttggatttatggatcacagtcatgaaaaggtaaagataccaacttgttttgtgaatttaatctttattccttacttttttgcccctactgtttgtaattcctactttataatgaaatccttcttgtgacttatagaaattaactggggaaaatgtttttctgttctccatttcctttaagtttgtttttagatacactgcattgcaagtatgtgtggtacagtaaaatgttgctaattgtatctgcgctgataagatgccatttgctctaggtcagtttcctaccccctcccccaactattcctagccagtggtagcatgcttcttacttccaaatatatgtgtgtgtgtgtgtgtgtgtgtgtgtgtgtgtgtgcctgtgtgtatcaacaatgtgatcctaaaataaaagaatgacatatatttgacattatttacatactaaatatgggagcacataaatcaattacagaataaaatcaatttttcaaggattttgatgtaatggtttttattcaaaatgtttcttcctttccttaggtagaattttctgccaattattttaaagaaaaatgaagatttattttttaaatgtgaaatgcagtttttttctcttttttgagacagggtcacgctccgtcacccaggctggagtgcagtggcaggattacaactcactgcagccttgacctcccaggctcaagcaatcctcccacttcagcct

SEQ ID NO: 8420 - DNA, 769 bp, Homo sapiens
agagaagatgagttaaattggaatggacttgaaaaaactgatttagttggatttatggatcacagtcatgaaaaggtaaagataccaacttgttttgtgaatttaatctttattccttacttttttgcccctactgtttgtaattcctactttataatgaaatccttcttgtgacttatagaaattaactggggaaaatgtttttctgttctccatttcctttaagtttgtttttagatacactgcattgcaagtatgtgtggtacagtaaaatgttgctaattgtatctgcgctgataasatgccatttgctctaggtcagtttcctaccccctcccccaactattcctagccagtggtagcatgcttcttacttccaaatatatgtgtgtgtgtgtgtgtgtgtgtgtgtgtgtgtgtgcctgtgtgtatcaacaatgtgatcctaaaataaaagaatgacatatatttgacattatttacatactaaatatgggagcacataaatcaattacagaataaaatcaatttttcaaggattttgatgtaatggtttttattcaaaatgtttcttcctttccttaggtagaattttctgccaattattttaaagaaaaatgaagatttattttttaaatgtgaaatgcagtttttttctcttttttgagacagggtcacgctccgtcacccaggctggagtgcagtggcaggattacaactcactgcagccttgacctcccaggctcaagcaatcctcccacttcagcct

SEQ ID NO: 8421 - DNA, 769 bp, Homo sapiens
agagaagatgagttaaattggaatggacttgaaaaaactgatttagttggatttatggatcacagtcatgaaaaggtaaagataccaacttgttttgtgaatttaatctttattccttacttttttgcccctactgtttgtaattcctactttataatgaaatccttcttgtgacttatagaaattaactggggaaaatgtttttctgttctccatttcctttaagtttgtttttagatacactgcattgcaagtatgtgtggtacagtaaaatgttgctaattgtatctgcgctgataagatgccatttgctstaggtcagtttcctaccccctcccccaactattcctagccagtggtagcatgcttcttacttccaaatatatgtgtgtgtgtgtgtgtgtgtgtgtgtgtgtgtgtgcctgtgtgtatcaacaatgtgatcctaaaataaaagaatgacatatatttgacattatttacatactaaatatgggagcacataaatcaattacagaataaaatcaatttttcaaggattttgatgtaatggtttttattcaaaatgtttcttcctttccttaggtagaattttctgccaattattttaaagaaaaatgaagatttattttttaaatgtgaaatgcagtttttttctcttttttgagacagggtcacgctccgtcacccaggctggagtgcagtggcaggattacaactcactgcagccttgacctcccaggctcaagcaatcctcccacttcagcct

SEQ ID NO: 8422 - DNA, 769 bp, Homo sapiens
agagaagatgagttaaattggaatggacttgaaaaaactgatttagttggatttatggatcacagtcatgaaaaggtaaagataccaacttgttttgtgaatttaatctttattccttacttttttgcccctactgtttgtaattcctactttataatgaaatccttcttgtgacttatagaaattaactggggaaaatgtttttctgttctccatttcctttaagtttgtttttagatacactgcattgcaagtatgtgtggtacagtaaaatgttgctaattgtatctgcgctgataagatgccatttgctctaggtcagtttcctaccccctcccccaactattcctagccagtggtagcatgcttcttacttccaaatatatgtgtgtgtgtgtgtgtgtgtgtgtgtgtgtgtgygcctgtgtgtatcaacaatgtgatcctaaaataaaagaatgacatatatttgacattatttacatactaaatatgggagcacataaatcaattacagaataaaatcaatttttcaaggattttgatgtaatggtttttattcaaaatgtttcttcctttccttaggtagaattttctgccaattattttaaagaaaaatgaagatttattttttaaatgtgaaatgcagtttttttctcttttttgagacagggtcacgctccgtcacccaggctggagtgcagtggcaggattacaactcactgcagccttgacctcccaggctcaagcaatcctcccacttcagcct

SEQ ID NO: 8423 - DNA, 820 bp, Homo sapiens
gggattacaggcatgagccactgtgcccagcctacaattactatttacttaaaatgtttattaatgtgagaaaatgtttcagaatgaatctggtcttttttctctacagtggcctcacccttacttttctttcttagccctcttgggaaaggggctccctgcttctcccctcacgtcacccctctcacagtgcttaatggggacctataaacaacaactccgtggccccggggaaacaagcaccttaccttgtaacaacgaagacctttaaggggtcacatcccacattctggccttttcccctctaaactttatcatcaaatttaacctttcatatgataactaacacttggacagcattttatagtttttaatccaccagcattatctcatttgcctcacaaaaacaggaggaggctagggagtccagggacttcctgagccatcttcaacacaagtcagcatttcacagggctcctttcctccagctgcccagccarcgcaatttagttattggcagaaaggaatagaactttacggcaggaatatggaccaacagtcaggcagtgatctccaccagctttcctcacaaaggctaaagcaactccattggatgctaatctgccatgttgactaatgactaaaccttttctgggaaggactctaagatttccagtttatcttttgtaatttgtttaaatcctgcccttaggtcaaaacaaccttgatgttatcaaacctcaattgtccttcacatcccatctgaatcatgcataccctttccctatataaaccctggctccggggagtaatggggcgg

SEQ ID NO: 8424 - DNA, 797 bp, Homo sapiens
cattttaaaggccacttctttgattaccagtcaggaaatataatgacaggctggttcaaaatgtaaaactcattgaggaggagattctccaatgcgataatctcatttcatttcttaacatatgatcaagaattccaccaagattatttttattttgttttgttttaacaaccacctattcctttctcacattccatatacctaaggtgttgctctaacgtgtgtgcagaggccagttgattytaaaattagatctcttattttttttggaggagcaagtattatttgtttttattgtacatccaagaaaacagaggatcttatgacaaatgacgaagccatgactgggcatggtggcacaagcctgtaatcacttgagcctaggagttcgagaccagtctgggaaacacggcaagaccccatctctacaaaaaatcttttaaaaaattagccgagcttgatgatgcctgcctgtagtcccagctatttaggaggctgagatgggacgatcgcttgagtcctgaagattgaagctgcagtgagccaagactgtgccactgcactctagcctgggtgacagtgtaagaccctgtctcaaaaaacaaaaacaaagccacacaatgcgtcagtgcagagaaagaattagattgaaggactcccaaaagcttggtttgggatgaatctttaggatactaggaataagagtaaatgctctggaatctgacttcagcaggcactctgtatgtgtgttgggggttggttagggattgactccgagtgaagctctagggcaggaa

SEQ ID NO: 8425 - DNA, 2650 bp, Homo sapiens
ccatcagcttcctccttcacccagatgtggtatcactgatgaaggctgcaggaagatagcttggataaaagtcctggtttgccagaacagtctcgggttatgcctgttgctcttgtctacattttaataattccctttctaaaaacagtccttgtttgcatgataaatgatatggtcacctatttatgctggtcccctctgtgaccacacaagctggggccagatggggagtttcagttataattttagtaccctcactggctttctgacccagctgggtctggtagaatctgtttctcaatcttaaagtaggggtaatcacattgacctacttacagtgggttgcaaggaaggttctgttctgttgtgtttttctgtcttctttaaaggtattgtgttggtatcatataaattagacttaaaaaaaattagtcgttggtgtgtacagcacctgtcatttagagatgcaagaatctgtaagcaataccatctaatccagtaaatgtwgtcctctctgttatgctttcatgaagatccacccatcttctcgaacaacctacagggtggaacagcaggacattcaggcctagttaaaaagatcttctggctacctgtccttgggttgctgattgcatctgaatgtgatggtggagctaaggaagtatatctgggcaataacttgcccttggtggtcacactgtgtcagttcatcactataagagaaaggcagaaaagctaagccgaaaagctccatccccacgagaagctggtttgcatggctggaccagtgaggatgtcaagacagctctattgtgggttggctgctggatccaactccaccacttctgagcctttgagttataacatcaagcacaaacaaccaggcttattttcccagccaaagtcacatgcaatgtcaaggtatcattaaaaaaaaaaattgaagtttaaaaggcagcttcctctgagtgctgatttgggcacataaacagtggcgtggttaaatgccactctgtgtttaaggtaattatacatcagccctggaatgtagtgatgtgaaagccccactgcagcaaacaaagttgattctatcagcaaactctggcaaatcagctggcctggatgcttctccctgaatttactacttcctacttgagaactgtctctgggaacatcagaacttgaagacaagtgtggtgcactgcctagcactctaaggctggtgccagcttgtaaccaatgatatgtctgcagcagggcttggggaccttggcccatagcagcttgcagtgagagcccttggaaacagctgaggcccataggagtgtcagtggtttgggtctgtgcattgtcatgtcttaccaggtcctgctggggctggactgccactgctcaacaagccaaagacatccatccagagaaaggctggtggagtggacaagacttcttgggaaaggtgacattcctaggggtcaagagatgatggtttttggcttctagctctggaagcactgtcgtaatgggcccaagcaaacgtctgactggtgtagtctaactttgttctacataaaaggacacaggggcccatttatccttttccactttggaatcatacctttctcggtgaggactcagtcatcacccctctgcccttcatcctggtgcccaatccccaaccatgcgccaaatcagtggaactttccttgtggttttgcggaatctttttccttcatccctacagaatttccttcatgagttactgctggcagctgtatttgtgctaattagctgcccttgatggatttctttcatccagttgtaaattctagaggagacattcccaggccaatttaaaagtagaattcacagaccaaactaagtggaaatcaggtttggatggcctccacagagcaagtcaagccaattcccatggcacctgagcacagcattcccagggtggtaagtcaaagtagtagaaggacagacctggaagaaatctcacatagacctttagtttagtcacctcattttacaaactaggcacttggggctcataaaggtgaattaacttgtcctatctcaccgctatttgctggtcacctctgaaagtaacaaggtatgggtggctctgtagactacaggggaattaccccgttgccttctgcgacaccttgaatacagctgtcataaggaaaggccttgtctgttattgtcaagttcatcttttcttttcaacttctaacttttttttctcatggagtaatattatacccctaaagaaaacatatggaatccagctgttgagatatgtcagatattccaaaaagcatacaaagtagctgacctcattttggtaagtaccatggacgagctgctagaaggcacaaaactccctaaacatctggacagagctgggtcctaggttccagtaatacactgtccactagcaaaaagcctttatgctcttagtgtggagtagtctacggtttctcatctgtctctggtactttcagagtcatcagggaagcttctgtgaggtggtgatgtaggaaggtttgttttatggggtatttgggaagaaatcttcttggtcatatttatgacaactcttccaaagggtaactatttgtttacgtgctgacctcggatc

SEQ ID NO: 8426 - DNA, 2650 bp, Homo sapiens
ccatcagcttcctccttcacccagatgtggtatcactgatgaaggctgcaggaagatagcttggataaaagtcctggtttgccagaacagtctcgggttatgcctgttgctcttgtctacattttaataattccctttctaaaaacagtccttgtttgcatgataaatgatatggtcacctatttatgctggtcccctctgtgaccacacaagctggggccagatggggagtttcagttataattttagtaccctcactggctttctgacccagctgggtctggtagaatctgtttctcaatcttaaagtaggggtaatcacattgacctacttacagtgggttgcaaggaaggttctgttctgttgtgtttttctgtcttctttaaaggtattgtgttggtatcatataaattagacttaaaaaaaattagtcgttggtgtgtacagcacctgtcatttagagatgcaagaatctgtaagcaataccatctaatccagtaaatgttgtcctctctgttatgctttcatgaagatccacccatcttctcgaacaacctacagggtggaacagcaggacattcaggcctagttaaaaagatcttctggctacctgtccttgggttgctgattgcatctgaatgtgatggtggagctaaggaagtatatctgggcaataacttgcccttggtggtcacactgtgtcagttcatcactataagagaaaggcagaaaagctaagcmgaaaagctccatccccacgagaagctggtttgcatggctggaccagtgaggatgtcaagacagctctattgtgggttggctgctggatccaactccaccacttctgagcctttgagttataacatcaagcacaaacaaccaggcttattttcccagccaaagtcacatgcaatgtcaaggtatcattaaaaaaaaaaattgaagtttaaaaggcagcttcctctgagtgctgatttgggcacataaacagtggcgtggttaaatgccactctgtgtttaaggtaattatacatcagccctggaatgtagtgatgtgaaagccccactgcagcaaacaaagttgattctatcagcaaactctggcaaatcagctggcctggatgcttctccctgaatttactacttcctacttgagaactgtctctgggaacatcagaacttgaagacaagtgtggtgcactgcctagcactctaaggctggtgccagcttgtaaccaatgatatgtctgcagcagggcttggggaccttggcccatagcagcttgcagtgagagcccttggaaacagctgaggcccataggagtgtcagtggtttgggtctgtgcattgtcatgtcttaccaggtcctgctggggctggactgccactgctcaacaagccaaagacatccatccagagaaaggctggtggagtggacaagacttcttgggaaaggtgacattcctaggggtcaagagatgatggtttttggcttctagctctggaagcactgtcgtaatgggcccaagcaaacgtctgactggtgtagtctaactttgttctacataaaaggacacaggggcccatttatccttttccactttggaatcatacctttctcggtgaggactcagtcatcacccctctgcccttcatcctggtgcccaatccccaaccatgcgccaaatcagtggaactttccttgtggttttgcggaatctttttccttcatccctacagaatttccttcatgagttactgctggcagctgtatttgtgctaattagctgcccttgatggatttctttcatccagttgtaaattctagaggagacattcccaggccaatttaaaagtagaattcacagaccaaactaagtggaaatcaggtttggatggcctccacagagcaagtcaagccaattcccatggcacctgagcacagcattcccagggtggtaagtcaaagtagtagaaggacagacctggaagaaatctcacatagacctttagtttagtcacctcattttacaaactaggcacttggggctcataaaggtgaattaacttgtcctatctcaccgctatttgctggtcacctctgaaagtaacaaggtatgggtggctctgtagactacaggggaattaccccgttgccttctgcgacaccttgaatacagctgtcataaggaaaggccttgtctgttattgtcaagttcatcttttcttttcaacttctaacttttttttctcatggagtaatattatacccctaaagaaaacatatggaatccagctgttgagatatgtcagatattccaaaaagcatacaaagtagctgacctcattttggtaagtaccatggacgagctgctagaaggcacaaaactccctaaacatctggacagagctgggtcctaggttccagtaatacactgtccactagcaaaaagcctttatgctcttagtgtggagtagtctacggtttctcatctgtctctggtactttcagagtcatcagggaagcttctgtgaggtggtgatgtaggaaggtttgttttatggggtatttgggaagaaatcttcttggtcatatttatgacaactcttccaaagggtaactatttgtttacgtgctgacctcggatc

SEQ ID NO: 8427 - DNA, 816 bp, Homo sapiens
tgttatcccggccttccaataaatttgtatgaacttaattcctgtattaaatccttttctgctttaaatagccagagtagtttcagatatcttcaacttaagcctgattcaaacagatggtatactgagaaagaaacacaattaaccaaattaaaccattctatgtgatgaaaatccatccttcctgagcataatgtgaactggaaacaataatgtgttgggaatagagataatttcagtagaaacgatgttgactgatttatcaagaaattaaacagagttataattttcaataagttcttgctttttattgttttatagctaagttaaatgacttcattaatataactagttctttcttactttgaaccctgagctatcagctttatttattagtcacacatgtatttttatttgaatttgaatttcatattactttaatagtcacagtttgttatttgycacttatttgcttcttataaactatatatttatccacaaattttgacacctgaaagcaatgatgcatatccatatggatgttttcatactatagagatgaaaaaatgtatgttatacagatgataaaatctaacagttttaggagaaaatgtccttatctgtaaacagaaagaaaactcataattaggttcagttaagatcaagtattcaaatataaattaaatacttttatattgatttaatttttgttgtaatctccaattctttttcaagtcaaactgaggtatttaaagaaagacactcagagacacagtaattgggtcatgtaagtttctgaaatggtggctgattaca

SEQ ID NO: 8428 - DNA, 819 bp, Homo sapiens
cttcttttctatctcaagatgtcaaaaatgtggagttgtgcaaccttcttatactaccaaggtacatagaatcacaggtgattaacaaatataggtgggcagggaaacattattaactttatttagctttgcctgcctgaactaaagcagaaaggactttcagctctaaataggaaaagaagtaaacatctaccttaagtagcaatgcagaatctattttccacagatactgaggattcacattatcagtaattttagcataaaaacaattctagtagccataaattgtacattcaaagacagttcaccatcataactacaggattaaaaaaattctcatgtaatacctaatatactgtttctacattctgtgttctaattctctggatttataaataatgattgatatgttcactctagttttaatttgtgtgagtctgattttgttttcctaccattggagagaatagacacatacatgtgtttggaagacaggagtttctttaagatttaattataggtataaatgtcctatttgaactaggcaaaatgcgtattaaaaatgaaagttgtaatacattacttaccaagttgatttcctattttgttaggtattgctagatgtacaacctttttaaaatgctgtaatttcaaaaaagtgaaaaacaatcattagaatatttcttggaaataatataataaaatatcaaatgatagtcagtttttccccmaaatgccagcccgcatatatggaatactttgatgttgaaataataaaaattgtataattaggaaaataatttacacatgatggatcca

SEQ ID NO: 8429 - DNA, 819 bp, Homo sapiens
cttcttttctatctcaagatgtcaaaaatgtggagttgtgcaaccttcttatactaccaaggtacatagaatcacaggtgattaacaaatataggtgggcagggaaacattattaactttatttagctttgcctgcctgaactaaagcagaaaggactttcagctctaaataggaaaagaagtaaacatctaccttaagtagcaatgcagaatctattttccacagatactgaggattcacattatcagtaattttagcataaaaacaattctagtagccataaattgtacattcaaagacagttcaccatcataactacaggattaaaaaaattctcatgtaatacctaatatactgtttctacattctgtgttctaattctctggatttataaataatgattgatatgttcactctagttttaatttgtgtgagtctgattttgttttcctaccattggagagaatagacacatacatgtgtttggaagacaggagtttctttaagatttaattataggtataaatgtcctatttgaactaggcaaaatgcgtattaaaaatgaaagttgtaatacattacttaccaagttgatttcctattttgttaggtattgctagatgtacaacctttttaaaatgctgtaatttcaaaaaagtgaaaaacaatcattagaatatttcttggaaataatataataaaatatcaaatgatagtcagtttttcccccaaatrccagcccgcatatatggaatactttgatgttgaaataataaaaattgtataattaggaaaataatttacacatgatggatcca

SEQ ID NO: 8430 - DNA, 819 bp, Homo sapiens
cttcttttctatctcaagatgtcaaaaatgtggagttgtgcaaccttcttatactaccaaggtacatagaatcacaggtgattaacaaatataggtgggcagggaaacattattaactttatttagctttgcctgcctgaactaaagcagaaaggactttcagctctaaataggaaaagaagtaaacatctaccttaagtagcaatgcagaatctattttccacagatactgaggattcacattatcagtaattttagcataaaaacaattctagtagccataaattgtacattcaaagacagttcaccatcataactacaggattaaaaaaattctcatgtaatacctaatatactgtttctacattctgtgttctaattctctggatttataaataatgattgatatgttcactctagttttaatttgtgtgagtctgattttgttttcctaccattggagagaatagacacatacatgtgtttggaagacaggagtttctttaagatttaattataggtataaatgtcctatttgaactaggcaaaatgcgtattaaaaatgaaagttgtaatacattacttaccaagttgatttcctattttgttaggtattgctagatgtacaacctttttaaaatgctgtaatttcaaaaaagtgaaaaacaatcattagaatatttcttggaaataatataataaaatatcaaatgatagtcagtttttcccccaaatgccagcccrcatatatggaatactttgatgttgaaataataaaaattgtataattaggaaaataatttacacatgatggatcca

SEQ ID NO: 8431 - DNA, 819 bp, Homo sapiens
cttcttttctatctcaagatgtcaaaaatgtggagttgtgcaaccttcttatactaccaaggtacatagaatcacaggtgattaacaaatataggtgggcagggaaacattattaactttatttagctttgcctgcctgaactaaagcagaaaggactttcagctctaaataggaaaagaagtaaacatctaccttaagtagcaatgcagaatctattttccacagatactgaggattcacattatcagtaattttagcataaaaacaattctagtagccataaattgtacattcaaagacagttcaccatcataactacaggattaaaaaaattctcatgtaatacctaatatactgtttctacattctgtgttctaattctctggatttataaataatgattgatatgttcactctagttttaatttgtgtgagtctgattttgttttcctaccattggagagaatagacacatacatgtgtttggaagacaggagtttctttaagatttaattataggtataaatgtcctatttgaactaggcaaaatgcgtattaaaaatgaaagttgtaatacattacttaccaagttgatttcctattttgttaggtattgctagatgtacaacctttttaaaatgctgtaatttcaaaaaagtgaaaaacaatcattagaatatttcttggaaataatataataaaatatcaaatgatagtcagtttttcccccaaatgccagcccgcatatatggaatamtttgatgttgaaataataaaaattgtataattaggaaaataatttacacatgatggatcca

SEQ ID NO: 8432 - DNA, 819 bp, Homo sapiens
cttcttttctatctcaagatgtcaaaaatgtggagttgtgcaaccttcttatactaccaaggtacatagaatcacaggtgattaacaaatataggtgggcagggaaacattattaactttatttagctttgcctgcctgaactaaagcagaaaggactttcagctctaaataggaaaagaagtaaacatctaccttaagtagcaatgcagaatctattttccacagatactgaggattcacattatcagtaattttagcataaaaacaattctagtagccataaattgtacattcaaagacagttcaccatcataactacaggattaaaaaaattctcatgtaatacctaatatactgtttctacattctgtgttctaattctctggatttataaataatgattgatatgttcactctagttttaatttgtgtgagtctgattttgttttcctaccattggagagaatagacacatacatgtgtttggaagacaggagtttctttaagatttaattataggtataaatgtcctatttgaactaggcaaaatgcgtattaaaaatgaaagttgtaatacattacttaccaagttgatttcctattttgttaggtattgctagatgtacaacctttttaaaatgctgtaatttcaaaaaagtgaaaaacaatcattagaatatttcttggaaataatataataaaatatcaaatgatagtcagtttttcccccaaatgccagcccgcatatatggaatacttygatgttgaaataataaaaattgtataattaggaaaataatttacacatgatggatcca

SEQ ID NO: 8433 - DNA, 2050 bp, Homo sapiens
ccaagcaggaaacctgttctctctctcctgtgaatatgcttcctgggaaagagaagggaaatagaagcggtagtgtaccttttcatgattggaaaggatctagtgatctgactgcttcttaaataaactttcaatgcatcattctcattttagtctctcctcttcaccacacttccagaagaatctgatgctgccaattcctgacacttgaaggctcttgagtgtcaaacaagttgcttcttggctttcctgctgctggtttagtactttaatttgggagttctgctaagtcttttctcactcatccaattttccaaaattgtgttattattgtttattttcccatggcccaggacttaaaaaaattcactgacaaattaactggatttggggaggaccaaatttgatgcatgtgtttaatttactccctacatctgggagctccattaaatttttacaagtataacttgacataataaaatctaaatttaattaatatatttacccttcacctcaaaaatacaagggctttagaaactttcaatactaattaccccatattccttattaatgtttattgtttaaattctgccttttaaataccctccatctccaaattagccattgttccccattattgtagtgtataagagtgcttattcagatacagccagatgtttatacatttcttggtccaccatttcttcttgcatgtgactccttctttctgggttcagtgtccttaccattgaagtacatctttactgaagatgctgttggtgtcctgtccagaatctcttcaatgagctggcgtactcatcccttagctgctgagagtgttggctgctaatagttcacactctttccctgaggattccattcaagccaacaatttcagaaaatgcctggaaggtaacagccttcccccgtgggtagctcatagccaatgactgattgatatgggtgtacagaactgaggctccagaactccctgtgggatcagactgaggctagacttcagctaaacccatatctttcccagcttcttttcctgtcctattctgcttccttcctcgctgttcagatttcttctgagagcactccctcaggcaatcacttggacaggaatctaattctcagggtcagctgcaagagcccaatctaagacagttgatagcagtagtaattatatacacctgagtctgaggatgggattctggagtttgctcactcaccagtggttccatcagaatctcttccctgaagatagtctcagatgtgctcctgcagtgaaattgctaacacttttacttgtagtgaaccaggacagcatataagtagaagcgaatgcattaacttctgtgatgtatctagtatttgagagtacaggtggaaaagtaacttgaaagattgttgaattgggagggtattgctaagcaccattgatgcactaagtatagatgccaggatcaaatctattaaccaccaatttaaacccaagtgtgagagtcaaagggcctccatggaagcctttaaaaagtccctcatcactggcagccagaaggccaactgaactgaagcccaggtgcagcctgtacttatgagtggcagaatgccagagaaggttaattctcagcctgtgtaagtctccttcaagagaatcagggtcctgattggaaaaaagtgggaacatgagaattggaatggggaaacttattagacacacttaaggaccttggcctcccagcttctccggaatatctgggcctacagacgtggcccactcccttgctggaagatggaagaccttctccttgcttgaaaactataagcttcgagtaagtcaagtgtcctacaaaacaatgttggtcctgctcagaatctacccccacttctctccccgataccagacagtatgaggactaagtttcagtataatccaactgggtaagtacagtgtctgttaagggaggggaggatcatatggcaaaggcrctgcaggatctggctgacttaagccagcaggaccccagagaaaatgcctggaagt

SEQ ID NO: 8434 - DNA, 766 bp, Homo sapiens
aaaaccccgtctctactaaaaatacaaaaattagctgggtgtggtgactggtgcctgtaatcccagctactctggaggctgaggcaggagaatcactggaaccctgggggtggaggttgcagtgagccgagattgcaccactgcactccagcctgggcgacagagtgagactccatctcaaaaaaatatatattaaaaaaaaagtattctaggacggacacagtggctcatgcctataatcccagcactttgagaggccgaggtgggaggatcacttgagtctagtttgagatcagcctggccaacatgttggaacccagtctctaaaaatacaaaaattagcctgatgtggtggtgcacccctgtaatcccagctactcgggaagctgaggcactgagcacaggaggtagaggctgcagtgaaccgagattgtgccactgcatgccagccttggcaacagagtgagaccctgtctcaaaaataaataaatattctgaagcataaaaatcctaaaacatatcattcttgacagaagcagagaaagttcccaggaacaaaaggttatcatgaaaacaattattggaagaatgaacaaataaatgaaatgtaaactgtcttcctgtggttcaaaaccacacctgccccatgtctgttagttaagcgtgggaggtcggcacatcctctagggccactcactggtgcgagcctcytcttgcaaactgtgccacagatcaggctggcatccacaacagcccgcctgccctt

SEQ ID NO: 8435 - DNA, 819 bp, Homo sapiens
tcttctgggggccccggtgccccacacacctcggatgtgccaggggcctcatgtaggctttctcatgctattttataaggaaagaaacaaaacagaaaggagttatgctggagagctggcagaagtcccaggggaacctaaccccctggccctcacgctcccactttatttcacaaacagaacaagctgccactgcactccagcytgggcaacagagcaaggccctgtctcaaaacaacaaaaacaaacaaacaaacaaaaaacaaaaacagaagagctgacactcaaagagtaaaaacaactaacctaagccacagggccttcctgtgctggcttagaacaaggaccaatggccagttatgaagggctcccgcaacgctgcctgaagcaaggtttgttttatacacaatgctcttccctcaggctctccattataaaggccacagtggagaagccaggcatccttcccaggaaggaacatacctgctcagacatggctccagcctcctgcagagtaggcaagaagatgtcctacagtagcacaaaggagatagtaggtgtgaagaagtgactaatgacacttgctgttcacaactagttttttccagaaactatgaggaaccccaagtagtcagcagtgggtgacggctgtcagcatccctccgacagccttgcttccagtggcactttacagtgaaagcaagcttaggtggcaacctggtgcccactcagacttgcattggcaagcagatacaaaaacagccgtgggacattttctatcaacttgctgaggtcccagctctgttttttgaaatgcca

SEQ ID NO: 8436 - DNA, 819 bp, Homo sapiens
tcttctgggggccccggtgccccacacacctcggatgtgccaggggcctcatgtaggctttctcatgctattttataaggaaagaaacaaaacagaaaggagttatgctggagagctggcagaagtcccaggggaacctaaccccctggccctcacgctcccactttatttcacaaacagaacaagctgccactgcactccagcttgggcaacagagcaaggccctgtctcaaaacaacaaaaacaaacaaacaaacaaaaaacaaaaacagaagagctgacactcaaagagtaaaaacaactaacctaagccacagggccttcctgtgctgrcttagaacaaggaccaatggccagttatgaagggctcccgcaacgctgcctgaagcaaggtttgttttatacacaatgctcttccctcaggctctccattataaaggccacagtggagaagccaggcatccttcccaggaaggaacatacctgctcagacatggctccagcctcctgcagagtaggcaagaagatgtcctacagtagcacaaaggagatagtaggtgtgaagaagtgactaatgacacttgctgttcacaactagttttttccagaaactatgaggaaccccaagtagtcagcagtgggtgacggctgtcagcatccctccgacagccttgcttccagtggcactttacagtgaaagcaagcttaggtggcaacctggtgcccactcagacttgcattggcaagcagatacaaaaacagccgtgggacattttctatcaacttgctgaggtcccagctctgttttttgaaatgcca

SEQ ID NO: 8437 - DNA, 745 bp, Homo sapiens
tgtggaagaaggtcgttgaaagaggttctttttgttgtttttttacagctttatggaggcataattgacttacagtaaactgctcgtagttaaagcgcatcactggataagttttggcatgtgcacactcttgaagccatcaccaccatcaagataatggatatttccaycaaatgcaaacgtttcctggtgtctcttggtaaaccatccccccctccacccctgttcctaggtaatcactgatctgccgtctgtcattagagattagtttgcatttttctggattttatatgagtggtatcctacggtacgtatttttttttttggcgggggggtgttctgcctccttccactccgaagaatgatttttgagtttcacccacgttgctgtgtgtatcaatagctcattcctttctattgttgagtaattctccaccaaatgaatatgctataatttgtttaaccattattctactaatggatatcagggattttccagttttgggttgttataaacagattctctgaacatttgtttacaagtctttgtgttaagacatagtgctttaatttctcttgggtaaatacctcagagtggaatggttgagttgtacgggagatggtgggtctaacttgataagaaaccgccagactgtttgcaaagtgatcgcaccattttatattccaccagcagagtatgagagattcagtcactccacatctttgctgacacttggtatggtgc

SEQ ID NO: 8438 - DNA, 745 bp, Homo sapiens
tgtggaagaaggtcgttgaaagaggttctttttgttgtttttttacagctttatggaggcataattgacttacagtaaactgctcgtagttaaagcgcatcactggataagttttggcatgtgcacactcttgaagccatcaccaccatcaagataatggatatttccaccaaatgcaaacgtttcctggtgtctcttggtaaaccatcccyccctccacccctgttcctaggtaatcactgatctgccgtctgtcattagagattagtttgcatttttctggattttatatgagtggtatcctacggtacgtatttttttttttggcgggggggtgttctgcctccttccactccgaagaatgatttttgagtttcacccacgttgctgtgtgtatcaatagctcattcctttctattgttgagtaattctccaccaaatgaatatgctataatttgtttaaccattattctactaatggatatcagggattttccagttttgggttgttataaacagattctctgaacatttgtttacaagtctttgtgttaagacatagtgctttaatttctcttgggtaaatacctcagagtggaatggttgagttgtacgggagatggtgggtctaacttgataagaaaccgccagactgtttgcaaagtgatcgcaccattttatattccaccagcagagtatgagagattcagtcactccacatctttgctgacacttggtatggtgc

SEQ ID NO: 8439 - DNA, 745 bp, Homo sapiens
tgtggaagaaggtcgttgaaagaggttctttttgttgtttttttacagctttatggaggcataattgacttacagtaaactgctcgtagttaaagcgcatcactggataagttttggcatgtgcacactcttgaagccatcaccaccatcaagataatggatatttccaccaaatgcaaacgtttcctggtgtctcttggtaaaccatccccccctccacccctgttcctaggtaatcactgatctgccgtctgtcattagagattagtttgcatttttctggattttatatgagtggtatcctacggtacgtatttttttttttggcgggggggtgttctgcctccttccactccgaagaatgatttttgagtttcacccacgttgctgtgtgtatcaatagctcattcctttctrttgttgagtaattctccaccaaatgaatatgctataatttgtttaaccattattctactaatggatatcagggattttccagttttgggttgttataaacagattctctgaacatttgtttacaagtctttgtgttaagacatagtgctttaatttctcttgggtaaatacctcagagtggaatggttgagttgtacgggagatggtgggtctaacttgataagaaaccgccagactgtttgcaaagtgatcgcaccattttatattccaccagcagagtatgagagattcagtcactccacatctttgctgacacttggtatggtgc

SEQ ID NO: 8440 - DNA, 2132 bp, Homo sapiens
ggatccaagcttttcattttctctttgtaagagcttgcgtacactcaaaagaatccacacctcaccaaaatgtttatagtcatcgttactgccataatggtcaagttcaggagccacgtgggttccttaggagccacttcatcgcaatcaatggcagatgatagttgattaatggcaatgctgctgcatatgggggtcactaacatcccgtttcccattggcaaggagctcagctttgtgttcaagcccaaaggcatgaccaaaccaatccccacatcccatccatcacctggaaccactcttggtaccaattttatgtcagtcagggtacatctgcccacttcccacagcctttagctgtggtccccacgcagcctgtggggcgtgcagatgatgtggctccctgtggatgagaaaatggaggcttggggaggggaaatagtctccaagatcacccagtgaagacacctctgagtcggagcttgaacccaggtctctgggctacaaatttggcgctctggctgctgggagacactgcctcctggtggccgccctggccacaaacagctggggatggagttctcgggtggcttcgagcaaatttccccgggggcggccacatcccacgcagcacacacaccagcgagcctcttctcaccctggctccccgctcctctaggagcaacttggggaattcctacacatttaatccctactgtgcgctaagtagcgaagatggtcgttccatgtcaccctccctgcaaccttgcaaggtgggtgctatcacccccaactaagcagggtggaggcgacagcggagaaaacgaggctcagagaggcagagacttgtccaaggccacatagttggaaggcaccaatgtgggggcttgaatcaaaaccagaggaaagatatgcccaacattcctgtcccttggctctgggagcccccgtggaggcagagatgagtgcaggagtgggtgcagaggttggctcctcaaaagaatgccagtccaggctgggtaaacgatgggtgctctgagcggtggggggtttccctcctgctgtggggcttcctgaaggaatcgtggtgggaagcaggggttccccttcaagggggcaggggagacactctggagtgacatttgccacccaccactctgtaatgatcagagtgggagtaaatggagctgggcctcagagtaattggccggggaaccctgagtctcggctcggcccagggtcacaaaggtccccgagttaatgaagcaaactctccccagtgtcagaggccgccttcagcacccctacagaggacgaaactttcagcagcagcttttcaaggttccaaaaagaaagttggtggaggggggcagaaagggaaggcgttgttttcatgcctcttgcttcatttgcataaggtgaaaaaatgtttccatagaaacaactagagtctgtaatttttgaataacgatttctgcacacagcacaacctgtcttttccaaaggggaattaagaaattctcaacagcatttcttaccataacaaaaggcaaagtttcccaattctaggattgctgctccagaagggagggccttggctccagcccctgccctctctcggcctcagtttactccttctgtgaaatggggcgaatgagggtggaattagactcagcagggatgaagccgcctgcaccgtggaaggggagggcgggcgctggagtgagatgggattcctgtgtcggggctgggaggcagcagggccgggcagcgttgtgaggagctttccagaagaggcgggggcaggggctgaggacccgaggaccacccaggccacacggagaggcccccgcccgaccctgccccccggggtctcctctgcggcgaagagcgtgggtgcaggaccccggcgcgcagcgcagcgcagcggacccggctcacctgagcgaaggytgcggcctcgctggccgcctctgcccccttgtggcccgaggccaccgcagcacccacttgcccggggcactgacctgcgtggctggctccgccagggcctgacctccctcctggtgcctttgcagagggggagcagccacagggcctgggggtggggttgggctgggagagggacccca

SEQ ID NO: 8441 - DNA, 2132 bp, Homo sapiens
ggatccaagcttttcattttctctttgtaagagcttgcgtacactcaaaagaatccacacctcaccaaaatgtttatagtcatcgttactgccataatggtcaagttcaggagccacgtgggttccttaggagccacttcatcgcaatcaatggcagatgatagttgattaatggcaatgctgctgcatatgggggtcactaacatcccgtttcccattggcaaggagctcagctttgtgttcaagcccaaaggcatgaccaaaccaatccccacatcccatccatcacctggaaccactcttggtaccaattttatgtcagtcagggtacatctgcccacttcccacagcctttagctgtggtccccacgcagcctgtggggcgtgcagatgatgtggctccctgtggatgagaaaatggaggcttggggaggggaaatagtctccaagatcacccagtgaagacacctctgagtcggagcttgaacccaggtctctgggctacaaatttggcgctctggctgctgggagacactgcctcctggtggccgccctggccacaaacagctggggatggagttctcgggtggcttcgagcaaatttccccgggggcggccacatcccacgcagcacacacaccagcgagcctcttctcaccctggctccccgctcctctaggagcaacttggggaattcctacacatttaatccctactgtgcgctaagtagcgaagatggtcgttccatgtcaccctccctgcaaccttgcaaggtgggtgctatcacccccaactaagcagggtggaggcgacagcggagaaaacgaggctcagagaggcagagacttgtccaaggccacatagttggaaggcaccaatgtgggggcttgaatcaaaaccagaggaaagatatgcccaacattcctgtcccttggctctgggagcccccgtggaggcagagatgagtgcaggagtgggtgcagaggttggctcctcaaaagaatgccagtccaggctgggtaaacgatgggtgctctgagcggtggggggtttccctcctgctgtggggcttcctgaaggaatcgtggtgggaagcaggggttccccttcaagggggcaggggagacactctggagtgacatttgccacccaccactctgtaatgatcagagtgggagtaaatggagctgggcctcagagtaattggccggggaaccctgagtctcggctcggcccagggtcacaaaggtccccgagttaatgaagcaaactctccccagtgtcagaggccgccttcagcacccctacagaggacgaaactttcagcagcagcttttcaaggttccaaaaagaaagttggtggaggggggcagaaagggaaggcgttgttttcatgcctcttgcttcatttgcataaggtgaaaaaatgtttccatagaaacaactagagtctgtaatttttgaataacgatttctgcacacagcacaacctgtcttttccaaaggggaattaagaaattctcaacagcatttcttaccataacaaaaggcaaagtttcccaattctaggattgctgctccagaagggagggccttggctccagcccctgccctctctcggcctcagtttactccttctgtgaaatggggcgaatgagggtggaattagactcagcagggatgaagccgcctgcaccgtggaaggggagggcgggcgctggagtgagatgggattcctgtgtcggggctgggaggcagcagggccgggcagcgttgtgaggagctttccagaagaggcgggggcaggggctgaggacccgaggaccacccaggccacacggagaggcccccgcccgaccctgccccccggggtctcctctgcggcgaagagcgtgggtgcaggaccccggcgcgcagcgcagcgcagcggacccggctcacctgagcgaaggttgcggcctcgctggccgcctctgcccccttgtggcccgaggccaccgcagcacccacttgcccggggcactgacctgcgtggctggctccgccaggkcctgacctccctcctggtgcctttgcagagggggagcagccacagggcctgggggtggggttgggctgggagagggacccca

SEQ ID NO: 8442 - DNA, 822 bp, Homo sapiens
atatgagggggcctctctgcaaagcagcaattgtcaatagtaggtaagagtaggatttttccaacatagcctatatgggtcaatgaaaagagattgaagaacagtaggttcttaaaagacttgtatctaagatggggaatttatgaagactcaatcaataaatccaaggtggggccaaaaaaataaatccaagtatgaacaagccataaaaatccaggttgtcagattcaaggcaatcagataaaaaatggaatttaggtataaagtcagcatctaaaagctaagatagtatattaatgggggtcatgagtaaatgagctgatgtgggaaattgttaagattcattttattttatttaattttttgagacagagtctcgctctgctgcccaggctggagtgcagtggcacgatctccgttcactgcaaactctgcttcctgggtttaagtgatactcttgccccaacctccagagtagctgggrttacgagtgccaccatgcccagctaatttttgtatttttaatagagatggggctttgccatgttgctcatgctgttcttgaactcctgttctcaaatgatctgcccactctggcctctcaaaatgctgggatcaaaagtgtgagctactacacccaactggaaatggttaagattcttatagagcccagatagtggacaggtatggcagtgcttcaatatgttcagtggtcatggatgaatgtatatgcacagtagccaaaaagtgtattaggaaatgccaagcttgccaatgtaggtgctaccaacacctaccaacacctgatctgcttttgagagt

SEQ ID NO: 8443 - DNA, 822 bp, Homo sapiens
atatgagggggcctctctgcaaagcagcaattgtcaatagtaggtaagagtaggatttttccaacatagcctatatgggtcaatgaaaagagattgaagaacagtaggttcttaaaagacttgtatctaagatggggaatttatgaagactcaatcaataaatccaaggtggggccaaaaaaataaatccaagtatgaacaagccataaaaatccaggttgtcagattcaaggcaatcagataaaaaatggaatttaggtataaagtcagcatctaaaagctaagatagtatattaatgggggtcatgagtaaatgagctgatgtgggaaattgttaagattcattttattttatttaattttttgagacagagtctcgctctgctgcccaggctggagtgcagtggcacgatctccgttcactgcaaactctgcttcctgggtttaagtgatactcttgccccaacctccagagtagctggggttacgagtgccaccatgcccagctaatttttgtatttttaatagagatggggctttgccatgttgctcatgctgttcttgaacwcctgttctcaaatgatctgcccactctggcctctcaaaatgctgggatcaaaagtgtgagctactacacccaactggaaatggttaagattcttatagagcccagatagtggacaggtatggcagtgcttcaatatgttcagtggtcatggatgaatgtatatgcacagtagccaaaaagtgtattaggaaatgccaagcttgccaatgtaggtgctaccaacacctaccaacacctgatctgcttttgagagt

SEQ ID NO: 8444 - DNA, 822 bp, Homo sapiens
atatgagggggcctctctgcaaagcagcaattgtcaatagtaggtaagagtaggatttttccaacatagcctatatgggtcaatgaaaagagattgaagaacagtaggttcttaaaagacttgtatctaagatggggaatttatgaagactcaatcaataaatccaaggtggggccaaaaaaataaatccaagtatgaacaagccataaaaatccaggttgtcagattcaaggcaatcagataaaaaatggaatttaggtataaagtcagcatctaaaagctaagatagtatattaatgggggtcatgagtaaatgagctgatgtgggaaattgttaagattcattttattttatttaattttttgagacagagtctcgctctgctgcccaggctggagtgcagtggcacgatctccgttcactgcaaactctgcttcctgggtttaagtgatactcttgccccaacctccagagtagctggggttacgagtgccaccatgcccagctaatttttgtatttttaatagagatggggctttgccatgttgctcatgctgttcttgaactcctgttctcaaatgatctgcccactctggcctctcaaaatgctgggatcaaaagtgtgagctactrcacccaactggaaatggttaagattcttatagagcccagatagtggacaggtatggcagtgcttcaatatgttcagtggtcatggatgaatgtatatgcacagtagccaaaaagtgtattaggaaatgccaagcttgccaatgtaggtgctaccaacacctaccaacacctgatctgcttttgagagt

SEQ ID NO: 8445 - DNA, 679 bp, Homo sapiens
caaggtgatgaagagtgagccacaacctcactcgttcccctggggtgtgctgggcaccatgcctgctgatttccatcaactggggcctcctggcagcagagctcagcctttacaatcgtcctttctgagtgggtatcattttatgatgggcgagacctcccatgtcctgagagtagcagatttataattgagcaaagcaaaaatgccattagatcaaaggtcccaggaagtgaggcctcgtcagttctcagtaaaacatcatttaagtggacatcagggatgggagtccagcaagggcatgttcaaattcaagtcatctaagtgcctaaagtagttggccatttcctaatgacacggayggctctcatggcaggtgctttccctgggatctgagctcatatagaaacagaggttaaacacagagtatggacttccagagctgggaagaacagaggcaacccagtcttttgcttccgtttattttacagttgaagaaatagaaggaaagcaacttgcccagatgtcaggtcagaccagtgacagagttcaggcattcattcatcaaactctcatggagcatgccgtctgtgtcaggtccactgctagatgctaggcatatatatataacaagacttagctcaaggagctcctgctctcaaggagttcaccatccagtgga

SEQ ID NO: 8446 - DNA, 835 bp, Homo sapiens
atcagcctctctcttgcctttgggaaatgggaaattgagcattccttcctgtactggatgggagagaccctgggaagatatggggacttagcgtgagtmagtctttctttctttcttactttctttctttctttctttttgagatggagtctcgctctgtcacccaggctggagtgcagtggtggcgcgatcttagctcactgcaacttccgcctgctgggttcaagcaattctcctgcctcagcctcccgagtagctgggactccaggagcgtgccaccatgcctggctaatattttgtatttttagtagagatggggtttcaccatgctggccaggctggtctcgaactcttgacctctttatccacctgccttggcctcccaaagtgctgggattacatgtgcgagccaccgcacccggccagtgtgagtttcttgaagaggagatggctgtgtgagtcttggggaaggtcatggccggcagggcacacactgagacctgctccacccctctctctgctgtatgaattttcttaataccttatctaggagtaaagtgacccccgtttgcacactgtattgatggaggctcactgtttctcagtaagtccacttcatacttggccagatggccgttagaaagctggcatttagttggaaaaggtgggagcaaatgcttgagacagtaagcaaataaaaattgcatactaaatttgataatctttgtgtaaggatagcacatatacacagcaaagactcccatgatatactaaaatggtaagtttttaatcaatgaatggcaggatgcagtatgattgtaagctttctgatctt

SEQ ID NO: 8447 - DNA, 835 bp, Homo sapiens
atcagcctctctcttgcctttgggaaatgggaaattgagcattccttcctgtactggatgggagagaccctgggaagatatggggacttagcgtgagtaagtctttctttctttcttactttctttctttctttctttttgagatggagtctcgctctgtcacccaggctggagtgcagtggtggcgcgatcttagctcactgcaacttccgcctgctgggtycaagcaattctcctgcctcagcctcccgagtagctgggactccaggagcgtgccaccatgcctggctaatattttgtatttttagtagagatggggtttcaccatgctggccaggctggtctcgaactcttgacctctttatccacctgccttggcctcccaaagtgctgggattacatgtgcgagccaccgcacccggccagtgtgagtttcttgaagaggagatggctgtgtgagtcttggggaaggtcatggccggcagggcacacactgagacctgctccacccctctctctgctgtatgaattttcttaataccttatctaggagtaaagtgacccccgtttgcacactgtattgatggaggctcactgtttctcagtaagtccacttcatacttggccagatggccgttagaaagctggcatttagttggaaaaggtgggagcaaatgcttgagacagtaagcaaataaaaattgcatactaaatttgataatctttgtgtaaggatagcacatatacacagcaaagactcccatgatatactaaaatggtaagtttttaatcaatgaatggcaggatgcagtatgattgtaagctttctgatctt

SEQ ID NO: 8448 - DNA, 736 bp, Homo sapiens
ttctcttccagggttacctaccatgggatctgaagcaggtaagttgagttgatcaccaatggccaatgtctttatctgtaaaattatccttacagtccagaccctgctgatgcagtgccagggcatgggtacagatagtgaccctcataccaatgactacatatttaaaarctatatatcaagccagcaaactgtggaatcaaacattttctatcctcctactttgacagaaacaccttcaaaaagaaaatgtgtaggccgggcacagtggctcacgtctgaaatcccaacactttgggaggccgaggcagttggatcatgaggttaggagattgagaccatcctggcaaacatggtgaaaccctgtctctactaaaaaaaagaaaaaaaaaaaaaaaatagcagagcagggtggtgggcgcctgtagtcgcagctatttaggaggctgaggcaggagaccctcttgaacccggaaggcggaggttgcagtgagccgagatcccgccactgtactccagcctggtgacagagcaagactccgtctcaaaaaaaaaaaaaaaaaaaaaaaaagaagaaaaagaaagacagaaaatgggtaaagctatgatacttatatgactgaaagacatccaaatataaaaggtggccaaatgtaattgttactgcatggttctggatgtgctattagtaaacagagatactgggttagtcataaaataaagatgcatattattt

SEQ ID NO: 8449 - DNA, 736 bp, Homo sapiens
ttctcttccagggttacctaccatgggatctgaagcaggtaagttgagttgatcaccaatggccaatgtctttatctgtaaaattatccttacagtccagaccctgctgatgcagtgccagggcatgggtacagatagtgaccctcataccaatgactacatatttaaaagctatatatcaagccagcaaactgtgraatcaaacattttctatcctcctactttgacagaaacaccttcaaaaagaaaatgtgtaggccgggcacagtggctcacgtctgaaatcccaacactttgggaggccgaggcagttggatcatgaggttaggagattgagaccatcctggcaaacatggtgaaaccctgtctctactaaaaaaaagaaaaaaaaaaaaaaaatagcagagcagggtggtgggcgcctgtagtcgcagctatttaggaggctgaggcaggagaccctcttgaacccggaaggcggaggttgcagtgagccgagatcccgccactgtactccagcctggtgacagagcaagactccgtctcaaaaaaaaaaaaaaaaaaaaaaaaagaagaaaaagaaagacagaaaatgggtaaagctatgatacttatatgactgaaagacatccaaatataaaaggtggccaaatgtaattgttactgcatggttctggatgtgctattagtaaacagagatactgggttagtcataaaataaagatgcatattattt

SEQ ID NO: 8450 - DNA, 736 bp, Homo sapiens
ttctcttccagggttacctaccatgggatctgaagcaggtaagttgagttgatcaccaatggccaatgtctttatctgtaaaattatccttacagtccagaccctgctgatgcagtgccagggcatgggtacagatagtgaccctcataccaatgactacatatttaaaagctatatatcaagccagcaaactgtggaatcaaacattttctatcctcctactttgacagaaacaccttcaaaaagaaaatgtgtaggccgggcacagtggctcacgtctgaaatcccaacactttgggaggccgaggcagttggatcatgaggttaggagattgagaccatcctggcaaacatggtgaaaccctgtctctactaaaaaaaaraaaaaaaaaaaaaaaatagcagagcagggtggtgggcgcctgtagtcgcagctatttaggaggctgaggcaggagaccctcttgaacccggaaggcggaggttgcagtgagccgagatcccgccactgtactccagcctggtgacagagcaagactccgtctcaaaaaaaaaaaaaaaaaaaaaaaaagaagaaaaagaaagacagaaaatgggtaaagctatgatacttatatgactgaaagacatccaaatataaaaggtggccaaatgtaattgttactgcatggttctggatgtgctattagtaaacagagatactgggttagtcataaaataaagatgcatattattt

SEQ ID NO: 8451 - DNA, 547 bp, Homo sapiens
gtctctcatagatatctgagcactttaatttgtggaagagtcgaggaagaggaggccttgaaaatagtctcctttctaactaccaaatttgggggctggctcagcttcccctcccccattactggttccctgagcaggtctgagccaggataatcttctttaacctccactttctgtcaggccctggtcgtgtgctggatgtacctctcctcatgtaattgtcacaactaccctgtattggaggtgccaaagactgaataacatgtttaacttactaaatagaagaattgggactgccggtaaaaactgccagattccaaagccagagttttttcaatacactcaaggaataaaacgtcagctgctgtttttattagcactcaccaatgagacaccatcctgtcctgttccctgttttcatcctgcagcgccatatattgctccaaagcttagatagtgcccagagcccacctacagctcatcttcctatgaggcagagagctagcttgatckttggggaataatggcagagctctcagaaggtgct

SEQ ID NO: 8452 - DNA, 762 bp, Homo sapiens
agaaagctatacaatacctttaccagtctttttgtaatgaaagctctgaaatatttattgaatgaatgaatggtgctaataataaggtgatgaaaataatttttcattcacaaattgctaacatactgcctttcgtttcataacagtcttccaaaaaacagtattcttgtgactgttactgagtataaactggatacttctggatacggctctggttgtacataagtgtttttcaccttgtgttacacacaaacacacaccctactccgtttgttggaagcctgcaagtgatcacgcgtatcaatgctaggagtgacgtcaagtagactggctgggaagggcagaatgtggtaggcggttaaaaagcaaaaggcacatgctatatgactttttgccttttcttgttgtctttaagacttttgtgatggttacataacaccagtgggaccagagactagggcaggccaaagatgcactgattaaggaaattactgctacctaacagttattctggagctcaartatttcctgttcattatgcaataatgtagcctttcgagtctccaaatgccatttggaagaagagggtgggggagttggaggtagtaggttggatctgaggcttagtctcttgcctgctgttttatgggcaaggtggggcaggacctataaaaattccttcacccatggcccttttctcctacaatgactgtagaaaattagaaccctttaactgtttaggaatgtgagtgttcagcataa

SEQ ID NO: 8453 - DNA, 796 bp, Homo sapiens
tattagctggctttggaatgatgataacatagcttggccagttcaattaccacattttgtctgtcgttttcgtctcacgcacttaatgtctgctttgtacaagatgaaagacacttagtgcaaattcccctcgaaaatgaacacaartaagttcacagagtcataaattaatgacaggcaatctttcatttctacctgcttgtatccttttgtctgattgctccattagtctctattctctgaagtttcaaataaagaaaatgtaatgccacatttaagtataattagaatggataagtgaacagaacagagagaagcattctcagtcattaattgtcctaacgggcttaatctgggtaatatgaataacgaatatgctaaataaaataaagaaaatgcacattatgcttagaagcaaagtaaaaaccagtgagagagagaataggcacacaggaggaaaatacaggatgtgcgttgctaaacatcccttagtggatgctgtctgtttcttcattgtgatattgttatcagaattataataaccatactggtacgaagctttttgtttaaattagtgtgttctggaaaccttgacttattgacagggctaatattaagatttgaaactttcatttttaggttgtgtttacatatttaaactgatcatttaaattatttttatttttgttatgtaaactcaaaagagagtttgttatttgcgtgtgtgtgtgtgtgtgtgtgtgtgattatgtggctatatttttaacatcagcttagtcgctggcattttggtaaa

SEQ ID NO: 8454 - DNA, 796 bp, Homo sapiens
tattagctggctttggaatgatgataacatagcttggccagttcaattaccacattttgtctgtcgttttcgtctcacgcacttaatgtctgctttgtacaagatgaaagacacttagtgcaaattcccctcgaaaatgaacacaaataagttcacagagtcataaattaatgacaggcaatctttcatttctacctgcttgtatccttttgtctgattgctccattagtctctattctctgaagtttcaaataaagaaaatgtaatgccacmtttaagtataattagaatggataagtgaacagaacagagagaagcattctcagtcattaattgtcctaacgggcttaatctgggtaatatgaataacgaatatgctaaataaaataaagaaaatgcacattatgcttagaagcaaagtaaaaaccagtgagagagagaataggcacacaggaggaaaatacaggatgtgcgttgctaaacatcccttagtggatgctgtctgtttcttcattgtgatattgttatcagaattataataaccatactggtacgaagctttttgtttaaattagtgtgttctggaaaccttgacttattgacagggctaatattaagatttgaaactttcatttttaggttgtgtttacatatttaaactgatcatttaaattatttttatttttgttatgtaaactcaaaagagagtttgttatttgcgtgtgtgtgtgtgtgtgtgtgtgtgattatgtggctatatttttaacatcagcttagtcgctggcattttggtaaa

SEQ ID NO: 8455 - DNA, 796 bp, Homo sapiens
tattagctggctttggaatgatgataacatagcttggccagttcaattaccacattttgtctgtcgttttcgtctcacgcacttaatgtctgctttgtacaagatgaaagacacttagtgcaaattcccctcgaaaatgaacacaaataagttcacagagtcataaattaatgacaggcaatctttcatttctacctgcttgtatccttttgtctgattgctccattagtctctattctctgaagtttcaaataaagaaaatgtaatgccacatttaagtataattagaatggataagtgaacagaacagagagaagcattctcagtcattaattgtcctaacgggcttaatctgggtaatatgaataacgaatatgctaaataaaataaagaaaatgcacattatgcttagaagcaaagtaaaaaccagtgagagagagaataggcacacaggaggaaaatacaggatgtgygttgctaaacatcccttagtggatgctgtctgtttcttcattgtgatattgttatcagaattataataaccatactggtacgaagctttttgtttaaattagtgtgttctggaaaccttgacttattgacagggctaatattaagatttgaaactttcatttttaggttgtgtttacatatttaaactgatcatttaaattatttttatttttgttatgtaaactcaaaagagagtttgttatttgcgtgtgtgtgtgtgtgtgtgtgtgtgattatgtggctatatttttaacatcagcttagtcgctggcattttggtaaa

SEQ ID NO: 8456 - DNA, 773 bp, Homo sapiens
cgaatcctgtttgtctccctctgcatccctaccccccactgctgactccagaaggcctggtggggagcggtggtggatctgggggctacaaagccgggcaggattgtttaccctctccctaccttcccctcactggcccaactgtgatgggggtgagatggcaggctggggctgtgggaggctcccagaacagctggtggctgtgcagggccgtgggtggtggcaagtggggacctgctggagcaggcaagctaatctcatttggttgctgcagtcgcaaacaaggactgcatgctaagtggccagaggcagcagcgggactcagggccgacccaggccccacgcatacctgggagcacctagaggccagccctggtttgaatgaggagccatgttgggcaggggcaggggaataaggagggggaggatgcgtcttgtggggtaagaggttactccccgggaaatacctgctgggagatagggcgccagggtcagccagctcctcccaatcctctggcctctccycctctagccctcctcctgtagggtcctggatcagatgccactgggcaggaggcatctggagagcaagcttcatcccctttgccagcagaattgtgattggagagagggacccgcctgttcacagcagagcatgagggaggcatcggggaaggtgctggaagaggggaggggagggggctgggggagccttgagcctcgaggccctgcccagtcactccactcctctgagcctctaggggcttgtttag

SEQ ID NO: 8457 - DNA, 813 bp, Homo sapiens
gccagtgccctgagggcttcctgactgccacccacactctccgcccggctgccacttctcggagcagctggtaccatcagctcccagggagaatcctgaaatcacacaggtagctctggtctttgggcaaaggtttgtgctctagacgtgggtggcctgaacttggggctgcatcatggtaacagatggatttgaaggcagagcttgcaagggagtccagatggccacagccaccatccaggtctgtttttggtacttgctgggcccctgtgggcagctccatttgcaacccctttggagctccttagctcaggtcttgctgataaaaataagccctgccaatcacagggggcttgaaccactctgtgactcagcttccacatctacccctgaggggctgctaatgaaatgaaatgaggcatctcaagtgtcctgcccagaagccggtgcaaaggaagttctgttttcgttttgcagcatctcagcccagtgtaccacaatgttctatcattacagtctgatgggcctttagaaaaacggctctgcytcacttgctgtgtgactgtgggcaaatatcttcacctctctgaacctcagattctccatctgtaaagtggcaacaataatacgtactttataggaatgttgtgaggagctaaagaagaatataagcaaacttgaataaggcaataaatataaacacagaacagtatccagttggcaataggtgcttgatcaatatctgttgcctgtgcaacactttacttttcagggggatacactgaggtccagagaggggaaagagttcatcca

SEQ ID NO: 8458 - DNA, 781 bp, Homo sapiens
aagctaacacactatcctcaatgtacatatgaaggaaccaaggctgagagaggtcatgtgacttgtgaacaattgataagactgaggttcagttgagtgctggtaaatgtttaacaacttggctctctgtgggaagagaggaaaagtgccgattcatagcactggctgatttccaacatataaatacttccaccctggccaatttcacactaccactgtgatttmcctgaacgtggacttgggaagatatgtgtgcagttgtcctcaggagccagacaagctggctgtagtgcacctctgtgaggctgcaagcctaggcttctgtctctctgggtggcacccttgacagccctccccagtttttccccactgagtgctcttctcagttggcggggtggggcgccaacagcctattctgggaagtctctgtccagtcagtgggctggaaaccttgtggacatgcagcttctccctgggttcagggggtggataggggctctcatgtccctaaaaatgtaggctctgccagatggggaatagtcacaggaggcttgtgacatcaaaatggccttggaggacccttctggctgtagcatggaagatggattgaaggagtgaaggcagaagacagcaagaccagtaagaggtggtttaaataagagacataaagtagtggtgtgggaactatttcacgaagaagatgaaggaaggacggttggcaggcagaaggcaggacagatcatactactagttattgaataacggctagttattgaaactg

SEQ ID NO: 8459 - DNA, 781 bp, Homo sapiens
ttaaacagctaacaaatggtggagctgaaactataattcaggtacttagtctcttggtaaaggcctaagtattcttctctagatgtcattaataattcagatgaagcccccaaatgtgggatatactctcatttctccttctcaccaggatattagaaaatgtataatgcaaaaaaaattaagaaatgattctgagatccatttagcaggtagaaaaccttcctattgggacaaggatgctttgcatttcaattcaatactgtactagtggactagcctatagtgagctcatcacatggaaagagttttggatatttttttaaatttttaaattttaatttttatctttttttaggagatgttaagtagatgaaagaccaagaaaagcgagggagaaaattcaatatatttgagaacaaaggcagccattaacctgtccatcttcagaacctgaatcggtagccaaatctcagcagacagagctacgtaatgccagataaatcttcttgctgaatgagagacccatcctaccagcataaacaacatttgaacactctagcccccagccttaccagccagctctccattctctacacacagagtctttgttgggacactccaggccagttatttcaccatcctgagtctggtccctctctgaggcccagggacatatattcagttcaggtttgaattaaggaaagatactactaccttgatgggggatcaggaccacaggaccaaattgaacyaggcaagactgaaggggccaagggataga

SEQ ID NO: 8460 - DNA, 783 bp, Homo sapiens
gaagaagagttaaagtcccaatagcctttcatacatttaataacttcttactaaaaacatttttctgggcacagaaatcagctatggtgaatagacaacaggttcttggtctgaagaaacgctctctggtggtggtaaaccaactctaaataaataaattgacatagattttttaaaaaatgattttataggttgtataacttgccccaggccgcacaacttataactggtagagccagcattggaattgagacagtcaggctccaaagtccatgctgacaaccattttgctgaattcttcatctcagtgtcccttgggtacctctaacttaccatatctgaaactagatttagctttctctgaaaactgacttctaccaatctaatcaacaatgakaaagctaatattccgagtcaccttcaaattgatattttttaattagtgatttaacatttaattagatatgttgggggaaattgatataataagcattgtatacttacatcattatcataaaaatagtatatccctaatacaatgtaaaattttgatatttttggaattgtctttctttcagttactccttcgctcatacataaatgagctattgaagataaagtttcatgtccatggatatgtttagacttttaaaaatcacttgaaggattatttttctgatttatatgtcagcagaatattttgtgactactttttgaataacattttaaatagatagtgccaaataaatcacatgttatttggcatagatgtttctggatcca

SEQ ID NO: 8461 - DNA, 984 bp, Homo sapiens
gtccaatatccatccctccatccatccatctgcccatccaacttatgctcaactctcatggttgaaaatcattaaaaaatgcttgaatccattctctcatttgatgtggtgtgttgagaccagtggacccctgacagagggtcctgtgagtcaccaggatccctatctgaaacccagtcctcatgataaggtcctccagctggtaaaggtgtaacattgagccacacactaaccaaacatctccctgagagattctgtttccataycctgcactgcatgtttccttctggagtctgtccccttcaaagcagagtataagaagatgccctgtggaacggatagttccagttaggtttgattttatgaaatctcttcttcagcaaaatctgtcctgactgactccttgacacagaagggccctgacccacaatcttgttcaccgcattgagattccctgattccatgtttcttgctgaatgactaaatatcccaacagagggaggtcaagtttctccccagcaaaaatttttcccagttaaatggcaagaatgaagagctgacaaatggctatgacatcactctttgtcataacttgccccaaattactgcatgagaagccagtactctactgggtcttgccatgggacagtcataagtagaaaacaagatgatcccccaaagaattgccctttagagagcaattcaaagacaggaaaatcacccgttggttgtgtccctgcttctagccagatcttctagagagctctagatgctgaccccttcatcttgaaaagctcagtggagacctgggtcctagcctctgccacttactggttatgtgatcttgatcaggtgtatcttagtgggtaaagtaattgtgtctatttcaaaggactgttttgttttagttgcaagtgagggaagcctaccttagtctgacttaagtgaactagagaatatatcagcttgttaaccaaagagtct

SEQ ID NO: 8462 - DNA, 984 bp, Homo sapiens
gtccaatatccatccctccatccatccatctgcccatccaacttatgctcaactctcatggttgaaaatcattaaaaaatgcttgaatccattctctcatttgatgtggtgtgttgagaccagtggacccctgacagagggtcctgtgagtcaccaggatccctatctgaaacccagtcctcatgataaggtcctccagctggtaaaggtgtaacattgagccacacactaaccaaacatctccctgagagattctgtttccataccctgcactgcatgtttccttctggagtctgtccccttcaaagcagagtataagaagatgccctgtggaacggatagttccagttaggtttgattttatgaaatctcttcttcagcaaaatctgtcctgactgactccttgacacagaagggccctgacccacaatcttgttcaccgcattgagattccctgattccatgtttcttgctgaatgactaaawatcccaacagagggaggtcaagtttctccccagcaaaaatttttcccagttaaatggcaagaatgaagagctgacaaatggctatgacatcactctttgtcataacttgccccaaattactgcatgagaagccagtactctactgggtcttgccatgggacagtcataagtagaaaacaagatgatcccccaaagaattgccctttagagagcaattcaaagacaggaaaatcacccgttggttgtgtccctgcttctagccagatcttctagagagctctagatgctgaccccttcatcttgaaaagctcagtggagacctgggtcctagcctctgccacttactggttatgtgatcttgatcaggtgtatcttagtgggtaaagtaattgtgtctatttcaaaggactgttttgttttagttgcaagtgagggaagcctaccttagtctgacttaagtgaactagagaatatatcagcttgttaaccaaagagtct

SEQ ID NO: 8463 - DNA, 984 bp, Homo sapiens
gtccaatatccatccctccatccatccatctgcccatccaacttatgctcaactctcatggttgaaaatcattaaaaaatgcttgaatccattctctcatttgatgtggtgtgttgagaccagtggacccctgacagagggtcctgtgagtcaccaggatccctatctgaaacccagtcctcatgataaggtcctccagctggtaaaggtgtaacattgagccacacactaaccaaacatctccctgagagattctgtttccataccctgcactgcatgtttccttctggagtctgtccccttcaaagcagagtataagaagatgccctgtggaacggatagttccagttaggtttgattttatgaaatctcttcttcagcaaaatctgtcctgactgactccttgacacagaagggccctgacccacaatcttgttcaccgcattgagattccctgattccatgtttcttgctgaatgactaaatatcccaacagagggaggtcaartttctccccagcaaaaatttttcccagttaaatggcaagaatgaagagctgacaaatggctatgacatcactctttgtcataacttgccccaaattactgcatgagaagccagtactctactgggtcttgccatgggacagtcataagtagaaaacaagatgatcccccaaagaattgccctttagagagcaattcaaagacaggaaaatcacccgttggttgtgtccctgcttctagccagatcttctagagagctctagatgctgaccccttcatcttgaaaagctcagtggagacctgggtcctagcctctgccacttactggttatgtgatcttgatcaggtgtatcttagtgggtaaagtaattgtgtctatttcaaaggactgttttgttttagttgcaagtgagggaagcctaccttagtctgacttaagtgaactagagaatatatcagcttgttaaccaaagagtct

SEQ ID NO: 8464 - DNA, 782 bp, Homo sapiens
cgccacctttgttgattgtcaataacatgccttgcctctcctctgagaactgatgtgatctctaggattatctggccccaaaaatgtctttttacaaccatgcaagcaatcctacccctcttctgcactggctggaggaaagatggacattgaaaggaaatggtcagttaaaacatagagaaatcactatcctggaagtgggcatgtgtttcactgacataactacttagagaatgaaaatggagttgaatagagtcctactttttcttaaaacacaaagtcattaaatctggaaggcacaaagaaatgaagggaaaatcaggttgagagacctccacaagaaatacagacaatgaagacagtttcacactctgggctgaagtaagccacatagcaccattccaccaccagagctgtgcatcttggccaatagcgagtaagagatgaagcaggaatacaagtcaataaagtggttgagcatcgttattcttacgcgttgtcattgaaagaggtcctgtcctgtccaaatcttccaccaaacctgtgtttggatttgcagtaggctgaagcgttrtactatgactggagtccatatctgaaggaatcaatattagtgttattgcttgatttcccaaaccactacctgaaggtggcttatggtctacagctgatttttttaaatattcacatctggccaagaggaaagaaagcacatactgactatatctcccgaactgagatagattattgtttcatcaaagagcaccacaacaagtaactgg

SEQ ID NO: 8465 - DNA, 789 bp, Homo sapiens
agattcatgcccttatcaaagaggcccccagagaccggttttgtctgttccaccatgtgaggacacaactagaagacaccatctatgaacaagaaagtgggcccacaccagacaccaaatccgctggccccttgatcttagacttcccaaactctagaactgttagaaataaatttctgttgtttataagcaacctaatttattgtgttttgatatagcagtcagaatggactacaacactaggagaatgaaaaagcaggctgggcttggtgactcacgcctgtaatcccagtactttgggaggccgaggcaggcggatcacttgaggtcaggagattgagaccagcctggccaatatggtgagaccctgtctctactaataatacaaaaattagccaggcatggtggcacacacctgttatcccagctacccgggagactgaagcaggagaatcgcttgaacctgggaagtggaggttgcagtaagtggagatcacaccactgcactccagcctgggcgacacagcagaactctgtctcaaaaaaaaaaaaaaaaggaaattcactagagaaatataatatagtaggcaaagatacaaataagattaaaactcagattttggtcaaatgaacaatattttkctgtggctttaaaactgcatttttccccaaattatttttctttctttcttcttttttttttaatacaaagagtctcgctctatcacccaggctggagtgcagtggcatgatgacatctcactgcagcctcgacctcccatgctcaag

SEQ ID NO: 8466 - DNA, 2021 bp, Homo sapiens
acgaggtttcaccatgtttgccaggctagttttggactcctgacctcaagtgacccacccaccttggcctccgaaagtgcttggattacaggcatgagccactgatgtgttaaagttctatgtgtggttctcttcatgtgtggaaaaagatggggccaggcatggtggctcatacctatagttctagcactttgggaggctgaggcaggtggatcctttgagtccaggaaattaagaccagcctgggcaacatagcaaaatcctgtctctgcaaaaaaattaaaaaattaaccatgcgtggtggtgcacacctgtagtcccagctactaggaaagccgaggtgggaggattccttgagcccaggaggtcgaggctgcatgagctatgactgcacctctgcactctagcctggatgacagagcgagaccctgtctcaaaaaataaataaaataagtaaataaaaatatgaacatttgtaagggtctaccattgcatgctttgcccctcatgatgtctcaggtactcatttcaggattctaatttgcaaccagttttgttttatggataatgttcttgttggaaatgcttccaaactcaggctgaatgcagagtgtgttacataagcacagattaaggccatgtctgcagggagataatgcattagaatcctgtagaaccagtgttttcatgtgttcatttggtgtaggcttccttccccactgccatggtgatatttgatgaaactagttggtggcttagttacaggaattacacctgaaaataaatcgcgaaagttcccatatgaagcacaagtttagccatatgtacttacaatgatgatggcaaaaataggtgaaaaacattgtagttatataatattaccatatttagaaatgctagtgatggtggagggagtaataatgacattatataataatgtatgtataatcagtgcagaaaaatttccgctatactccaaaagaaactaatgctttaatttacatttggttcttatttgttctcccctccccccacagtctatcctttcaaaaaaagatgctaatgagtagtaaaggaaccagagctaaaaaaggagctgtcctcatctgtaaattcaccttccccaaagagctgcaagttgactgtttgcagttgccaaaaagctggggcccagcaataaagtgctcagcccccacagcaatctccttccttcagaggcggaactgctcatgataaatacttctgcctccacagaagcctccttgttttacctcctctccgctgttgccaccccacttggttctcgagggcagcaggcagagttgcccaagacttattgtgtggccacaaagagatggcagtcatgccagatggcaggttttccttgcttctacttacccagacaaacagacttaaagcagtctggtggtgaaacaagaattgttgtggccatgaagaaaagttcgtgtcaaaatgtattcatttcctttcattttcttccgagacgcagacaactttttaaaaaaaatctagtattttgttataagacttttaagcaaatgtactacttttatatgcatgttttgaatgcctatgtaaaaatgtaatgggcacattgcttacagtactctgatgagagcacaccgtttgtctttaaataaacctagatgtgatctttggtttgcatttagtttcaataagccaattattggcagatttttcactgggtggggccgaaacggcggcttattcattttttcttaagcatagatactcaagggggttaagtaactgcacaccactggcaaagatttgtaatcctcagtgctagtaaaggtgaggcacttacccctttaagtgaggagagatggcttccatttaattattgctctgtggcatttctgtrtaggaagtgggaggcactgcagatgctcggaggagttgggaggcccatgtgtttctgcactacctggtctctgtgccctcgcctcccttcagcctgccctctacatagcagcaga

SEQ ID NO: 8467 - DNA, 778 bp, Homo sapiens
taaaagcaaataacatgtaacagagctccagttcatctggcaacagacttctcaacagaaaacatataggccaggaggtagtgggacattttcaaagtgctgaaagaacaaaactgtcaaccaagaatactgtacccagcaaatctagccttcaactctgaaagagagagagtctttcccaaacaaagaaaagctgagaaaatgcaccaccaccagacccaccttacaagaaatgctaaagggaattcaataagaaagaaaaacactaatgtgcaaaaagaaaacatttgaagatgtaaaacccactggtaaaagtaagtacacagaacactctaatactgtaattgtgtacagkccactcattactagtattaagtctaacagacaaatctatcaaaaacaataatcactacgtgacctgttaagagccaaagataagcaatataaaatatgtaaatcaagacacagatactcaaaaatgtggaggtgagcatgaaattaaagcgtagagtttatttttttagacctgtttggcattgaacaagacatccagcctctcttgggtgtcagtttgctctctggtaaattgggaaatacaccagtctcaccagttgttatgaagaaaggtgatgtgtgtagagcacagcacctgctaggtagcaagtgctcaatcagcagccctcccagactgcttctctttccctagctcggacccagggtgcagcttctggtcaggttgcagcaaatgtctttgacttgtctgaggagtccggtatac

SEQ ID NO: 8468 - DNA, 654 bp, Homo sapiens
tgggagcgccaggctgcccttcccgcccctcccagaggacgtttcctgggcgacttcttccctcatgtgagctgctctgtttacatttgctggtcgctggaagatcgaaagactggacaaaatccatatggcggccggccggcgcggtggctctcgcctgtgatcccgcgctttgggaggccgaggcgggaggttcttctgagctgaagagttcgagaccagcccgggaaacgtagtgagacccccaccatctctacaaataataacaaacaaacaaaaggtccccccgccccgccggccgcgggttgccgtcgcacccaggcacatttgaagggcggcaggagccaaggcctggctgtcactgctgtcccggacccctttgacggcccctgggggttcaccagagggctggcccgtggctcactgcccagtcctctatgaggacacttcgccatagacattttgttattgcagactgctctgggaacacccctgrctgggccctaaaatgaattccagaaaaggaatcgcaggtcaaggggcggttctaaaaggcttgggctagggtcagccagagctctgtgcagcagatgggggcctggaaaagtctgcagaagtggccttccgcccaggccctgcctcccccgacggggg

SEQ ID NO: 8469 - DNA, 756 bp, Homo sapiens
atatatatatatatatatatatattttttttttttttttaactagagacagggtttctccatgttggttaggctggtcttgaactctcgacctcaggtgatttgcccacctcagcctcccaaaatgctgggattacaggcgtgagccaccacacccagccttttttatatttactttttttattatttttattttttttgagacggagtcttcgctctgtcgcccaggctggagtgcagtggcacgatcttggctcactgcaagctccgtctcctgggttcacgccattctcctgcctcagcctcccgagtagctgggactacaggcgcctgccaccaygcccagctaattttttgtatttttagtagagacggggtctcactgtgttagccgggatggtctcaatctcacctcgtgatctgcccgcctcggcctcccaaagtgctgggattacaggcatgagccaccatgcctagcttttttttttttttttttttttttttttttaactactggaataaaaccagcaaaatacagacagtgataatttctgggtggtaagacttcatatgatattattttctgtatacttctctatagcttccaaattttctaccatcaacatttacatttataattaagaaattatttaaaagattaagaagataattctgggattaagctgacaccctaaaagtagacccagaattttggcagaccccaggccctctgcctagtcctatgtctgcttcgggg

SEQ ID NO: 8470 - DNA, 801 bp, Homo sapiens
ccagccactaccccggtgactggttctggcccacagatacaggagagggggtgaagatggccatatccccagttctgaggctcagtgaggatttatggagctgtgtttaggcctagatttgccccattccctctctcaccccaggcctcccaagaccgtggactcagggaacgaatgactaatcagagttgggagggggtcctacagggttgggcccagggttttggaccaaggagtctcagttaatcccagctggggtttagtaaaaatatggctaagaaattctagcccaccttcaagtattcagctgtgttcaaggaaaaactcacacacacacacacgcacacrcacacacacacacacacacacacataaaaaaggctttttagactatttatttatgagcatgtgtcaaaattttatttcaatcttgctacaagtgaagagacctataaaaggccagccgcttcaagatgacttcttggtagatacatttagaggcaagaagagtggttagcagcattgttaaaatgggcatacaaaaataatgtctgaataaaatatataaaactcttccaaacggcagggtggataggaaactggttcctgagaagaaatctaaatcctgttaaaagtttatcggaaaattgcttaagcattttaacaacaaggctgatttcctcccagaaggaaataatgaattacacttggcaaaaaggctgtgtcccagacaagcttgggggcctttcgtcttcagttagaaattccggcttggctgctgctccagggctgcagggtcaa

SEQ ID NO: 8471 - DNA, 685 bp, Homo sapiens
  misc_feature (1)...(685): n = A,T,C or G
ccttctgggatttaatgaggtaatgggtgaatgtgtggttagcacagtgtctgccatctagcaagtgctcaataaatggtaggagggagtacggaggagcatagcaggcagaactgtgtgtttatctgtaaggaaagcagccatttaaaagcagccactttcttctttcctaaatggagcagatatttgggaagaattcctcacatggcctctcttggttatgtaaatatcagaaaaatcaccaccatttcctcaagggwaccgagctcgaattcgaaatcatgtcagtgcttttaaggnnnnnnnnnnnnnnnnnnnnnnnnnnnnnnnnnnnnnnnnnnnnnnnnnnnnnnnnnnnnnnnnnnnnnnnnnnnnnnnnnnnnnnnnnnnnnnnnnnnnaacagcaggcataatttggataacatgcaagtctcaactgtaacctataatatcaggacccgaaatggaggaaactcatccatgcccaagactgaggaagcaacacaacttttcctcattgggactccagacccatgatgacatggggacaccagagctgagtgtaacaccaacaagagaggccccagttcttctgattccacagcctgtagccttgcagtgatggtcaaagggaccttggactgtcagaggcgtttcaacaacagcaactccatcttgagtaggg

SEQ ID NO: 8472 - DNA, 622 bp, Homo sapiens
tcaactttcccaaataacaagaattatctggaagtatttcttaaagacacagattccagggcccctgattccagaaacagtgatcaggggagaggcctgggtttctgtatatttatcaagtactctaggtaattttcttttttaaaaattacagacaaggttgggaaatactattacaacccattaccagccctgaggctgcactctgggaaactttaaaaaataccattgcttaggctctacccacagtgacctaatttaacaacaacagaatgataaaaatgaagataaactctcaataatcaaaattaaattatwagagtttttgacctataattgttcctttagtggccctatgttctccatacccccagaatcattacttagctaggaaaatcacatctggcctcgttaatggtgtttttctagtttttagatgccaagaatacaacattgtgaactagggctgtgattactagtggtgggggaagcagcagagtaaccacttgctttggaaataaaacaggaaacattcatagttgctttgggctgtaaatgtgtgtccaggttacagcaaaggctaagaatagcccacaaaggacaagtgggaagtagccctcat

SEQ ID NO: 8473 - DNA, 627 bp, Homo sapiens
ttctccatttgagcctcagatgggaccccaggcccggataaaaaccttgattgatgtctgtaagagaccctgaaccagaagacccagctgaaccatgcttggattcctgtcccacagaatgtgtgctgttttaaggtgttagatttgtggtaatttgtttttcagcaatggataaatatgctacactaggttttcttcccaaatcagttttgctattagaaaaccatctcagagaaaaataagtagttctgactgaaccactgttgtttggaatrtaatagatctatgttatggaagggaaatccaaaaggaattttccccctccttctcatagcctgtccatacttccaatccctggaccctcccaattggaaggtattgataaaattttcagaattgttttcacctgcaatccacaacaatgtatcattgttttatctttaaaacatctagttccctagaagcagagactgaggaggggattttcttgaaagtgttgagagagttctcaagagaagtcagtaaggcagaagaaaggaaagcaagaaagctaagcaagacactgtctctcagctggagagtaacttccgtcctggtccctttggaatctctgcagcaaaacctgca

SEQ ID NO: 8474 - DNA, 626 bp, Homo sapiens
tatcccatgcctaagaagcattttaagcctttttaagctccaaagattagggtgcaacagggaggggttaagaggaggacagataaacaagactggagcgcattctccatgcagagaagtagattctgtactttggttagattaatccccaaattgaaaccggccctgaacatcgttctgagaaaggagagccgagagataagagaaagccccttggcaaagcctgggcattgagctgtttgtggaaatgccgactgcgtcctttccctgccgccaaaggacagaaagacaagaccgcggaggacaaatagagagtgagagtttccttaaggacagtcagggaaacaggagagggaaaaggaaaggagcagaggccacatgggtgatgactccatgttttgtcaaagcatcatggcgtcttccccaccgagccttgggaccactgacctgcccgggctcacaccatagaaagcacacacattgggttatgcaaagaccaagtgctgggaaggccrgctttgcttccagtctcaggcaaggacactcacagaggactgtcacacccacacgagcaaggtaaccccctttcttgagcatgcctggtttccaacctgtggcctttttga

SEQ ID NO: 8475 - DNA, 672 bp, Homo sapiens
aataactggagtatgctctctttcactttaatcaggggtcagcaaactagggcccttgggccaagcctagggggtttgtttttgtaaataaaggtttattggaaaacaaccatgcctgtttgtttatggctgcttttgtagagagaaagtataaccccaaacatttactayctgacattttacaaagtttgctgaaccctgatttaaagaaatgcgagttctaccactagacagctttccctttgggtcttggccgccagaaagctgagatcaatgagatacatcaagctaggcagtttggtatatttgctgcttctaccctctgcagaatttctaattttctgttttactgtaggcttccttacatgattttgggaattaggtagatgataaattaggaaagaaaaataaaaagaaataatgcatcctgatatgatgtactgaggatgtaaaatatcaacagatagtactcttggcaaaaatagttaccctgaatttactcatgaggaacatgacagatccaaattgtgagattcaaattgcagggcattctacaaaacacctagcctagcctccagaaaaacatcaacaccataaaagacaaaaaaagatgggaggactgtatttttagtaaaggacatggcaacgaaatgcagtgtgtgactcttaatt

SEQ ID NO: 8476 - DNA, 841 bp, Homo sapiens
tttgtaggtcatggcaggtgtttgcattttattctaagaacaacgagaagccactgaagggttttaagcatctgtccatccccaatccccaggaactgtcacctgaagaaatcacctagatttcagcatgaattccgaatcctatcacagctatgtgacctccgagtccaaattttctcatctgtaaacaaggctgatgcaagcctcttcatagggctgttataagtatgaaatgcagcaatgtgtgatcaggcagggagtagatgaaactcactgcacctgacgagcacaccagtacctgggcagccgtgttccaaagcaaggacaggtgcagacaactgacacgaacccctgctgtggagaaggacaatgcttcagtactcagcgcgcacaggtggtggtggtggagggggtgtatcttcaaatagaccccattgcccctcccttcaacctctagcccagccacaaccatcagaaagcacgcagtgcacctgcaccccatacgatctcctctggctgacagctaaggagcacgcccggcagagctccatctcaacgctgatctgctgtgttgttttgtttttcagttctccctgatgtctttattggaaagcctggacccaggtaagtgtgctgatctccctggggcttcccaccaatcccaggctggttctgggctggtgaaaaggaggcctaagtatggaagtgttggagggacctcagggttcaactggttccaggttgtcacaggcacctttgagaacttgccctcaaaatttgtgcacccacaatgctttacacaattttgagtttcctgtggacactgmtgagcccaggctca

SEQ ID NO: 8477 - DNA, 385 bp, Homo sapiens
ggatcctggggaggaaaagcctttcctccgccctcttaggttcagtacttaggagtctgtgaattaaactgacaataggaggtggaacaagatggccaaatagaaccctccagcaatcatccctcctgtccctccacaggaatactaaatcgaaaaactatccayacaagaaagcaccttcattagaataaaaaatcaggtgagcaatcacagtacttggtttttacatcatccatcccaggagctggaaactgagttctagctatccccaccagcacgggctaaagtactctggtgccctaaataaacttgaaaggcagtgtaggccataaggactgcagttccttggaaagtcctggtgctgtgttgtgctgggaccgtggat

SEQ ID NO: 8478 - DNA, 1984 bp, Homo sapiens
aaaaaaggaaaattaaaaaacttcaccatttaaggcaattatttctcatttaacatctgtaaaatacatttgttagcaaggaatagcacagcgtgtgtgcttcgcattctaaagctattgccttcaaaatactttctggatgatatctttacaaaaatggcttatagtttttctttatgtatatctcagttaacttttcttctgtatgcatttaaactgaaatataatgccataggacttagaatgagtgttaaaataggactctttctgtttggtttttatgaagccctcaaaatgaaatagcaatataagaactgccaggtatccctcaggtcccaagtaaagatgatgaactatctattcaagaaattctgagagcctgggtgctgatgttgccaggattagcctattattcacctccaggctatgtaaagtgtcccgtcaatgaactggcaatgagcatctccttgagagaaaygtcagcatatcatttattccccacattttccttgcaggaagggagtgggtaattttctgtttatttgagaaatggtagttgactcagtcctgaagagactaaacatgaacgacggtgcatgtctggccagtcatcatgggagggctgaataaatagggtggcattgtgagcaagctgcttgtccaccagtgatgcatgctttttggacgcagtggataaatactgctcatttgtaccacttggggaggaaaaatggtggaacaattgaagcccatgagaggggagtcataagctgggaaggagcattgttcatgatgctgagggagggaatctcaaggatccacacaagtttcaaaatcatgctgcttccgtgtacaatgcaccaccagcagattacatctgccctggacaagggaaatgatatgtttccttcgatccagtgtgtgttggagctcaggagaggtgactgtgtgcattattttcctcccttatttagtgatgtctcatttgtagcacaaaatcagccattgctggtatacttatgccactgaaatcagcaagcactgagaaacagtcctttttgttctttggagttacagccatcacactactgtaatctcctctccccttcaccctggccttgagtggtccaagaaaacaagcagcaaggtgtagaacaggtggctaggattgaaaagggaaatgaagacatgttccacaaatcttttttttttttttcttttgaggtggagcttcgttcttgtcgcccaggctgaagtgcaatggcatgatcttggctcattgcaacctccacctcccaggttcaagagattctcctacctcagcctcccacgtagctgggactacaggcacccgccaccacgcctggctaatttttgtatttttagtagagacggggtttcagtttattggtcaggctggtcttgaactcctgacctcatgatccgcctgcctcagcctcccaaagtgctgggattacaggagtgagccaccactcccagccaatttttgtatttttagtagagatggggtttcaccatgttggccaggctagtctcaaactcctgacctcaggtgatctgcctacctcggtctccgaaagtgctgggattacaggcatgagccaccactcctgaccacacaaatggcttttaagcccaaagtagacccaagctggggaaagtagagaaacttaatcatgagtggattttagagctgtgaacttgttatgccagattgaacttgatgaaaaccaggaggatcctgcatggctaagtgatctgattgagatttactgattgagattcaggggtgagaaattaggaaactgtttaaagaggatttagggagtatagtgagcaaaaaataaatttatttcctattgttatatattaaatgcaactttttaaactctttataacttgatgggactttctcatagccagagtcagaccagctgtgatattattgtggtttagaaatgca

SEQ ID NO: 8479 - DNA, 758 bp, Homo sapiens
tactctttcacttaaaccccaartggccaagctaggattgatttggtgtgctgtagaaagaacttcattggtattcatggattcacattacatcttagaggagttttcaaaagcgtcttagactgtatgtgtatatacacacacattctgaagcagtaggtgggtcttggggcctgagatctcgggtgaatgtaaatttaggttcacaggtgatactgtagattcacagtgtctacagagtacactatgaatttgtggtgactacattattgacaaaatattttaggtttataatcagaaaaaagttaaaatagttaatgaagatgctttaaaagcctgtgtactttagagaagctacttaacacaaattgggtatctaatgtaggctgggctggatacttcattttcatcaaatctttttaaaataattggtgaaataacctttattgaatatggttttctacatttttcacacttccctccttcatagggttgtgaaaatttatttcatattctagatgaggaaattgaggcacagaggtacacttacaaagatacaataaatggcagaactaagatttgaacccaggactaagtgtattgcttgtatttatttaattaattaatttttaagagacagggcctcactctgttgcctaggctggcccttgaactcctgggctcaagcagtccacctgcctcagcctcctgagtagctgggactgcaggcacaccatgcctcccagttgtttttaaac

SEQ ID NO: 8480 - DNA, 758 bp, Homo sapiens
tactctttcacttaaaccccaaatggccaagctaggattgatttggtgtgctgtagaaagaacttcattggtattcatggattcacattacatcttagaggagttttcaaaagcgtcttagactgtatgtgtatatacacacacattctgaagcagtaggtgggtcttggggcctgagatctcgggtgaatstaaatttaggttcacaggtgatactgtagattcacagtgtctacagagtacactatgaatttgtggtgactacattattgacaaaatattttaggtttataatcagaaaaaagttaaaatagttaatgaagatgctttaaaagcctgtgtactttagagaagctacttaacacaaattgggtatctaatgtaggctgggctggatacttcattttcatcaaatctttttaaaataattggtgaaataacctttattgaatatggttttctacatttttcacacttccctccttcatagggttgtgaaaatttatttcatattctagatgaggaaattgaggcacagaggtacacttacaaagatacaataaatggcagaactaagatttgaacccaggactaagtgtattgcttgtatttatttaattaattaatttttaagagacagggcctcactctgttgcctaggctggcccttgaactcctgggctcaagcagtccacctgcctcagcctcctgagtagctgggactgcaggcacaccatgcctcccagttgtttttaaac

SEQ ID NO: 8481 - DNA, 696 bp, Homo sapiens
aggtgtaatatttataggttggtaaaatagattgtttttcatggataatttttaacttcattatttctgtacttgtacaaactcaacactaacttttttttttttaaaaaaaaaaaggtactaagtatcttcaatcagctgttggtcaagactaactttcttttaaaggttcatttgtatgataaattcatatgtgtatatataattttttttgttttgtctagtgagtttcaacatttttaaagttttcaaaaagccatcggaatgttaaattaatgtaaagggaacagctaatctagaccaaagaatggtattttcacttttctttgtaacattgaatggtttgaagtactcaaaatctgttacgctaaacttttgattctttaacacaattatttttaaacactggcattttccaaaactgtggcagctaactttttaaaatctcaaatgacatgcagtgtgagtagaaggaagtcaacaatatgtggggagagcactcggttgtctttacttttaaaagtaatacttggtgctaagaatttcaggattattgtatttacgttcaaatgaagatggcttttgtacttcctgtggacatgtagyaatgtctatattggctcataaaactaacctgaaaaacaaataaatgctttggaaatgtttcagttgctttagaaacattagtgcctgcct

SEQ ID NO: 8482 - DNA, 1614 bp, Homo sapiens
tattatttgacaatgccctttcctcactgcaagcctaaatttcctctcttcctcagttctgatttatcatttcactgtaactctattagctgtaaagcatttggggatgctgtcaggataacatgctctgtagcaaatgaggttgtattgaattatttagctttcagctaaagtggagataactaaagcagctgagctggtttgtaaaatgttggggtaatctgtctgctgatttggagttttatcatattaattttttcttatggttgaaaattataaattttaaggctacaaagaaaaatatgtatgcaactattcagttcagtgccacagacctatagctaaggaattatctggcttgcatagtatataattacgtagctgcagaaccaccattctagagaaccatgaatttatctaataagtttattcatacaagcttttaaaaaaccataaatacataatttccctccatttttttctaacaaaaatagatgaaggatttcttcttgagatatataatagtctcagcttttgaagttggcctgtttttcttgagctttccttgccagaatttgacttttaaacattttttttcacaaaacagaactttctctttttaactcagtaatagaaaaatgcattcttaaatgttgtcaacaaaggggaggaggggatcactgcgaatctatcgatgaccatgaatgtttttgtatcctctttcccatattactagtgtctcttggaaaattgagctgtaataaggatccagccaagaggagggtggagtgaagaattctgtggctctgtaatacctggggcgtttgtcccactcagcacatctcagtgtctaaatrcccaccctcaagaagtgggactgcagcaggaagtgaagtatctttgcatatgttcaatatataaactaaactcgaacatctggcaaacacccctttcctgggtgaattctggaaaacagcacaattataatcccaagcaaataactcaggagtaagactgttcccttgttaagaacaccaggcagcatcagtaaaagttaaaacttcttctgcatctatgcgcttttaatctccacggccatttccataatacctgagattacctgcgttgatagctggtgagaaatcatcccaggcaccgcagggggagaaaagagatgaaagctacctcaaggcgtacacgtaaaccttactgaacaatgaccttgatcgttagaaagtcaagaaaatgtactgccttgcaagctgccggtgttctattgagtttctctccgggggcaactcggagatgcctttttggcaccatcggttctagtatttcctctggcctgctgcgccgcgcctcatccaggcttgtagtgaggcacccccactcgcccggagacccgggccggccaggaggtgccagtgggcaggtgtggcagcctgcctgttgattacagtccctacaatgtgcgagctccttgggactgcaggctgcgcgccgccagctttgcctggttcgtcctgattacactaggttttcgggcagaaacagcgacactgagctcgggctgggggtggggccctcgggcccagtgcccgccccctgccctcc

SEQ ID NO: 8483 - DNA, 1614 bp, Homo sapiens
tattatttgacaatgccctttcctcactgcaagcctaaatttcctctcttcctcagttctgatttatcatttcactgtaactctattagctgtaaagcatttggggatgctgtcaggataacatgctctgtagcaaatgaggttgtattgaattatttagctttcagctaaagtggagataactaaagcagctgagctggtttgtaaaatgttggggtaatctgtctgctgatttggagttttatcatattaattttttcttatggttgaaaattataaattttaaggctacaaagaaaaatatgtatgcaactattcagttcagtgccacagacctatagctaaggaattatctggcttgcatagtatataattacgtagctgcagaaccaccattctagagaaccatgaatttatctaataagtttattcatacaagcttttaaaaaaccataaatacataatttccctccatttttttctaacaaaaatagatgaaggatttcttcttgagatatataatagtctcagcttttgaagttggcctgtttttcttgagctttccttgccagaatttgacttttaaacattttttttcacaaaacagaactttctctttttaactcagtaatagaaaaatgcattcttaaatgttgtcaacaaaggggaggaggggatcactgcgaatctatcgatgaccatgaatgtttttgtatcctctttcccatattactagtgtctcttggaaaattgagctgtaataaggatccagccaagaggagggtggagtgaagaattctgtggctctgtaatacctggggcgtttgtcccactcagcacatctcagtgtctaaatacccaccctcaagaagtgggactgcagcaggaagtgaagtatctttgcatatgttcaatatataaactaaactcgaacatctggcaaacacccctttcctgggtgaattctggaaaacagcacaattayaatcccaagcaaataactcaggagtaagactgttcccttgttaagaacaccaggcagcatcagtaaaagttaaaacttcttctgcatctatgcgcttttaatctccacggccatttccataatacctgagattacctgcgttgatagctggtgagaaatcatcccaggcaccgcagggggagaaaagagatgaaagctacctcaaggcgtacacgtaaaccttactgaacaatgaccttgatcgttagaaagtcaagaaaatgtactgccttgcaagctgccggtgttctattgagtttctctccgggggcaactcggagatgcctttttggcaccatcggttctagtatttcctctggcctgctgcgccgcgcctcatccaggcttgtagtgaggcacccccactcgcccggagacccgggccggccaggaggtgccagtgggcaggtgtggcagcctgcctgttgattacagtccctacaatgtgcgagctccttgggactgcaggctgcgcgccgccagctttgcctggttcgtcctgattacactaggttttcgggcagaaacagcgacactgagctcgggctgggggtggggccctcgggcccagtgcccgccccctgccctcc

SEQ ID NO: 8484 - DNA, 1614 bp, Homo sapiens
tattatttgacaatgccctttcctcactgcaagcctaaatttcctctcttcctcagttctgatttatcatttcactgtaactctattagctgtaaagcatttggggatgctgtcaggataacatgctctgtagcaaatgaggttgtattgaattatttagctttcagctaaagtggagataactaaagcagctgagctggtttgtaaaatgttggggtaatctgtctgctgatttggagttttatcatattaattttttcttatggttgaaaattataaattttaaggctacaaagaaaaatatgtatgcaactattcagttcagtgccacagacctatagctaaggaattatctggcttgcatagtatataattacgtagctgcagaaccaccattctagagaaccatgaatttatctaataagtttattcatacaagcttttaaaaaaccataaatacataatttccctccatttttttctaacaaaaatagatgaaggatttcttcttgagatatataatagtctcagcttttgaagttggcctgtttttcttgagctttccttgccagaatttgacttttaaacattttttttcacaaaacagaactttctctttttaactcagtaatagaaaaatgcattcttaaatgttgtcaacaaaggggaggaggggatcactgcgaatctatcgatgaccatgaatgtttttgtatcctctttcccatattactagtgtctcttggaaaattgagctgtaataaggatccagccaagaggagggtggagtgaagaattctgtggctctgtaatacctggggcgtttgtcccactcagcacatctcagtgtctaaatacccaccctcaagaagtgggactgcagcaggaagtgaagtatctttgcatatgttcaatatataaactaaactcgaacatctggcaaacacccctttcctgggtgaattctggaaaacagcacaattataatcccaagcaaataactcaggagtaagactgttcccttgttaagaacaccaggcagcatcagtaaaagttaaaacttcttctgcatctatgcgcttttaatctccacggccatttccataatacctgagattacctgcgttgatagctggtgagaaatcatcccaggcaccgcarggggagaaaagagatgaaagctacctcaaggcgtacacgtaaaccttactgaacaatgaccttgatcgttagaaagtcaagaaaatgtactgccttgcaagctgccggtgttctattgagtttctctccgggggcaactcggagatgcctttttggcaccatcggttctagtatttcctctggcctgctgcgccgcgcctcatccaggcttgtagtgaggcacccccactcgcccggagacccgggccggccaggaggtgccagtgggcaggtgtggcagcctgcctgttgattacagtccctacaatgtgcgagctccttgggactgcaggctgcgcgccgccagctttgcctggttcgtcctgattacactaggttttcgggcagaaacagcgacactgagctcgggctgggggtggggccctcgggcccagtgcccgccccctgccctcc

SEQ ID NO: 8485 - DNA, 1614 bp, Homo sapiens
tattatttgacaatgccctttcctcactgcaagcctaaatttcctctcttcctcagttctgatttatcatttcactgtaactctattagctgtaaagcatttggggatgctgtcaggataacatgctctgtagcaaatgaggttgtattgaattatttagctttcagctaaagtggagataactaaagcagctgagctggtttgtaaaatgttggggtaatctgtctgctgatttggagttttatcatattaattttttcttatggttgaaaattataaattttaaggctacaaagaaaaatatgtatgcaactattcagttcagtgccacagacctatagctaaggaattatctggcttgcatagtatataattacgtagctgcagaaccaccattctagagaaccatgaatttatctaataagtttattcatacaagcttttaaaaaaccataaatacataatttccctccatttttttctaacaaaaatagatgaaggatttcttcttgagatatataatagtctcagcttttgaagttggcctgtttttcttgagctttccttgccagaatttgacttttaaacattttttttcacaaaacagaactttctctttttaactcagtaatagaaaaatgcattcttaaatgttgtcaacaaaggggaggaggggatcactgcgaatctatcgatgaccatgaatgtttttgtatcctctttcccatattactagtgtctcttggaaaattgagctgtaataaggatccagccaagaggagggtggagtgaagaattctgtggctctgtaatacctggggcgtttgtcccactcagcacatctcagtgtctaaatacccaccctcaagaagtgggactgcagcaggaagtgaagtatctttgcatatgttcaatatataaactaaactcgaacatctggcaaacacccctttcctgggtgaattctggaaaacagcacaattataatcccaagcaaataactcaggagtaagactgttcccttgttaagaacaccaggcagcatcagtaaaagttaaaacttcttctgcatctatgcgcttttaatctccacggccatttccataatacctgagattacctgcgttgatagctggtgagaaatcatcccaggcaccgcaggkggagaaaagagatgaaagctacctcaaggcgtacacgtaaaccttactgaacaatgaccttgatcgttagaaagtcaagaaaatgtactgccttgcaagctgccggtgttctattgagtttctctccgggggcaactcggagatgcctttttggcaccatcggttctagtatttcctctggcctgctgcgccgcgcctcatccaggcttgtagtgaggcacccccactcgcccggagacccgggccggccaggaggtgccagtgggcaggtgtggcagcctgcctgttgattacagtccctacaatgtgcgagctccttgggactgcaggctgcgcgccgccagctttgcctggttcgtcctgattacactaggttttcgggcagaaacagcgacactgagctcgggctgggggtggggccctcgggcccagtgcccgccccctgccctcc

SEQ ID NO: 8486 - DNA, 1614 bp, Homo sapiens
tattatttgacaatgccctttcctcactgcaagcctaaatttcctctcttcctcagttctgatttatcatttcactgtaactctattagctgtaaagcatttggggatgctgtcaggataacatgctctgtagcaaatgaggttgtattgaattatttagctttcagctaaagtggagataactaaagcagctgagctggtttgtaaaatgttggggtaatctgtctgctgatttggagttttatcatattaattttttcttatggttgaaaattataaattttaaggctacaaagaaaaatatgtatgcaactattcagttcagtgccacagacctatagctaaggaattatctggcttgcatagtatataattacgtagctgcagaaccaccattctagagaaccatgaatttatctaataagtttattcatacaagcttttaaaaaaccataaatacataatttccctccatttttttctaacaaaaatagatgaaggatttcttcttgagatatataatagtctcagcttttgaagttggcctgtttttcttgagctttccttgccagaatttgacttttaaacattttttttcacaaaacagaactttctctttttaactcagtaatagaaaaatgcattcttaaatgttgtcaacaaaggggaggaggggatcactgcgaatctatcgatgaccatgaatgtttttgtatcctctttcccatattactagtgtctcttggaaaattgagctgtaataaggatccagccaagaggagggtggagtgaagaattctgtggctctgtaatacctggggcgtttgtcccactcagcacatctcagtgtctaaatacccaccctcaagaagtgggactgcagcaggaagtgaagtatctttgcatatgttcaatatataaactaaactcgaacatctggcaaacacccctttcctgggtgaattctggaaaacagcacaattataatcccaagcaaataactcaggagtaagactgttcccttgttaagaacaccaggcagcatcagtaaaagttaaaacttcttctgcatctatgcgcttttaatctccacggccatttccataatacctgagattacctgcgttgatagctggtgagaaatcatcccaggcaccgcagggggagaaaagagatgaaagctacctcaaggcgtacacgtaaaccttactgaacaatgaccttgatcgttagaaagtcaagaaaatgtactgccttgcragctgccggtgttctattgagtttctctccgggggcaactcggagatgcctttttggcaccatcggttctagtatttcctctggcctgctgcgccgcgcctcatccaggcttgtagtgaggcacccccactcgcccggagacccgggccggccaggaggtgccagtgggcaggtgtggcagcctgcctgttgattacagtccctacaatgtgcgagctccttgggactgcaggctgcgcgccgccagctttgcctggttcgtcctgattacactaggttttcgggcagaaacagcgacactgagctcgggctgggggtggggccctcgggcccagtgcccgccccctgccctcc

SEQ ID NO: 8487 - DNA, 808 bp, Homo sapiens
ccagaggcattgttaaaaaacgctcccgctgtgtcttgtgaataaaagatggctttagggcagcacagaatgagctgctgcctgggctaggaaacatcccctgtccaaaccttcatgctttatctggacacaagggcagaggccacactagcacttcaggacagagagtgacaggcaaacagtgcccggttctgtggtggatgacacaaaggctggtgcggaagaagggctgaaccccggggaggcctgacgcctgtcagtaatgagatcatgaaaaccagttctgagttgcttccatgtggccccacgaatatctttattccctgrgtctgtgcctggggtgggcctcagatcccatagatcagagtgaaggggctgtcacatttacttgtcatttggtaattttcagtgaattaggggtatggagtttccatctgccatctggcctcactctggtaaccatggtaaccaccatctgcctgacttaatactattaagtcctgtgccaaaagagcactggacagggtgttgggaccagggagctggtcatcctttactggtcaccctggacaagggctctgaccttgctgtgtctcagtctctttctctgtataacagcagatttggtctgaatgtctttaaggtgcctttctcttaggaagagaatgccactctggggagaaattatctgagatcatcagcagcatttatagtctgaggacctggtcagcatttcttctgtctcctgcatgtggagttaaaagtgttacctgtctggagacaaagagaattgcctgtgaattaacgg

SEQ ID NO: 8488 - DNA, 808 bp, Homo sapiens
ccagaggcattgttaaaaaacgctcccgctgtgtcttgtgaataaaagatggctttagggcagcacagaatgagctgctgcctgggctaggaaacatcccctgtccaaaccttcatgctttatctggacacaagggcagaggccacactagcacttcaggacagagagtgacaggcaaacagtgcccggttctgtggtggatgacacaaaggctggtgcggaagaagggctgaaccccggggaggcctgacgcctgtcagtaatgagatcatgaaaaccagttctgagttgcttccatgtggccccacgaatatctttattccctgggtctgtgcctggggtgggcctcagatcccatagatcagagtgaaggggctgtcacatttacttgtcattyggtaattttcagtgaattaggggtatggagtttccatctgccatctggcctcactctggtaaccatggtaaccaccatctgcctgacttaatactattaagtcctgtgccaaaagagcactggacagggtgttgggaccagggagctggtcatcctttactggtcaccctggacaagggctctgaccttgctgtgtctcagtctctttctctgtataacagcagatttggtctgaatgtctttaaggtgcctttctcttaggaagagaatgccactctggggagaaattatctgagatcatcagcagcatttatagtctgaggacctggtcagcatttcttctgtctcctgcatgtggagttaaaagtgttacctgtctggagacaaagagaattgcctgtgaattaacgg

SEQ ID NO: 8489 - DNA, 789 bp, Homo sapiens
aaatgctcaaagttgtcgctcatattgcctagaattatcttgttaatccttccccctgtacacacatccctaaaaaaatcttaaaaataaaaaacaaaaaagtccactaataatctagagttcagctggttgcagatttaattttttaaaaaaaattttaaaaactccttctactttctaatctttgccactacagaatccgtgaaggaagggggaaggtccatgttccccagccagctcagggcacctcagcaaagtcccctccctcacccgttaccttgggcagcagggacagagctgccgctaagagtagcaaagaaattacggtcagccatgagggaaaatgatcaaccgagtgcaggaggcaggcactttatctgcaagattgtcaaatccctcaaaacaaatttcttagggagagggctgcgatgggagaggggagggaggaggaaaggatattttcttgtcacagtgacacggaagtgacactttgcagggccttgcctgccctgtatacaccctctcttccttccagagtaacagaatgtgcctgaaagattttcaactgacctccctggaagcagaagaaacgaagcttcctgggctcgctagtattccaatagtcagaatgctaactcgcttttttgactgttgagttttgtgagctttccccaggaacasagagagagaaagaaagagagagagagagaaggaagggaaacggcagagggatgcaaaggctagagctgaattccacaaacccgacttacttttcctggggctcttatg

SEQ ID NO: 8490 - DNA, 778 bp, Homo sapiens
cttggccaccttctctgcgagcaggcactcgcaattcccaaggttgctcagtttttttcccgcttatccccatctcagcctttttcctagtcctggctgtctattacggggctttagggagactctcctggggcgtatcctccattatttcccaggaatgtccttctttagtcaatatactcatcagcctggttctatttgcactgtatcttgttgaaattccttgaagtttatgggccagtaatgtgattttttttactgatttctagagtggaataggatttttatctctttgtctgtttcaataggaatttggaatagggaggatttaaatgcacgggtccaaattatgatctgtaaacaaccatcagatactgtaacttttgacaggtcagaatacaaaactgatttatttacagtgtcaccactaggtggtgccaccaattagtgaaaacaatgtggttgctatggctggacttccaagaaccacctgcagctactacaagcacatatttgtgagttgtctggaacttgtattcacctgtgcatatttgcatgagcgtgtgcacacacagttattggtgtataagttttcccacagagcaatgttgatttacaagcatgtgcrtgagtctgtgtaccctggaaagtatgggcacgaagctaaataatatgagtttcaaaaagcttacccatcagctgtgtggtctagaactcccattccttggctaggaagtcccaaccctgaggaagaaatacaatgacaagcttttctgaa

SEQ ID NO: 8491 - DNA, 769 bp, Homo sapiens
catgctcagcctacaactgggccaggtgtgcccctggcccagctcgtacccgcattcagaggttccgaagttcttgtcccacatccaagatgaataaggttactctgacaatcgaagggtgaggtgggtgaagaagaattttattgagtgaaagaatagctctcagcagagaggggatgcgagrgtggtccctacccaaagtcaagtggtcacccacccagcgtggctgggtctgggacttgtatgggcttagaatgggtgagtacatgctgattggtttgttagtatgcaaaaaaaaggctaaaacaaaggcaccatgtaaaggtgggcatgacagtgtaaaaaaacaattagggaagagtaggaatatgtaaaatgggtgaagggttagaatcaatcagaggaacgcacaccaaacggaaagagaggttctcagtccattccatgggtttgacttgtagcttggctttcaggctttaaattggctttggcttgaaggtgtggtttcactgggaacccaaccctatctgcctaggcatttgactgcctcctgctgctatcataatcactcttgacatctaaaccaaatttttggctgaggttcatcttacctcttcagggtggctacaacaacaggtgccggatcaggatgctgagacaatgaccacctccaccggggtctttcctcaggctttggcttgttaacaggctctgctgccttctagcaagcatgtactctgcactgttccttcttggcttcttgtgcttt

SEQ ID NO: 8492 - DNA, 769 bp, Homo sapiens
catgctcagcctacaactgggccaggtgtgcccctggcccagctcgtacccgcattcagaggttccgaagttcttgtcccacatccaagatgaataaggttactctgacaatcgaagggtgaggtgggtgaagaagaattttattgagtgaaagaatagctctcagcagagaggggatgcgagagtggtccctacccaaagtcaagtggtcacccacccagcgtggctgggtctgggacttgtatgggcttagaatgggtgagtacatgctgattggtttgttagtatgcaaaaaaaaggctaaaacaaaggcaccatgtaaaggtgggcatgacagtgtaaaaaaacaattagggaagagtaggaatatgtaaaatgggtgaagggttagaatcaatcagaggaacgcacaccaaacrgaaagagaggttctcagtccattccatgggtttgacttgtagcttggctttcaggctttaaattggctttggcttgaaggtgtggtttcactgggaacccaaccctatctgcctaggcatttgactgcctcctgctgctatcataatcactcttgacatctaaaccaaatttttggctgaggttcatcttacctcttcagggtggctacaacaacaggtgccggatcaggatgctgagacaatgaccacctccaccggggtctttcctcaggctttggcttgttaacaggctctgctgccttctagcaagcatgtactctgcactgttccttcttggcttcttgtgcttt

SEQ ID NO: 8493 - DNA, 831 bp, Homo sapiens
aagcgattcttctgcctcagcctcctgagtagctgggattacaggcgcgcactaccacacccagctaattttcatatatttagcagagatgaggtttcaccatgttggccaggctggtctcraactcctgacctcaagtgatccgcccacctcggcctcccaaagtgctgggattacaggtgtgagccaccatgcccagttgttctttcttctttatttgaatatgtgagctcaattatagtggaagtgaattgagagtattatggcatataaaactggaaccaacgagtctcaaatcacttcatatcgttttcctggaatggtttttagggtaagcacaatatttaatcagttgatatcagttctggtccttatcacttgtaaatgagtgtgattgttcagtttaataacaagtgctcatgaaccccattactaaaaatatgagatatagctcctagaatacaatcgtaccccagtgccacctagaggaaagaatttgcatcgagaggctgggcatgtctgtttctgtacatcctggccactgaggtaccgcttttgccttttgtatttcttttgtaaaatgaggccatccacaagactagtgtgtcatagaaataattacataaaatttcttataactgaagtcactaactagtaataattttaaggaaggcatgctaatacttttaattaaaagactgtaatttaggctaaagaaaaacctactgactaaaagtgaacattacttttaatttacaacacagaaagctgttgaaaaataaaaataactggccatcttagggctcaagccagctctgatgccagaatttt

SEQ ID NO: 8494 - DNA, 680 bp, Homo sapiens
gggaaggctgaggcccaagaattgcttgaacctgggagacggcagttgcagtgagccacgatcgcaccactgcactccagcctgggtgacagagcttgactctgtctccaaaaaaaaaaaagtacaatatagtaaatccaattaaattgtaaccattgacaacatcatttgccatatgaatcaatttttgtcatagatttaaatttttaacttcaaaagaaaaatatcattttaagagtattaaaatttgggaacttcaagtttggcaagtttattatatatgttcattatagaaaaaaatattaagcaacaagttaaatatcacctacagatcagcagccttacctttgtagattttttttctgtgcatagccataactttttcacaaaactgagatcatactctgttattttataatctgctttttttaaaacacaacaaaataatgtgatcacttttccatgtcaataaagtacatttcttattttagcatcttttgttgctgagttttaactctagatgtgctagtgtttattcagccattccctcatagccatttaagtggtttccaaatctctattctgataggtcgtgctttgatgcagtctcttgtaactaaatctctatgcacatccttarttagtcccttaggctgaattcccagaagaactggtgggtc

SEQ ID NO: 8495 - DNA, 1570 bp, Homo sapiens
tgaacattctcactgaggcttcttcacagtttgtacctgaagaacagaaatgatgattacatggagaaccttgttctgacccctaagatgaagtgggtgggttttgatttcttgttaccaaggtaacctctttcaatgagccttgaaaagataattactcagtgtgaagacttttgctttgcatggcacaccaatacagttcacagacaatcatttacataagaaacaaccggcacacacagattcaccttgattttatgaagtgcaactattcggagcataaacatatatctataaaagaacttaatcagcattaatttataagtatctcatcttaacatttaagataagtttttagagctctaaggattcaaaacaacaagcttgcccaatttccccattttataaatgataccggggcctaaaaattaaattataagcccaataatctcagagcatattaacagcagaaatgggactaaaaattaggtttcctgactcctggtccagtgttcttctcatcactttgtgtattttttatagctctccaccaatgaggcagactatatttttaaaatattatttttagttatttcaggtagaaattagtaattgacaacacttcaaaaataaagagaagctcaaattacaataaaatatcatgtagtctttccatccataaatagccatgttaattttccatatacatccaggcacctttctacagatggatcctatatttttaaaaaaggaagagagatcacattgtactgtattttaacctacttttttcctttaatattttattgtaaatatgagttccatgtcattaaacttgcatttgtggcagcatcttgctgacatagtttatttcccatcgcagtaaattttacacatgcagactcagtgaaattgaatctcaaattgggcctaccctgaattttttatgcccaaaagtcagcctcaatttgctccagacacaactctagtaaatcttggaatccaaaaagagaaaaactgtcttagtcacggcctaaggaaaaacagtgaaacccacagctcttagacagcgggaaaattgctcagtgctgtttataagagaaatgcatattaaaattgcaattaccgtttttctattattaaattggaraaggtcaacaagcctgacaacacattgtatgagagagcacgcagcgtggggggaaatcagcactcttatgtattgctgtgggaaaaaaaatcaatacagcctctatggagagaaactgagcaaaatctattaacattacaagtacaaacatccttcaattcagcaatatctttctaattctaggaaatattactcatatttatcttccaaagtgcaaaatgatatgtgcttgaagttaatgattgcatcacagtttctaatcaagaaagactgaaattatcttaaatacctataaataggggattggtgggcttatccatagaatgcaaaaccatgtagccacaaagaatgtggccttttgcatactcatataaggcaaattccaagaattaatgttaagtgggaaaagtagaaaagcag

SEQ ID NO: 8496 - DNA, 638 bp, Homo sapiens
agtggctcatgcctgtaatcccagcactttgggaggccgaagcacaaggattgcttgagctcggagttcaagaccacccagagcaacacggtgagaccccccccccgcctacaaaaaatagctaagtgtggcagcacagacctgtgttctcagctagggagactgaggcgggagaatcacctgagcccaggaggttgaggctgccgtgagctgtgatcataccactgcaccccagagtgaccctgtggcaaaaaaaaaaaaaaaaagaaagaaagaactaactttattttcacttaaagataattcaaatgcctgctcttccaggaagccctcctggatctctcagattgagtttctctcccttctctttaagccatttcattccctctggtctctgcatacagaactaggtagacctagggcctggggggcccagcaaagcccaaccctggggtgatgcctctgggatctccagcccttggctggtcctgccctgcactttgtggggaccaggggaggggctggattggctctgagccaggtacacaagagcatactaagagcttgctggagtgcattctttcaaccagtttttcctgagcacccacactctgmcaggaccacatgactgcccctgg

SEQ ID NO: 8497 - DNA, 615 bp, Homo sapiens
tattatgaaaggatggaggttccctccactaccacttctattgaatctttttttttgtagatagaaggcataaaaattttcactgtaacatgcatgcacagagaataattacccaatggggtacagaataacccaatggggttcagaagcttatatactctttttcataggggaggaaggagatgaagaattcagacaattcttttgaggagctgcaaatgatyattaggaaatatgaatgaacagaaattaactatagattctctttgaaatttgaatgagcctccagtggcaggcattatcttctgaaaaagtccatccaagtgtggttgcattcttcagtcttcttttctgagatagataatgagatttcagggaagggaggaagacaattgtatttcttcatttggttggggttgggggtgggagacagacaaggttagagggacattgactctgaggccacttctaaggcctttcagcatgtccagacttcaaggtatcattttctgaaccccaacattacctttctgaaacttccctagaagtttcatactttaaaagctgagttagtggctgtgcagagaaaaattgagttaatagccaagtggcaaa

SEQ ID NO: 8498 - DNA, 538 bp, Homo sapiens
tttctgggaaatttgggatcttagtgtctggcaaaatttatattacttatttaaggcaagtgttgcaattttccatttcataatcaagtaaaagctagacatattcttactagccattaagagaaccacaaatgatttgctaatttttttcaaagaaatatttttatttcatatgttggcacaaaatgtaatagttatttctgggtttggagctttycctgaataagaattctggatttaaaatgttgaagactatttcaattttaaaactaaaagaaaatatgcagaacactatgaaaagtttaatactgcataacttaatgttattaaaatgtgtaaaacttgcagcatattaaactataagagaaacccaaactcaaaaaaagctacacaaaagtggctacaactaaaatggacctaacataactcaaaaatttctacttctggccataaaacagtagatacggtctctgaaaccccaatgtggccctgataacagtcagtgtggagttgttagcataccaagaggaattccgcg

SEQ ID NO: 8499 - DNA, 538 bp, Homo sapiens
tttctgggaaatttgggatcttagtgtctggcaaaatttatattacttatttaaggcaagtgttgcaattttccatttcataatcaagtaaaagctagacatattcttactagccattaagagaaccacaaatgatttgctaatttttttcaaagaaatatttttatttcatatgttggcacaaaatgtaatagttatttctgggtttggagctttccctgaataagaattctggatttaaaatgttgaagactatttcaattttaaaactaaaagaaaatatgcagaacactatgaaaagtttaatactgcataacttaatgttattaaaatgtgtaaaacttgcagcatattaaactataagagaaacccaaactcaaaaaaagctacacaaaagtggctacaactaaaatggacctaacataactcaaaaatttctacttctggccataaaacagtagatacggtctctgaaaccccaatgtggccctgataacagtcagtgtggagttgttagcataccaagaggaattcmgcg

SEQ ID NO: 8500 - DNA, 778 bp, Homo sapiens
agtctagggcccgacatttggatctagttgtcatgtctstctggcctcctttaatcagaaacattcccacagccttcctttatctttcataacaatgacaggcagcagaataagtttccctgtgccttttaaagacagaacaaatgttcttcattgtgtttgtctgatgtttcctcacgatgaggcgagaaaatgaaatactgcgtaagtgatcctgcatccgtctcaaaaaaggtctcatttctggagacactgatgtccttctcacctcattggcggtgttgattttgatcattcctcccctccagggcgttgactgatttccccatggtgtaaattactagttttcctttgcatctaataagcagcctgtggggagcctgaaatatgtttcttgccaggtggaggcacggtcataaggagcagtgtgtgtgtgtgaggatggagagaagcccttcccttctaggggaacgtgaggagagtggagggtgcacttcctccacctgcagctggaaagtctgtgcgcctttcagtgatgaagcttacagatggatgttgcagggctttgggtagggcctggaccaggctccaggtagagtatttcgggcttggatgttttcaggcaccaataagtcaagcttgcattgatgatattacaaagtggcagaggtgcctcctgaatgaaaaagaaatggaatcctaaccctgacttctgtctttgagggtcaaacatataaaaacatgtctgatgccggatttctgggaagggcattggttt

SEQ ID NO: 8501 - DNA, 778 bp, Homo sapiens
agtctagggcccgacatttggatctagttgtcatgtctgtctggcctcctttaatcagaaacattcccacagccttcctttatctttcataacaatgacaggcagcagaataagtttccctgtgccttttaaagacagaacaaatgttcttcattgtgtttgtctgatgtttcctcacgatgaggcgagaaaatgaaatactgcgtaagtgatcctgcatccgtctcaaaaaaggtctcatttctggagacactgatgtccttctcacctcattggcggtgttgattttgatcattcctcccctccagggcgttgactgatttccccatggtgtaaattactasttttcctttgcatctaataagcagcctgtggggagcctgaaatatgtttcttgccaggtggaggcacggtcataaggagcagtgtgtgtgtgtgaggatggagagaagcccttcccttctaggggaacgtgaggagagtggagggtgcacttcctccacctgcagctggaaagtctgtgcgcctttcagtgatgaagcttacagatggatgttgcagggctttgggtagggcctggaccaggctccaggtagagtatttcgggcttggatgttttcaggcaccaataagtcaagcttgcattgatgatattacaaagtggcagaggtgcctcctgaatgaaaaagaaatggaatcctaaccctgacttctgtctttgagggtcaaacatataaaaacatgtctgatgccggatttctgggaagggcattggttt

SEQ ID NO: 8502 - DNA, 814 bp, Homo sapiens
aaaaagagaggatgaggaataattttgaggaataatttaggtagaaaagatggtatggagagaaaatgtaaaacccagatggacccataagttactagttactgatattgggcatcaaatttgtctctgacctttacagtaaaggaaaacatgatcagttaattgcaaaaatcttgtttccatgagaaaaagcatatcaattactcaggacaaatgaaatatcccctgatgcttaaatatgaatacgtttgcctataatttgctcattgatcataaaacttttcttttgtttcgccttctgtccattttctctataattgttgttttgcttgctggtgcaatggttgaaaggcctatagatgctgtaagtgctgaagayctgaggatgaggatctgaggatgaggatgggatgtactgaaagtgttgggtcatgttgacagagagcatggggtgattaacgtcacagtcatcccaaaccatggattctaaatctagggacaggttttggcctggttacagcaactttgcaaaggagtatattgcagctgagatcacccggggaactatgaaacaagcaataaaacaaaagatcttcaaggaacactgagaaggggacttgtagggatctgctgtgcagcgcaaatccaacctcaggagcttacagcagagaaatcacatagacattcaacgagaacaaccaaagttactaaagtaattgtggaaaaaggttatataaaggggaaacaatacaacagtaactcatgggcactacatcctgccttttgaaggaattttatttttagttattgttaa

SEQ ID NO: 8503 - DNA, 814 bp, Homo sapiens
aaaaagagaggatgaggaataattttgaggaataatttaggtagaaaagatggtatggagagaaaatgtaaaacccagatggacccataagttactagttactgatattgggcatcaaatttgtctctgacctttacagtaaaggaaaacatgatcagttaattgcaaaaatcttgtttccatgagaaaaagcatatcaattactcaggacaaatgaaatatcccctgatgcttaaatatgaatacgtttgcctataatttgctcattgatcataaaacttttcttttgtttcgccttctgtccattttctctataattgttgttttgcttgctggtgcaatggttgaaaggcctatagatgctgtaagtgctgaagatctgaggatgaggatctgaggatgaggatgggatgtactgaaagtgttgggtcatgttgacagagagcatggggtgattaacgtcacagtcatcccaaaccatggattctaaatctagggacaggttttggcctggttacagcaactttgcaaaggagtatattgcagctgagatcacccggggaactatgaaacargcaataaaacaaaagatcttcaaggaacactgagaaggggacttgtagggatctgctgtgcagcgcaaatccaacctcaggagcttacagcagagaaatcacatagacattcaacgagaacaaccaaagttactaaagtaattgtggaaaaaggttatataaaggggaaacaatacaacagtaactcatgggcactacatcctgccttttgaaggaattttatttttagttattgttaa

SEQ ID NO: 8504 - DNA, 788 bp, Homo sapiens
tccaatgtgggatgggggtggaggagcttggaggtggattcattcctttgggttcagttagccagtcaacaaacatgaattgaactctttgtgttagttaggtagtgagatgggaaagatgaactcatggtccaagatgccctgtgtctgaaatatacaagaggctagggagatgtgcagcaaggaagtaatcgtactgctacgtggttgtggagcgcttaagaattattttgaatgcttattttcacaacagcgaatcaggtctgcactagcattcctatttcccaggcacgttagagatgaaatcggttgtaaaaaccaattgtcctccacctttcatttcccatcagaccacaagggggcgccgtgcgaggcgaacacagccttagatctgcaaaatgctggtcgctgcrtgaggggcttcaaaacatcctaggtggtgcccaaagaccttgttgcctgagctgaataggtgctagctatttgcactgtcagcgctctaaaggatttctgggggccccctttcaacgggaagccacctggtacgtgtaaacacccacaagttcactcccctttgcaaggggcagaggacctagtaacttttctctagagcgctctcctctgcatacaggtccctacatgtccccttctcagtgctctttgcagatcttttgttttcttgcttgttgatttttcttttgcaaacaggattgggggacccattatttatccaaaaccttcttttgtcaaatcgtaggtcctttccagtgtagactggatgtctagac

SEQ ID NO: 8505 - DNA, 712 bp, Homo sapiens
tttcattttctagggctgcatatcctttttcctaaagaggaactccacattttataagttgcagttcccataaagactagatctgtccctagttttgatgaactatacctgggaaaccagaggtatggcaatcctaaaacaaatataggaaaagagttccaatagacacagattcccttcccctggtgaaaatgaagatagaaacaacaacaaaaaaagatattatgtaatataaaataaaacaaatgtwcattatatttgaacctgtattctcttttctaaactgagtttcagagggcaaggaacatgtctgtcagatactactttctatccagtacacatagtagctgcacaataaacatttatgacatgaattaattagcgtttctctggcctgccaatgccctgtatatagaaaatctgtaaatttccactaactttaaaaatactcatattttcctggaacagaaagtaaagattacatggcagacaaaattgcatctgtctactaatgattaccatgtaatctctactagatggccttgtggttctcagtaagagtcaagtgacaaaggagacagagggagcaaagctgaaagactttaataaactctctttgcaaataatgtttttattcaatgtcaacttcttattaaaacatcccagggcttgactcttctgagtcttttatatactttttttctacaacaaa

SEQ ID NO: 8506 - DNA, 498 bp, Homo sapiens
tagaacatcctaaaaatccagttcagcttttttattcttgttacatttctgcagaattttaatataactttccttttgtgtatttatgcctactgtttctatttacttacgggtggcctgaattttttatccagagataaagttaatgcaagaaagaatttaaaaatgtatggtagattatcaaaattcttaacttaaaaaaaggtcaaatccacctttgctacagcacacaacctaatcttatatctgytcatcttttttgtctttgttttaaaaacacatacttgataatcatattagatggttacagctttctattgctgcataataaaccagtctaaacatagcagcttaaaacagctaagtagcacagatggacctgctcatgattcttcaatctgggctgaactcagctgggtggctcatctcttccctagatggtgtcttctgctggactatttaatatgtttgtatttagaggcagctccatagggactg

SEQ ID NO: 8507 - DNA, 763 bp, Homo sapiens
agcagcctctcaggtggttctgaggcaggataagtaaggttagaaggccatactgacttgtcctcctgtgtgaagccctgtgggcttttttcacagcagactctgcatcccttgcaaactcgtgcatcagcacctaatatattgtgcaagataagcagtcctccaggataccagcagctgccagatagttacaagttcctgatatccagtacagcctgggaaagagaacaraagccccttattcctgatgtagcttccccaatctccagccaatcaaatttctgccttaggggaaataggcacttctcaagggtcctgcatgagcagctaggctcaggtttagtttataatggctttttcctcattttgatagtaaaaaacacacccctaggtggagattttatatgctaatgatacatgtgatccatgttagagcatgtagatactgagcacacatgccaatcgcaggtccacctttgcatatttgccctcaccagtactttatgaatactcatggtgtactttcactttgcaataaacttatttgcctacttactttggactcattctgaaattcttttgtgtggcaaagtcaagaacctgaaccagcccactgacaacagttccaaagtcagtggtagagggaaagagcctacctgcttgtagatacaatgagtccctctgcattcccccagtaacatgttcctatagaacccatttccattttatcatggaacacttccagacactgccttctttatta

SEQ ID NO: 8508 - DNA, 723 bp, Homo sapiens
caaggacattctcaagtaaaactggccatttttaactggaagtgcatggtggtaaagagtacaatgaccactggtacagtttttcatcactgccttgtttcttgccactgttttacttgttgcttttgcaccatcagtgcaaatgtcaaccttctggagaaaagcaaattatatcaaaactatggaaatagctttgactttgtagattgcctcatgagtctggaggactctcagggttcacgggtcacatggtgagaactgctgctttagataggtgccagcaagcaaatacagcaaaacaaggaaaataactaggaggagaaaaaaggagacaaagggtcatttgttgaagataggatgtctacccatagtggtttagcacaagataaacattcaaaatcaattccttatacagtcaatagcccactagaaaatataatgagaaaaaaggacattgtttgattatctatgattgtgtggtatagtatatttacatgtaatacacaaacatataattcttggctgaaccatgtgaaaattaattgtaggcatcttgatacttcagccctaaattcttcagcatgcagatctcaaagacattctcatgcataaccacattgtaattaccatatcaatgaaattaatgtataatttcatatcatcatctaacatcccaaaaatgtcttttatagtggktgccttttgtttgggatgcagattcag

SEQ ID NO: 8509 - DNA, 723 bp, Homo sapiens
caaggacattctcaagtaaaactggccatttttaactggaagtgcatggtggtaaagagtacaatgaccactggtacagtttttcatcactgccttgtttcttgccactgttttacttgttgcttttgcaccatcagtgcaaatgtcaaccttctggagaaaagcaaattatatcaaaactatggaaatagctttgactttgtagattgcctcatgagtctggaggactctcagggttcacgggtcacatggtgagaactgctgctttagataggtgccagcaagcaaatacagcaaaacaaggaaaataactaggaggagaaaaaaggagacaaagggtcatttgttgaagataggatgtctacccatagtggtttagcacaagataaacattcaaaatcaattccttatacagtcaatagcccactagaaaatataatgagaaaaaaggacattgtttgattatctatgattgtgtggtatagtatatttacatgtaatacacaaacatataattcttggctgaaccatgtgaaaattaattgtaggcatcttgatacttcagccctaaattcttcagcatgcagatctcaaagacattctcatgcataaccacattgtaattaccatatcaatgaaattaatgtataatttcatatcatcatctaacatcccaaaaatgtcttttatagtggttrccttttgtttgggatgcagattcag

SEQ ID NO: 8510 - DNA, 352 bp, Homo sapiens
agatgtgcctggattcaaccctggctgtagacattaggcatgttattaacttctctgagcctcagtttccctagctgtgaaatcagagtcactgtgaagactgaatgagaaaactcacacgtgtggttcctggcccagaacaaatcttcaaccagtggttataactattactctgtgtgtctagcctatatcttttctgctgcagtgaaagttagttattcgatgaaagggagcaacccactgagggggatggtctgggtgcctggatgctgtggtcaatgggtcggcatcacacccagcaccctgcccaacacagacaccgcccccacccccccmcccatagctgctgcca

SEQ ID NO: 8511 - DNA, 820 bp, Homo sapiens; identical to SEQ ID NO: 7341

SEQ ID NO: 8512 - DNA, 789 bp, Homo sapiens
gcacccacacacacccacacctcactttcctcatctgtaaaaggaaactgtaatatctgcacaagggactattgtatttgtcacgtggaatatttgtggggtttccatggagcaacatgtgtgtcaattacttaacactaaagaactcatttaaaatggaaacagattgtggccactgatatttgtaaggggtgctagaccacctcacgtcactggggatatcagtgcatcttttcttgttactggggttaggtgtgaacacccaggccactccctcaacccaggagcmgtggttctcagactgtggtctggggaccagcagcagcagcgactccagaccctgcccagacctgctgagtctgccccactagggtggggcctgcactgttttaccagccttgcgagggacctttggaaaatcctagtgcccaagtctgagaaccactggccaagatgcgttcagtcagcatctctaggagagggactcaggcacaggttatttatttatgtttttttcatttaattcattttttaaattatactttaagttctagggtacatgtgcacaacgtgcagttttgttacatatgtatacatgtgccatgttggtgtgctgcacccattaactcataattgacattagatatttctcctaatgctatccccagccctccaccccttgacaggccccatggtgtgatgttcctcaccctgtgtccaagtgttgtattgttcaattcccacctgtgagtgagaacatgcagtgtttggttttctgtccttgcgata

SEQ ID NO: 8513 - DNA, 829 bp, Homo sapiens
ttgaaccaagcatcctcaggatctggcctccaccccaccaccaggcccaatgaccacctcagtctcctccctaagtgcctcccagccaccagaaccttcccttctcctagaacatccctcacccgagccacctgcacttttccctcacccaccacgcactcctgatcctctggcctgctctccgcctcctccaaaaggcttmactgctcctcccctgtgggactccactctgataactccatctaactgtgactcagtggcacttccactggacactgtccctcaaagcttgactccacgtgaggatttggcagcttctgtcccagccatctcaggtcttggcggctcaaatagtcaagtttctgccttctcctggtggcaggagactaccagaacctggtgcgtcttcaattcgtcagtccagcaagatcatctttcccgccacccaccagagacctgtcagatggaagctggtagaccatttttgctcagctctgatggccaggatgtcgtggggatacaagtcacagaaatcaacatttgagaggaaaaagaaaatgatggacgatttccaaaacagcccacaaaagcacttgaatgctttggggaatttggttaaatcactggatgctgagcaggacaccacaagcccaaaacccttctggaacatgggagagaactcaaaatagctgcccagtcctcagaagctctcagatcctaggctcttgcaggaaagttttcagaagaattatagccagcttttctggggcctcccctctctgcacagtgaatctctggtggctaatgcctgggtcactgactgtatgta

SEQ ID NO: 8514 - DNA, 1402 bp, Homo sapiens
tcacacttagtacactcttagtacacttagtatgttcttttgcaagaaagaaggggcagagctctagtgaacactcaaaagaaaaccttggcctggcatcaagttaggcgactggatgtatatatatatacatccagtatatatatatgtaaaataaaaattcgaaagaacatatgcattatatttaacctacccaccattaatattttgaatgagtgcttatattatataaataatacataatatacacctgttcaaacattttaaattaaattaattgagctttttcggtattttctaaatcatttaaatgcatttcttgtcaaactcttgatcatactgtacatataattatattctgaaaaacaatttaatctttaaaaaggtttagctacagtctttttataattccttattaattattgacatttacaagatgattatatcataatggtcattctgtcataatacaattataatacctacattattataatatgatattatagtgatattataatagcacctcagtggaactaaaatcttaaaaagttagagctcagttgcattttgcacattgtaatagtgcacacacccatgggcacaaaaacatacaagcaaagtactggatccaatagctttttgaaccttttaagctaaagattacactatcttttcaactcaatataaccttctcatgtgtgtttaatttttttttgctccaaattattattgcattttctctgaaagatgaagagaataaaaggtttaggttagaattaatgtatctgaaacctttttgtatgaatatagcaatgttaatgttacagtaatttaatttgaaaagcaaatccccaatagattatttaaatatgttatccaggaatatagagacataattgtttttagtaatataatatgcatagcctttctttccaatgttgaaaagaacaatttctataatttttatatgcaaatgcttttgaaagttagytcacctgactcacctgatatatggcaatgtcctgaatacatctaattagataatcttttgaaaattctatttaaataaaggcagatgattcatgggagaaataatcaaattaaattacttttttaaacatcttttttaatactactaaaaaattctgataacctcactatggttttcataaatgttttctttcttgttatgtggtaagaatatgcacatgtgtttaagagttcagattcctaatttcaacttctggattcctttggcaatatttatgggggattgactatgtccaaggctttttggaagttgtcacatgcatgctgtcatcaaagagcatttcagttttatattgtgtctatcttggacttctgtgaaattaatctaactcagaaagcaactgaaaca

SEQ ID NO: 8515 - DNA, 781 bp, Homo sapiens
tattagctgctttacgtggagagttgttggaagagctgtagattggtggtaaatgtgtctagcataggggatggcacataataaatacaactattggttaatagaatttcatttaattttaaaaatgacccttactggtgggtattaacagtctcagtttaaagataagaaactcaaagagcccttatccaaaatcctagttagtaaatttagagttggaattcaacgtcaggggattgaggctgaaagccagcgctcgcctgctataatacatcagcgcacagggctaagcaccaacctaaaaaggtggaagaacgattgtccraggagacaggacaagtcaggaaggcagggggaagccatgagtatggctatgctgcatggggtcagtggccaagaaaggccaaaagaaaggaggatctcagagatttaccgtgcaccctggccctgggcatgaggcatggggaggagaaaaccagaactggcgcaagagaaaccattttagaattccggagttgtgggagggatgagtgtagaattctcccatccatggacaggggctagagtggcaaatgaagaaagcaacaggtggacccaaggcatagacactctcacagccccgttatcttgagacggaggatgacacaggcgttatcaactttcccactttcaagatgagcagactgaggcaaaggagtgtttatgaactggaatactcagttcataagcactgatgttaagccctggcttgtttccagaactgcactgctgtgcagggacc

SEQ ID NO: 8516 - DNA, 786 bp, Homo sapiens
tttttttttttttttccaaccacctggtcagtttgccggggtggggaagggtaggatggggagacatctgtatttattcttttagagctcggggtctcactctgggctcaagcgattcgcccgcgtacctgggactacaggtgcgcactactgtgccaggatagtggttcccaaacttttctgcgcattgaaatcacctaggaagtttccaaaaatactgatgcctgtttcctacccccagaaattgtgatttaagtggtccaagtatcctctaggcttcgggattttgtaaagctctccacgtgaatctgagcttaggaacctctgaactggggcttgcagcagaagcacgtaaagcacgcaaagaaacgaaaccacacaggtcacactagtaatgtggcaacaggctaacttaaattatgtaaggctagtgctttccagagtgtactggaggacgggaaacaagccccatttaagcagtgcctcgggatttgagttgcctgtgaaacgcagcagccttctgccgaggacgcagaaacccccgcctctcatccagggctgacagggcacgggccgcgagccgcggcggggcctcctggcgcatgcgcgatctcccggagcatgcgcagcagcggcgccgacgcggggcggtgcctggtgaccgcgcgcgctcccggaagtgtgccggcgycgcgcgaaggttcagcagggagccgtgggccggcgcgccggttccgcacgtgtctcggcacgtggcagcgcgcctgcccttggcttggaggcgcc

SEQ ID NO: 8517 - DNA, 490 bp, Homo sapiens
ccccagtaaagctcttaaaacacacgcagagagcccttagagagcaagaaaaaggtacaaccctcccggcaaaaaataacggaaagcatagttttaatcctcttcctcccaacgtccttcccgagtgaaaataactgccaagttcacagctagcacacgaccttcccccaccagccctgcctcttaagaacactaggagctgcccgagagtcgtattaacaactctgttcaccaccacacacaaaaaccaggccacgttcaatgagttttactctacctgaccccgtgagcaacacagggacgtgagtgtgctgtcgatggcaccccaagcgatcacaccctccaccacactgcctttttaacagagtatctcackgagtagctcggagcatgaaacagctgcaggggttctcagctcccagcctccgaatgaaagtgcgtgctcaagtctctgaaaaataacaccaagctagctcctttgatggaaaag

SEQ ID NO: 8518 - DNA, 767 bp, Homo sapiens
cgatccattcgtacatgcctttggtggacttgtcaacaaagactctgattctgctaagtgttttacttgatgcattacacctttataataacagagatgaaagggagtcagttttaatcaggagtagaaccttctccccaccattacaaaatccctaaataccaacactgacataatacacaaaaagactaaaacataactggcaaataggtaaaagaaattaggagccagagttttcaacttgacttcaatcagaaaaaaatataaaaactaaaggttaaagaaaaatactgatattgaatgtcttctaatcttcaaaaccagattatataaaacttaatagggtcacaaagtcctattcagagttcaaaatactcattataaaaacaataatcaactacagaaatacagtgcacaccctgtggtgtgacagccagaagggatggaaaagaccaagaatcagttaacttcaagygctacaaaaagacaagatcacattaacactgcaccaaaaaaaaaaccagctatgaagggtgggaactatcacatcctttaaggtgtgaaagagagctaaacattaacttgtgaggcaggggtttctatctgtcccggaatcataggagagtatgtatgaaggagtgtgactaaaaactatcaaattgtataccaatatgcatgtctgattatcagctagtataaactatatgcaaatatgtggatatatttaacgtgagtgaatgagcacacgttcacatttttctggggaa

SEQ ID NO: 8519 - DNA, 806 bp, Homo sapiens
cctcgttctgctgtccagtatggggtctgctatacagtatgtgtgttttcaaacaattagatagcacaggaaagaaacaaatccctgccccgaaggtcctaactttaataaagtatgttatttccaataagcccctttaatataatattatattgtttgccaaatgaatttaaatattttaatgttgaaatgatatcagcaaatacctaaaacttatttcctgttgcaataaaatacacrttttctcagtctcacaactttccacattaataataattaaaaggttagaaggcagccttaattacatagctaatcactcggcctttcccctcgttgtttgggacaaacatacaagttttctaaatgtcttagccaaaatgtcctacgttccattcttcttcttcttttatctaatgtgtaagaaagcgcatttgatggatggaacattcccgtccacaacctctccagtaaatctctcaaagtccttaacctcgtacagcctgcctgatagagcatttgctgttgtttatagtctgttatcccagggattggctttctgtgtaataaagtactaaaagtctcgtagagtaggatcaacttgggtgttctgcggtttgcatggtggtggttatacctaattcccacagcagagacgggagttagagggagcatcataaagaacacaagtcagtgggctgccagctgagtgagctgccctgcgaacaggtttgggtaatagcaatatttctaaaagggagggcaatgacacttaagtgaggttggtcttaggaagcagttgcaggtct

SEQ ID NO: 8520 - DNA, 806 bp, Homo sapiens
cctcgttctgctgtccagtatggggtctgctatacagtatgtgtgttttcaaacaattagatagcacaggaaagaaacaaatccctgccccgaaggtcctaactttaataaagtatgttatttccaataagcccctttaatataatattatattgtttgccaaatgaatttaaatattttaatgttgaaatgatatcagcaaatacctaaaacttatttcctgttgcaataaaatacacgttttctcagtctcacaactttccacattaataataattaaaaggttagaaggcagccttaattacatagctaatcactcggcctttcccctcgttgtttgggacaaacatacaagttttctaaatgtcttagccaaaatgtcctacgttccattcttcttcttcttttatctaatgtgtaagaaagcgcatttgatggatggaacattcccgtccacaacctctccagtaaatctctcaaagtccttaacctygtacagcctgcctgatagagcatttgctgttgtttatagtctgttatcccagggattggctttctgtgtaataaagtactaaaagtctcgtagagtaggatcaacttgggtgttctgcggtttgcatggtggtggttatacctaattcccacagcagagacgggagttagagggagcatcataaagaacacaagtcagtgggctgccagctgagtgagctgccctgcgaacaggtttgggtaatagcaatatttctaaaagggagggcaatgacacttaagtgaggttggtcttaggaagcagttgcaggtct

SEQ ID NO: 8521 - DNA, 772 bp, Homo sapiens
cttttcaaagcacagctcaatttcttgctttccagaagccttcctgggtctctcaaacctagcagaatcccttctttctcagaaatcctagcgctcatttaactcacaractgtaatacaacagtggcagcaagagatggtttctattcatggagtactgggtgttgttgttttgttttccagagcccagtgaacaagactgcataggcttagctgcatttgtaaacctctccatcccatcatttagaaagctaagccaggcatcctgagcagttggctctgaagcctttcacctagcatggctgcatgtggtccattgattgcatctatacatgaataaacattcaggaaatgcagccttgttgataaaggggaccagggacctggggctctgtgtgcacatcactggggttccatttcatttgtctgcctctactcacgagcaagagggatttatccataaaacaaaacaggcattttagcaactcctggatgctcagttcatctcttggcacatcttatttaggatattgagccagctaccaaacctaggagggaatctgagtggtcactcagatagagtgaccaactgtccagtttaccggggactgaaaaggttcacgaaatgagggttttcagttttaaaaccaaggccgtccagggtagagtaagacccctatggatgaagactgattcttgttcaatggacagaaagcatacaagaggccaaggattcagtaccgtgtctgggtcagcaggagagggcggagaa

SEQ ID NO: 8522 - DNA, 772 bp, Homo sapiens
cttttcaaagcacagctcaatttcttgctttccagaagccttcctgggtctctcaaacctagcagaatcccttctttctcagaaatcctagcgctcatttaactcacagactgtaatacaacagtggcagcaagagatggtttctattcatggagtactgggtgttgttgttttgttttccagagcccagtgaacaagactgcataggcttagctgcatttgtaaacctctccatcccatcatttagaaagctragccaggcatcctgagcagttggctctgaagcctttcacctagcatggctgcatgtggtccattgattgcatctatacatgaataaacattcaggaaatgcagccttgttgataaaggggaccagggacctggggctctgtgtgcacatcactggggttccatttcatttgtctgcctctactcacgagcaagagggatttatccataaaacaaaacaggcattttagcaactcctggatgctcagttcatctcttggcacatcttatttaggatattgagccagctaccaaacctaggagggaatctgagtggtcactcagatagagtgaccaactgtccagtttaccggggactgaaaaggttcacgaaatgagggttttcagttttaaaaccaaggccgtccagggtagagtaagacccctatggatgaagactgattcttgttcaatggacagaaagcatacaagaggccaaggattcagtaccgtgtctgggtcagcaggagagggcggagaa

SEQ ID NO: 8523 - DNA, 789 bp, Homo sapiens
cagggagaggagagagacacacatcccaagcaatctcggttgaaagctgacctataccgtatgctcacaggggaacttaccccagctaagtcatctggatgtgcctcagtttccacaacaaaatgaatgggaaggccattttccaatccaggaaaaataaaatggatacagcacacaatactctgcaaaaaggacccatctacctgaatgatctggaaggactgacccccccgggctatatcattgatgatgatggtgacgatgaaaagctttaataagcacctatttatgccactctgttaggtgttaccacaaaacttttctcatttaaacttccctgcaattcaagaaataggcattatgaccccatttcacagatgcagagctggccctcgaaggattgagtgacaatgctagtggagaggtcaagtgggggagccagaaggtcttttgagaaggaccctgtcagaacccaaccccttgtgctgcctgcacagatatctcaggctccaagagaatcaagcccctcccctggccacatggcctaagtggccagacacacaagagatgctcccagccttgctgacctctcaccttgtccctaagaccaagtggccttggaatatttagtgagacctgctggctgaggagtggagtagcctgaggggcaagcaggaagaggccaggtcaacacagtgaggcctcagatgaaattaggaagagcatccagagtacaactgactgccgagccccaggcaaaaggatcrggccagctctcgggccagggct

SEQ ID NO: 8524 - DNA, 466 bp, Homo sapiens
tgtgttccgcacgggggctccaccagggcagggatggtggtgagggtcgctcgtgggtcccctcgcggggagcagggtctggtactcaccagggcgcacgactaggacttgtggaatgaattcatcgtcgcctttagcttttagtcctttgaagagccctgagagtggaaatcaagagattttttccacggggaagttctttttacaaagcgttgatttctcggcacccggcagggagggcaactggcagggyctctggcgcaccttctgcgcggtggagccacgggggctcagctgggcggtggtgcggccgtggggtggtaggtcaagagctgggaaaggaaaaagcaaaagctgggaaagaagccggggagcggtggaccagacatccagacctcctgaaaggctcatgaaggggcacaggcaggatcttctggaagtgagaattgttttgtttgtttgtttg

SEQ ID NO: 8525 - DNA, 623 bp, Homo sapiens
acttcttagctattaagtgctgatttgaccagctttgtctaggtttctttcaaatggaggacacagtggtagaagtcagcatgagggaattttattttatcattatttttttaaactgatagaattgcaaggagagtgatggaattttaaagcacatatatgtaaagcccttgtgaagtattttcttctgtcctctctttttttgaataatcagtatttcctccaactattgtctatttgtacctggcattgtaccctttaaaaagaaagtagaggcagcacatggtggctaacacctgaatctcagcactttgggaggccaaggcaggagtatggcttgagcttaggagttcaaagttaccttgaactatgattgcaccactgcaccccagcctgggcaacagaggaagaccttgtctcttaaaacagaaacaaacaaaaaackaagttaagttttctgatttttaaaaattattatttatagagatagggtcttgctctgtcacccaggctaaggtatagtggcatgatcatggctcactgcagccttgacctctgagttcaagtggtccctcctgcctcagcctcccaagtagctagaaccacaggtacacatcaccaca

SEQ ID NO: 8526 - DNA, 778 bp, Homo sapiens
aactgacttcataaagagtgggatagtcttaagttgattacaaatagtgttcagagtttcaagaaagggacatggaatcaaatcagtactttccattaaccaaactcttgagaatagcttcatattttaaactctaagacaatcatcttaaagcaagaattcaatcagcagcttattgtcgcacggaacagtatcataaagcagtcagtcgctgtccagtttctagatttctatcacattctgtttgttgtttgttttttgagacagggtctcgctctgtcacccaggctggagcgcagtggcgccatctcaactcactgcaaccttcacctcccaggctcaagcgattctcctgcctcatcctcccgagtacctagggttacaggtgtgcaccaccacacctagctaattcttctttttttttttttttttttttkgtatttttagtagagatgggtttttgccatgttgaccaggctggttttgtactcctggcttcaaacaatctgcccacctcggcctcccaaagtgctgggattacaggcattagccaccacatccagcctctatcatgcttttcgtaagtgcaaagcaatagcctgaagtggataaaatcattaagagtatacaacataagcatattaaaactttacactgcattccaggctgggcaacagagtaagactctgtctcttaagaacaaattaaaaataaaaaaataggccaggcgcagtggctcacacctgtaatgccagcactttgggaggctgaggtggaa

SEQ ID NO: 8527 - DNA, 778 bp, Homo sapiens
aactgacttcataaagagtgggatagtcttaagttgattacaaatagtgttcagagtttcaagaaagggacatggaatcaaatcagtactttccattaaccaaactcttgagaatagcttcatattttaaactctaagacaatcatcttaaagcaagaattcaatcagcagcttattgtcgcacggaacagtatcataaagcagtcagtcgctgtccagtttctagatttctatcacattctgtttgttgtttgttttttgagacagggtctcgctctgtcacccaggctggagcgcagtggcgccatctcaactcactgcaaccttcacctcccaggctcaagcgattctcctgcctcatcctcccgagtacctagggttacaggtgtgcaccaccacacctagctaattcttcttttttttttttttttttttttgkatttttagtagagatgggtttttgccatgttgaccaggctggttttgtactcctggcttcaaacaatctgcccacctcggcctcccaaagtgctgggattacaggcattagccaccacatccagcctctatcatgcttttcgtaagtgcaaagcaatagcctgaagtggataaaatcattaagagtatacaacataagcatattaaaactttacactgcattccaggctgggcaacagagtaagactctgtctcttaagaacaaattaaaaataaaaaaataggccaggcgcagtggctcacacctgtaatgccagcactttgggaggctgaggtggaa

SEQ ID NO: 8528 - DNA, 824 bp, Homo sapiens
ccacggagatagaggctgtgaccgagtttgcagagctgggacacacagccctggggttgaacaccgcctctcaacagtgtggcctccgccaataccgagcctcatttcctagcttgcagaacggattaactcggacctgccgggtgttgtggcggctactgggaccggctgggaatgaatccctgtggctccttcccttccccttagtcgcgcccctttcttcttacggacaggagagtggactaaatgcagattcccaattcttcggcctcagtttccctaaggatctcatgtgagcgttcagggtccgcgtcggcgatgcgtccaccaggcacgggtcccgcggggaggggaatgacctacacttggcctcgcgaccctgcgggcgcccgggttccaggatgagccccgggcgtggctggggagtgcgcgcgtcccggctccaccccaccccgggcacccctggcccccagtctccgccagcgggcggtgcggcagcgccaccgtgtggccgcgcgacatcaaagcgccgcgcctctgcccgctggcgggtcccgcgccgcggagccggagagcgacttccccggagctagggcggtgcaggagggcatctggtccaggtcccccgacacacctcaggattttcttgcactccccccgccccccggcggggctgccagcgtcaccarttacgagtggacggagcggaggcagtgcctccctgccctcggtggagggcggggccgagggcacctcggccgggccaggccttccccgcccgtcgcatcgtcccattccgaggtccgggttctgcgtctactctt

SEQ ID NO: 8529 - DNA, 881 bp, Homo sapiens
aatgcccaggacatacaggcaccgtgctcagtcgcccaaaatacaccaaacacatctcttcacgtcccaccagagtgtgacagtcattatctttctttgttatgtttattcaaatgtctggcttcccactctactgcaggctctataagaacagcagcctattctctgtgtccccagagctcaggtaccctggagatatttgttgaatgagcttatatgaggaagcagagggatatggtaaaggagcccagtgtatttattcagaagatctgagtgccagccctgctgcagaccacctatgtgacattaggaagcccctttcacaactattaaatgccctgtctcccaaaagcgattgcatggaagaggtgaggtctatgtaagggtcttttctaaactgtggtgtctgaattaatacgcactataggaatagccccaaactggaaacaaccctgacgtccttcaatgggcgaatggttaaacacaatgtgttacatccacaccacaggattctactcagcaatgaaagtaaatggactgttgatgcacacaacagtgcacagacctcatgcaagcttcgccaagtgaggaaagccaattgcagaaggtaacgactgtatgattmcactgatttaacattacggaaatgacaagattatagaaatggaaagcagagtagagttcccccaggggctaatgagcaggtgggggctgtaaaaaccaaacatgagggatccttgtggtgatggaaatgtcctatcttgagtgcaacgatgccaatatcctggttgtgatactgttcaatggttttgcaagacgatagcatggaggggactgaatactcccttgtatgatttcctgcaacttcatgtgcaaatctc

SEQ ID NO: 8530 - DNA, 637 bp, Homo sapiens
agggcagaagcctcaggacagcagaaacccttgctctgcattgcctggacctcgcttccccagcggaggagctgagctcctgacagccgcactcacagccttgctatttcaccttaacctycttctctttcttgccttatcatctacaagagcagctgtagtgcaacgccttctggaaatgagtccaggtcagagtcactgacctcctaacgtacctgtgcatggtgctgttggggccactttcttgtccacctgagaggcagcatctgtgcctgggaaatctgaggggcttgatccttgccatgtccccagttgtgagaaaagggatgtctgagaccatgagtgggggccgttggtggccaccatgagcatctctatgtcctactgtgccccttcccctgccagagcttgggtatagagtttgactgcaaatacatccagatgagcctcatcattgcatcgtcggtcctcttcctccacctccttgcatctgcccaggtgtgctgatcactcactggcctctgccattcctcctgtctggccgttgtgctttggcctggtagttaaaccacaacgtatttactcaagttcctttatctccagcctctgaggtttgaatgtcttcagcaccttttcc

SEQ ID NO: 8531 - DNA, 842 bp, Homo sapiens
caaagggagtttctcgaaaggaagcatccagagagcaagaatttgagaagcaggtggaaattgcatggccttttccaacctagcctcagaagtcacccagcatcactttcactctattctcttgttgaagcagttacaagcctgcccaaattcatgaggtagagacaaagaccccacctctggacagaagtgccaaagaatttggagccatgttttaaaatctcgagaatctggcctctggccagtctcccagatgcagactctgcttataggctcccacaaagtctcattgtatttggcatcgggctcagaccctagacccacaggaatgtgatgtgaatagttaatatcgaatatgttgtagtgcaacataggttgagaaccatttctcttaaccattccattgtacttctcttaagaggattttttgagagcctactgacacatgtgattaaaaatatatataacatataatatagamcagtacataggatgtgatttcagtgagttatattattatgtagagttttaaaatttaatatttgaacctttccctatattccataacatttatatatttagtttcatgtaatgttcattctccacttctctgtgtgtaacacaccgttaacacagcataagactctgatgaatcatagaagacatgacatagagaagccattatcctggatatctttgaataccatatttcttataaacaatttccactcagagccttaggaggcaatggttactgggaatagtctgggataatagaggctagtgacctcttgacgtgatcatttaagcttagatgaaaaaagcatctcaagtgctttaaa

SEQ ID NO: 8532 - DNA, 739 bp, Homo sapiens
  misc_feature (1)...(739): n = A,T,C or G
caaccttggggacccccgaagcgccccgggcgggaatcgggtgggacgcggcacgcaggagggaacgggtgtactgggtggggtgggcgtgrcgctgtcaccgcaggagatcgggcgggtagggcggacctgggatgcgggatagagggggcgcggcattcgcgcgagagggacgcggtgcgcaaccggctgactaggggccgcaacgcctagcgcgcgcgacaaactacgcagcggcggagacaactctcaagggatagggccatcagccctgcggccctggcaggtccctaccaaagatcttggaagatgccgtttggggcactaaggggacctgaagtcctccccaggctcattcccgcctgggggccttggctctgggaaggcacgcaaggtaaagggagcgcaacggaaactcaccgtccatggtctcccgcaccgcattcagattcgccgccgcggccgccgccgccgncccagcaccgctgctactcgccatggctaaggccgagggaggcgggagaagggcctgacccggaactggagcgccttcctctctccgaggcaatcacacagcgcgtctcggcccacgccgggcaggctcgccccctcgcgctcgccgccggngtgaggctgcgttgatttgaatttggagccacgttcctctgcgcggaacgtggagcgaggagttgccattcgaatttcctacgcggcctccgtgcgattggctggttcgcgg

SEQ ID NO: 8533 - DNA, 739 bp, Homo sapiens
  misc_feature (1)...(739): n = A,T,C or G
caaccttggggacccccgaagcgccccgggcgggaatcgggtgggacgcggcacgcaggagggaacgggtgtactgggtggggtgggcgtgacgctgtcaccgcaggagatcgggcgggtagggcggacctgggatgcgggatagagggggcgcggcattcgcgckagagggacgcggtgcgcaaccggctgactaggggccgcaacgcctagcgcgcgcgacaaactacgcagcggcggagacaactctcaagggatagggccatcagccctgcggccctggcaggtccctaccaaagatcttggaagatgccgtttggggcactaaggggacctgaagtcctccccaggctcattcccgcctgggggccttggctctgggaaggcacgcaaggtaaagggagcgcaacggaaactcaccgtccatggtctcccgcaccgcattcagattcgccgccgcggccgccgccgccgncccagcaccgctgctactcgccatggctaaggccgagggaggcgggagaagggcctgacccggaactggagcgccttcctctctccgaggcaatcacacagcgcgtctcggcccacgccgggcaggctcgccccctcgcgctcgccgccggngtgaggctgcgttgatttgaatttggagccacgttcctctgcgcggaacgtggagcgaggagttgccattcgaatttcctacgcggcctccgtgcgattggctggttcgcgg

SEQ ID NO: 8534 - DNA, 739 bp, Homo sapiens
  misc_feature (1)...(739): n = A,T,C or G
caaccttggggacccccgaagcgccccgggcgggaatcgggtgggacgcggcacgcaggagggaacgggtgtactgggtggggtgggcgtgacgctgtcaccgcaggagatcgggcgggtagggcggacctgggatgcgggatagagggggcgcggcattcgcgcgagagggacgcggtgcgcaaccggctgactaggggccgcaacgcctagcgcgcgcgacaaactacgcagcggcggagacaactctcaagggatagggccatcagccctgcggccctggcaggtccctaccaaagatcttggaagatgccgtttggggcactaaggggacctgaagtcctccccaggctcattcccgcctgggggccttggctctgggaaggcacgcaaggtaaagggagcgcaacggamactcaccgtccatggtctcccgcaccgcattcagattcgccgccgcggccgccgccgccgncccagcaccgctgctactcgccatggctaaggccgagggaggcgggagaagggcctgacccggaactggagcgccttcctctctccgaggcaatcacacagcgcgtctcggcccacgccgggcaggctcgccccctcgcgctcgccgccggngtgaggctgcgttgatttgaatttggagccacgttcctctgcgcggaacgtggagcgaggagttgccattcgaatttcctacgcggcctccgtgcgattggctggttcgcgg

SEQ ID NO: 8535 - DNA, 670 bp, Homo sapiens
ggtggaggggaggtcttggcgaaaggaggatttttggaggaaaggggaccccaggcagttaatttcctagcccctgtcaatcatacttctctggctaggactcatgtgcaagaaaggcacaagcttcctcatctcttacctgcttgctacaaagaattgtttaatagcaactgtagttggatagggtatccgaagaatgttcatagtgttgagacatgagatgatgaatttaaaaaaaattgtagytataagtcctttagttgagaagagatctgggcctgttgtaacctttagtttcctcagaggcagatctgaattcattcatatttgattgctgcgtataagccacttcacttctctgagcttaatactttcgcaaaataatatcactagtaagttactgctatagctttcaaggttgtttcgaggatcagttgagaacatttatatgtgatactttttttgtaagctgtatcatagccccaagagtgtgaggttttgagttgttttttgtgacacatttgtcgagtacattttaatagttaaaattaatatctatgggactttgtaattttaacatgcatactcttgatttctttttagttttctctctgtgctatgggagatgtcaaggaatcaaagatgcaaataacaccagaaactccaggaa

SEQ ID NO: 8536 - DNA, 772 bp, Homo sapiens
ttttaacatattgctgaagaagtcaaaggaggaattattgccacaagttttatccaaaaaaagtaaccctcaaaggtattgccagtgacatttttaagtaaatataattcagaaaattcaaagctactgtaatatatttaatgtcccataagaaagtaaattttatatgaatcgatttgcaaatccatagtaattttcttgtatataatacaaatactatatttgtcacaaatattttatatgtataaatgtatccatagcaacctaaattataatttcatctatacatccttcttggaaacgactcaaagatatcgtttgaagcaatgtttaattcagctttgttctcttttggataaaataagaacttgaaatttcaaatgaagcctacagtttaggaggctgaagtgggcaattaattacgcttttctgttttgtgaaagcttcttctctatagtcattcaaggaatacttgctgtgtacctactatgcgccagaaatagttctaagcagtgggcaaatccagcgaacgctggcaaggaaatcccgctctctagaactcaccctccagtggggtgatacaaacacaaatgacaagtaaaatatacggcatgttacagggtggtaagygctagaaagaaaaataataagaaaaaaaaaactacgaagtgcgggagaagcgtggcaactttaaacagggtgaccagggaagaattcgcaaccaaggtgacagctgagtgcagagctgacagaaagaagagaggaaggcacg

SEQ ID NO: 8537 - DNA, 772 bp, Homo sapiens
ttttaacatattgctgaagaagtcaaaggaggaattattgccacaagttttatccaaaaaaagtaaccctcaaaggtattgccagtgacatttttaagtaaatataattcagaaaattcaaagctactgtaatatatttaatgtcccataagaaagtaaattttatatgaatcgatttgcaaatccatagtaattttcttgtatataatacaaatactatatttgtcacaaatattttatatgtataaatgtatccatagcaacctaaattataatttcatctatacatccttcttggaaacgactcaaagatatcgtttgaagcaatgtttaattcagctttgttctcttttggataaaataagaacttgaaatttcaaatgaagcctacagtttaggaggctgaagtgggcaattaattacgcttttctgttttgtgaaagcttcttctctatagtcattcaaggaatacttgctgtgtacctactatgcgccagaaatagttctaagcagtgggcaaatccagcgaacgctggcaaggaaatcccgctctctagaactcaccctccagtggggtgatacaaacacaaatgacaagtaaaatatacggcatgttacagggtggtaagcgctagaaagaaaaataakaagaaaaaaaaaactacgaagtgcgggagaagcgtggcaactttaaacagggtgaccagggaagaattcgcaaccaaggtgacagctgagtgcagagctgacagaaagaagagaggaaggcacg

SEQ ID NO: 8538 - DNA, 772 bp, Homo sapiens
ttttaacatattgctgaagaagtcaaaggaggaattattgccacaagttttatccaaaaaaagtaaccctcaaaggtattgccagtgacatttttaagtaaatataattcagaaaattcaaagctactgtaatatatttaatgtcccataagaaagtaaattttatatgaatcgatttgcaaatccatagtaattttcttgtatataatacaaatactatatttgtcacaaatattttatatgtataaatgtatccatagcaacctaaattataatttcatctatacatccttcttggaaacgactcaaagatatcgtttgaagcaatgtttaattcagctttgttctcttttggataaaataagaacttgaaatttcaaatgaagcctacagtttaggaggctgaagtgggcaattaattacgcttttctgttttgtgaaagcttcttctctatagtcattcaaggaatacttgctgtgtacctactatgcgccagaaatagttctaagcagtgggcaaatccagcgaacgctggcaaggaaatcccgctctctagaactcaccctccagtggggtgatacaaacacaaatgacaagtaaaatatacggcatgttacagggtggtaagcgctagaaagaaaaataataagaaaaaaaaaactacgaagtgcgggagaagcgtggcaactttaaacagggtgaccagggaagaattcgcaaccaaggtgacagctgagtgcagagctgacrgaaagaagagaggaaggcacg

SEQ ID NO: 8539 - DNA, 833 bp, Homo sapiens
aaaaaaagaatccataatcagctacagctacttaatgtagagcttatttgccaggtagtattctaagcactttgcatatgttaactcttttaatcctcagcacaatctcaccagataggtaatttaatcttgcccattttacagatggaaaaaccaagacacaggggtatgaagagtcttgcccaaggttacttagtttacaagaaaggccacattagaatctcttgtgtaaaactggaagggcttcagaaattctgctcttaatcataggccatactgcttgtgagagaagagatctgtgtgtgtgatcacctcgttaaacccccttcattttatatatggaaaaacamggcacgcttagggtggagctgccatagagccaaggctactgctcctggtttgagacgcagtggtatcatgttagctaggcactaaagggttaggcaggacaaactcagagtcattcacttacacaggggaccattttttcttagaaattattattattatttttgaacctgggatatgagtcaggtcaaaatgcatagatggtggagggggggctgttaaaaagaagaaaatgaggatgcaggcaataaaattagttggggatttgggagttcatagaagtaaagtgaaataatatgcaagcatgtccatgaaatattgcctgtttcatttttcattatgtattatcagaagatttcaagggaactaaatttgtagaaagatcttgcttgaagtcagaatggttctttttctgtgagaaactattaggtgttccacattcctcttctgtgtcaccattgtgtctaaggaggaagggagtggat

SEQ ID NO: 8540 - DNA, 664 bp, Homo sapiens
gggatccaccgctcctgtgtgaccgaaagcaggccactccctctgctgagcaccaggctcttcacttctgcatgaagtcctggctccaaccccatctcaacatgccatgaaaatagataaggaggaaaaaaacacacaggaaaactccttgcccagtaaagaagtgatggttagycaccccgtggatagtctgcaggctccaggccaaatcatgccaagtgggaaattgtctcatatagccaaatccttctttcaaattttatttatggccatcaagctctaacagttattgtgtgctcccacaacatgcagaccaccgtgacaggactgtgagaaggacaaaaggaatcaagacacaaagccgtgaaggcatcatttgtgggtcagtttcaccatctgcccactcagttcctttcacccacgtgggaggggcccctttcccctctcttccctgctcattgctgtcacggttcttatttccttctgtcttcctctgaccccactcctcatatcaaaatctgctttccaaaaaaaagactctggtgcttattcatagtacggtgcaaatgactgatagctcaaaattccctagagaaccttacaatttcctaaagctcaaggtctttaagcaatgaggctgctctagtgggatttctgccatgat

SEQ ID NO: 8541 - DNA, 664 bp, Homo sapiens
gggatccaccgctcctgtgtgaccgaaagcaggccactccctctgctgagcaccaggctcttcacttctgcatgaagtcctggctccaaccccatctcaacatgccatgaaaatagataaggaggaaaaaaacacacaggaaaactccttgcccagtaaagaagtgatggttagtcaccccgtggatagtctgcaggctccaggccaaatcatgccaagtgggaaattgtctcatatagccaaatccttctttcaaattttatttatggccatcaagctctaacagttattgtgtgctcccacaacatgcagaccaccgtgacagractgtgagaaggacaaaaggaatcaagacacaaagccgtgaaggcatcatttgtgggtcagtttcaccatctgcccactcagttcctttcacccacgtgggaggggcccctttcccctctcttccctgctcattgctgtcacggttcttatttccttctgtcttcctctgaccccactcctcatatcaaaatctgctttccaaaaaaaagactctggtgcttattcatagtacggtgcaaatgactgatagctcaaaattccctagagaaccttacaatttcctaaagctcaaggtctttaagcaatgaggctgctctagtgggatttctgccatgat

SEQ ID NO: 8542 - DNA, 664 bp, Homo sapiens
gggatccaccgctcctgtgtgaccgaaagcaggccactccctctgctgagcaccaggctcttcacttctgcatgaagtcctggctccaaccccatctcaacatgccatgaaaatagataaggaggaaaaaaacacacaggaaaactccttgcccagtaaagaagtgatggttagtcaccccgtggatagtctgcaggctccaggccaaatcatgccaagtgggaaattgtctcatatagccaaatccttctttcaaattttatttatggccatcaagctctaacagttattgtgtgctcccacaacatgcagaccaccgtgacaggactgtgagaaggacaaaaggaatcaagacacaaagccgtgaaggcatcatttgtgggtcagttycaccatctgcccactcagttcctttcacccacgtgggaggggcccctttcccctctcttccctgctcattgctgtcacggttcttatttccttctgtcttcctctgaccccactcctcatatcaaaatctgctttccaaaaaaaagactctggtgcttattcatagtacggtgcaaatgactgatagctcaaaattccctagagaaccttacaatttcctaaagctcaaggtctttaagcaatgaggctgctctagtgggatttctgccatgat

SEQ ID NO: 8543 - DNA, 664 bp, Homo sapiens
gggatccaccgctcctgtgtgaccgaaagcaggccactccctctgctgagcaccaggctcttcacttctgcatgaagtcctggctccaaccccatctcaacatgccatgaaaatagataaggaggaaaaaaacacacaggaaaactccttgcccagtaaagaagtgatggttagtcaccccgtggatagtctgcaggctccaggccaaatcatgccaagtgggaaattgtctcatatagccaaatccttctttcaaattttatttatggccatcaagctctaacagttattgtgtgctcccacaacatgcagaccaccgtgacaggactgtgagaaggacaaaaggaatcaagacacaaagccgtgaaggcatcatttgtgggtcagtttcaccatctgcccactcagttcctttcacccacgtgggaggggcccctttcccctctcttccctgctcattgctgtcacggttcttatttccttctgtcttcctctgaccccactcctcatatcaaaatctgctttccaaaaaaaagactctggtgcytattcatagtacggtgcaaatgactgatagctcaaaattccctagagaaccttacaatttcctaaagctcaaggtctttaagcaatgaggctgctctagtgggatttctgccatgat

SEQ ID NO: 8544 - DNA, 664 bp, Homo sapiens
gggatccaccgctcctgtgtgaccgaaagcaggccactccctctgctgagcaccaggctcttcacttctgcatgaagtcctggctccaaccccatctcaacatgccatgaaaatagataaggaggaaaaaaacacacaggaaaactccttgcccagtaaagaagtgatggttagtcaccccgtggatagtctgcaggctccaggccaaatcatgccaagtgggaaattgtctcatatagccaaatccttctttcaaattttatttatggccatcaagctctaacagttattgtgtgctcccacaacatgcagaccaccgtgacaggactgtgagaaggacaaaaggaatcaagacacaaagccgtgaaggcatcatttgtgggtcagtttcaccatctgcccactcagttcctttcacccacgtgggaggggcccctttcccctctcttccctgctcattgctgtcacggttcttatttccttctgtcttcctctgaccccactcctcatatcaaaatctgctttccaaaaaaaagactctggtgcttattcatagtacggygcaaatgactgatagctcaaaattccctagagaaccttacaatttcctaaagctcaaggtctttaagcaatgaggctgctctagtgggatttctgccatgat

SEQ ID NO: 8545 - DNA, 773 bp, Homo sapiens
tcagctgggaagcagtgaagctggaatgaagtgcgaagaaatcatcacaaagtgaggagcagaaaagcacatggaagaacaaggcaagtgcacgagcacctgagaacatggatattatacacacatgtaagtcccttgattggcagcgggactgggaagtgtagggtcacaaagcctgtctccccagccagctgtctgtcctcttcttccaaacgaagtcatgtaaagcaggaacccccaatcacacagccctaggtggctctgtgcctggggccattggcccttccagacaactagtactgcaagaatgcaaargcagaggacacaagcctgccttccaggggcatataatctagttgggtagataatgaaaatacaccatgtgactcagccctgacagtcaataaacaggctaagaattcagggtaatccaagaaggctttgcagaggagaggggattgaagccaagcgtggaaggagggtaggaaggtggaaggtgttccaggcgaggggagctccttcagctaaggtttgcaggtggaaaagagcagggcaggagaccagcattgggggctgtgtgaggtgagtcctggtgaccgagggtcccaggcagcacatggggctttgtgaatagggctggggctccctgcctcaggtgccggtcctgccccctacactctggcttattcatcatcccaccctccaggttctcaccaggtggacaaaacacagcatgatttctgctcctcaacagccatcaacgttctaactgg

SEQ ID NO: 8546 - DNA, 773 bp, Homo sapiens
tcagctgggaagcagtgaagctggaatgaagtgcgaagaaatcatcacaaagtgaggagcagaaaagcacatggaagaacaaggcaagtgcacgagcacctgagaacatggatattatacacacatgtaagtcccttgattggcagcgggactgggaagtgtagggtcacaaagcctgtctccccagccagctgtctgtcctcttcttccaaacgaagtcatgtaaagcaggaacccccaatcacacagccctaggtggctctgtgcctggggccattggcccttccagacaactagtactgcaagaatgcaaaggcagaggacacaagcctgccttccaggggcatataatctagttgggtagataatgaaaatacaccatgtgactcagccctgacagtcaataaacaggctaagaattcagggtaatccaagaaggctttgcagaggagaggggattgaagccaagcgtggaaggagggtaggaaggtggaaggtgttccaggcgrggggagctccttcagctaaggtttgcaggtggaaaagagcagggcaggagaccagcattgggggctgtgtgaggtgagtcctggtgaccgagggtcccaggcagcacatggggctttgtgaatagggctggggctccctgcctcaggtgccggtcctgccccctacactctggcttattcatcatcccaccctccaggttctcaccaggtggacaaaacacagcatgatttctgctcctcaacagccatcaacgttctaactgg

SEQ ID NO: 8547 - DNA, 789 bp, Homo sapiens
atgaaaattgttaacaggcttgttaactttcaagtagggtaaaatctcagacccttcgtagttcttgacacgcttgtggaaatatcttcttttttaaatcacgtgcatttataactctaattaaaataagaactacatttttaaaaagccttacaggtagtgataaaattaagacctataaagatggctaatcagcttttatatataactgatacaaatcaatgttctaaagcaggggtgttcaatcttttggattccctgggccttattccctggaaaaagaagaagtgtttttggccacacataaaattcactaacactaacaatagctgatgagcttaaaaaaaaaaaaatcacaaaaaaaatctcatgtattaaagtttacaaatgtatatcaggcagaattcaaagccatccttggcagtgagttggacaagcttgtcctaaagtcttgatcaagcacaaggggtcaggaatttccttttcaccaatcctattttctttttacaattccactcaccatttcatcccatatatatatatgtatttatttattttgagacggagtcttgctctgttgcccaggctggagtgcagtcgcacaatcccagcttactgsaacctcagcctcctgagtagctgggattacaggcacacgccaccaatctggctaatttttgtatttttagtagacatggggtttcaccatgttagccaggctggtttcgaactcctggcctcaagcaatcctcccaccttggcctcccaaagtgctgggattacaggcgt

SEQ ID NO: 8548 - DNA, 839 bp, Homo sapiens
cataatgaaatttgatgcctctaagttagatgaaattaaataaaattaggtttcatctgtgtagtttacatacagaagaaaaaatatcagttctccatgcctgaattaatgacatgaaaagttctacagaatttttttcttgtaatcattawactactttgagacaaaatgtcatttaaataacccttgcatttcactcattaatgaaaatagtatttattagcacgttaacagaagaaaaagcatcctctttccccatgctctctctcccaaaggcacaccagggacacaccagctgacagcctgggggaagaactgacacctaccctttctgcctattgactttgcaggaaagatgaaatacaccctcagtctatgccacaaagcggaaaactgtaaatttgtcaggaggaaaagaatcaatatcgtgaaaatggccatactgcccaaggtaatttatagattcaatgccattcccatcaagctaccaatgactttttttcacagaattggaaaaaactactttaaagttcatatggaaccaaaaaagagcccgcattgccaagtcaatcctaagccaaaagaacaaagctggaggcatcacactacctgacttcaaactatgctacaaggctacagtaaccaaaacagcatggtactggtaccaaaacagagatatagaccaatggaacagaacagagccctcagaaataataccacacatctacaactatcttgtctttgacaaacctgacaaaaacaagaaatggggaaaggattccctatttaacaaatagtgctgggaaaactggctagccatatgtagaaagctgaaactg

SEQ ID NO: 8549 - DNA, 839 bp, Homo sapiens
cataatgaaatttgatgcctctaagttagatgaaattaaataaaattaggtttcatctgtgtagtttacatacagaagaaaaaatatcagttctccatgcctgaattaatgacatgaaaagttctacagaatttttttcttgtaatcattatactactttgagacaaaatgtcatttaaataacccttgcatttcactcattaatgaaaatagtatttattagcacgttaacagaagaaaaagcatcctctttccccatgctctctctcccaaaggcacaccagggacacaccagctgacagcctgggggaagaactgacacctaccctttctgcctattgactttgcaggaaagatgaaatacaccctcagtstatgccacaaagcggaaaactgtaaatttgtcaggaggaaaagaatcaatatcgtgaaaatggccatactgcccaaggtaatttatagattcaatgccattcccatcaagctaccaatgactttttttcacagaattggaaaaaactactttaaagttcatatggaaccaaaaaagagcccgcattgccaagtcaatcctaagccaaaagaacaaagctggaggcatcacactacctgacttcaaactatgctacaaggctacagtaaccaaaacagcatggtactggtaccaaaacagagatatagaccaatggaacagaacagagccctcagaaataataccacacatctacaactatcttgtctttgacaaacctgacaaaaacaagaaatggggaaaggattccctatttaacaaatagtgctgggaaaactggctagccatatgtagaaagctgaaactg

SEQ ID NO: 8550 - DNA, 839 bp, Homo sapiens
cataatgaaatttgatgcctctaagttagatgaaattaaataaaattaggtttcatctgtgtagtttacatacagaagaaaaaatatcagttctccatgcctgaattaatgacatgaaaagttctacagaatttttttcttgtaatcattatactactttgagacaaaatgtcatttaaataacccttgcatttcactcattaatgaaaatagtatttattagcacgttaacagaagaaaaagcatcctctttccccatgctctctctcccaaaggcacaccagggacacaccagctgacagcctgggggaagaactgacacctaccctttctgcctattgactttgcaggaaagatgaaatacaccctcagtctatgccacaaagcggaaaactgtaaatttgtcaggaggaaaagaatcaatatcgtgaaaatggccatactgcccaaggtaatttatagattcaatgccattcccatcaagctaccaatgactttttttcacagaattggaaaaaactactttaaagttcatatggaaccaaaaaagagcccgcattgccaagtcaatcctaagccaaaagaacaaagctggaggcatcacactacctgacttcaaactatgctacaaggctacagtarccaaaacagcatggtactggtaccaaaacagagatatagaccaatggaacagaacagagccctcagaaataataccacacatctacaactatcttgtctttgacaaacctgacaaaaacaagaaatggggaaaggattccctatttaacaaatagtgctgggaaaactggctagccatatgtagaaagctgaaactg

SEQ ID NO: 8551 - DNA, 3028 bp, Homo sapiens
ctggagcataaatgatcttcaagaaatacacacaggaagttgaacaggtgtataaacttcagagaagctctctggtctctcaaaaatccctgtgaatatctcagagcagctgagatgcctcattatccccggatgcctaattcattctcattattgtgacttcaatctttactatctcaacaaatatggatatccagccacttctcaaccccaaattctcaagaaaaagtgggatcatgagctgcatatttgatccaatgaagctttgtcaagtcctgggagtgtcatcttcttattttagatataactgtggccaaaatatttatctaccacatagctcatattttccttctccaagaacataacagttgccctgattaatatctcttttgaaaaactctaaaatgccaactactcactgtttccaattattcgaaggaaagctaacttccagagagtctatctgcatgtaattatttcaaatatttctaagtacttgggaggaagagctcttgaaattttagtctctgatcaccagtatatgaattcaagtgcctttgggacctaaagaaaacaagagtgttcatttgaaggagggagggtgggaaaaatagaaggaagtgtagtgtttagattcactggtttggaaagactttaaaaatatttatatcagtattgaggatttgtgtatgttttatttcttgtcatggctttgaagaagttatgtgtatatcctcaaagattttaagtattatttcatagagaatatggtactatttataaatacaaatgtatgagattacttttaattttgttttatttttgctgcatctctttgactgcatttttttaacttgatttcttctaaaccttgtgagcactctaataatacaggacagtggtttatgggacttctctgaaatgacatctggaaaaccaattaatgacatctcaggttgagcaagtatccatgctatggttcagatgtatcctagtctcctgataaagttaatatacaggtttaaagtacaatgataataattaataataataatatagctatgctatgtggatcctgaaaaaataaaagaaatagaaagttctccttcctacccataactatcagttcttcaaactctcaattcttcaaaaagctcacaatttctgtgcctttaaattttatcccagtcactgtatagtttaatgcattttaaaaattattcttcacaatgactctataaggtaggtaatagtatcatcctcatttcatagacttggaaactggacttagagagattagcaccttgccaaagttacaaggttgtgagtggcagagtcggaactcaaatctagccctggcctgaagcccgagccttatccactgtgatataccaccttgcctgtatcatccaagctgtccatgaaggctgacactgagaccaagttagcctgaacatagaggtaccattgggacttggagaggcaaaggcttaarttgctaacttcaaaggtatggacaacttctattgaatttgttgaagataatgaaatctagttcttcagcaatttagggaacactgtcagtattaaaatttggttttggttttgtctctatttttaagcaggtggcatgaagaaaatttcatttggagaacaaggactattatgtccatttagtttctactctgtgttgctaggtatgagaaatagagaagttaacaaaacatggttcttgcaccaaaacacataaacatgtgactaaagtgtctatttcactgggcaaatgatagttttgtcccttgagtctgcatttactattaacacctggccaatctccttagggttaataacccacaatggacccttcttggtctacactgctaaaatgagttctttcctatcatctgtgaggtattccttaatagcacccccaaaggacagtataagaatgcaaatacttggttcccttaagggttcctttccaagttttctgaatgaactgtggggttaattccaccccctccaaacgtttgccacttgtacacttctctccttccatcttctttgcagagcagccttatgcagaaaacaagctcaaaaatacagatttttctttggacaggatctacacccaactcccagtgaaacagaattctaggaggtgagagccaaactgggagaactgaccataaaaacacttgatccatcccttctttttaaaatggaataaccaagactttgaagaggtaagtggcttgcctgttgtcacagagaaataaacaacaaattcaaaacttgaacccaggtcatttatctttttctacaactataattcatgccaaatacaaatcctatggtcagagaagcccttgatgtgagctctggttcatcactttgcacaatgcttggaacaagtagattcctagcaaaagttgattaagcaaatatacgtgaatgagttcccagcttccactctacccctgcttacctcccgtaccagccctttctctcactgcatgtttccttcctgggctaaactacccagtaatgctaatgcaactcttacctgagcagcagcaacagggacagtatttccagaaatacatctggcagagacgaagactactctggagagctatttagtcagtgcattatcaggatatattttgctagctgacccctagatatggctacacagaggatgaagcaaggatgttttagtagtagaagttggtgacaaatcaagagcttagggaatagagagcagtgagataattgggccaaaccactcaaaaatgcaaaagctagagaaaattggtgggttaactgacttgcccaaggcaatacagctttttgacaccagaggagggatttgaactctgttgtcaggattcctagtctggcaactctgcatagtgctgctgtcacagtagaccagaagccatagtgcctagtttgggaggtgcttgcagagggataaggatggtgcagaaatgggctgggtgtggtggctcacgcctgtaatccc

SEQ ID NO: 8552 - DNA, 645 bp, Homo sapiens
cttgagcccaggagttcaagaccagcctgagtaacatagcaaaaccctgtctctacagaaaattttwaaaaattagctgggtgtagtggtatgcacctgtagacttagctgctcaggaggctgatgtgggaggatcacttgagcccaggaatttgaggttgcagtgagctatgattgtgccactgcactttagcctgggcaacagagcaagaccctgtctcaaaacacaacaaaaagcaaatcttaagtagaatgaaacagctaagttttcgattaggagataggatttaagagtagctattaacagaggctacattttatcttgaaataatattgaatgaactaggagtaaaaatgttatcaagcaaatgggctcactgcccgttacacactaaagccaaaaactatggcacctgcctttgacgaaaggctttattgcaagtggtcagcaaggagacaggagtgggctcaagtctgtctccctgatttagggtctagggcaatttttttttttttttttttttttgagacggagtctcgctctgtcgcccaggctggagtgcagtggcgcgatctcggctcactgcaagctccgcctcccgggttcacgccattctcctgcctcagcctcccgagtagctggga

SEQ ID NO: 8553 - DNA, 1290 bp, Homo sapiens
cctcttccctcactgcccctccccaccagccccccgagaaggcctcgtcacatcctggcatctggcagcagagaaaggatttcactcttgtacctgggctgcctgatattgctatgagagataactgtatacgaaccaataatctagcctgacaatccaatttactgaccaatagcgcacaatccaccatgtcatcggctgtggggaggcccataaattagttcctagtaatttattctgatcaatagaatgggcaaagtcacttgtctctttaatcaaaggccctctcagagatgtcagtgcaggcagctgcgtgggagggagcagggctctgtgagcaacaaggcagtgggtgctagcaccacactcctgccctggcttccagaacccagaagcctccccagaatggggctagtgtgggaggggcccaaggtccaggctgcctatgcttcccttggtcaccccaaccataaaacattggctttcaaacaagctaaggacagaagaggccatgayagtaattaacaagagataagctccagggaacactgtacagggccccaacaatgtctgattttttctgaatgttcagaatcttccttcctctcctggtcacggggccctaccaacgcttgtgctgatgcttctataaagagaaggatcctagccccgtgggtaagagccagactgcctggctttgaatggtgactctgccattagctacgtggcctcaggcaagcttcttgcctttctgtgattcactttcctcatctgtaaagtggaactaataacagtacctacctcagggttattaagaagatttagtaaattaattatatgatatataataagttaatataaaattaaactaataaatgaatatacaaagtgcttagaatagtgcctgacatgcagcaagcactatattgagtgtttgttaacataaacaaacagagatcaagggaaaacattgatgtgcttctctctgaagatgtgccaagtccttgagatggtcttcctgacaactttgactgtttcctacccgtcttcacctcttgtcctccttgtccaaaataaatagataaaggaagagtgtgttgatgttagctctttgaagtgacagggaaactccaaaggccgccgtgcaaggttttccccttatctgggccctctggcagagccagtgtgtcagccttggggaaacagaccgattttgctttagagaaaataggcctgatgttagacagcagggagggaaaggaaggtctgttacctgtgctggctgcaggg

SEQ ID NO: 8554 - DNA, 831 bp, Homo sapiens
gtcccttcgcggccaggcatggtggctcacacctgtaatcccagcactttgggaggctgaggagggtggatcacgaggtcaggagtttaagataagcctgggcaagatggtgaaaccccgtctctactaaaaatataaaaattagccagacgtggcctgggcgacagaacgaggcacgatctaaaaaaaaaaaaaaaaaattagccaggcatggtggtgggcatctgtaatcccagctattctggggggcagaggttgcagtgggtcgagattgcacattgcactccagcctgggcgacaagagctaaactccatctcaggggggraaaaaaagaagtctcttcaggctctgacgctctgaaattctgtatgaatcagtgaaggagtctgttggctttttcttgatccccctcaaccctgtactccccacaataatcatctgaaagactctgaaaccaagttagtagcccagagaaatctgcagtgtctcaggaatattacagtcactaaacggaactaatgttatttgcagaacagggatggggtgagagccaactcattcgggattgggattcctgaacccctggcccccaactgtaactaggttcctggatgtgcaaagggccaggggtctctgttctgccttcaaggtcaaaaccaggacttctgattcttgggaaccttggaggcctctttgttcaatcattagcccttagggctacctcatggcagggaagcccatgctaaaggcaaacactcactgaggcgcagaggggaaactgagccaaaatcacgcccaaaacttaagactccagtgactgtccttggatc

SEQ ID NO: 8555 - DNA, 831 bp, Homo sapiens
gtcccttcgcggccaggcatggtggctcacacctgtaatcccagcactttgggaggctgaggagggtggatcacgaggtcaggagtttaagataagcctgggcaagatggtgaaaccccgtctctactaaaaatataaaaattagccagacgtggcctgggcgacagaacgaggcacgatctaaaaaaaaaaaaaaaaaattagccaggcatggtggtgggcatctgtaatcccagctattctggggggcagaggttgcagtgggtcgagattgcacattgcactccagcctgggcgacaagagctaaactccatctcaggggggaaaaaaaagaagtctcttcaggctctgacgctctgaaattctgtatgaatcagtgaaggagtctgttggctttttcttgatccccctcaaccctgtactccccacaataatcatctgaaagactctgaaaccaagttagtagcccagagaaatctgcagtgtctcaggaatattacagtcactaaacggaactaatgttatttgcagaacagggatggggtgagagccaactcattcgggattgggattcctgaacccctggcccccaactgtaactaggttcctggatgtgcaaagggccaggggtctctgttctgccttcaaggtcaaaaccaggacttctgattcttgggaaccttggaggcctctttgttcaatcattagcccttagggctacctcatggcagggaagcccatgctaaaggcaaacactcactgaggcrcagaggggaaactgagccaaaatcacgcccaaaacttaagactccagtgactgtccttggatc

SEQ ID NO: 8556 - DNA, 826 bp, Homo sapiens
acccacaggaggtactaaaggacaagccacaagaggttttgtccttgggagaacaaatataccaggcaaattcccatttattttctgctagtctccattaggaaaagctgcagacaagacagatactatgtgtttctttcacctccacacgctgcctgtctttacttaaaattctttctttctgcctatccattcattgctagttacaattttctgtaacaatgggctgccatttaatttctctcctctaagcctaactgttcctcaacccaaggactcactgccatgaagcattattttacagtgtggagaagcacctggctctcccaaatggtctttcatttgcactgatcaacaagaacaacaaaagcctygtgtcagaggtacaaggcaaccgctttgtctgaaaccacccactcgtcttttgttttcttccacagcacactgtgcattatgttccacgtgctcctctctggggctctgcagatgtgaaactttaaatgcagggtatttaaaaataataaggaatatagaaaaaaaagcaccctgaaaattacagagctttgtagtgaagcagcatgcggccctctaaagagctatgtttatcaagagttcagatgctttccgtgttgctgattagagtgagctggatgacagaggaaggggtcagagggcaaggaagttaaatatcaacattggaaagcacctgaaaaccagcgctcctggaccctgctccttttcataggagatacattaagcggaaatacagttgtcggggagccctggatcactgactgcttaaggaccacgctgtaatgaaggcctt

SEQ ID NO: 8557 - DNA, 588 bp, Homo sapiens
attcaggacrcttcattccttgatggagccctagctgctcagggcactcagggaaactttattttgttcaacataagaaaagagtcagttgtgggaggccgacgcaggcggatcaactgaggtcaggagtttgagaccagcctggccaacctggcaaaactccgtctctactaaaaatacaaaaattagccgggcataatggcgggcacgtgtaatcccagctacttgggaggctgaggcaggagagctgcttgaacctcaaaggcaggggtagcagtgagccgagatcatgccactgcactccagcctgggcgacagaggaagactccatctcaacaacaacaacaacaaaaaaaaaaaaaaaaaaaagaggagaaaagagtcagttgggtaaggggaggattatttcaaggaaaagggaagttaagaaagaatagaactggcagtgtgtggtggctcacgcctgtaatcccagcactttgggaggccgaggcgggtctaacacgaggtcaggagttcgagaccagcacagccaagatggtgaaaccccttctccactaaaaatacaaaaattagccgggcatggca

SEQ ID NO: 8558 - DNA, 588 bp, Homo sapiens
attcaggacgcttcattccttgatggmgccctagctgctcagggcactcagggaaactttattttgttcaacataagaaaagagtcagttgtgggaggccgacgcaggcggatcaactgaggtcaggagtttgagaccagcctggccaacctggcaaaactccgtctctactaaaaatacaaaaattagccgggcataatggcgggcacgtgtaatcccagctacttgggaggctgaggcaggagagctgcttgaacctcaaaggcaggggtagcagtgagccgagatcatgccactgcactccagcctgggcgacagaggaagactccatctcaacaacaacaacaacaaaaaaaaaaaaaaaaaaaagaggagaaaagagtcagttgggtaaggggaggattatttcaaggaaaagggaagttaagaaagaatagaactggcagtgtgtggtggctcacgcctgtaatcccagcactttgggaggccgaggcgggtctaacacgaggtcaggagttcgagaccagcacagccaagatggtgaaaccccttctccactaaaaatacaaaaattagccgggcatggca

SEQ ID NO: 8559 - DNA, 794 bp, Homo sapiens
cttcatagtctatattatctttctattatcttccacactcctcctgcaccaatgcattctgtgctccttctacagtgacctcttggctgttaaccaaaatatgtcatgcttgggtttctgtgtgtgctgttttttctccatgaaatacctggcaagtttctatctgcctttttggagtatgtagaggttccagccttaaaacctacagacatgtagaaggatctacacatatatacatttcaagggatcaacttttaggtacatgcattttttttctgagtatgctatgaccctcaaaatattagggaccactattttggactcagtgtaaccaccctttccattgtaaagtcttcactttttagtgatgctcttarccattgaatatcatgtaacatataacattttctttaatatttttaagcaggcaagataactgttgctttcagcaggaaatcaatgggtcaaagtgggattctaagcaggctaactcctgtatgaagtgggttcagagaagaatctagtgctcaagcacagccccatttgatgaatgccttgaaaatgcatgatcaaaatccactcccctaatttttcttttctttctttctctttctttctctctttctttctttctttctttctttctttctttctttctttctttctttctttctttctttctctctctttctttctttctttcttctttccttccttcccttccttccttccttccttccttccttacttccttccttccttccttccttctttctttcttttttttttctttc

SEQ ID NO: 8560 - DNA, 1150 bp, Homo sapiens
tcattccttgcagaaagtcacacctatgtagacaaggtaaaaaatattgagagaacttaccatgtgccaagcactgttctaagcacttttacatatattaactcatttagtcctcaaaacaaaaacatgaggtagatactattggtccacagtccctttccaaaaatctcaagcttagattccataatcatacatattattaattctgcaggaaaaaaatgtaaatattcaaaccaagagatagacaaaatcaatacataacttcttgtcaggtcattgtcaccaaatgaattcaggtaggttaggttttgctgcctaggggttatgaaaatttttttggtcgtgaaaacattttggatccccattttatggatgagaaaactcaggcacaaagcagataagtaacttgcccaagattacccagctcattgtatccagacctacgctcttaactacatccagcactgcctcacaatttagattttccagatgccagcagcaaaagcctagagagaaccccattatctcttcttagattcagattcatttctagtcaaatggtatttgggaggagagtgggatcactgtgtaaaaacaaggttgcctaggcaccccctcctttatggccacggagtawggaatagtttgtttagaagactatacagatggggagacaatgactgtacttttagccaaatactcacttaataattttaagaaagcacagaccaggcaggcaagaaatcagactggaatgagataaattagtgctagttctacctgtgatgcttttttggatttctggtcctttggggattgaagaaattggatggaagatgaataattcgtgaaacacaaaaataaatgatcagcaaggtgcccttgtgttatctgtgggcttacgtgaggctaatttatagaatataggtatccatttccttacattatgacttttaaaagcatcccaatccaacattaagctctccaagggaaaaaacaatgggagattcagtcattgacaacattaataaaatgaaaagatttgtcttttccatgtgaaatatagcacatttgaaggcataaagcacacagacaattcatattttgcaaaagcatacagatgttgaatgacaaactgctccatatggcc

SEQ ID NO: 8561 - DNA, 1150 bp, Homo sapiens
tcattccttgcagaaagtcacacctatgtagacaaggtaaaaaatattgagagaacttaccatgtgccaagcactgttctaagcacttttacatatattaactcatttagtcctcaaaacaaaaacatgaggtagatactattggtccacagtccctttccaaaaatctcaagcttagattccataatcatacatattattaattctgcaggaaaaaaatgtaaatattcaaaccaagagatagacaaaatcaatacataacttcttgtcaggtcattgtcaccaaatgaattcaggtaggttaggttttgctgcctaggggttatgaaaatttttttggtcgtgaaaacattttggatccccattttatggatgagaaaactcaggcacaaagcagataagtaacttgcccaagattacccagctcattgtatccagacctacgctcttaactacatccagcactgcctcacaatttagattttccagatgccagcagcaaaagcctagagagaaccccattatctcttcttagattcagattcatttctagtcaaatggtatttgggaggagagtgggatcactgtgtaaaaacaaggttgcctaggcaccccctcctttatggccacggagtaaggaatagtttgtttagaagrctatacagatggggagacaatgactgtacttttagccaaatactcacttaataattttaagaaagcacagaccaggcaggcaagaaatcagactggaatgagataaattagtgctagttctacctgtgatgcttttttggatttctggtcctttggggattgaagaaattggatggaagatgaataattcgtgaaacacaaaaataaatgatcagcaaggtgcccttgtgttatctgtgggcttacgtgaggctaatttatagaatataggtatccatttccttacattatgacttttaaaagcatcccaatccaacattaagctctccaagggaaaaaacaatgggagattcagtcattgacaacattaataaaatgaaaagatttgtcttttccatgtgaaatatagcacatttgaaggcataaagcacacagacaattcatattttgcaaaagcatacagatgttgaatgacaaactgctccatatggcc

SEQ ID NO: 8562 - DNA, 793 bp, Homo sapiens
aaaaggaacccaaactaattatgactaaggttatgctgtccaggcatgacagtctccactcagaagaggtgagagcacttagacaaattatttataccaactacctttggaatttgaggactggtcatgtggcaggccaggtctcactaatacaggcctccataacaactctctcagcactgactgagggggtaagtcaaatattaaaagtggaaagagccagcacccttctacaaaggctggaatgtaacagaagtccaccaagagttttgcctaggcctttcctgggcatgacaagataacgaagcaattcttaagaggaccgatttaggacaaacaagtttattggggctctgaagaaactccccaaacctccatgatttagcccaagacaagatgagggtaaccatctcagcactcagacccatttagattaagtaatctgactgagactcyagaggaaggtcttcaggactcagattttagttacaggttagaagaagttagtcacttatgtctatagatgaatgcacacttacacgtagacataaagcttagaaggtaagctttagatattggaaaactctgtaattttgtgttggactggtgatattttccaggccttctccctgtacccggttgtagaaataaactcccttcttccccagttcatctgcatcttgttattgggctatgagaataagcagcctggcccttggtttagtctgggaacagccatgtgacagcaaagggaagcagagacatgacagaaggccaaacaggacatgatccc

SEQ ID NO: 8563 - DNA, 812 bp, Homo sapiens
ttctccttcttcatataaaatgcatttgactgtgccacacagcacatttgggttgagggagaatgttgcagggaatgcaattttttctttgtaagaaaaggtcaagagctagcatgcagagattacatcaacgataaatttttggattcacttgttatttgaaattctctaaaataaaacaaccacaaagaaacaccagcaatacctaaaatacatgcctcagcaagctgacaagcaccgccaccactgtggcaccaactcccttccaacccacaatgacaggccacaaacaggcacccagagtcccggcagctcagagatggagagatmatgtttccacaacaagtctggaaagaaggagaaaaactggagggtagacatcagtgatcagctgttttccaaaggtgactgagagtgacaagcgcttaaaagaacaccagtttttaatgctaatctgatttccagtctcacctaacacctcaggctatagtagaactatctttctttccaagtagcgtttcctctctcacattctttccccagcgggaatcttctctgattttagatcattttagccttctttggttcccacatgttgaacacctagcaaagccttccttctcaggcacacgacccagcggggtgctccccaaacagccattgtctttgtcttaatatcacaaccaaagcaaggtctttatttccctgaatctgatctatcttaaaagcctccttccgcttctggtttcaattgctcacaatctattcaaaacacttgaaagcatcactttgtcatgatatttcctttctta

SEQ ID NO: 8564 - DNA, 812 bp, Homo sapiens
ttctccttcttcatataaaatgcatttgactgtgccacacagcacatttgggttgagggagaatgttgcagggaatgcaattttttctttgtaagaaaaggtcaagagctagcatgcagagattacatcaacgataaatttttggattcacttgttatttgaaattctctaaaataaaacaaccacaaagaaacaccagcaatacctaaaatacatgcctcagcaagctgacaagcaccgccaccactgtggcaccaactcccttccaacccacaatgacaggccacaaacaggcacccagagtcccggcagctcagagatggagagataatgtttccacaacaagtctggaaagaaggagaaaaactggagggtagacatcagtgatcagctgttttccaaaggtgactgagagtgacaagcgcttaaaagaacacyagtttttaatgctaatctgatttccagtctcacctaacacctcaggctatagtagaactatctttctttccaagtagcgtttcctctctcacattctttccccagcgggaatcttctctgattttagatcattttagccttctttggttcccacatgttgaacacctagcaaagccttccttctcaggcacacgacccagcggggtgctccccaaacagccattgtctttgtcttaatatcacaaccaaagcaaggtctttatttccctgaatctgatctatcttaaaagcctccttccgcttctggtttcaattgctcacaatctattcaaaacacttgaaagcatcactttgtcatgatatttcctttctta

SEQ ID NO: 8565 - DNA, 794 bp, Homo sapiens
  misc_feature (1)...(794): n = A,T,C or G
aattgtcaaggctgctctrcccaagtcctggctgtgtcacactcgctgcccaacttgtcctccactttcctcattgcttgttcaaaaccttcccttccctctaggtccacctttaggcctgcttttttccaggtggtcctctttctgcaattccagccttcagcatcatccctgctctggactcctgtagcatttaaagaattggttatctgtttggcattcagcacgcagttttctattattatttgctcccttcaattctgcacaataaataataagtgaagcatccactgaggataaagcagagtcttgaagacagtagaatttacttataaatatgaaaaaaaaggtctcttctttatgccccaattttctaactctaaaaagaatggtggaagctacaggaaattcagagagccttggtcccaaaaggcttgagggataaaggtctactagagataggtagctccccaagcaggatgaagatagannnnnnnnnnnnnnnnnnnnnnnnnnnnnnnnnnnnnnnnnnnnnnnnnnnnnnnnnnnnnnnnnnnnnnnnnnnnnnnnnnnnnnnnnnnnnnnnnnnngtgtcctgctgtcatcctcaggaggcaatcagtcccagcctctcccaccatcttccctgcagcgatttcttcgagctcgaaacatctctggcgttgttctggctgaccactctggtgccttccataacaagtaagaatcacttggccctgcaccctcttcattcttgaagagagtctattctgcagtctgggaggaaggtcact

SEQ ID NO: 8566 - DNA, 675 bp, Homo sapiens
caaacttagctaagaaaatatctgagcacatccagaattaaatatcacaagttgttggaccaacaccttcaccatatctacagatgagtccctgacactcacatggagctgattgactctgatttgactcrtaattctaacagtttctgttttcagcttagtctacggcaacaaaataatagtacaggacccactgcagattggtgtagtaatacaagagatgtgaccagagatgagaagaaagagacccaaaaaatgatcagaagcagaaatgggagcccagaagtgcagctgaccagaagcatttcagtgtcagatcacacgcagcctcctctgtaatgagatcacagcacgtctcatcagttactggttttcattatggtgacactgaacactcatgaaaagttagcattgaaatatgttggtatctccaatttagaaaggtagtgatgatgggtacagtgtttttacggggaaaaaaagccaaaaaatgcattcatgtttgtctactcttaaaacccagctgtccaagaacgattccccaaggccctgtccatcatttctctttctatccttgaagcgcagtgtctgacacataggatgtgctcattgatgccagatgatgaaacttgaatggctggtttcctagggttctggataactctgttttaccgt

SEQ ID NO: 8567 - DNA, 761 bp, Homo sapiens
aagattttcatcatgggacattaattccccaaggacgtccagkttgcatgtatatgggtgccgctgagacccacgatgtctcatgcctctatgccaacagtgcaaccatagggcaggaagtgagaatgggaggcacaggcatgagatgaaatcctgatggattgtgatccctggtcacaatgtcttcagcaaatgtctgttgatattctctttcaatgctttctacctgcctggtttcttatacatatatccctttccttattggctttttaactctaaactatttttgtatcacagttatggctattacagttgacctagtatttatagttattaaaatcaaaattagttacaattaatctcatagcacaccaccctaggatttttttctcactgggtgtgaatttccaaaaaaagaagctcagggtaggtcaaagaaataacttgctgattcagaggcttccaaacgccggtaccgggctggggaacgttatagatcacacttcctgtaaatatccaaactgcttagaaatagactgttccctacacagtacagtatgagagtcactgcaagttctctaaattaaaaaaaaaaatcaatggattagctgaccatatgtcccagacccacaatctggtcacagttcatggagaacaggctactagctgctagtttgaagttactggtgacaagtgaggcctgggaggatctgaagagtgctgtaggagccgtccttgcacacagtgcttatgacttacca

SEQ ID NO: 8568 - DNA, 761 bp, Homo sapiens
aagattttcatcatgggacattaattccccaaggacgtccaggttgcatgtatatgggtgccgctgagacccacgatgtctcatgcctctatgccaacagtgcaaccatagggcaggaagtgagaatgggaggcacaggcatgagatgaaatcctgatggattgtgatycctggtcacaatgtcttcagcaaatgtctgttgatattctctttcaatgctttctacctgcctggtttcttatacatatatccctttccttattggctttttaactctaaactatttttgtatcacagttatggctattacagttgacctagtatttatagttattaaaatcaaaattagttacaattaatctcatagcacaccaccctaggatttttttctcactgggtgtgaatttccaaaaaaagaagctcagggtaggtcaaagaaataacttgctgattcagaggcttccaaacgccggtaccgggctggggaacgttatagatcacacttcctgtaaatatccaaactgcttagaaatagactgttccctacacagtacagtatgagagtcactgcaagttctctaaattaaaaaaaaaaatcaatggattagctgaccatatgtcccagacccacaatctggtcacagttcatggagaacaggctactagctgctagtttgaagttactggtgacaagtgaggcctgggaggatctgaagagtgctgtaggagccgtccttgcacacagtgcttatgacttacca

SEQ ID NO: 8569 - DNA, 761 bp, Homo sapiens
aagattttcatcatgggacattaattccccaaggacgtccaggttgcatgtatatgggtgccgctgagacccacgatgtctcatgcctctatgccaacagtgcaaccatagggcaggaagtgagaatgggaggcacaggcatgagatgaaatcctgatggattgtgatccctggtcacaatgtcttcagcaaatgtctgttgatattctctttcaatgctttctacctgcctggtttcttatacatatatccctttccttattggctttttaactctaaactawttttgtatcacagttatggctattacagttgacctagtatttatagttattaaaatcaaaattagttacaattaatctcatagcacaccaccctaggatttttttctcactgggtgtgaatttccaaaaaaagaagctcagggtaggtcaaagaaataacttgctgattcagaggcttccaaacgccggtaccgggctggggaacgttatagatcacacttcctgtaaatatccaaactgcttagaaatagactgttccctacacagtacagtatgagagtcactgcaagttctctaaattaaaaaaaaaaatcaatggattagctgaccatatgtcccagacccacaatctggtcacagttcatggagaacaggctactagctgctagtttgaagttactggtgacaagtgaggcctgggaggatctgaagagtgctgtaggagccgtccttgcacacagtgcttatgacttacca

SEQ ID NO: 8570 - DNA, 797 bp, Homo sapiens
cacaacatggtgcagaggtcttgatggacttacttagctaaagaaggaaagcacctatagggcagcacaaggtagatcctccctcactccaaacctccagtattattcagagcagctttatattctgttcatgcctattttaaatgttattaaaatgtacctatatgcgtagatttttctctccataatccttctggaatattacattataaatcaactcaaaagttaaattaatgacatccaattaaaaaagtagattaagagactcatagaggaagcactgcgctaagattaatgaaaatgttattccaacatgaaaattgccttagaacttgttaccaaaattttgaacattaattatctctattttaagccttgcctttagaaagttatttcttctacttgcttttatcatacttcgtgacaaatctacagttgccccacacaattatatagttctcttaaatttatatatatttttatatatatatatacacacacamaaaaaaaaattcagaatatgataatttgtgcattaggaattaaccaaaacgtttttttccttttttttttttgagacagaggagtcccactctgtcacccaggctggagtgcagtagtgtgatcttggctcactgcaacctctgcctcctgggttcaagcgattcttctgcctcagcctcctgagtagctgggattacgggcatgcatcaccaggccctgctaattttcgtatttttagtagagatggggttttgccatgttggccaggctggtctccaatgcctgacgtcaag

SEQ ID NO: 8571 - DNA, 797 bp, Homo sapiens
cacaacatggtgcagaggtcttgatggacttacttagctaaagaaggaaagcacctatagggcagcacaaggtagatcctccctcactccaaacctccagtattattcagagcagctttatattctgttcatgcctattttaaatgttattaaaatgtacctatatgcgtagatttttctctccataatccttctggaatattacattataaatcaactcaaaagttaaattaatgacatccaattaaaaaagtagattaagagactcatagaggaagcactgcgctaagattaatgaaaatgttattccaacatgaaaattgccttagaacttgttaccaaaattttgaacattaattatctctattttaagccttgcctttagaaagttatttcttctacttgcttttatcatacttcgtgacaaatctacagttgccccacacaattatatagttctcttaaatttatatatatttttatatatatatatacacacacacaaaaaaaaattcagaatatgataatttgtgcattaggaattaaccaaaacgtttttttycttttttttttttgagacagaggagtcccactctgtcacccaggctggagtgcagtagtgtgatcttggctcactgcaacctctgcctcctgggttcaagcgattcttctgcctcagcctcctgagtagctgggattacgggcatgcatcaccaggccctgctaattttcgtatttttagtagagatggggttttgccatgttggccaggctggtctccaatgcctgacgtcaag

SEQ ID NO: 8572 - DNA, 791 bp, Homo sapiens
cagcaaaaactgccagaatccctgaagttaaagctccatcagtgccatgtttttgggtacctccttccccaggcaatggcagcagaaaagtttgtgagaaaccaaggctggcaggtgcccaagaaggccaagagtggatgccataggaaggctggggaagccatggaaggcactgccttctctgccaggccaccacagtggtccccagggccaggcttgatgacaggcccctacatgcccttacccagctccagccagggtgccggggggtcaggcaacccatccaggccggtctccttcacagctctgcccagagtctctccaagatgtgcagctgctttctaagctgaaacgtctcctggtccagtggggcccactagcacaaccagctygtcctggttttagcagcgaaagccctgtgtgctcatcctggggcctgcttgcccatcatttaaataaccaaggaaggctgggtgtggtggctcacgcctgtaatcccagcactttgggaggccaaggtgggcgggtcacttgaggtcaggagtttgagaccagcctgggcaacatggtgaaaccccatctctactaaaaatacaaaaattagcctggtgtggtgctgcacgcctgtaatcccagctatttgggaggctgaggcacgagaatcgcttaaacccaggagataaaggttgcagtgagccgagatcacaccactgcactccagcctgggtgacagagtgagaccctgtctcaaataaataaataaatagataaatagataaataaataaataa

SEQ ID NO: 8573 - DNA, 745 bp, Homo sapiens
ggcattatacagttttttccttctcaacagatttctgcacatagaaaaaatatatgtagagggaaaaaattagcctttcatgtactccagtgctttgtatgctgaaataatttatttttaagagaatttataaaatagtacagcattaaaaatgaaaaaagaaattcattgagttattctttatcacatgattgctcatggaaacttggtttaggtcacagccatacaaaatatcggactttattcaatgctctcaggaaaaaatgtaaaagtcaagtttgctcatgtcactaagtgatagaaatcatcctgtttgatcccagtcttttgttacacttaaaagagaaaaagaactcctataaattcctgaaataaatcaagtttctcaaaaagctcaaaattaaaaagaacttaacagaaaaacattttcaaaatgtcattgacataagagggatctctgggaagatgaaggcataggaagcaccaggaatctygcttcttatctaaacaaacaatgacagtgttaaaatctgtctaatataactattttggagttctagagtctattgaagtcttgccacatccaggggaagacttggttggtaatttataattaattttggttaattacaaagttttgcacagtataatctatccatcccccacccctagtcccatagcagacagctgtgcaggtttctgaagcagcctgtacacaacttgcaggagccagggtgggcaaaaa

SEQ ID NO: 8574 - DNA, 704 bp, Homo sapiens
aaaaggagtattgtggttggatgatggggaggctctctgcaatgcaattctgtttcaagccctgtggaggggacattttaaaaacctcaaataggtttgggggttccaggagcagcaaagacatgagccttgcttcccagagaaagcccaggataatgtggatgccattgggtacaagtggcagccacgtttatctaagcagagagactctgctacagccccaagttacgggccagcacccacaggagttctgtgaccttgagtgggctgtagactgcgcgggtcttgcagctgtgatgacgggaccccatcaacaagtgcagagtgaatttcatgagctagaagccatgtagccccttggcgttcaacagtatatacactgggccttatcaaagaagactgaagaagtggacactaacaagggacaggagattaatattggtctatgtctctgcccagacaacgtgatgcctatcagcttctggaacgtagatgtcattcagtggaggaagaagcggcagaaccttacgtttaaatcctgaataaggtacatttaccagaaagtatgtagataagcttgttctgctccagtgcaaaatgagagtttgrgatggaacttaagtcctcatatagttacagttttgcatacttgattgcaggtcttcccctaacatctgtgggctgagaaggactggagcagtcaa

SEQ ID NO: 8575 - DNA, 554 bp, Homo sapiens
cctccatgggaaagcttttctagggcattacagaaggaacatatagagttggaacccccacacatggaggcaccattctgcaaacccagattcatagacctaccaacagcttgcaccctcagtgtggaaagctacaagtgctcaacactagcccagcccatgagggcagctgtgggggaaagaccctgcaaagccacaggtgcagagctacccaaggccttgggagcccagccatcacacccctgtgttctggatgtgggatttggattgaaaagtgatgattggagctgtacaatggaatgactggcctgctgggtttttgacttgcatcrgatctgtaagtctcatctgtattttgtgcttctttctggcaaagttttttcttttggctgggaattcatacccaatgcctgtacaatcatggtaccttgaaagtaattaacttactttgtatttcagaggctcagaggcagaagggactgcagccttgtgtcagataagactttgggctttggatattcagtaaaggctggaatgacttaagattggggggg

SEQ ID NO: 8576 - DNA, 554 bp, Homo sapiens
cctccatgggaaagcttttctagggcattacagaaggaacatatagagttggaacccccacacatggaggcaccattctgcaaacccagattcatagacctaccaacagcttgcaccctcagtgtggaaagctacaagtgctcaacactagcccagcccatgagggcagctgtgggggaaagaccctgcaaagccacaggtgcagagctacccaaggccttgggagcccagccatcacacccctgtgttctggatgtgggatttggattgaaaagtgatgattggagctgtacaatggaatgactggcctgctgggtttttgacttgcatcagatctgtaagtctcatctrtattttgtgcttctttctggcaaagttttttcttttggctgggaattcatacccaatgcctgtacaatcatggtaccttgaaagtaattaacttactttgtatttcagaggctcagaggcagaagggactgcagccttgtgtcagataagactttgggctttggatattcagtaaaggctggaatgacttaagattggggggg

SEQ ID NO: 8577 - DNA, 554 bp, Homo sapiens
cctccatgggaaagcttttctagggcattacagaaggaacatatagagttggaacccccacacatggaggcaccattctgcaaacccagattcatagacctaccaacagcttgcaccctcagtgtggaaagctacaagtgctcaacactagcccagcccatgagggcagctgtgggggaaagaccctgcaaagccacaggtgcagagctacccaaggccttgggagcccagccatcacacccctgtgttctggatgtgggatttggattgaaaagtgatgattggagctgtacaatggaatgactggcctgctgggtttttgacttgcatcagatctgtaagtctcatctgtattttgtgcttctttctggcaaagttttttcttttggctgggaattcatacccaatgcctgtacaatcatkgtaccttgaaagtaattaacttactttgtatttcagaggctcagaggcagaagggactgcagccttgtgtcagataagactttgggctttggatattcagtaaaggctggaatgacttaagattggggggg

SEQ ID NO: 8578 - DNA, 554 bp, Homo sapiens
cctccatgggaaagcttttctagggcattacagaaggaacatatagagttggaacccccacacatggaggcaccattctgcaaacccagattcatagacctaccaacagcttgcaccctcagtgtggaaagctacaagtgctcaacactagcccagcccatgagggcagctgtgggggaaagaccctgcaaagccacaggtgcagagctacccaaggccttgggagcccagccatcacacccctgtgttctggatgtgggatttggattgaaaagtgatgattggagctgtacaatggaatgactggcctgctgggtttttgacttgcatcagatctgtaagtctcatctgtattttgtgcttctttctggcaaagttttttcttttggctgggaattcatacccaatgcctgtacaatcatggtaccttgaaagtaattaacttactttgtatttcagaggctcagaggcagaagggactgcagccttgtgtcagataagactttgggctttggatattcagtaaaggctggaatgacttaagattkgggggg

SEQ ID NO: 8579 - DNA, 554 bp, Homo sapiens
cctccatgggaaagcttttctagggcattacagaaggaacatatagagttggaacccccacacatggaggcaccattctgcaaacccagattcatagacctaccaacagcttgcaccctcagtgtggaaagctacaagtgctcaacactagcccagcccatgagggcagctgtgggggaaagaccctgcaaagccacaggtgcagagctacccaaggccttgggagcccagccatcacacccctgtgttctggatgtgggatttggattgaaaagtgatgattggagctgtacaatggaatgactggcctgctgggtttttgacttgcatcagatctgtaagtctcatctgtattttgtgcttctttctggcaaagttttttcttttggctgggaattcatacccaatgcctgtacaatcatggtaccttgaaagtaattaacttactttgtatttcagaggctcagaggcagaagggactgcagccttgtgtcagataagactttgggctttggatattcagtaaaggctggaatgacttaagattgkggggg

SEQ ID NO: 8580 - DNA, 805 bp, Homo sapiens
agcctgggtgacaagagcragactctgtctgagaaaaaaaaaaaaagaatgaaagatagaacctcacaacagattcaacagaaattttaaaggaatttaagatattatgaggaacaacaaatgtcaacaagtttagcaacataaatgaaataagcaaattccgataaagacattaagtagcaaaattgactaaagaacaaatagaaaatcttaatagatgtatataaagtaaaaaaaaattgaattagtaattaaatatattccccctgaagaagagtgtagtgctagatgccttaacccatgaattccatttaacatttaaggaggaaagtataccagtcatacacaaacatttccagcaaatacagaagagaggatatgccaaaacattttagaaagccagtattagcttgataccaaagcaggatggagacatcagaagaaaaggaaagtgccaaacaatatctctcataagtttacgtccaaatgtatttaacaacctggatgcaaattacatccaacagtatgtaaaacgatcatacactacatgtctctggaattaatactagtaatgcaaatttggcttactatctaaaacacaacgaacattgtacatcatataaataaagtagaaaatcaatagaatcatgtcaaaagacataaaagaattttggcaaaatccaacaataattcctgataactcacaacaaacatgcagaaaaaaaataagtgacaaaactaacataaaggacagaagagagtaattggaattataccattttaaggctcttgtctttaacaaaag

SEQ ID NO: 8581 - DNA, 611 bp, Homo sapiens
actgaattatggagttttgggtaagatcagagtccagttagatgatagggaaartggatattttggtgggttttaagttacacaaggctgtcccgggaggccttctgcaggttttagaaccctgttgggctcttggcaagtttccttctctgggagcaagaggacacatgctgtcttcctgtaccagtttatcagagctcactgagtttgttcatccctcggtgtacttccctagagttgcttggatgttttagagttgacttgacataccgaaaaagagtgcttcagagtagcaaaatgtgcacatgcatctgtgcatgcgtacacacacacacactctctctctctctcgaatgagaaaacagtagcagaagggacagtgttttacattgctttttaatcagtgattcttttacttggttatttctagctttccagcctctcagcctatagaaaatgtcttctaaataagagtaaacaggtatagattgctgggttatgtatatttctgcagtgcttctattgaaaatataaaatggggcaagaaagattgcaaagcttattaacaaggcattccttctgtttgagtctttgctgttactattggcatt

SEQ ID NO: 8582 - DNA, 777 bp, Homo sapiens
gatcctaggaagaaaagacaactagtccagattggagagtttcaaacatttgtggccaaggacaacataagtttccatattcatggccattctttccaggtggatataatgaaagtcagcgaattgatgagatcagatcctcaatgattagacaataaaatacatttctaatataaaatttaccctaaagcttagtgcctctcctataactaatattacagtcttctacccctattgaatgaatatactgcaaaacaaaagtcacctgaatgccaaatatatagtcagccctccgtatctgcaggttccaaatccacagattcaaccaattgagtattgaaaatattmaaaaaaaaaaacataatacaacaataaaaataacaaataaaaaaccaagacagtgtaacaacggtttatataacatttacattgcgttagggtactggatgtaatctagagatgatttaaagtatataggagaatgtgcataggttatatgaaaacactatgccattttatataatggacttgagcatctgaggattttggtataggaaagtagggggataaggaggagtggtccagaaaccaattgcctggggatacaaagggatgcctatgtatatagtcctggtcacaaggtaagacattcacgtggtctgtgtgtgtgtgtttgcataaaatatttctggaaggactcataagctagtaacaggttgcttcaagagagaggaactgggtggctatggggtttaggaaggggagttttcactatgt

SEQ ID NO: 8583 - DNA, 622 bp, Homo sapiens
ccagcaccgagggctcatccatccacagagcagggcagtgggaggagacgccatgacccccatcctcacggtcctgatctgtctcggtgagatttgaagaaggaggggagcttctaacctaagagggacctcaccccacagccaaactctggtccctaaggagaccccaggggctcacaaagatcccagggaggggaggacctgcccaggcttcagggggcaaatccctcaccgggaactctcttccagggctgagtctgggccccaggacccacgtgcaggcaggtgagtctgtccccagctcttccaggtccctcctcctcactggggacaaggggccacccccgtgccgctggggatggggaatagcagttctgggctgactgatsggggcgtctggagggtcctgggctgagagctggaatctgctgggttgggtgggaaatgagttagaatccgactcctgatttccttccagggcacctccccaagcccaccctctgggctgaaccaggctctgtgatcacccaggggagtcctgtgaccctcaggtgtcaggggggccaggagacccaggagtaccgtctatatagagaaaagaaaacagcactctggattacac

SEQ ID NO: 8584 - DNA, 499 bp, Homo sapiens
cacccacccataactggaaggctgggacatttgtccactaacttttactccactgtggtttaaggttgcctytaggagcattatccctcccttcatttctacaatgctagtgatcaacttttttgaattgaacttaactggagtcagtaaaaagctcgtccaatttatccagaatgcctgagaaattgaaattttttttcatactataaagaagttacataaagaacatttgaaacacaagcaattccaaatatgtattttgaccaaattactttgcccatgaagcagctccacataggtacaatattgagtgtgtacatagaaaatgttagtaatcactagtgctaaagaagagaacagatatggagatagtcgttctgcagtaatatcatactttttttttctaaaatgtataaggctgcgtaatcctttgtctccaacaaacactaaaactcttttaaagtactggctatttttatttggcctcatccatttatgt

SEQ ID NO: 8585 - DNA, 739 bp, Homo sapiens
ctttcctctggaaggctgcaatttaatatgtttatggggagaagtggtccctacaatcccaagaaaagtaagggggagttgggggagtctcaacccaattatttggcagtcaactttgcccctccaataaatgaaactgcaaagctgtcttttacaggatacccaggcactgacagcaaactgcaggaccacagtttcacatccattccctgggggcatgatttaaacccagaaacctgtcatcaggagggaagtggagagcggctccaggactggctgagaagtgatggtgaagggtttttgtctccctttcaaccccgtaaacctaagtgaacccgatctctgattgattattaaacacttcgcattcaatggctgaaggacagtctactcgttaaatcagtgattcttagcagagctatttctgctagatgatattgttgggtgctgggaaggaggtgccgataatgagaaggaagtagccatcgcaagttggcaraactcccgaggaagtttaaaaaaaaaaaaataacttccgtcagcatcattgcctgcaaaatggatgccattctttttgagattaaggaatccagtgaacaaacacaagtcaatcacatttactacggaaaacaattactcaattcagcgagaggaagaataacatctaccggagttctagccttccattctgaaggggcatggagaggggacgaggtttcttcctcatctcagatggatc

SEQ ID NO: 8586 - DNA, 775 bp, Homo sapiens
tcttgactcagaccgggggtgtcagccaggtgtgaggggtagagaaggcattttgtccatccagtgacgtcactgcccagaaactgtcagcaaggaggaaggaaggcatgagttggtgaycgcatagtgctgactagctggacagggcataaactaactctctgtgtcaggagagctcctgaattcttcggtgtagagtccagagctgagggtcagtagattctagtcactagaccaccaggtctgactggctcttggtggtttgggtaaatctgtgcctctgtcttcatggaagtccagacccacttaacactcggaggctgcatgtttcttgttaagagttgtttgccatccagcacctcaacggttgtcagagctagaaggggcattagagatcattcatcctggccctcgctgatccaggaggaagcagaggtccagagagacatgtggagctcacggtgctgcagccagttaaactccaagcaaggcttcctgctccacccagtgccctccctgcacttgtgagtggggcaggggacgctgcccttgactccagaccaagcccccagtgggggctcagcagaatccccacaacaccccctaccagagggcatcccctcacccatcaatccaagatttacagctgtccaacttctcttgcctcgccacccttcccctctccattagtccatttattctgtggttggtagaaaaattacgctgttcagagcaataattgcaccaggaaagggttttctccccagtagtagag

SEQ ID NO: 8587 - DNA, 775 bp, Homo sapiens
tcttgactcagaccgggggtgtcagccaggtgtgaggggtagagaaggcattttgtccatccagtgacgtcactgcccagaaactgtcagcaaggaggaaggaaggcatgagttggtgaccgcatagtgctgactagctggacagggcataaactaactctctgtgtcaggagagctcctgaattcttcggtgtagagtccagagctgagggtcagtagattctagtcactagaccaccaggtctgactggctcttggtggtttgggtaaatctgtgcctctgtcttcatggaagtccagacccacttaacactcggaggctgcatgtttcttgttaagagttgtttgccatccagcacctsaacggttgtcagagctagaaggggcattagagatcattcatcctggccctcgctgatccaggaggaagcagaggtccagagagacatgtggagctcacggtgctgcagccagttaaactccaagcaaggcttcctgctccacccagtgccctccctgcacttgtgagtggggcaggggacgctgcccttgactccagaccaagcccccagtgggggctcagcagaatccccacaacaccccctaccagagggcatcccctcacccatcaatccaagatttacagctgtccaacttctcttgcctcgccacccttcccctctccattagtccatttattctgtggttggtagaaaaattacgctgttcagagcaataattgcaccaggaaagggttttctccccagtagtagag

SEQ ID NO: 8588 - DNA, 670 bp, Homo sapiens
tcctagaaatattatttaacagttctccccttttggtcaggttctcacctaggtgagagttactaaaacagggcatcagcactactctcagtaatcatcgttttgggttttcggtcttaacacatcatttataggttaaggtgtcctcattatcatgcgtttcttggagttttatcattccagctggagagagaccatttagcattcagcagagggctgcatatagayatttaagactctttgagaggatacagtgtaacagggaaactactgtaatgactctccccaggataatactaagagtttacaatatgacgcttagccagggacccatgaaccaaaccaactaaaattgaagagatcaaagaatgagccagatgaggaatttaccctttttaagcaagtactatttgttcatttttttgcaactgagtctcaatacactatgtgtctatccatgtgcaacagaaagtgtcagcaattgcacagattccctgttcgctagtaggtagcagttctattatctagtatcccatgactgggttaaattaaagcaggaagtgagaacacatgggtctaaaagtctgactctataaaagggaccactagtacagtttgaacaacagttgtgttagggatgttgctgaagttacccactgggcagactaaa

SEQ ID NO: 8589 - DNA, 785 bp, Homo sapiens
tgggagagacagctgagctgctgtgcctgcagatgagaagtcaaatgctttacaagactcagcccccacctgggaaactcaagccatctgggaggccccagtgatggtggccttggggaaaagggggagaagagatggggggcagcctcatttgcataaaggcctcacctctgcccataaactgagctttcaggggcagggacaccagggcctggccagtcaccaggaggctgggggcagaggagggtggagcagggccaggccctgascaggtcagcagccaagtcccatccctgtgctcctggctcctcttcccatctggctcttccctccctgacctcagtaggtcctcccaacagctctgcatcaagggcaggaataatcatctctgctttgctgatgaggcagctgaggcccagcgagaccaagtgtcttgctcaaggtcacacagcaagtctgcagcagacccagaactgaccaggccctgactcgcagcccagggtgctgagttctgcccctctggcttccttctggctgccctggcccggggcctgtgctgggctccccgacactgtcctgtcctctgctaccaccagccccctctgctccaccaaacgccgcagccagggcttagttcagagctgctggagactccaagccccctctccagcctccacccctgagcctagccccttttccccagctgttcccagacactgggtcaggagacacagaatgctggggctggcagggaccccaggaagcctctggcccaatcctctgga

SEQ ID NO: 8590 - DNA, 785 bp, Homo sapiens
tgggagagacagctgagctgctgtgcctgcagatgagaagtcaaatgctttacaagactcagcccccacctgggaaactcaagccatctgggaggccccagtgatggtggccttggggaaaagggggagaagagatggggggcagcctcatttgcataaaggcctcacctctgcccataaactgagctttcaggggcagggacaccagggcctggccagtcaccaggaggctgggggcagaggagggtggagcagggccaggccctgagcaggtcagcagccaagtcccatccctgtgctcctggcwcctcttcccatctggctcttccctccctgacctcagtaggtcctcccaacagctctgcatcaagggcaggaataatcatctctgctttgctgatgaggcagctgaggcccagcgagaccaagtgtcttgctcaaggtcacacagcaagtctgcagcagacccagaactgaccaggccctgactcgcagcccagggtgctgagttctgcccctctggcttccttctggctgccctggcccggggcctgtgctgggctccccgacactgtcctgtcctctgctaccaccagccccctctgctccaccaaacgccgcagccagggcttagttcagagctgctggagactccaagccccctctccagcctccacccctgagcctagccccttttccccagctgttcccagacactgggtcaggagacacagaatgctggggctggcagggaccccaggaagcctctggcccaatcctctgga

SEQ ID NO: 8591 - DNA, 797 bp, Homo sapiens
aggtgatttactctgccaggaaatgtctgtctctcaggagggatcaaccaggccctcctccttgaagctgggatttactgaggcttctgtttcccagggagctgcatggtggctttgtgggtgctggggtgagggtgagggtacaaccaaggtggaaggagccatggggattcacatgcagtaaagagcaaacctagacggtgtggtcgggatgaagaggttaaacttaagtgtcactggaggcctaggactgattcctgccccaccacggccaggcttgtgtgaccctgggagcttgacacatagtaggggctcaggaaagttgagttctcccccagctcatctgaggtctccctttccctgcccyggccacttcttccaggtccccccccaactccttgccctaggctttcctccaagccccctgcctgcatacgtctgtctgtcctcagggagagcagaagcctgcccgtctcaggttccgtcttcactgcaattcaggagagagagcactgggggcccatgagcaggactggcctggccactgcatgccaggacaccaggaacgggtgcttcatatgtccagggatagttaaaggggcagctacttccctcctgatgagtttggaaagggctcttggcagagtaaagggactctggggcctgaatttctattatgatctaagggatcagcaaaattcttgagcctatctgatttctaataaggaatgagggagcctggtctcattagggcaggtgacccagggtcttactgggcaggggcaagggctggggtt

SEQ ID NO: 8592 - DNA, 840 bp, Homo sapiens
ctatacacagtaccccctcgtagtactcactgttggttctacctctcctgcaggagcccgaggtaactgtgattcatagaactgaaatgacatacctgagcattagctccaagggagtctgggaatatgagctttatactttaggcaagcatgacccagaatattggaggatgttcaaagatcttctgcagatctgcacaaatgacaagygtccaccacaagaattatgccactgtagctgtgctttaggaaaagtaatttgccatgatttgtgtagaaaggattggggtaggccaggtactgtgattcacgcctataatcccagcactttgggaggccaaagcaggaggatcacttgagtcccagaattaaagactggcttgggcaacatggcaaaagtctgtctctgcaagaaacacaaaaattaatctggtgtggtggtgtgtgcctgtagtgccagctactctggagtctgaggtgggaggatcgattgagcccagggaagtcaaggctgcagtgagctgtgataacaccactgcactccaacctaagtgacaaagtgagactctatctcaaaaaagaaataattaaataaataaataaataaataaaataaaggactatagtagaaaaagcctggatgtgaatagacaagttacaagcctattggaattgtcaagggaaacagtaataaggtctcaccttgtgtagtagacacacaaggaaagagaagattctggaattactgaagagacaaaactggaaacatttagcaatgatgccatcagtagaaatagggaagtcaggaggaggtgccattctgaagtggaggactgagtc

SEQ ID NO: 8593 - DNA, 840 bp, Homo sapiens
ctatacacagtaccccctcgtagtactcactgttggttctacctctcctgcaggagcccgaggtaactgtgattcatagaactgaaatgacatacctgagcattagctccaagggagtctgggaatatgagctttatactttaggcaagcatgacccagaatattggaggatgttcaaagatcttctgcagatctgcacaaatgacaagtgtccaccacaagaattatgccactgtagctgtgctttaggaaaagtaatttgccatgatttgtgtagaaaggattggggtaggccaggtactgtgattcacgcctataatcccagcactttgggaggccaaagcaggaggatcacttgagtcccagaattaaagactggcttgggcaacatggcaaargtctgtctctgcaagaaacacaaaaattaatctggtgtggtggtgtgtgcctgtagtgccagctactctggagtctgaggtgggaggatcgattgagcccagggaagtcaaggctgcagtgagctgtgataacaccactgcactccaacctaagtgacaaagtgagactctatctcaaaaaagaaataattaaataaataaataaataaataaaataaaggactatagtagaaaaagcctggatgtgaatagacaagttacaagcctattggaattgtcaagggaaacagtaataaggtctcaccttgtgtagtagacacacaaggaaagagaagattctggaattactgaagagacaaaactggaaacatttagcaatgatgccatcagtagaaatagggaagtcaggaggaggtgccattctgaagtggaggactgagtc

SEQ ID NO: 8594 - DNA, 840 bp, Homo sapiens
ctatacacagtaccccctcgtagtactcactgttggttctacctctcctgcaggagcccgaggtaactgtgattcatagaactgaaatgacatacctgagcattagctccaagggagtctgggaatatgagctttatactttaggcaagcatgacccagaatattggaggatgttcaaagatcttctgcagatctgcacaaatgacaagtgtccaccacaagaattatgccactgtagctgtgctttaggaaaagtaatttgccatgatttgtgtagaaaggattggggtaggccaggtactgtgattcacgcctataatcccagcactttgggaggccaaagcaggaggatcacttgagtcccagaattaaagactggcttgggcaacatggcaaaaktctgtctctgcaagaaacacaaaaattaatctggtgtggtggtgtgtgcctgtagtgccagctactctggagtctgaggtgggaggatcgattgagcccagggaagtcaaggctgcagtgagctgtgataacaccactgcactccaacctaagtgacaaagtgagactctatctcaaaaaagaaataattaaataaataaataaataaataaaataaaggactatagtagaaaaagcctggatgtgaatagacaagttacaagcctattggaattgtcaagggaaacagtaataaggtctcaccttgtgtagtagacacacaaggaaagagaagattctggaattactgaagagacaaaactggaaacatttagcaatgatgccatcagtagaaatagggaagtcaggaggaggtgccattctgaagtggaggactgagtc

SEQ ID NO: 8595 - DNA, 821 bp, Homo sapiens
aatttcaacaggagatttgaagaagtcaaaccaaccatgtccacagtatagccacacccatttgtatatagaaatggctgtgtttacatttataggtgtgtttatgtgtgccaaaacttatgtatctctacaaacacagtgaaaaggttgggcttgctcaagtaatgatagggtcaacaaaaaggcacgtggccctagctgggggcctggacatgctcctctagcagtaagacccaggttgccgactgcccgttatgttgttctgtgttttcttataacaagccagactctgctcacatttatttgattcaaagtacagtgtagatctggaaaaacagaaatacgaaggtagtaatgtaaagactgcaagtataatttttaaaaatctttctgggtataaagttctatgagtatttaattgatttaatccaaatagcaaagacctctttccttataatagttaacctttcaaaaccctgcacatttctaagaataagaagtgtttggtgagtgctataagaagtagctcaaaaatagatagaaacacagaaacaagctcacctggcagaatattacatttttccccmaaaaactttatagaaataccacgtcttctttgccttgtgtttttctgttgaaaccaaagattgcaagatgtcatgtttgcacccaattttagagcactgtaatgtcaagtagactccattttacatgagattccaaaaccgtgtgctgttttttatattcatctttcttctttgtaacacaattaaaagcatcctgctttcttcacagtaatcagaacatgaaatattaccttg

SEQ ID NO: 8596 - DNA, 800 bp, Homo sapiens
cttttctctgtcataatgtcataaattctaatcatctgtgacataggaaagcagcatagcactgtggttagaagtgtgtgctttgggatacgcagggtgagttcaaatccttggacaattaacccttctgttgcctcagttgccttattgtttaccatgaggcataataacagtatctactccaaaaaccttttgtgagaagacaatgtttgaaaaatagtgcccaatacctaggaagcamtcaaccaaacatcaatgtctttacaaatatgtatgtgtttggagatacaggcacagagcaatggtatattttccctaggctttctggttctctaataatgtagtttagagtaaagagatgtaaagagatgacgagtttaacctcatctactggaatattcctctgaatggttctccattctgagacccagtgtcttgtctataactaaaagcaaatgtgtccagtgaaaacatgagatgatagtgcactgaactttctcaccagaaatgagcttttaaagatctcttggtgctttcttggcccatcttttgtctcaccagagtatcacaatttgagaaggagaaatataatagagttaataatttgctaattatgagtagggagatgtttttgtgcagctgtatgtttgtctatacccatgtagtgttatcaatgaccagctttgtgaatgcatgttagagtttacagtttcagtggcttgccttatgaaaacatgctaataaaatatgagtagcaacaaaaagggctattttcccctcctttccatacaacaaatagt

SEQ ID NO: 8597 - DNA, 643 bp, Homo sapiens
tcctatttcataaacaactatagttagctaaataaaatattttgaygtttaaaaatggcagcaattatgagctaaactccaaaactggagtgtgaattttctactatacaactcagcaggaaaaaaaaaaaaaaagacaagttttagaagtatacaaaaccccttttgctatgtaacctttaatacaacatggggagctgccaacctgcccaaaaagtgcaatctgttgcacacggtacaagcaagaccttgttaggtcgcaaaatttatgtcatttggcatcactctgggaaacaaaagctacagtatccaccttgatcaaaacagattggctgtgcccttgctgaaaatgtcattacagcaattgaaggcatgcaaaaaagacttcaaagttggcactgcaagtattatgcaggatgccaaggtactaaatggagataaaggaacaccctaaataccctttgccattttgtaaatgacagaggttttgagcttactactgaatataccacctcctatctatgatgtgatatttccctaacacactaacatttaatcctcacaattacatgaggcaagtgggtgttaatatatccatttcacaaatgggaaaactatggcttagaaaaggcaaataattcat

SEQ ID NO: 8598 - DNA, 643 bp, Homo sapiens
tcctatttcataaacaactatagttagctaaataaaatattttgatgtttaaaaatggcagcaattatgagctaaactccaaaactggartgtgaattttctactatacaactcagcaggaaaaaaaaaaaaaaagacaagttttagaagtatacaaaaccccttttgctatgtaacctttaatacaacatggggagctgccaacctgcccaaaaagtgcaatctgttgcacacggtacaagcaagaccttgttaggtcgcaaaatttatgtcatttggcatcactctgggaaacaaaagctacagtatccaccttgatcaaaacagattggctgtgcccttgctgaaaatgtcattacagcaattgaaggcatgcaaaaaagacttcaaagttggcactgcaagtattatgcaggatgccaaggtactaaatggagataaaggaacaccctaaataccctttgccattttgtaaatgacagaggttttgagcttactactgaatataccacctcctatctatgatgtgatatttccctaacacactaacatttaatcctcacaattacatgaggcaagtgggtgttaatatatccatttcacaaatgggaaaactatggcttagaaaaggcaaataattcat

SEQ ID NO: 8599 - DNA, 623 bp, Homo sapiens
cgaccccacaggagatgaaatggaagcaagttctctttcataattgccaagggcatccctcacaaagagccccttgtggtctctgttgccatttattaaccacctattatgagctaagtactgtgctacattctttacaaacagaatatacaacaatatgcataaaacagaaagcttatcttcatgtaacagaagaaacccagttatcagagttagataatgccttcccagaagccaaaggataatgatggtctcattcttcacattgtaacttggcaaaccaaggcttgtttgttcttttcttccacatccatctacgataataagccaccatamacgaatttgcagacagccagctgctcaacataccagaaactatcttactaaagtgagagtaagtttaaacaatggagataattaatggatgttctgtttctttactacgttgtgtttccttattgagtactctacagttccagctctgtatcacagttctctgcattatggaagagtagatataaaaaactgaaaacaagtcatattggtttgggacaagtaggaactgtacttttgcacaaatcaacactggtttggtggctacactcaataactgggtagagaga

SEQ ID NO: 8600 - DNA, 623 bp, Homo sapiens
cgaccccacaggagatgaaatggaagcaagttctctttcataattgccaagggcatccctcacaaagagccccttgtggtctctgttgccatttattaaccacctattatgagctaagtactgtgctacattctttacaaacagaatatacaacaatatgcataaaacagaaagcttatcttcatgtaacagaagaaacccagttatcagagttagataatgccttcccagaagccaaaggataatgatggtctcattcttcacattgtaacttggcaaaccaaggcttgtttgttcttttcttccacatccatctacgataataagccaccatacacgaatttgcagacagccagctgctcaacataccagaaactatcttactaaagtgagagtaagtttaaacaatggagataattaatggatgttctgtttctttactacgttgtgtttccttattgagtactctacagttccagctctgtatcacagttctctgcattatggaagagtagatataaaaaactgaaaacaagtcatattggtttgggacaagtaggaactgyacttttgcacaaatcaacactggtttggtggctacactcaataactgggtagagaga

SEQ ID NO: 8601 - DNA, 815 bp, Homo sapiens
tgcagtgtgctatgactgtgcctgtggatgaacaaccactacactccagcttgggcaaggtagtgagaccccgtctctttaaaaaaaaaaaaaaaaaaaatctcatctttcatagtcattggtcaataaagaaaatatccatccaaaaaacatttcctaacttttgcaaaatcaaggctgaaggcaactatcatttttccagtgtctcacttataaaacaaaggaaagaaagctgtctctctgacaaagtcatatagttcctttaccagacatagcataacatgtgtctcattctgctttcttttctagaaaatacagaattaagtttggtgttcaaatgcaatgactaatgcatctcaggtgtctgataatatttgtttccctgtccctttataaagtcatctccaattcccttgagaaggaggcaaggcacatgggagggtacggaaggaaaatatttttgtggaaaatacttagacagtatattcatttcaaatctattttctgaataatatctttaagttttatcaacttaaatatgtttgaatgacaatatattctttggaattataaaatgtctyaagtgaggtattcagtatattgagttctaatcctggcatcctcttcaaatgatatgcaaaaaactatgcaacagaaagatatttatataaagcattcactaccagaccactaccagaccattacaattctcatacatttaaatgccaatgcaaatatcttgaatgttaagattcaacagacaggcttttaattcaagatgacagattaagcacacaagtaaacccccctaaaat

SEQ ID NO: 8602 - DNA, 546 bp, Homo sapiens
aggaagtactcagtggtcttaccctttccccagagcaaggtaaagtggcttatgcctcagaactccgggtttgcatcgactttacaagagacattcrggaagcccttttaataaagaatgtgttgattcattcacttttccattttattatctgcttctgagacttctttcacattacacctatggttcataaaaaactttctcctgtttcctgtggactctactttcttccccattgtttaagcaactgttaaaatgctaccttctctaggaatccttcatcggaatggtgatgatccctctctcttgacctcacctccacacatatggtcccttcacttagtttgctgaactttaatctgctcttcccttgttttctgagcaggaactaatgagaagagtaacagtcaagtaccacagcagagtcacttcaccaaaactaccactggccctccccacctggtgcctccccaaccccttcctcgtcgtggtacccaacctgtgggttctctagaactaaagtctgcctgccaggtgactgctgga

SEQ ID NO: 8603 - DNA, 645 bp, Homo sapiens
ttgattggtctctgagacataagaaggacgttagtgaaaaaacagataaaatcctcaagtctgcagtttggggcatgtggaaatgtcagtttctcaggtttgataaagggaccctggttacgtcagtgttaatatcagggaatcctggggtatcagcataaccagctctgtcctatgatttttattattattattttttcagaaggagtsttgctctgttgcccaggctggagtgcagtgtcacaatctcggctcactgcaagctccgcctcccgagttcacgccattctcctacctcagcctcccgagtagctgggactacaggtgcctgccaccgcacccggctgctctgtcctattatttttaactcttccctatacctaaaattatttcaaaatgaaaagatttagaaatgatgtagaagcaaacagtagtagaactgctgctgcgtcctcacagaacatctgtatttaataaagtctagtttatgatttgctggggtacctgaaagaccctagccaggtgtcagagagagttggatttgaattcttattaaaatcattctttgtaatggaaatttgggcaagttatttgacttctaaactaaaatacctcatatgtaaagtaattttattaaagattact

SEQ ID NO: 8604 - DNA, 645 bp, Homo sapiens
ttgattggtctctgagacataagaaggacgttagtgaaaaaacagataaaatcctcaagtctgcagtttggggcatgtggaaatgtcagtttctcaggtttgataaagggaccctggttacgtcagtgttaatatcagggaatcctggggtatcagcataaccagctctgtcctatgatttttattattattattttttcagaaggagtcttgctctgttgcccaggctggagtgcagtgtcacaatctcggctcactgcaagctccgcctcccgagttcacgccattctcctacctcagcctcccgagtagctgggactacaggtgcctgccaccrcacccggctgctctgtcctattatttttaactcttccctatacctaaaattatttcaaaatgaaaagatttagaaatgatgtagaagcaaacagtagtagaactgctgctgcgtcctcacagaacatctgtatttaataaagtctagtttatgatttgctggggtacctgaaagaccctagccaggtgtcagagagagttggatttgaattcttattaaaatcattctttgtaatggaaatttgggcaagttatttgacttctaaactaaaatacctcatatgtaaagtaattttattaaagattact

SEQ ID NO: 8605 - DNA, 645 bp, Homo sapiens
ttgattggtctctgagacataagaaggacgttagtgaaaaaacagataaaatcctcaagtctgcagtttggggcatgtggaaatgtcagtttctcaggtttgataaagggaccctggttacgtcagtgttaatatcagggaatcctggggtatcagcataaccagctctgtcctatgatttttattattattattttttcagaaggagtcttgctctgttgcccaggctggagtgcagtgtcacaatctcggctcactgcaagctccgcctcccgagttcacgccattctcctacctcagcctcccgagtagctgggactacaggtgcctgccaccgcrcccggctgctctgtcctattatttttaactcttccctatacctaaaattatttcaaaatgaaaagatttagaaatgatgtagaagcaaacagtagtagaactgctgctgcgtcctcacagaacatctgtatttaataaagtctagtttatgatttgctggggtacctgaaagaccctagccaggtgtcagagagagttggatttgaattcttattaaaatcattctttgtaatggaaatttgggcaagttatttgacttctaaactaaaatacctcatatgtaaagtaattttattaaagattact

SEQ ID NO: 8606 - DNA, 618 bp, Homo sapiens
atactcaatggagggaaactgctgtcccagaaaaaaatgacagagccagccacggggaggcaagatgcctgcctttctcagcgtcagatttgcctctgtcactgtgatcagccgtttttcttctgagctggccgctctcgctgtgctggctaggggacgcaggatttctaggccacttgaaagataaaaccctaacccagcaagcagcaagagggagtttgggacgtaaaaaccagcaagctcctaagagtgcacagagggtccctgaccgcacacagctgctccgcccgggctactgtggaactgtgccaggtcttacctggctggggcagaagtgggttctcacctctgcaccagcactgggaagggcttctgttactcccatcccatcagccgtgcacttcctgtgcacttcccaggaaaaaaactgtgtctgtacatagcttcactcgaagcctccagaaagcctytcattgctgggtaaaatgctcagagtgaagtgtggtttttaagaacaggatatgattttaaatacacacacacacacacacacgaaactagagaaataaaccaagcatatgaatttctctgtgtcctctagccacattggcctctttt

SEQ ID NO: 8607 - DNA, 511 bp, Homo sapiens
ttcactgatttattaaccctgaacaaagatgtaattgcagggtctcagaaataacttttgttttcatttttctttttttttttmtttttggtatttgttttgtttggccttgaatttcttaatatctagtcataccattcattgcctgttttcttcactcagttgcccatcttttccccccagaaatgaaagaagcattagcttctgagtcttaaggatgagacctctgcattttctttgcttgtttagggcaagaaatgaagtgctgcctctttaattggcagaagcatgcagaaggagcatacctttaatttagtgttgggatacctcacttgcaccctggctgttgtcttattggagacggcagcctgcctgagatcctctagcactgaaataatatcatccagcacgcatttcttatcctgatttctcaacacacacagatgggaaaaagtataattatagcccttgtggttcaccttcatttccagcacggctcggtgggtctgca

SEQ ID NO: 8608 - DNA, 802 bp, Homo sapiens
tcagtatggtaaccctagggtcaagcacagtgtctgagacatgacaagtgctaggtatttatggactcttgtagttaccctcccattctatatacaacactaaaccaaaaggaaacccacctacaccatagggagcaccacacccacttcaataaatcctgaacagcactccagaataaaggatttgcaggcagaatggtaaattctagagccagattagacatttttctgaaaccagccagataactaactagggtccatttgtcagatccagcccatacctgttcttttctcagacctgaatccctacgaatagatgtctttgcatataatctagtcaagaaactttctaaaggaagcattctatttttctgacacacaatccaaatcttctagtggctcttgtgctctcctttactcgttagtctcttctgtactctagctttctaccctcrgtttccttagtaaacttctttactcttgatattttgactttttctttgtgctgctttcctcatttgctcctaaattacttcctgataaaacttgagtaagcatcatcagtgttacacactccatttggaaggtcacatctcgtgtttcattttcagtctctgcagaaaccttagggattagcgtaactgtggtgtgcttctatttctattagataagcaccttcggtgctcagttgacttgtgttttatgtgtgttgtcatactatctgagtagatgactttttcaagtccaagtaaaaggttgagcccaatggcagtaagtgactatttcaataggccaaaaggat

SEQ ID NO: 8609 - DNA, 802 bp, Homo sapiens
tcagtatggtaaccctagggtcaagcacagtgtctgagacatgacaagtgctaggtatttatggactcttgtagttaccctcccattctatatacaacactaaaccaaaaggaaacccacctacaccatagggagcaccacacccacttcaataaatcctgaacagcactccagaataaaggatttgcaggcagaatggtaaattctagagccagattagacatttttctgaaaccagccagataactaactagggtccatttgtcagatccagcccatacctgttcttttctcagacctgaatccctacgaatagatgtctttgcatataatctagtcaagaaactttctaaaggaagcattctatttttctgacacacaatccaaatcttctagtggctcttgtgctctcctttactcgttagtctcttctgtactctagctttctaccctcagtttccttagtaaacttctttactcttgatattttgactttttctttgtgctgctttcctcatttgctcctaaattacttcctgataaaacttgagtaagcatcatcagtgytacacactccatttggaaggtcacatctcgtgtttcattttcagtctctgcagaaaccttagggattagcgtaactgtggtgtgcttctatttctattagataagcaccttcggtgctcagttgacttgtgttttatgtgtgttgtcatactatctgagtagatgactttttcaagtccaagtaaaaggttgagcccaatggcagtaagtgactatttcaataggccaaaaggat

SEQ ID NO: 8610 - DNA, 802 bp, Homo sapiens
tcagtatggtaaccctagggtcaagcacagtgtctgagacatgacaagtgctaggtatttatggactcttgtagttaccctcccattctatatacaacactaaaccaaaaggaaacccacctacaccatagggagcaccacacccacttcaataaatcctgaacagcactccagaataaaggatttgcaggcagaatggtaaattctagagccagattagacatttttctgaaaccagccagataactaactagggtccatttgtcagatccagcccatacctgttcttttctcagacctgaatccctacgaatagatgtctttgcatataatctagtcaagaaactttctaaaggaagcattctatttttctgacacacaatccaaatcttctagtggctcttgtgctctcctttactcgttagtctcttctgtactctagctttctaccctcagtttccttagtaaacttctttactcttgatattttgactttttctttgtgctgctttcctcatttgctcctaaattacttcctgataaaacttgagtaagcatcatcagtgttacacactccatttggaaggtcacatctcgtgtttcattttcagtctctgcagaaaccttagggattagcgtaactgtggtgtgcttctatttctattagataagcaccttcrgtgctcagttgacttgtgttttatgtgtgttgtcatactatctgagtagatgactttttcaagtccaagtaaaaggttgagcccaatggcagtaagtgactatttcaataggccaaaaggat

SEQ ID NO: 8611 - DNA, 812 bp, Homo sapiens
tatagagctgtgtgtccgcgctctcgaggcatgctccatgctaggaggatgtattctggttaaagattcgtctgcgggagcagaggaagggcagggacaggggtctgggagctctactccatttgacattgctgcccgggtgtggcccgcttcggggtcagggggcacccttagaacctgtgcagggcaggaactgccaccatctgttggccacacatttctcagtgaacaaatgacttttggcatcagaaagccataacttcacacctaaacttccacgaggctgagctcttcctgcccctctgtgtgtgtaygtgtgtgtgtgtgtgtattgaggggacgcggctgctggccaccttctgtcggcacaggttggcgaggcttcatgactgcccagcccatgcagtccaagagtcccacagcccagcccatgcccaggctcatccactgcggcgggtggcctctgccaggggaggctaggaaaccccagtggtgagccttggccttgggatctgccaggactgtacccgggatggcagggagggcgagctttggtccctgcaacttggagccatctctctctctcctgctgtctgtgggtctgagaacccccagctcgtcctcccccctccccaaacctatgacctacaactggagcctctgcccacttctccctccagggtttcaaagacaacctccacgctgtgttctgcttggctgagaactcggtggggcccaatgcgacaaggccagatgacatccacctgctgtactcagggaagtacgtctggccctcccactccttcctgccc

SEQ ID NO: 8612 - DNA, 871 bp, Homo sapiens
aggctatacagattttcctgggtgaggttgaaaagaatattgacctcatcaggtgaccttgtcaagatgtttaatttctctcttctatacttattataatttaatacattatggatgtttgtttatttaagtttactccattcatgagttatttggaggatgaactaatgttggtagtgatctcacatattctcagataggagattccagataagtgccaagtggtaagaacaaaatagagttcaactgttaaatattaagaaagtgttactcagtggtttcagtttgttcagaaatagtgcaggccacctcagatcaccagaattacttagatgcttttgttatgctagcatgacctaaaaatctgcttgggaactaaatatttggcgctctcttttgtttttgctgacyagtgcatgacatcatgatttctgccagcgtgccctgctttctggtaattcagctcttacccccattgctcctctccttttcacatcctggctaacctctgatcagccttcagaacctgcattttgggtggggtgtccctgttttgggtgctccctttctacctcgtgcttccatcctaaccctactgggtggtttgcacctgcttatttattggttgttctcctaaacaagaccacaagcatctagaagtcgaaaccatgtgttactcactttggaatctcttgtagaggacccatgctccatgatccttacagcaaggatggtaaatctgcagtggtgtaggactgtctgtctgtctgcatatctcctagaatggtaagacggagtgtgcttgtggtgatcgcttaaaggaacagggagaggcagcatggcacactgttcaagaataaggactctggat

SEQ ID NO: 8613 - DNA, 871 bp, Homo sapiens
aggctatacagattttcctgggtgaggttgaaaagaatattgacctcatcaggtgaccttgtcaagatgtttaatttctctcttctatacttattataatttaatacattatggatgtttgtttatttaagtttactccattcatgagttatttggaggatgaactaatgttggtagtgatctcacatattctcagataggagattccagataagtgccaagtggtaagaacaaaatagagttcaactgttaaatattaagaaagtgttactcagtggtttcagtttgttcagaaatagtgcaggccacctcagatcaccagaattacttagatgcttttgttatgctagcatgacctaaaaatctgcttgggaactaaatatttggcgctctcttttgtttttgctgaccagtgcrtgacatcatgatttctgccagcgtgccctgctttctggtaattcagctcttacccccattgctcctctccttttcacatcctggctaacctctgatcagccttcagaacctgcattttgggtggggtgtccctgttttgggtgctccctttctacctcgtgcttccatcctaaccctactgggtggtttgcacctgcttatttattggttgttctcctaaacaagaccacaagcatctagaagtcgaaaccatgtgttactcactttggaatctcttgtagaggacccatgctccatgatccttacagcaaggatggtaaatctgcagtggtgtaggactgtctgtctgtctgcatatctcctagaatggtaagacggagtgtgcttgtggtgatcgcttaaaggaacagggagaggcagcatggcacactgttcaagaataaggactctggat

SEQ ID NO: 8614 - DNA, 821 bp, Homo sapiens
acaccctctactgtgcaccccagggggcttcctagcaggcttcaaaagagtgtgaactccacaaaactggacctcatcataaatgcacaagtcctctcctgccagctgttcagcaactaaacagtaaaataggaaaaatatgatttccaaaacgaagagcagaagacatatccagcaatatttttttgtggaaacagagacagggtctcgctctgtcacccaggctggagtgcagtggctcaatcatggctcactgcaacctcatcctcctgggctcaagcgatcctcccacctcagcctcccaagcaggtgggactacaggtgtgtaccaccacgcctggctaattttttaatttttagtagagatgaggtctcactaagttgcccagcctggtctcaaactcctgagctcaagtgatccccccgcttygcccttctaaagtgctgggattacaggcctgagccaccacgcccagcccaggaacatcttttactggcagagatggagaatgtagtgagaaatttaaattcagaattcttcctcattttgaaaagcacacatctcacctagaactagccacatctctaagtccaagccacgtgtggccagtggctaccatgctggatggcacagagcagactctgctcagagccggagacccccaacccgaacccaccctgaacaccaggtacagttcctggaccacagcagacactcacgggctgcttggaacaggcatgaaggaggcgtgaagttacagaaacgaataaataacacatgaggctaattcatacaaccacttcgtgggtcacgtcttcat

SEQ ID NO: 8615 - DNA, 821 bp, Homo sapiens
acaccctctactgtgcaccccagggggcttcctagcaggcttcaaaagagtgtgaactccacaaaactggacctcatcataaatgcacaagtcctctcctgccagctgttcagcaactaaacagtaaaataggaaaaatatgatttccaaaacgaagagcagaagacatatccagcaatatttttttgtggaaacagagacagggtctcgctctgtcacccaggctggagtgcagtggctcaatcatggctcactgcaacctcatcctcctgggctcaagcgatcctcccacctcagcctcccaagcaggtgggactacaggtgtgtaccaccacgcctggctaattttttaatttttagtagagatgaggtctcactaagttgcccagcctggtctcaaactcctgagctcaagtgatccccccgctttgcccttctaaagtgctgggattacaggcctgagccaccrcgcccagcccaggaacatcttttactggcagagatggagaatgtagtgagaaatttaaattcagaattcttcctcattttgaaaagcacacatctcacctagaactagccacatctctaagtccaagccacgtgtggccagtggctaccatgctggatggcacagagcagactctgctcagagccggagacccccaacccgaacccaccctgaacaccaggtacagttcctggaccacagcagacactcacgggctgcttggaacaggcatgaaggaggcgtgaagttacagaaacgaataaataacacatgaggctaattcatacaaccacttcgtgggtcacgtcttcat

SEQ ID NO: 8616 - DNA, 821 bp, Homo sapiens
acaccctctactgtgcaccccagggggcttcctagcaggcttcaaaagagtgtgaactccacaaaactggacctcatcataaatgcacaagtcctctcctgccagctgttcagcaactaaacagtaaaataggaaaaatatgatttccaaaacgaagagcagaagacatatccagcaatatttttttgtggaaacagagacagggtctcgctctgtcacccaggctggagtgcagtggctcaatcatggctcactgcaacctcatcctcctgggctcaagcgatcctcccacctcagcctcccaagcaggtgggactacaggtgtgtaccaccacgcctggctaattttttaatttttagtagagatgaggtctcactaagttgcccagcctggtctcaaactcctgagctcaagtgatccccccgctttgcccttctaaagtgctgggattacaggcctgagccaccacgcccagcccaggaacatcttttactggcagagatggagaatgtagtgagaaatttaaattcagaattcttcctcattttgaaaagcacacatctcacctagaactagccacatctctaagtccaagccacgtgtggccagtggctaccatgctggatggcacagagcagactctgctcagagccggagacccccaacccgaacccaccctgaacaccaggtacagttcctggaccacagcagacactcacgggctgcttggaacaggcatgaaggagrcgtgaagttacagaaacgaataaataacacatgaggctaattcatacaaccacttcgtgggtcacgtcttcat

SEQ ID NO: 8617 - DNA, 826 bp, Homo sapiens
cagctggtttagttctagtcttacaaaggaaagcagaatggctatgtactttacgaactgtctgttatcacctgattataaaagataattttaagtgaaacatttaaaataaaaaacaaagtaaaatctattatttatggcagccaatcttggtcataagagttcatattatttatcgcttttgtgcataaatgaaaaacaaatactaaggataatggagcctatagtcagcagcagcaaagacttaacacaagaggcttcattttatctcagagggcacatttccatgatacttggggagtgagagaaacctttctctccacagcaaccatttcacaggaaaaaatttaatcttggcaataattaattygtacttttaaatccttggggaatatactgttttctttctccaattttcatttatcacttgttacatctattcaaacttcacatgggacaggatcacttccattctctaagagtaactgatcacatacaaatatctgcaatactttctttctttctttttggagagtacagcaggcaggtgaagaaataaagagatttttgaagctagaagggagaagggagttaatttctttgtccgaactgggagtcattaatgaataaggcacctaacggtgtaccaattaacgcctgcaagtgtggacttcttcacactgctctgggtgtcccacctgctagagttgtgggaagacttcaggtacttggcagaaataatatttagggagaggatggcatcaactgcagcttcatccacctcaggcttattccgaatacgacctaaaagaaaggataaaaaaaa

SEQ ID NO: 8618 - DNA, 808 bp, Homo sapiens
acacggacccagatggctgcaggggctagggkcaggggcctggcatggggcatcagggtcagccctgccccatgctttggccatctggacgctacagcagagacaacatgtcacaacttcaggttggggaggagaggaggtagttaacagaggaagttaacctaattggaatcaggtttggccagaaaaaggcaataaattctgcatgcgtttgtgtttgtgtttgtaatgtgtgtgtatatggagagtgttccctagcatgcatctttgggagacttctccagggggtcctaggactactctgcaagggaatgggagggcctggtggcatttgtggtatgcagcctgacccactctcctgcccccatggtgtgaggaagatgtacttattggagcatttttataggtcatgctttagaaccaagtgagagcctgaggaggagctggaatcagaaggtgattctgactgtttaaaactgtcaacttcggaggctgcaagggtctctagagtacacactgggtcaggttcacacctgtgcttccggagcaaggctgatgctcagtgatagatttttaaattgtcttcaactgagaattgctggatacatgagatcacccaaggagtaaagatgcagaagatgggcgatggagacctgaaaattgtggtcagttttccagtaccaggagagctttgtgcagatgcacatatatcagcatcctcagttggccatggccaccaagagcagctccctgagtaaaatgactagccaagagggtggcacatgttctgtgactagtcaggacatgg

SEQ ID NO: 8619 - DNA, 840 bp, Homo sapiens
tcatccaaagacggggccccaggaagctcagccgaaatgtggccaatctggactctgacagtgaaagacggttgacagggaggtgactctgaggaaatccaatggcaactgacatgtgctctgaaggtggaaaccaccagcattaggttttcataagcactagcaccagaagagagtaactgttctaagctacatctcggtgtgctttacattactgcactttcacttccattatcttgttggatgcacacaatcaccctgcaaggttggtgttatgtgccactttccagataagggagccaagacgcagagattaaatgagctgtccaaagtcactgcacttgaaagtgtctaagccaccctttccatgtaggtttcctgactgttaacggtccactctacattctcatgatgcccatgggccaaaacaatcactctttcctccccacgacaactgattgaatgggaaagggtcccttaggaaagttgatgttatttttatggaagactcagagggtcagacgagcaggagggaggtataatgattcagatgtgtgaattataccagggctgaataaagaggttatagagaagttatgattcagaaaggaagggggatggactaagggtaggcaggggagcttggaggccagggggaaaaaaaacactgaattttatacacaaagtgatagacaagatgctaaacatacttttcataacttatatcatttaatctgtacgacaaccttgtgagacagattrtcagcattttacaaataggaaaccggagtcttaagaaatttgagcaacttatcacaaatcacaggactagaagtgaaa

SEQ ID NO: 8620 - DNA, 841 bp, Homo sapiens
tgtctgatggactttacattcttcacatcatctaccactgagctttactcatatgagatcagttgatgttactgaacaaatacatggtgttgattgttactctatattgagcacttactttgcagtggaggaaagttatcttttccctctattcatcttaggttcattggctggggcctctaataaaagagattaacaagagcaagccattcacatttatttaatatcagttttacatgacrtgggaaactttaaaaggagacctgaagaaatagttacacttgagtgtttgttatgctgggtttgaggaagagcggacagtggtgaagaaacatgataggaccaagggcagatgagctaaatgtaaggagcatggggtaaactcagtaaggcctatttgttcagattcgtctttgtgtccctgtgtcttagagatagaatgttcctctcctccagggatagggagggtgcctctctcatgagggtctcatgatctgctttaggggtaggtcagaaaatccttcctaggttctatgaagtcttcaggggaaggtcgaagagcctttcccatacatgcccttcctcaacttcctttagcttactctgtatgccaaggtgccacattttggggtagcgtattctgaaccccaccaatggcatcgtgcttagctcctcatctgcaacgtttcttcaggtctttacagcaatcctgtgagttaggaacatttttcatcctcattctacagctcagagctgaggtgcagaaggcttaggtggctggatcaaagacacacagctgctacatggcagagtcttgaatttgggttctgtttgatgccaa

SEQ ID NO: 8621 - DNA, 841 bp, Homo sapiens
tgtctgatggactttacattcttcacatcatctaccactgagctttactcatatgagatcagttgatgttactgaacaaatacatggtgttgattgttactctatattgagcacttactttgcagtggaggaaagttatcttttccctctattcatcttaggttcattggctggggcctctaataaaagagattaacaagagcaagccattcacatttatttaatatcagttttacatgacgtgggaaactttaaaaggagacctgaagaaatagttacacttgagtgtttgttatgckgggtttgaggaagagcggacagtggtgaagaaacatgataggaccaagggcagatgagctaaatgtaaggagcatggggtaaactcagtaaggcctatttgttcagattcgtctttgtgtccctgtgtcttagagatagaatgttcctctcctccagggatagggagggtgcctctctcatgagggtctcatgatctgctttaggggtaggtcagaaaatccttcctaggttctatgaagtcttcaggggaaggtcgaagagcctttcccatacatgcccttcctcaacttcctttagcttactctgtatgccaaggtgccacattttggggtagcgtattctgaaccccaccaatggcatcgtgcttagctcctcatctgcaacgtttcttcaggtctttacagcaatcctgtgagttaggaacatttttcatcctcattctacagctcagagctgaggtgcagaaggcttaggtggctggatcaaagacacacagctgctacatggcagagtcttgaatttgggttctgtttgatgccaa

SEQ ID NO: 8622 - DNA, 796 bp, Homo sapiens
ctggtaaggtgatcagggtgaaccaaccttaaaactgaacacatacctcaatgctgctaatcattggctaagagcatattagtcaggattcttttggttccaagtgatataaactcatttaacttggccccagcgatgtagagaatttatggattggtgctacttcaggtatagctggatgcaggaattcaaactgtcattcggactccacttctctccctttttgggctctgcatttctctttattgtgtttattcttaattgtctctaccctcctgatcctgtgtggcaasagagaaggccattggcagctctaggctgtgtgtcttttttttttttttttttttttttttgagccggagtctcactctgttgcccaggatggagtgcggtggcgctatctcggctcactgcaagcttctaggctgtgtgtctttaatgcccattgtctccgtgggggtaagggcctgcctttccctttcctggaagaagggtcctgactggctctgcttgggtcatgtgtcctatcctgggccaatcactgtgcatgaggtcagaggattcctgttgcataccagcctgagtcacatgaccaccttgtcacgtgatggaggtaaatctgtgtcaccagatggtggagggacagtttttgaaaacaaaggaaggatattgtaacaagaggaagggggcaaagattcaaggcagacaaaaccagtcatcagctgaaaacagcaccaccctctccttcaaaaaattctttgttaagaacatccgattcaccaaattgtggctgaaa

SEQ ID NO: 8623 - DNA, 796 bp, Homo sapiens
ctggtaaggtgatcagggtgaaccaaccttaaaactgaacacatacctcaatgctgctaatcattggctaagagcatattagtcaggattcttttggttccaagtgatataaactcatttaacttggccccagcgatgtagagaatttatggattggtgctacttcaggtatagctggatgcaggaattcaaactgtcattcggactccacttctctccctttttgggctctgcatttctctttattgtgtttattcttaattgtctctaccctcctgatcctgtgtggcaagagagaaggccattggcagctctaggctgtgtgtcttttttttttttttttttttttttttgagccggagtctcactctgttgcccaggatggagtgcggtggcgctatctcggctcactgcaagcttctaggctgtgtgtctttaatgcccattgtctccgtgsgggtaagggcctgcctttccctttcctggaagaagggtcctgactggctctgcttgggtcatgtgtcctatcctgggccaatcactgtgcatgaggtcagaggattcctgttgcataccagcctgagtcacatgaccaccttgtcacgtgatggaggtaaatctgtgtcaccagatggtggagggacagtttttgaaaacaaaggaaggatattgtaacaagaggaagggggcaaagattcaaggcagacaaaaccagtcatcagctgaaaacagcaccaccctctccttcaaaaaattctttgttaagaacatccgattcaccaaattgtggctgaaa

SEQ ID NO: 8624 - DNA, 796 bp, Homo sapiens
ctggtaaggtgatcagggtgaaccaaccttaaaactgaacacatacctcaatgctgctaatcattggctaagagcatattagtcaggattcttttggttccaagtgatataaactcatttaacttggccccagcgatgtagagaatttatggattggtgctacttcaggtatagctggatgcaggaattcaaactgtcattcggactccacttctctccctttttgggctctgcatttctctttattgtgtttattcttaattgtctctaccctcctgatcctgtgtggcaagagagaaggccattggcagctctaggctgtgtgtcttttttttttttttttttttttttttgagccggagtctcactctgttgcccaggatggagtgcggtggcgctatctcggctcactgcaagcttctaggctgtgtgtctttaatgcccattgtctccgtgggggtaagggcctgcctttccctttcctggaagaagggtcctgactggctctgcttgggtcatgtgtcctatcctgggccaatcactgtgcatgaggtcagaggattcctgttgcataccagcctgagtcacatgaccaccttgtcacgtgatggaggtaaatctgtgtcaccagatggtggagggacagtttttgaaaacaaaggaaggatattgtaacaagaggaagggggcaaagattcaaggcagacaaaaccagtcatcagctgaaaacagcaccaccctctccttcaaaaaattctttgttaagaacatcmgattcaccaaattgtggctgaaa

SEQ ID NO: 8625 - DNA, 614 bp, Homo sapiens
ttaacagctccattcctgatctgtgctgagacagaactctttcttctgctgcctccacacaactgcacaaaacccttaaactgaacgcaattcagacctggaacattctcgcatcttctgaatcccttggctcagagtatattatcctagtgctcaggtcctatctgcctcctaggacataattcactcatagaacccacaccgcagctcaggcaggagacctccaataccatacaggatatttatttacctgccatgaatctcaaaggatgacaagaagtaaatcagcttctagaatatgtgtgaaaacagsagctgagacattcttgtccaactctgcaagactgttaagttctaatgcacaggatacaccattcattctaacatatacacctccatggggaccagaatacccagcaattgataaacacttccatccattcccccatctcacttgcagttcagtcaagtgattgtcaagacatcaataggaagttctgtgtaaacacaggcactatagctaatcagtaggatgtttattgtatcattgcttgtcaaccattatcaataaggatttgagtgctacaaaggagaattaactggtttctaattaa

SEQ ID NO: 8626 - DNA, 596 bp, Homo sapiens
aattataaatgtcaggattttaaattttaatattgtatatattttacaggagagtttagaaaaggcaggaagtgtaatgtcaggtcactgctgagaagaggcattaatttatttttttctccactgttgctatttaactgaagccattctagttaacacagtaaggcatttggtcagcatggcttgtatgaataaaataaccaaaggtcagaaaaattagacaccccactcatgtggtgttaaaacagcctctggaaaatggaagaaccagtgtttcatcaccgtgtctaatttccacaattataaatacagcttaatccacagaggtcactgaggttttcagatctggttacaggaagtagacgtaaagtagggattttatttcttctttctcttgtaagtattatcaacatcttgtctttcatgactctatttcagccacagtgattgaaagttgtaaaggtgagttgaayagtatgcctcctagaaagccattcatttttccagcctgaaaatggacagttatatgtcacgcattgaaaacccgatctttaaactgcttcagtgtctcatctctcctctgctatggagatttg

SEQ ID NO: 8627 - DNA, 751 bp, Homo sapiens
taacagaggcagtctcgcgtttcagggccctttctccttcattcatttgttcatgtatttattccagtttcaattattaatgcccgctctgtgacaaatttgatagcctgctgtgagtgaaggacaggtagtctactgtgtcaactttgggggatagccctgggcttcctctaattcctttaaactccatagtcatgatagagaactgcttttttcattttgttaattaattttttaaaaattttaattttgttttaaatttctattttagattcagtgggtatatgtgcaggtttgttaygtggatgtactgtgtgtgatgctgaggtttcgggtatgaatcatcccatcacccaggtactgagcatagtacccactagttagtttttcagcccttgcccctcttcttccctccgctccctagtggtcctcagtgcctattgttgccatctgtatttccatgagttcctgatgtttagctcctatttataagtgataatatgcagtatttggttttctgagaactgcttttttttttctgagacggggtttttttttttttgagcagagacagggtttcaccgcgttagccaggatggtctcaatctcctgacctcgtgatccacccgcctcagcatcccaaagtgctgggattacaggcgtgagccaccgcgcccggctgctttttttttttttttttttttttttttttaaatcaagaacggctaaaccccacattttaaactgaact

SEQ ID NO: 8628 - DNA, 1213 bp, Homo sapiens
agtacccagttgaggagttagaataaagcaaaatatgctgcattgtccttaaaaacaacaaaaaagtattgggtacttagtatttctattctctggatagtaataccaaaatgcaatattatagtggtttgtgtgtcactccatgtgggtaaaagcacacgatttcttggctttccatttttctgtgtcccaatttaaagtaccacacacagctggttttttaccttctttcgcctgcactttcctttgcctctttctattttctcccttttttcttccacaatcttccgtaattaccattcacatctattagattgtgctatagagttttgaatgacattatcccagagtctaacatgggaaatattattttctgagctgtgctccttaactcctcaagcacctactgcaggcgttggaaaaagaaagccatgggtctccacctctgcctcctccttaaaagcttcctgtgtcttccctacaaagagattaggcctaattttagaccagctgcccttgggaggtcggtaacctctggagcgattataaagctaggcatgattgaggaaacttctctttcgcttgtagatyaatttcgtttagctgttataacttagtttttgaagtaaaacccaagtctaataaaccaaagaattggtttcaccttcaaattctcaacaaagccaaagccaaataatattacatgtgaaattgcttctttgattgaaaaaattggatttttgtttttacagaataggttaaaggatccttactgaaacaaagaatagcctagctttattctcatattagatcattccctcttaatttgcttatttatagaaaaaagaacttatgcaaagagacactacttttcattaaagtaaaacaagggactttagaatgacagaatattaatattgacagtgtggagaaatagtcaagttacattaatatttactgtaaaaatcatatatacctggtactcagtagctacttaataaatgtttacatataacaataatacttaataaatacttaaatatttctttgactaagtgccagccactgtctaagggctcttagtgaattcttacaaccacttaaggaggtctgtgctattattatctctgtgttagaggcgaatgtctgtggcatggtggacttgaaggacctaatttgtccaaagtcattcagctagtaagaagttgacttg

SEQ ID NO: 8629 - DNA, 745 bp, Homo sapiens
aaactttaaaatctgtagctcatgaagaacagcttctacttcaaagaaggccagtcacgagggaacatagagagttgggagatgtcagagttgagacggagactaaacgggggttggcatatgctggctctcatgagctacgcaaaagcctttggtctgtgccccgggagctgggtcactgaagaattcctgcagagctgtcacagaatcagttccccatctgaaagaccctgtgactgctgcamtagcccagtaaggatgtggggaagcaactaggaaatcgttgaagtggcctgggtgagaggatggtagcttggtccagggtgacaagggggaagaatcagtaggacttgttgatgctttgattttcatggaggaggtggtgaacagatcccaggtgtggggcaaggccaggtgagccgcggcagggctgttcacagacgtggtgggtgaggagccagcagagggtctgtgcgtgtccagcttgctagctgagtggtcatcggcacagggtaggtaggtggcaccgcgggctacagggagatgagctggaaaaggctgaagagaggacctggcaaagagtcattgagaagtcattgggaagcaggaaaaccagccaagggtgcgcagccaggggagccctggggaaattctctcaaggagaaggaagatgcccagggtgtcatatttgtctgaggtcaggcctggtgggcagaggcggtcatcctctggactcactggcgtt

SEQ ID NO: 8630 - DNA, 668 bp, Homo sapiens
ctgcagactggtcttcgggaagtgcacccccagatgcaatcagttcacagaggaaaaccacattttgtttagtcttttcctagtctagaaggcctagtatttaataaaccctggagccagccctgagggggactggcttttatgggctccaggcagctctctcagyctcttcccaggtgggggggcttggcctgttggcagctgacttgagttttcttcccagccccacctcgcccaatgcccccaccttttccatgagatgaagagaaacttggcctccaagggtcactcttctccccaggaatgtgtggcccagcttctccagtttaaaagactttcctctgctccagggctgaccccaaacagatgggaacctctagagcttggttggccaatgccatgttcagcccagtcacagctgagatcttgtcacctaggtgagtgctttactgctggagaagtagcaatcaagagaacagttctttttaacatggacatgagagattttagggaccagtccccagtgctcaaatcatagcaggtcccacccaagaacttggctcatccacaaaccaagctcctgccaagccctggcttatggagatggaccagacattcctggggcatcatggcaggcggccactgatgctgtctcaaatcctggggtt

SEQ ID NO: 8631 - DNA, 668 bp, Homo sapiens
ctgcagactggtcttcgggaagtgcacccccagatgcaatcagttcacagaggaaaaccacattttgtttagtcttttcctagtctagaaggcctagtatttaataaaccctggagccagccctgagggggactggcttttatgggctccaggcagctctctcagcctyttcccaggtgggggggcttggcctgttggcagctgacttgagttttcttcccagccccacctcgcccaatgcccccaccttttccatgagatgaagagaaacttggcctccaagggtcactcttctccccaggaatgtgtggcccagcttctccagtttaaaagactttcctctgctccagggctgaccccaaacagatgggaacctctagagcttggttggccaatgccatgttcagcccagtcacagctgagatcttgtcacctaggtgagtgctttactgctggagaagtagcaatcaagagaacagttctttttaacatggacatgagagattttagggaccagtccccagtgctcaaatcatagcaggtcccacccaagaacttggctcatccacaaaccaagctcctgccaagccctggcttatggagatggaccagacattcctggggcatcatggcaggcggccactgatgctgtctcaaatcctggggtt

SEQ ID NO: 8632 - DNA, 763 bp, Homo sapiens
acaatgggaagacgggacccgcagacttcagacgcaatttccctaccctttaagaaagggccctttcatatacgtatgaaagaaaccgcaaagctttctctgaagcacgtcgctttggcatttcctccctgggaagactggggggcatgaccgcttccccgctagttcccaccccactgcatttagtcttaattcgtcccagtctaagcagcttgcaagtcctctccctaagtcattaaaacgsgtgtccccttttggttttaccttttgttcctgctcgggcaatttgtctgtccaaagcatgattttttcttcctttagaggctcattaaggataaagaatctcaagcagttcagctttatctgcagtcccacccctgtaaatctgagtggtgtccaggcatagtttcactccagaggcagaagaaagggagtagtgaggatcagtaaaggttaaagaatttagaataaatacgagcgtgggggaggtgaagaagagagatgggattgaaggagaattgaagatcaattttgatcaaatggatcaaaactttgtacctctgctctagtaagacctttgcaccgtctctgccacatgggacttggagatattagttgttacaaaaattgcttccagttttgaatgtgctactagtcactgtgtagctcttgataaattaattagtaaattggctccctctggcctaaaattaccttacctgttttttaaaaaagataacattgttgtgtcttttctagttag

SEQ ID NO: 8633 - DNA, 655 bp, Homo sapiens
tttttatttctaagagtcctcctctcattctccaacaggttcccaacctttcccagcactggccctgcagctccctgcctccggctcaatagacctggcactcccggaagcagcttcctttcttggcaccaaatgctctgagtgaggggtggaggtgaggggctggcacaggcttctggaatctcaatctagaagtgrggcatgtggctgcttccaatcttctggtgacctatacctgcttagcatcccttagggccaaagcataggcagggcatgtgtgtttgcctgcagaggggagggaggtgcaaaatagcccactccaagtggggcttgggagggaacacttttttctttctttctttctttctttttttttttctaccactatccacctggagagggaacacttttttctttcccttatagtttcctaaagagagaagctctctgcccaaggcattcccagagctgggacggggtgggtgggggtggagaaacagggaggactgttcaggtgctatttagctccaggctgccagaccaggcccagcgagtcccagcaggccctggagcaccccacacccatggcctcagctgcactcccaggggtgcagagcttgggcccccagcagctcaggggtggggtgaaggccat

SEQ ID NO: 8634 - DNA, 655 bp, Homo sapiens
tttttatttctaagagtcctcctctcattctccaacaggttcccaacctttcccagcactggccctgcagctccctgcctccggctcaatagacctggcactcccggaagcagcttcctttcttggcaccaaatgctctgagtgaggggtggaggtgaggggctggcacaggcttctggaatctcaatctagaagtggggcatgtggctgcttccaatcttctggtgacctatacctgcttagcatcccttagggccaaagcataggcagggcatgtgtgtttgcctgcagaggggagggaggtgcaaaatagcccactccaagtggggcttgggagggaacacttttttctttctttctttctttytttttttttttctaccactatccacctggagagggaacacttttttctttcccttatagtttcctaaagagagaagctctctgcccaaggcattcccagagctgggacggggtgggtgggggtggagaaacagggaggactgttcaggtgctatttagctccaggctgccagaccaggcccagcgagtcccagcaggccctggagcaccccacacccatggcctcagctgcactcccaggggtgcagagcttgggcccccagcagctcaggggtggggtgaaggccat

SEQ ID NO: 8635 - DNA, 642 bp, Homo sapiens
cactgtgaaagacttttttgtctttcaggcttctcttgtgtggcccctgggagcagtctagcacctgtgggcagaagctgtagggaaaaggagcagattttatctctataagaaactttcttgtggtgaaaactatctagaaatggaatgagaaagtggtgagctccccattattggaggtgttcaagtataggctgagcggtgacttgtcacgaaaactgtatgacagacccaaacatcaacggggtgcttagattctttgatctcgggtcagttccacacaagacaggctctgtgttagtgaggacccagtggtgtttttgaacaggcggcaggataacaatggtatataaaataaatgcagagaaagacctccacatcaagccaacccctcctccctacctgtaagttttccacctgagtgagctctggctccarctgcacttgtcaaactcccattgttagagcacagataaatgcttccggccacccaagcaggagaggcccacctcaacttaagggctactctattttagttttccgtagctggagattgagtatcacgcttttctaatcttgtgcttctgaaagggccctgttctctcttgaaccccaccccctcctcctttcacagatcaaata

SEQ ID NO: 8636 - DNA, 682 bp, Homo sapiens
ctgggaaaaatatagatgatgtaaaaaatcataataataaacgatgctaagaagaaaaaaaaagaagtctatttcttctttacactgcacccaaccaaataattttcaattgaatttaaaatttaaataagaaggacagaagaagtatatgagaatatctttatatcccagatatctagaaagacatcttaaaccacacaaacctggaaggaaatgattaaaaaaaaaaaagcacatcatcaagaaagagaaaagacaaattacaaactgctagaagatatttgcaatacatataactgacaagaaattagtatttagaatatataaagaaattatacaaattaactactacaaaaatacaagtaaattagaaaaaaatgggcagttgatctgaataaacataacatataagcaaaaatatgaatggccrataatcaaatataaacaactgtacttcattaataagtcagaaaatgaaaatcaaaatcacaagaaaatttcatttcataaaaatttgattgcaaaagttgaaaagtcagagagcatcaggtattggcaaggaggaagaacaacaggaaatcttttccactgctactgacaatataaattgatacaaaaaacttgaggactgatatgacactatcctatgaaattaaaactgtgcatatcccatgaaatggca

SEQ ID NO: 8637 - DNA, 400 bp, Homo sapiens
gttataataaaaatagtcatcgtggtattcatagatctcaaattatcttaccaaaaatgtaatttatagtagaaatcgtaagtaactgacattcccagataattaatatattatattatctctaagacccctgtttctaatctaaagtaatatggttcacaaaaacacccagttaacaaacatactgatgagtgattaagagatcctctattaaattaggagtgccattttagtagaagaggctgactagctggagaatactcaccctccactggggcatcaacccataaggaagacatccccaggaagcccctttcatccactgaggcttatcccagaggatcawtggtagttcaaatattgttgtgagagggagacaggacacaaatcccatcagcta

SEQ ID NO: 8638 - DNA, 1377 bp, Homo sapiens
atcttctgctggagcctcagtaagtttatttcatctaaatgggtctaggtgctgggatgattaccctttgtctcctgctaaatcataaaggtttgggagtttctttacaccccagtaaacttgtctgtggaggcctggggagtttcttcagacccccagtaaaacttgtttaatcctaaatgggctctgttaagaattccttcattatattgtcatgcttcaaggcccaggaaaagcctagacaaaactctctgtgggctctttgttacattccagccattgtatagggcactggcttaatcagcttttaacgtttaacctagctactcagtcagtgctgggacagttgtaatggaggcttgcgttagtgagacatggcttgccacaatactatagcactaagttggtttaaattcaaggggaggagtattatactccacttctcagtaggaggaatagaaaggaatccgtggccatatttaatataccaccactatgtatgcagagcaacatagctatacttgcatagtttgttttttgttgtaggttatatgatgtaagtacagaacctgcgcattccatacaagcatagaatcaggtaaaaagcataactgaaaatgaaatacacttcagaggtgacaaatcaacacatgctgagtggggcattaatggacccggatcctagtcagggttagttacaattagctgtctgaccttaggtaaatcagttaatcttgaagactacttcctagtctaaaattcagttacttcaattacctctattgccttgatttgtctgattaagcatgcactgagaacacatataaaaggccaagtgaccatcatcattaattcaccattaaacttttgatcatgataatgcaggtactctgaaaccctaggaagaaaaacaacatatcaaggataaatgtggttaggataaatagtggtagaaaatacatttcttcttaatgaatctgttccagattattttcttctgtatggtcctgctcctctgcacgatgcagaggtttctgtttagttttgactctatcagactcccaggtagagcattctcacctttstagaagtaggagtcatctcattgattgtcttgagtaaaaggaaatggctcatgcatcttttctacattataacaaatgtccttttgcattataattgaatggtgattgttgtgttcaatcaatgggaaaggttaaaggagctcctctgccagcatttttaatggagaagtcgattaagattcagtttaatcattctggctgcctcagaattaaagcaacaaagaccatcaatggcactataattactagtctttctgtaagtttacactgctatttatgcagctataaattt

SEQ ID NO: 8639 - DNA, 829 bp, Homo sapiens
tcccaggtgactttaaagggtcaaatgtattattctaatccctgttccaaacagagaaaaggtcattatacagtacctactgcatgttgtaaagaatgaaaaattcacactgggggcgtgggtgcaaatctattttagacttggcctttaaaatgttttttaaattgaatgattaagtggtgatgaaccagaaaaaataccttgaaattgatcccatttattaattagtttgcacatgtaaaggtctttctataaatagtcagaagactagagaaaattgttcttcttgaatggagaaatgactttcaaactaacctttttttcactatagaaataatgcttataaatgcacttattaccatccaatactctgcttcttccaatatacatatagagtcctataaaggggtttgtgtcttaaaagtttatacttggtctacgttaacaagccaactgtagagaacaactccatagagaggaatrgattgaagaaacatacagaatgtgtactattgtcttgaaaatatagctttgcagtgaacattgtagaagtgtttggaaaagcaatgctttagagaatttgagatatcgggaattcaattaaagagcctgaagagcaaacaggtgaggaaatttgtgaggtaagatgaagcattgtttatgatttagttcatgttggagtaaaaagcctattgaaagagaaagcataaaaagaaaaatatgaagctatcattctctaggaaaaaaaaattcaaacttttccagtacccagaacttccagaactttcttataacaaaaaggaaaaataaaatttttagtgctagaaga

SEQ ID NO: 8640 - DNA, 829 bp, Homo sapiens
tcccaggtgactttaaagggtcaaatgtattattctaatccctgttccaaacagagaaaaggtcattatacagtacctactgcatgttgtaaagaatgaaaaattcacactgggggcgtgggtgcaaatctattttagacttggcctttaaaatgttttttaaattgaatgattaagtggtgatgaaccagaaaaaataccttgaaattgatcccatttattaattagtttgcacatgtaaaggtctttctataaatagtcagaagactagagaaaattgttcttcttgaatggagaaatgactttcaaactaacctttttttcactatagaaataatgcttataaatgcacttattaccatccaatactctgcttcttccaatatacatatagagtcctataaaggggtttgtgtcttaaaagtttatacttggtctacgttaacaagccaactgtagagaacaactccatagagaggaatggattgaagaaacatacagaatgtgtactattgtcttgaaaatatagctttgcagtgawcattgtagaagtgtttggaaaagcaatgctttagagaatttgagatatcgggaattcaattaaagagcctgaagagcaaacaggtgaggaaatttgtgaggtaagatgaagcattgtttatgatttagttcatgttggagtaaaaagcctattgaaagagaaagcataaaaagaaaaatatgaagctatcattctctaggaaaaaaaaattcaaacttttccagtacccagaacttccagaactttcttataacaaaaaggaaaaataaaatttttagtgctagaaga

SEQ ID NO: 8641 - DNA, 829 bp, Homo sapiens
tcccaggtgactttaaagggtcaaatgtattattctaatccctgttccaaacagagaaaaggtcattatacagtacctactgcatgttgtaaagaatgaaaaattcacactgggggcgtgggtgcaaatctattttagacttggcctttaaaatgttttttaaattgaatgattaagtggtgatgaaccagaaaaaataccttgaaattgatcccatttattaattagtttgcacatgtaaaggtctttctataaatagtcagaagactagagaaaattgttcttcttgaatggagaaatgactttcaaactaacctttttttcactatagaaataatgcttataaatgcacttattaccatccaatactctgcttcttccaatatacatatagagtcctataaaggggtttgtgtcttaaaagtttatacttggtctacgttaacaagccaactgtagagaacaactccatagagaggaatggattgaagaaacatacagaatgtgtactattgtcttgaaaatatagctttgcagtgaacattgtagaagtgtttggaaaagcaatgctttagagaatttgagatatcgggaattcaattaaagagcctgaagagcaaacaggkgaggaaatttgtgaggtaagatgaagcattgtttatgatttagttcatgttggagtaaaaagcctattgaaagagaaagcataaaaagaaaaatatgaagctatcattctctaggaaaaaaaaattcaaacttttccagtacccagaacttccagaactttcttataacaaaaaggaaaaataaaatttttagtgctagaaga

SEQ ID NO: 8642 - DNA, 829 bp, Homo sapiens
tcccaggtgactttaaagggtcaaatgtattattctaatccctgttccaaacagagaaaaggtcattatacagtacctactgcatgttgtaaagaatgaaaaattcacactgggggcgtgggtgcaaatctattttagacttggcctttaaaatgttttttaaattgaatgattaagtggtgatgaaccagaaaaaataccttgaaattgatcccatttattaattagtttgcacatgtaaaggtctttctataaatagtcagaagactagagaaaattgttcttcttgaatggagaaatgactttcaaactaacctttttttcactatagaaataatgcttataaatgcacttattaccatccaatactctgcttcttccaatatacatatagagtcctataaaggggtttgtgtcttaaaagtttatacttggtctacgttaacaagccaactgtagagaacaactccatagagaggaatggattgaagaaacatacagaatgtgtactattgtcttgaaaatatagctttgcagtgaacattgtagaagtgtttggaaaagcaatgctttagagaatttgagatatcgggaattcaattaaagagcctgaagagcaaacaggtgaggaaatttgtgaggtaagatgaagcattgwttatgatttagttcatgttggagtaaaaagcctattgaaagagaaagcataaaaagaaaaatatgaagctatcattctctaggaaaaaaaaattcaaacttttccagtacccagaacttccagaactttcttataacaaaaaggaaaaataaaatttttagtgctagaaga

SEQ ID NO: 8643 - DNA, 804 bp, Homo sapiens
aaaagagatatcctttcttttaataatgttgaactataaagagtctccccaaaactacctctaacgcgtaatcatttctgttttagaacatcttgtttacccacagtcaggagaggcagaattccaaaataaaagattttttaaaaaaataaattgactggtataataagagtgaactcaaaccatttcagaattctactttgtctctttatgctcagtgtagatgttgggactggagtgttgacaaagagcctatgtataaattcttccttcaatttttttccagaataggaactgccctagatcagcagggttaaaactttacagacaattagtcagatgtgaaaggaaacgtagccttggtttatctatctcctgagctcctactcagtggagaaatataggggaagatgagaccggtgagtgacacggggatcttaatcagttattgtaatatgctctaacctgttttaagtaagtccctttcaatattttttttcctttgagataatccatttcatttccaactcttttctcaaaatgacatcttggggcagtttatttttagctgtaagagccaacaagtacacccttcacctcagaaatgaggtaacagaactcgggraaaataaatgagaaaaatcatttcagaaatgcagactaaactagaagcaacacagagcatcacaacagtgatggtgtaagagaaatggaaggacaacaagaatacattttttaaattgaaaagaaatgtagagataaaaagaattaaaaaaaaaataacaaatattaaaattaggcaaa

SEQ ID NO: 8644 - DNA, 818 bp, Homo sapiens
gtgaagcttacaaaaggctagtcttttcaagctgcagttgagaggtacagaaggaacaagtgacagatggaaaagtgggataagagagcactggaaactagcccaggaacagcagtaagaggaggcagtgacactgagcacgggaacaagggagatgggattgctctgcacctgggagagcaaaccagcacctagagctcaatctcagacccccaagtcctgccttttttcaaaatctaaacaaaatataggaagttagccctgatacagaaaaggcctgatagctggcacagcactgtttatatcagggaaaaactggaagcaacctaaatggccaaaagaaggaatatgcttatggaacctgmgatatattcaatggactagtatgcagtattaatgtggaagcttgatgctattttccaataaggaaaaataggtataatttagtactatccaaagacatgggacacaaagttttatgtatatttatgataattctgaaaagcatagaaatgaaaaaggaccaaagaaatgcagcagagccttgatccctgcacttcacagagacgttctgcctgtctgtgagcagggacagtgatacatgattacaactgcctgagtcacttggcctaggtgtgctccccagccaggggaccagcccctcacacagctctgctgtgcagtcacttccaggaatgaagcaacagatcatatttcttcttggaaaatggccaaaagtgagagggaacctctgctgaaatctgaaaagccatgctgtggttttcatgtgcacatcgaatgtcattctactctcaaca

SEQ ID NO: 8645 - DNA, 818 bp, Homo sapiens
gtgaagcttacaaaaggctagtcttttcaagctgcagttgagaggtacagaaggaacaagtgacagatggaaaagtgggataagagagcactggaaactagcccaggaacagcagtaagaggaggcagtgacactgagcacgggaacaagggagatgggattgctctgcacctgggagagcaaaccagcacctagagctcaatctcagacccccaagtcctgccttttttcaaaatctaaacaaaatataggaagttagccctgatacagaaaaggcctgatagctggcacagcactgtttatatcagggaaaaactggaagcaacctaaatggccaaaagaaggaatatgcttatggaacctgagatatattcaatggactagtatgcagtattaatgtggaagcttgatgctattttccaataaggaaaaataggtataatttagtactatscaaagacatgggacacaaagttttatgtatatttatgataattctgaaaagcatagaaatgaaaaaggaccaaagaaatgcagcagagccttgatccctgcacttcacagagacgttctgcctgtctgtgagcagggacagtgatacatgattacaactgcctgagtcacttggcctaggtgtgctccccagccaggggaccagcccctcacacagctctgctgtgcagtcacttccaggaatgaagcaacagatcatatttcttcttggaaaatggccaaaagtgagagggaacctctgctgaaatctgaaaagccatgctgtggttttcatgtgcacatcgaatgtcattctactctcaaca

SEQ ID NO: 8646 - DNA, 818 bp, Homo sapiens
gtgaagcttacaaaaggctagtcttttcaagctgcagttgagaggtacagaaggaacaagtgacagatggaaaagtgggataagagagcactggaaactagcccaggaacagcagtaagaggaggcagtgacactgagcacgggaacaagggagatgggattgctctgcacctgggagagcaaaccagcacctagagctcaatctcagacccccaagtcctgccttttttcaaaatctaaacaaaatataggaagttagccctgatacagaaaaggcctgatagctggcacagcactgtttatatcagggaaaaactggaagcaacctaaatggccaaaagaaggaatatgcttatggaacctgagatatattcaatggactagtatgcagtattaatgtggaagcttgatgctattttccaataaggaaaaataggtataatttagtactatccaaagacatgggacacaaagttttatgtatatttatgataattctgaaaagcatagaaatgaaaaaggaccaaagaaatgcagcagagccttgatccctgcacttcacagagacgttctgcctgtctgtgagcagggacagtgatacatgattacaactgcctgagtcacttggcctaggtgtgctccccagccaggggaccagcccctcacacagctctgctgtgcagtcacttccaggaatgaagcaacagatcatatttcttcttggaaaatggccaaaagtgagagggaacctctgctgaaatctgaaaagccatgctgtggttttcatgtscacatcgaatgtcattctactctcaaca

SEQ ID NO: 8647 - DNA, 807 bp, Homo sapiens
ggaaattaagaatcagggaagtttaatatgtaacttgctcaaaattgcagattgtgtagtgtgggagctgggatcagagctcaggtctgtgggacctgaaaactggccctggcacagctgcaggaagacgctgaaggcaccgtagaagaagtagggccaacaggagggaaagggagcaaaaatgggaatatggggtccagagcaaaggcttgggagttttactaataaatcctcggccaggcgtggtggctcacgcctgtaatcccagcacatttggaggccgaggtgggtagatcacttgaggccaggaattcgagagcagcctgtccaacaaggtgaaaccccgtctgtaccaaagatacaaaaattagccaggcatggtggygagtgcctgtaatcccaactactcaggaggctgaggcaggagaatcgcttgaactccagaggcagaggttgcagtgagccaagatagtgccactgcactccagcctgggtgacagagcgagattccatctcaataaaataaaataaaataaaaataataataaaataaatccttatcctgagtgacttggaatggtagctgggcagtactagcattttgttgaaaggtaattgtgggtcagtactctgttaggtgcattgcatgatttagtaaataattcatataataaagacagggaaggaacaaggatgggatggggattatcaagatagaagatggaaactgagctttttcaggcaggcaatggcaggaagcagggtgcggaggcaccttgattaacaatgggacccagcagcctggaa

SEQ ID NO: 8648 - DNA, 807 bp, Homo sapiens
ggaaattaagaatcagggaagtttaatatgtaacttgctcaaaattgcagattgtgtagtgtgggagctgggatcagagctcaggtctgtgggacctgaaaactggccctggcacagctgcaggaagacgctgaaggcaccgtagaagaagtagggccaacaggagggaaagggagcaaaaatgggaatatggggtccagagcaaaggcttgggagttttactaataaatcctcggccaggcgtggtggctcacgcctgtaatcccagcacatttggaggccgaggtgggtagatcacttgaggccaggaattcgagagcagcctgtccaacaaggtgaaaccccgtctgtaccaaagatacaaaaattagccaggcatggtggtgagtgcctgtaatcccaactactcaggaggctgargcaggagaatcgcttgaactccagaggcagaggttgcagtgagccaagatagtgccactgcactccagcctgggtgacagagcgagattccatctcaataaaataaaataaaataaaaataataataaaataaatccttatcctgagtgacttggaatggtagctgggcagtactagcattttgttgaaaggtaattgtgggtcagtactctgttaggtgcattgcatgatttagtaaataattcatataataaagacagggaaggaacaaggatgggatggggattatcaagatagaagatggaaactgagctttttcaggcaggcaatggcaggaagcagggtgcggaggcaccttgattaacaatgggacccagcagcctggaa

SEQ ID NO: 8649 - DNA, 807 bp, Homo sapiens
ggaaattaagaatcagggaagtttaatatgtaacttgctcaaaattgcagattgtgtagtgtgggagctgggatcagagctcaggtctgtgggacctgaaaactggccctggcacagctgcaggaagacgctgaaggcaccgtagaagaagtagggccaacaggagggaaagggagcaaaaatgggaatatggggtccagagcaaaggcttgggagttttactaataaatcctcggccaggcgtggtggctcacgcctgtaatcccagcacatttggaggccgaggtgggtagatcacttgaggccaggaattcgagagcagcctgtccaacaaggtgaaaccccgtctgtaccaaagatacaaaaattagccaggcatggtggtgagtgcctgtaatcccaactactcaggaggctgaggcaggagaatcgcttgaactycagaggcagaggttgcagtgagccaagatagtgccactgcactccagcctgggtgacagagcgagattccatctcaataaaataaaataaaataaaaataataataaaataaatccttatcctgagtgacttggaatggtagctgggcagtactagcattttgttgaaaggtaattgtgggtcagtactctgttaggtgcattgcatgatttagtaaataattcatataataaagacagggaaggaacaaggatgggatggggattatcaagatagaagatggaaactgagctttttcaggcaggcaatggcaggaagcagggtgcggaggcaccttgattaacaatgggacccagcagcctggaa

SEQ ID NO: 8650 - DNA, 704 bp, Homo sapiens
ttcaagggattctcctgcctcagccgccccgagtagctgggattacaggcatgcaccaccacatctggctcattttgtatttttactagagatggggtttctccatgttggtcaggttggtcttgaactctcaacctcacgtgatccgcccgcctcggcctcccaaagtgctgggattacaggtgtgagccaccgcacccagccccctgctccaatttctaacmaatttggagtaaatctctaattccaggcagggagccaggatgggcctcctaggcaggggcctgaataggccctagggccttgagattccagcttatcaggctgtgactgctccccttgttggcattagacaaggacaggctgcctttccccaggtctcaggtatcattggaaggtccagatgaaagttaagtgtagcttaattaacagtatgtgaggctattaagctaggatctaggtagattcttatttatatcctaaacttgaatgtcctttactggcaaaataatggagcctcctagaaacgcaccagcttcttgtttgctctccctgtgagacgtgaaggccctttggtggtgttcatcttccctgatcacctcagccagagctgctggaacacctagtcaggctccaactaacatcactggggttgtctgtgctctcctcatctcccctgttagacttgggggtgagcgtcagga

SEQ ID NO: 8651 - DNA, 704 bp, Homo sapiens
ttcaagggattctcctgcctcagccgccccgagtagctgggattacaggcatgcaccaccacatctggctcattttgtatttttactagagatggggtttctccatgttggtcaggttggtcttgaactctcaacctcacgtgatccgcccgcctcggcctcccaaagtgctgggattacaggtgtgagccaccgcacccagccccctgctccaatttctaaccaatttggagtaaatctctaattccaggcagggagccaggatgggcctcctaggcaggggcctgaataggccctagggccttgagattccagcttatcaggctgtgactgctccccttgttggcattagacaaggacaggctgcctttccccaggtctcaggtatcattggaaggtccagatgaaagttaagtgtagcttaattmacagtatgtgaggctattaagctaggatctaggtagattcttatttatatcctaaacttgaatgtcctttactggcaaaataatggagcctcctagaaacgcaccagcttcttgtttgctctccctgtgagacgtgaaggccctttggtggtgttcatcttccctgatcacctcagccagagctgctggaacacctagtcaggctccaactaacatcactggggttgtctgtgctctcctcatctcccctgttagacttgggggtgagcgtcagga

SEQ ID NO: 8652 - DNA, 745 bp, Homo sapiens
tttatcacccactaaagcttagagaggccgttttatcctagagttgagtttgattatcagaaaccagcataaactttgccctaaataaacagttcaggtaaggaaaggatttttccttagtaaaattaatgttttgatactattgtattatggttctagagagaaacagaaccagtacaatgtgtgtgtgtgtgtgtgtgcgtgtgtgtgtgtgtgtgtgtgtacacacagagagagatttattttatggaattggcttacaagatgatggaggctcggccaggtggggtggctcacacctgtaatcccagcattttgggaggctgaggagagtggatcacctgaggtcwggagttcaagatcagcctggccaacatggtgaaaccccatctctactgaaaatacaaaaattagccaggcgtggtggtgtgcacgtgtaatcccagctattctggaggctaaggcaggagaatggcttgaacccagggggcggaggttgcagtgagcccagatcgtgccactgcactccatccagcctgggcgacagaagaagactctatatccaaaaacaaacaaacaaacagaaaaaaccagggagactggcaagtccaaaatctgcagggtgggcagcagactggagacacagggggaactgaagctgcagtttaagtctgaaggccatcaggctgaagaaatttttcttgctccggagagtcttttgttctgttcaggctttcaactgatt

SEQ ID NO: 8653 - DNA, 745 bp, Homo sapiens
tttatcacccactaaagcttagagaggccgttttatcctagagttgagtttgattatcagaaaccagcataaactttgccctaaataaacagttcaggtaaggaaaggatttttccttagtaaaattaatgttttgatactattgtattatggttctagagagaaacagaaccagtacaatgtgtgtgtgtgtgtgtgtgcgtgtgtgtgtgtgtgtgtgtgtacacacagagagagatttattttatggaattggcttacaagatgatggaggctcggccaggtggggtggctcacacctgtaatcccagcattttgggaggctgaggagagtggatcacctgaggtcaggagttcaagatcagcctggccaacatggtgaaaccccatctctactgaaaatacaaaaattagccaggcgtggtggtgygcacgtgtaatcccagctattctggaggctaaggcaggagaatggcttgaacccagggggcggaggttgcagtgagcccagatcgtgccactgcactccatccagcctgggcgacagaagaagactctatatccaaaaacaaacaaacaaacagaaaaaaccagggagactggcaagtccaaaatctgcagggtgggcagcagactggagacacagggggaactgaagctgcagtttaagtctgaaggccatcaggctgaagaaatttttcttgctccggagagtcttttgttctgttcaggctttcaactgatt

SEQ ID NO: 8654 - DNA, 808 bp, Homo sapiens
tgcctattatagcacaygtctggccatttatttatgagtgcagcaagcaggtttctatcacttactgtgatggaagagaaaaagaaggaaagagaggcaacatcttgatgaaagatattgcaaatttgaatgcaactattctaggaagtgcatatatagtagagaaatcattaagccattggcttggaactgtcagactttactgatgaggaaatggaggctgagagaggttcacttgatggaattcatgtaataaaaggcggtagagtgatttgaacccaagtcagactgagccacacattttctaccagtactctgtacttactaggagatggtgatctcatgtataaatgttaactgacaacttatctcagacacctgtaagttaaacggacaccataattcaacttgaatttggctggggaaccataaaagaacccaagaccagtgagacatgggcacacttagtatcatgccccagcactcatttagaaagaaatgaatcacagaatatgtcagccatagctcatttaatacaaccaaaaataggtatttcgtagctattttccacctaaagactatccccagccagctatgcttgtgaggtagcacatcccaaacacgggtgggagaaccatggacaagtgcacctagccatctttataaacctgcctacaatgaataaaatggaaatggtcagtatgaagcattcagtacttaaattgctctgcttaactgatgaaactcaaatactgttcctcttcagtatgctttatttcttttataaacataccaactttctttaagg

SEQ ID NO: 8655 - DNA, 753 bp, Homo sapiens
gcttgaaagtgatggggcatggcctgaccacactatctcctactttgcttctgttgatcttatctcccactgagcctttagcattctgattcatcaggctccaacctgcactcattgcctttgaactcacctatccacgggatcatcatatgcttcataacgatgaagcctgtcaaaggagattacacaaagaataaaataacgtggcatactgatggcaaataggataatacttaaaatcctgtaataccggatttcttctaaaaagcataagtcttccacctccattgacttaactgttttcagaacaggtagagaagttatttaaactattattttatgcagaagtaaaaataaaatcgccatccattttatggatgagaaaacatcacaagaggttaagagacttggtcagggtcacacrgaagcaaagctagaacccaagtcctgtaattaaatggtgttagctgatttttttctttaccatccttttcatctcaccctttgagatgctggcatataagaccctttacttcgtagaaataaactttacaatagtgatagtgagacagattgagctagaaaatgtgaaatcaaactaacctgcaggtagaatcgcatattttatgactaaggcatctgcttagagtttgaaatttctcaaatgcccactaagtcagggaatgcagcagaaatacaaaggacatgattctatttttaaaaatgtataaaaaaaaattactccctagcatc

SEQ ID NO: 8656 - DNA, 490 bp, Homo sapiens
tctagtaaaagtacaaaaaactaggtgggcgtggccaggcgcagcggctcatgcctgtaatcccagcactttgggaggctgaggccagcagatcataaggtcaggagatcgagaccatcctggctaacacggtgaaaccctgtctctactaaaaatacaaaaaaaaaaaaaaaaaaaaaattagccgggcatggtggcaggcgcctgtagtcccagctactcgggaggccraggcaggagaatggtgtgaacccgggaggcagagcttgcggtgagccgagaccacgccactgcacctccagcctgggtggcagagcgagactccgtctcaaaaaaaaaaaaaaaaaggcacccaggctgacagacgaactggagcaggccgcatctgaaggatgtcaccagtgtgacattctcttgacaatgcagctgaactgtctactgaaaaaaacggaggataaagacctcatccagaggaggccagtggtcacta

SEQ ID NO: 8657 - DNA, 443 bp, Homo sapiens
tgggtgacagagtgagaccaggaaggaaggaaggaagggaaggagggagggagggaagaagagagagaggaaggaaggaaggaaggaaggaaaggagagaggaaggaaggaaggaaaacaaaaaggaaagaagggaaagagaaaaagagagaaaaaggagaaaccccactgggttcctgggcttttattgctggccgcattcattcaggcccgcctggtggtccatcctcttatcctctttccctccaccctccaygagtgtctctcactttctcctgttggggctttaaaacaataccccaaaatgaaggcctcagcagcgccctcagaagcaagtttttctctgaccttctcctgtccccctgtctcagtcccactccccccgaggctaaccctagaaactagcatccctagtcaggattcctgggcaggtcatacaaacc

SEQ ID NO: 8658 - DNA, 651 bp, Homo sapiens
tggctcatgcacatctggtccactagggggcagtgaatgatcgcgcctccagcgggmgggcttgttctacatccacctgaagtgtgcaggcctttcacacaagtgagatgcgctgccgccaaggcaggtgtagggactagccagttattgctactagcataatatgccagaaggatgaagtgaaattatcgtttgaaaaactgaacaatgaaaaaagttcatttttaccaataaatttgcatggtaaggaacaggtggtaccgctgtacctgcccgggtcctgttccctggctcctggtggagggcagtgaccaggctgggctgcacccagaagggcagccacggagaggggtagagccagggagccccgtttacgcagttgctggggctagcaaccaccgggcacgagtgaccaaggcgggcttcccctactcatcctgtccctgtgccggggtccatttgggggagtcccaggcctggaagccgaacagcacacatccaggggcaccatccgagccgtaggctgtgtggatgccccctggagccgggcagttcccagatcatccccgctcccaccacgtgggggccctgtagagagaaaggcaacaccggagcaaaattaggaattggggccagctggatttcaatgtc

SEQ ID NO: 8659 - DNA, 541 bp, Homo sapiens
catccctggctggggcctcgtgccgccagcagccccctccgcccacctgccctcccagctgtcccagtcacacccggcacccatgtgccctgtggaaatctgaccagcctcgcagcgccctccaaggagacagctgacggatggggcttgggagagtgggggtcatgtgggaagcagagctcaggccagaaagygggagccgccctggccgggcagggagacactggcagtttctgcttgccgtgtgaccttgagctccttgctgagcctctcagggctggcaagggctgctctgagccacctggagctggggctaagtacaggcaacttgtgggttcccgggtccatgggctcacacctggaacttggcaccggcctccattgggcaccccccagacccccaccctgtgggccagaatgatgggatctgactggctgtgtgagtccaggctaatgtatcggcttgtctgggcctcagcttcctcatcacaaagttgaaagtgttggcagctggggtgccgtgcagtagcccggcccctcc

SEQ ID NO: 8660 - DNA, 541 bp, Homo sapiens
catccctggctggggcctcgtgccgccagcagccccctccgcccacctgccctcccagctgtcccagtcacacccggcacccatgtgccctgtggaaatctgaccagcctcgcagcgccctccaaggagacagctgacggatggggcttgggagagtgggggtcatgtgggaagcagagctcaggccagaaagcgggagccgccctggccgggcagggagacactggcagtttctgcttgccgtgtgaccttgagctccttgctgagcctctcagggctggcaagggctgctctgagccacctggagctggggctaagtacaggcaacttgtgggttccygggtccatgggctcacacctggaacttggcaccggcctccattgggcaccccccagacccccaccctgtgggccagaatgatgggatctgactggctgtgtgagtccaggctaatgtatcggcttgtctgggcctcagcttcctcatcacaaagttgaaagtgttggcagctggggtgccgtgcagtagcccggcccctcc

SEQ ID NO: 8661 - DNA, 1134 bp, Homo sapiens
  misc_feature (1)...(1134): n = A,T,C or G
ggaaynnnnnnnnnnnnnnnnnnnnnnnnnnnnnnnnnnnnnnnnnnnnnnnnnnnnnnnnnnnnnnnnnnnnnnnnnnnnnnnnnnnnnnnnnnnnnnnnnnnntcagggcacacctcggagatatcagtaacttcacccatcctgagacattttaggagaagctggaggctattagcatactgtttcctcagggtttgttcaggtacaggcaaggcagaggctcagggggaaagacagatcatagttccaggttagaggggctgtgagcagcagagactgcagagactgcacgcagggttcacagtttgctccataaactggccctgctcaagatgctcctctgccttcctcgcttcacctctgcaccactgattgagtgcagtgagcaatgccaatgggaccaaactgtgccaggctccatgaacgtgctctgagcccacttcactcagttctttcctttcgtgtggcactcaatcagctcattgttgaaatgtgcactgttcaagtggtagacttctgtatctgaggaaattctgagctgagattaagctgctgcatgatttcagcccccttcaaatttaatctctgctcatagtgctatttattctgcaaaatcatttgtatatagcacattttcctcattatattctctatgaatccaattacactaaggctgttgatacaggaccatgatcttggatcatactcatgaccaatggattggttaactgagagtttctttatctcctctcccccttccccagccctccagcctcagattaatatctagaagcttctggaagactgataacaaaatgtttttgcaaagagaaaagtttggttatttttcttgagctttggataaccaagtttacttatagtctggcaaagaataaccatagaaggcacaggcctggatgctcaaattctttctcttaaaaatgaatgtttatattgatctgaattagaagatactgagggtgacggagtgggataggccacataggacctgctgtaaggtaggagtcctgttcttgtagtaatttagagagaagcaaagaaaagtggcacattggaagacaagaggaatcttttgcatatgatgctgtgtctttttcagtcttgtttatc

SEQ ID NO: 8662 - DNA, 1134 bp, Homo sapiens
  misc_feature (1)...(1134): n = A,T,C or G
ggaatnnnnnnnnnnnnnnnnnnnnnnnnnnnnnnnnnnnnnnnnnnnnnnnnnnnnnnnnnnnnnnnnnnnnnnnnnnnnnnnnnnnnnnnnnnnnnnnnnnnntcagggcacacctcggagatatcagtaacttcacccatcctgagacattttaggagaagctggaggctattagcatactgtttcctcrgggtttgttcaggtacaggcaaggcagaggctcagggggaaagacagatcatagttccaggttagaggggctgtgagcagcagagactgcagagactgcacgcagggttcacagtttgctccataaactggccctgctcaagatgctcctctgccttcctcgcttcacctctgcaccactgattgagtgcagtgagcaatgccaatgggaccaaactgtgccaggctccatgaacgtgctctgagcccacttcactcagttctttcctttcgtgtggcactcaatcagctcattgttgaaatgtgcactgttcaagtggtagacttctgtatctgaggaaattctgagctgagattaagctgctgcatgatttcagcccccttcaaatttaatctctgctcatagtgctatttattctgcaaaatcatttgtatatagcacattttcctcattatattctctatgaatccaattacactaaggctgttgatacaggaccatgatcttggatcatactcatgaccaatggattggttaactgagagtttctttatctcctctcccccttccccagccctccagcctcagattaatatctagaagcttctggaagactgataacaaaatgtttttgcaaagagaaaagtttggttatttttcttgagctttggataaccaagtttacttatagtctggcaaagaataaccatagaaggcacaggcctggatgctcaaattctttctcttaaaaatgaatgtttatattgatctgaattagaagatactgagggtgacggagtgggataggccacataggacctgctgtaaggtaggagtcctgttcttgtagtaatttagagagaagcaaagaaaagtggcacattggaagacaagaggaatcttttgcatatgatgctgtgtctttttcagtcttgtttatc

SEQ ID NO: 8663 - DNA, 736 bp, Homo sapiens
ttcatagtctatattatctttctattatcttccacactcctcctgcaccaatgcattctgtgctccttctacagtgacctcttggctgttaaccaaaatatgtcatgcttgggtttctgtgtgtgctgttttttctccatgaaatacctggcaagtttctatctgcctttttggagtatgtagaggttccagccttaaaacctacagacatgtagaaggatctacacatatatacatttcaagggatcaacttttaggtacatgcattttttttctgagtatgctatgaccctcaaaatattagggaccactattttggactcagtgtaaccaccctttccattgtaaagtcttcactttttagtgatgctcttarccattgaatatcatgtaacatataacattttctttaatatttttaagcaggcaagataactgttgctttcagcaggaaatcaatgggtcaaagtgggattctaagcaggctaactcctgtatgaagtgggttcagagaagaatctagtgctcaagcacagccccatttgatgaatgccttgaaaatgcatgatcaaaatccactcccctaatttttcttttctttctttctctttctttctctctttctttctttctttctttctttctttctttctttctttctttctttctttctttctttctctctctttctttctttctttcttctttccttccttcccttccttccttcttcctt

SEQ ID NO: 8664 - DNA, 617 bp, Homo sapiens
ttttaatatgggggttcagttacccccatattacagacaaggaaactgaggtgcagatcccagagagggggrgagagagagcaccattctggtatgtagcagggggagtcagagaacaaaaatcggactgactgataagaggcaaaggcactggtgcaggctcttccccagcttccagctctttcaaccttctgggcctcgactctgccctaaggagaggctgaggaccaggtgatgggcaccaatgtgtggcttcttcacatcccacaggccggaccccctgggcctcaccttccagtgagggaagagagaggtgactgccttttctttctctgcacagagcagcaggggagtcgtgacccccaggggctcagtagagcatgagcctggccattgccaagcggcccgcccatgcgtgctgtggttacacggtcttcatgctggctggggagccccgagaactcgggtttggttcgtcctccaaacacgtgaacacgtgttgagcactgactgtgaattcggcagctgtgatgggggctgaactcagggccaaggagccaggctccactccactgtgacaccaggtgtggggctcgggtaagtcacctctgtggcct

SEQ ID NO: 8665 - DNA, 738 bp, Homo sapiens
aggagccccgctctccccttagagacggatgcagttccgtgcacacaggccctctttcctgtgtaggggaggggcatgctgtctgcacatggcatgctccctcctgcccagggaagccaactgccatattagcaaagatggtttgaaaatgaacaagaatcccaacttaaaatatatatatatatgcagtcattccttggtatccgaggrggattggttccaagacccccatggtaacaaaatctgcagatgctcaagtccctgatataaaatagtgtcgtatttgcatagaacttacacaatccttttgtgtgctttaaatcatctctagattacttatatatatctaatacaatgcaaatgccaagtaaatggttgttatactgtctttttagaattggtattatttttcattgttgtattgtgatttttattgttttttaaagtatttttttatcctggcagggtgcagtggcttacgcctataatcccagcattttgggaggctgggtcactagaccctaggagttggagactagcctgggagacaaagtaagaccccatctctacaaaaaaaaaaaaaaaaaacgctggatgtggggtcgggcaccagtgacctcagctacacgggaggctgagtcaggaggattgcatgacccagaggtctaggatgcagtaagccgtgatcacaccactgcactccagcctgggtgacagaacaaaacctgtcaaaaaaaa

SEQ ID NO: 8666 - DNA, 681 bp, Homo sapiens
tggtggcacaagccttccccagtcctgcagccttcgggaagcggcggtgcccagggcgcagagctctggcgttgcactcatgggcttatgctgccctctagtgctgtgctcttaaaatagccgcgtggctttgccacttaaggctgatgcggaatctagggcctcgtgggccctctaaagaaactgcctcattgcatcaaaatcaatgccctgctcttctaacagacgctctctaatgccctstaatgaaacccatacagacgatcacctatctatgctccaaatcgcaaaagataaacataatgtcttaactttaatataaagtggaagtataagaacttaaagaaaagtagcttttatagcatggaacttgtcttgcaatgagcttgacctacactcaccagaagcaatttcttaaatacccactcagaggtgacactgcttccgctgagaaacgctcgtggaaggtcgggctggccagccttgctgtaaagggccaggtggtgcatacgcatggctttgtgggccataagctcccagccacacctacacagccctgtcattgtgacgcaaaggcagctgcagacagcagcaagtgaatgggcatggccacattccaacaaaacatcatttgcaaaaagaggcagttggctagatttggcccagaggttaatgatttgt

SEQ ID NO: 8667 - DNA, 810 bp, Homo sapiens
taattgttgggaaattgtgattggctttcatacttctagtcttgatttgacttctaaagtagccaagcagtccagggaaagatgacctccatgaagaacatgtgctgaggacttctggtgaggttcagaggagaataaacagtgagaagaggaagggctctttgcaaaacttggcctagagctccaggcctgaaaatggtactggacaacctcaatatccaaccataggggagagaggaagtgaatcacaggtcagcgtaagtaactgttatgctgttcctatgtgtcatgtgttagaaaatattaatgtggggaaaatcttgtgtcgtattaatttaaaaatagctataaaattaggtatcctataattccaactttattaaaaatctgtaaaaaacctggaagaggctggacatgatggctcatacctttaaccccagcaatttggaaggctgaggtgggaggatcgcttgagcccagcacttcaagaacagcttgggcaacatagcaagaccttgtatttacaaaaaaattaaaaagttagctgcgagtggtggctcacgcctgtagtcccagctacgtgggaggctgaggagggaggctcacttgagcctgaaagtttgaggctgcagtgagccaagatcacgccactgcactctagcctagcctggtgacagagtaagacattgcctctaaaaaaaaaagaaaaaaaaaaaggaaaaggaaaaagaaaaagaaaaaaaaaacctggaagaaaaaacatcaaaatwtattaatagcagttatggatttttttcagttttggaaatt

SEQ ID NO: 8668 - DNA, 1095 bp, Homo sapiens
tcgtgtatggggtgttctgagattcacacctttcctaagggtacggctgggccctgcagtggctgcggtggctgtcaacttcaatgtgcactgttccctcctmtgaagccatatctggtgataacatcaatgtgccagacttctctacttatatcacttgtttgatgagtttccatttttctccactcttgtctgtaaatgcttgacctgttggaagaaaaaaaagatgcaagctttattttctgtgtatatgcaaacctgccctcataaacagttttcaaccacagtcaacgaagcatctgaatcaagctgattttcaattacatgcaccaatttgttcctgtgctttactttttgtcttatatgtacatctctaagacttcgtgaaattttttgaagtccagggttatactgtatcaagaacttttaaaattaagaatgcattatttcactgattttcacaatccccttcggtgatgatatccttggaatatttcactgaatttctaatttcaaagtgattgtaacaggagctggaggagagaagcagaacatagtgaaaccattcatggaatgtaatttctattccactcatgttagggaagccgaagtctaggagagccacggtaacgccattttaggttcagctctgtcttgagaccaacaggtaaccacattcattgttacccactacccatagtcttaagatgcttacggttaaaaggaaacagcttaaacatacgtacaaggacacacttctgcaacagtagtgtgtccggaattggtgggttcttggtctcactgacttgaagaatgaagccgcagaccctcacagtgagtgttacagctcttaaggtggcgcgtctggagtctgtcccttctgatgttcagatgtgttgggagtttcttccttctggtgggttcgtggtctctctggctcaggagtgaagctgcagaccttcgcggtgagtgttacacctcttaaggtagcgcgtctggcgttgttcgttcctcctggtgggctcggggtcttgctgggctcaggagtgaagctgcagatcttcgtggtgagtgttacagctcataaaagcagcg

SEQ ID NO: 8669 - DNA, 1095 bp, Homo sapiens
tcgtgtatggggtgttctgagattcacacctttcctaagggtacggctgggccctgcagtggctgcggtggctgtcaacttcaatgtgcactgttccctcctatgaagccatatctggtgataacatcaatgtgccagacttctctacttatatcayttgtttgatgagtttccatttttctccactcttgtctgtaaatgcttgacctgttggaagaaaaaaaagatgcaagctttattttctgtgtatatgcaaacctgccctcataaacagttttcaaccacagtcaacgaagcatctgaatcaagctgattttcaattacatgcaccaatttgttcctgtgctttactttttgtcttatatgtacatctctaagacttcgtgaaattttttgaagtccagggttatactgtatcaagaacttttaaaattaagaatgcattatttcactgattttcacaatccccttcggtgatgatatccttggaatatttcactgaatttctaatttcaaagtgattgtaacaggagctggaggagagaagcagaacatagtgaaaccattcatggaatgtaatttctattccactcatgttagggaagccgaagtctaggagagccacggtaacgccattttaggttcagctctgtcttgagaccaacaggtaaccacattcattgttacccactacccatagtcttaagatgcttacggttaaaaggaaacagcttaaacatacgtacaaggacacacttctgcaacagtagtgtgtccggaattggtgggttcttggtctcactgacttgaagaatgaagccgcagaccctcacagtgagtgttacagctcttaaggtggcgcgtctggagtctgtcccttctgatgttcagatgtgttgggagtttcttccttctggtgggttcgtggtctctctggctcaggagtgaagctgcagaccttcgcggtgagtgttacacctcttaaggtagcgcgtctggcgttgttcgttcctcctggtgggctcggggtcttgctgggctcaggagtgaagctgcagatcttcgtggtgagtgttacagctcataaaagcagcg

SEQ ID NO: 8670 - DNA, 1095 bp, Homo sapiens
tcgtgtatggggtgttctgagattcacacctttcctaagggtacggctgggccctgcagtggctgcggtggctgtcaacttcaatgtgcactgttccctcctatgaagccatatctggtgataacatcaatgtgccagacttctctacttatatcacttgtttgatgagtttccatttttctccactcttgtctgtaaatgcttgacctgttggaagaaaaaaaagatgcaagctttattttctgtgtatatgcaaacctgccctcataaacagttttcaaccacagtcaacgaagcatctgaatcaagctgattttcaattacatgcaccaatttgttcmtgtgctttactttttgtcttatatgtacatctctaagacttcgtgaaattttttgaagtccagggttatactgtatcaagaacttttaaaattaagaatgcattatttcactgattttcacaatccccttcggtgatgatatccttggaatatttcactgaatttctaatttcaaagtgattgtaacaggagctggaggagagaagcagaacatagtgaaaccattcatggaatgtaatttctattccactcatgttagggaagccgaagtctaggagagccacggtaacgccattttaggttcagctctgtcttgagaccaacaggtaaccacattcattgttacccactacccatagtcttaagatgcttacggttaaaaggaaacagcttaaacatacgtacaaggacacacttctgcaacagtagtgtgtccggaattggtgggttcttggtctcactgacttgaagaatgaagccgcagaccctcacagtgagtgttacagctcttaaggtggcgcgtctggagtctgtcccttctgatgttcagatgtgttgggagtttcttccttctggtgggttcgtggtctctctggctcaggagtgaagctgcagaccttcgcggtgagtgttacacctcttaaggtagcgcgtctggcgttgttcgttcctcctggtgggctcggggtcttgctgggctcaggagtgaagctgcagatcttcgtggtgagtgttacagctcataaaagcagcg

SEQ ID NO: 8671 - DNA, 1323 bp, Homo sapiens
tgagaagccccaagcagctcgtgtttgcacagattctctagtgactaagactgttcttattttctctacgcctttttccactttcccataagcatttttagactatgcactgtttttctacactgaaatcatcaagtcacctccaaatcttaaaaccaagcagagaaaggccattatttaatcatagcagttatggggtacagaagcagtcttcacatttcctacatcacatgcagccagaaatcatttcctcccactgtaaacccaccagattttttttcaactcacaggaagaaacaatgttttggtctcacttatttgcaggtatattggaggtttgtatatcttaaaagagaaactgtctctaagcccccaaacccaaaccaaggttaaaaaatgccccctttttcctatttggcctggaagccaaataatgctttcaaagtaaacctgtgcatttttaaaaaccaatgaggataattcagaataaataaataaataaataaatattcaagttttctctcaattttgcagatctggccacacatcacatcagcctcagggtcttcaacattttgtgactgccacgagctttccccagaacgataagatcaacaccggtggctgaatatatctctktctctaattaaaggcttccttctgtgctgtgctatggattaacttgtaatctaccggcaggtcttcttatgctagttaccaaatacacagttccagggacgaattctctttgaaacacctcattgatgagtatttaaagcagggatccctaacctctggcctacagacatgtagcattccatggcctggtagaaaccaggcttcacagcagaaggtgagtggcgggccagcaagccaaacttcatctgtgttcacagccgctctccgtggcccacattaccatctgagcttcgccccctatcagatcagtgatggcattagattctcacaggagcatgaaccctattgtgaactgtgtgtgcgaaggatctgggttgtaagcttcttatgagaatctaaggcctgatgatctgtcactgtctcccatcacccccagatggggctgtctagttgcaggaaaacaagctcagggctcccactgattctactttatggtgagtcgtagaattattttattatatattacaatgtaataacaatagaaataaagtgcataataaatgtaatgcacttggatcatcctgaaaccatccctgtctccaccccatccatggaaaaattatcttccatgaaaccagtccctggtgctgaaacggttggggactactaatttaaaggacaccc

SEQ ID NO: 8672 - DNA, 799 bp, Homo sapiens
  misc_feature (1)...(799): n = A,T,C or G
atacaccatggaatactatgcagccataaaaaaggatgagttcatgtcctttgtagagacatggatgaagctagaaaccatcattctgagcaaactattgcaaggacagaaaaccaaacaccacatattctcactcttaggtgggaattgaacaatgagaacacttggacacagggtagggaacgtcacacatcggggcctgtcgtggggtgggggaaatggggagggatagcattaggagatatatctaatgtaaatgacgagttaatgggtgcagcacaccaacatggcacatgtatacatatgtaacaarcctgcaccttgcgcacacgtaccctagaacttaaagtgtaataataataataaaattcttttatgacaattttagacaaacagtggaggttggagaattgtttttttaaaaaggcccctaaagaaaatatagctaaatgttgatagtgattgttataaagaacatttttctaatttttatagttctacatttttaaacttttttgagcatgtgttatttttgtcatggaaaaaatggacactgtgatggcctttttattcacttctcttagcctggtatatgtggagaagaattggtcagcttatgcaatgtgtagaaaaactttgggtactaacaaataaaactttcccaggaaacaagttttgaaaatgatttaactttgaggntttaaaaacactttaaacattccctttgcaaaaaaattcattgaaaacaagccgatggtcttaggaaatattcagtttaaacatttacagagcaaaaatt

SEQ ID NO: 8673 - DNA, 632 bp, Homo sapiens
catttatactgttattttcaggactagcaattttggccaggagcagtggctcatgcatgtaatctcagcactttgggaggcaaaggtgggagtattgcttgaggccaggacttcgagaccagcttgggcaacatagtgagactttatctttagaataaaaagttaaataaataaaaagattagcaatcttatttaaatgacacatatattttgttcaatttctcaccattttcactgttgtcgttctagtttatctactgtctagtccactgcgttggtctcttatctttgcttctactcctaatctttttatagtcttttttgtttaggagttacaatgatcctttaaagtayaatcagataaagtataattttttgtgtgtgtgtgtgtatggcatagtctcactctgtctcccaggctggagtgcagtggcacgatcttggctcactgcaacctctgttcccgggttcacgccattctcctgcctcagcctcccgagtagctgggactataggcgcccgccactatgcctggctaattttttttgtatttttagtagagatggggtttcaccatgttagccaggatcatctcgatctcctgacctcgtgatccgcccacctctgcctcc

SEQ ID NO: 8674 - DNA, 632 bp, Homo sapiens
catttatactgttattttcaggactagcaattttggccaggagcagtggctcatgcatgtaatctcagcactttgggaggcaaaggtgggagtattgcttgaggccaggacttcgagaccagcttgggcaacatagtgagactttatctttagaataaaaagttaaataaataaaaagattagcaatcttatttaaatgacacatatattttgttcaatttctcaccattttcactgttgtcgttctagtttatctactgtctagtccactgcgttggtctcttatctttgcttctactcctaatctttttatagtcttttttgtttaggagttacaatgatcctttaaagtacaatcagakaaagtataattttttgtgtgtgtgtgtgtatggcatagtctcactctgtctcccaggctggagtgcagtggcacgatcttggctcactgcaacctctgttcccgggttcacgccattctcctgcctcagcctcccgagtagctgggactataggcgcccgccactatgcctggctaattttttttgtatttttagtagagatggggtttcaccatgttagccaggatcatctcgatctcctgacctcgtgatccgcccacctctgcctcc

SEQ ID NO: 8675 - DNA, 1513 bp, Homo sapiens
agatttaaggactagggtatgtgtttcaaatcaatgcatacagaagagcacgcaaatgcaaacatcttgatttcacccaagcaatctctgaaacatgtaagtttcatttggcctgaattggagcagtctcctagagggtcaaacatggcctttttgttattccaggatattccagagaaaaaagaaaaaaattaaaaaatagatggtaaccagattttgagaatagaaacctattttccctgttgcaagttattgtctcaagggagaaagggaataagtgtaaagcaagcctatttcaggaaaagattaaacaaagacaggccctgcctcagagttgtgagagtaaaagcatttgcagtggtgcagcttgaaagcatgccttattttattagcatccacttctcttctgaaaggctaattgtaaaatttatagagctaattatctctccagattaatatttatgaacatacaatagtaaatgtgagttgcaagtgttgtattaagcattggcttttcttttctctcttcacacatacaagcaaacaacagatatctcaaggtgatgttaatattctctctacaatgtatgtaaacagtcatgctaaatttttcttcccagttgctgcaaattggtatttacccagcaactgaaaactatttttaacagttaatactcttgaaatgtattgggatccttccgcaatatgactgagaacttggaaaatcaattacataaaagatcccctaatcaaacagtgaagagagagacttctctttattgactcatttaaactacattttattcttatatgacaaagggagcgtaatcaaaaacactttattgttcttcctgcacttggaatatggagcaaatgcacctttatttccaaaaacagaataaggttaaatgttgcacaaatactgcacttccacacaaatcctagtgtgttcattctaacacaatcagctgaaaccccaacttttgtgtataaatcttagcacttagctggttctcctatccatatacatacatcatgwagtttcctttctccatgacccaaggtagagaaaggtgtacagaggacagaagggaaagataacggaagccaagtttgctgacaaatgaatggctgtgggccagtcctggaactctgtgttttagttttcttgtccgcagacttaggggtattttgctctattgagaattcccaatcagggatttatggtttggcaagaagacaatggatgagttttgggaattctctaaccctccacctctaaaacctcgtatgaattgattatacatgaattagtaggagcatcttactgagaatattcatttgcttccagccattctcaaagggtttcaaaacctcagaaaggttaagggctattttactagatgacctccaagatcccttcctgttaaaattctctttaattcttgctatatccttgctgtaattttgctttagtgatccaccctttcttctgtgcaaatcaaacttactt

SEQ ID NO: 8676 - DNA, 796 bp, Homo sapiens
gccttcagtgggctgctttataataactatgaatataatgctatcaacattttagtggggtattactaaacgagctatattactaataagaaaactttacctctgcaattttggttacagtaaatgaccattatttatttagttgttcccttttgctaaatacaatttcactgcagcctcttaatggagagagaatatccagctttaaacattggttctgttttgctgtttcattttaatttaatctagtttgaaattgcattaaatacatcacggcaatgtactaaggctttacaatttctattgaggaagtgtataaccaaaagtttcctgtcagctggaggttagtcaagccccatgagtttaagcaccagccagcatttgcctgcttgtcaaaggagaaagaacttcctctgccccaacatccctcttgactgcaagtaaacttattgcctgtcataactctaggagtattcttgcctcacagccctgaggtcttagaccctgagtgcagcaagccagtgggtatckgccaaaggcctcaggctccctctaggctgcccctctgcttgccccctttttctcctcataactgccacctggcagccaattaaaagtcagagggaccaagtggtggcccatttggggaacctcaggtcactatgctgttttatttggtttttgcaatgacacttctttgtctgattttaatttgaacgaatataataaaaaatcaggagtctacatgaaaacccaagggcctggcatttcttgggaagtcagatctggccatact

SEQ ID NO: 8677 - DNA, 826 bp, Homo sapiens
acaacagccagcagcagctactgcagacttgaaatgtggctgctctgaatcgagatgtgttgaaagtttaaaaaacactatatttcaaagactgagtacaaaatgttaaaatgccttataaataatttttgcattgaatacatgttgaaatcataacatttggggtatattaaacgaaagaaaataaacaattttaccactgcttgttactttttacaaatgtgactgctagaaaattttaaattatatatgtggctcacattatattgcctttgaactgtgctaccttggagaacacagaacagctctaacattctcaactaatttcctttctggtgtttggacaaatgagagagtaagattgaggaaataagtcctaggaatgaatgcacttacagccccaaagcctgtagctactgctgtaaggtggctagttcctactctagcttagggatgctatggattcatctactctcttcttggctgtcgagaccctgggtctgatttacattgcgttctcggcacctagcccagcaccaagtggcccctgcatttgtccacagactagatgtggctgtatgggtgaatgactgtgttcattttgcagagatttgcctgtagttctccacctcttccaaacccaattcayaaagaaagaaattttaaaatgaacaggcagttacaatagcttataattactgcacaccaagtcctgggaaatatctgtgtgggaaagactgaaaacacaggtagaaatggggtgtcacctctcaggagtggcttcatttttgaagtgatggattatggtgaaaagggctccaataag

SEQ ID NO: 8678 - DNA, 274 bp, Homo sapiens
tcaaaaataaataaataaataaatamatacatacatacatacatacagacatacatacatacatacataaaggacaccttcatttaatcatcagcaaagggtaaaaagaccagctggaaacctggaggagtcacctgaattttctagtcatccaactcctcttcctgtggcaccaaagccacaaaataagggggaatgttcctgtggggcgtgtatctgcacaatgctatgacctccttctccagacacttgatgagcagagcactgaacagga

SEQ ID NO: 8679 - DNA, 779 bp, Homo sapiens
acctccccatctcccatactctagccacaaaaattccatggttccatgctacttgtaaaatgaaaggagtcaggggacacacttttatcatttagtagcggggtaccttgcgcaagccacataaacctctttgagctcccgtcgtttcaaaatggaggtgttatccctgcccctcctccctcatggggctgttgggaagctcaggggaggcagcagcagctgtgaccatcctcaatgtctytggtccttgcccctcctcactgacccctctcgccttcgtgaaatgcctcctctcctcaggctgcagaacactttctgcgtcctgcccttgcaagaaggcttttttgaccgttctggttgaagccagggctcaaaagtccaccttcatttagtgggtgatctctcacggtcgatagactcctccctggaccagcaaccaagagcaagggctttgtagttatactaagagcaagggctttatagtatagagtctggatatcaatcttggcttcagcactgaccagaagctgtgtgtcctgaatggagagcaagctccttaacctccctgagcctcaatttcttcatctataaaatggcctgataatagctatgtaattataattgtcacaatacagtgagatcatgaacagcacatagtagatatttaatcagtgggattcagtacttttattattatagttgttattcttggacaataaacaccttcaggcaatggatggaaaatctgtatgccctacaaaaacttagacatactaata

SEQ ID NO: 8680 - DNA, 779 bp, Homo sapiens
acctccccatctcccatactctagccacaaaaattccatggttccatgctacttgtaaaatgaaaggagtcaggggacacacttttatcatttagtagcggggtaccttgcgcaagccacataaacctctttgagctcccgtcgtttcaaaatggaggtgttatccctgcccctcctccctcatggggctgttgggaagctcaggggaggcagcagcagctgtgaccatcctcaatgtctttggtccttgcccctcctcactgacccctctcgccttcgtgaaatgcctcctctcctcaggctgcagaacactttctgcgtcctgcccttgcaagaaggcttttttgaccgttctggttgaagccagggctcaaaagtccaccttcatttagtgggtgatctctcacggtcgatagactcctccctggaccagcaaccaagagcaagggctttgtagttatactaagagcaagggctttatagtatagagtctggatatcaatcttggcttcarcactgaccagaagctgtgtgtcctgaatggagagcaagctccttaacctccctgagcctcaatttcttcatctataaaatggcctgataatagctatgtaattataattgtcacaatacagtgagatcatgaacagcacatagtagatatttaatcagtgggattcagtacttttattattatagttgttattcttggacaataaacaccttcaggcaatggatggaaaatctgtatgccctacaaaaacttagacatactaata

SEQ ID NO: 8681 - DNA, 776 bp, Homo sapiens
taattgtctttttcttttctttctttatttttttttttggaggcagaatcacgctctgttgcccaagctggagtgcagtggcgccatcttggctcactgcaagctccgcctcctgggttcacgccattctcttgcctcagcctcccgagtagctgggactacaggcgcccgccactgcgcccggctaattttttgtatttttagtagaggcggggtttcaccgtgttaaccagggtggtctcgatctcctgacctcgtgatccgccagcctcggcctcacaaagtgctgggattacaggcgtgagccaccgcgcctggcccctggattaattttctaatcctcaatttgccatctggaaaataaagatcaaacaggaatgcctttagccgttcccgccccacctctctccccggcagaacgtcagccttcctggtctaatcaattagacctggtctaattgacccctcaggatctcctctgatgtgtcccgggttccctccccagggtgccagaccagggcgcaccctccggaggcgcagggctgggatgcgccaagcagatcaggagctcccagataggcggggtcaggaaccgcctccctctttaatctctgagaatcacccccgcttccacaacttcaggtccacccacccagcagggtcccgcagctgcagctgggaaggtaattagcagccaccataattggggctagactgctgaggtcctggggagcgacccttgcaarggtgctagcccatccggcctctgctaacct

SEQ ID NO: 8682 - DNA, 667 bp, Homo sapiens
aggactatgacagcagcaatgttcagttcttaaccaagaaaactgccaggaaaactacttttttaaccacagcacttagtgctgggaggggatcagggactgtgacagcagtgcaagggtgtcttccctgatatttcacaaccacaagctgatcttcccctagattatggttttaaaaccttcataccrgctgggcgcagtggctcatacctgtaatcccagcactttgggaggccgaggcggccggatcacctgaggtcagaagtttgagaccagcctgaccaatatgatgaaaccccatctctactgaaaatacaaaaaatttagccgggcatggtggcatgtgcctgtaatcccagctacttgggaggctgagacaggagaatcgcttgaacctgggaggcagaggttgcagtgagccaagatcacaccactgcactccagcctaggcaataagagcaaaattccgtctcaaaaaaaaaaaaaaagcttcatacctagaattgtgtttagggtagccctaggatggttgtatcccccacccaatcttgacagaagcaaatgtacgttctctctggaggaaatcacctttgacctaagcctggaaaaattcccacaggtaagatctcaaaataaatgtattcataactaaaaatcacaaaaccca

SEQ ID NO: 8683 - DNA, 667 bp, Homo sapiens
aggactatgacagcagcaatgttcagttcttaaccaagaaaactgccaggaaaactacttttttaaccacagcacttagtgctgggaggggatcagggactgtgacagcagtgcaagggtgtcttccctgatatttcacaaccacaagctgatcttcccctagattatggttttaaaaccttcataccggctgggcgcagtggctcatacctgtaatcccagcactttgggaggccgaggcggccggatcacctgaggtcagaagtttgagaccagcctgaccaatatgatgaaaccccatctctactgaaaatacaaaaaatttagccrggcatggtggcatgtgcctgtaatcccagctacttgggaggctgagacaggagaatcgcttgaacctgggaggcagaggttgcagtgagccaagatcacaccactgcactccagcctaggcaataagagcaaaattccgtctcaaaaaaaaaaaaaaagcttcatacctagaattgtgtttagggtagccctaggatggttgtatcccccacccaatcttgacagaagcaaatgtacgttctctctggaggaaatcacctttgacctaagcctggaaaaattcccacaggtaagatctcaaaataaatgtattcataactaaaaatcacaaaaccca

SEQ ID NO: 8684 - DNA, 505 bp, Homo sapiens
  misc_feature (1)...(505): n = A,T,C or G
cgagcctcacctcacctcaagcgaagggcagcgcgcgggcgcccgcggaagagcccagggagcatggctccatgtagtccctcccggaactttcctgacatagcacttctctcctccgctgcagagaacaacgctgccaggcggaggaggaaggaggacaacgaagaggaggtggtggcggcggcggcgatasaggcggcggtggcgggagctggagctgaaagtgaggagcatcgcggacgagcgccgccgcctcgcgagccgccgaggggttcccgcccccagggtaaccaacgctccctcttaaaggcgccggccccggttttagaccgggaggtgagtgagagaagagaaagagggaggaggcaagtaaaaatggagggggcaagtcaagagggaggagnnnnnnnnnnnnnnnnnnnnnnnnnnnnnnnnnnnnnnnnnnnnnnnnnnnnnnnnnnnnnnnnnnnnnnnnnnnnnnnnnnnnnnnnnnnnnnnnnnnncg

SEQ ID NO: 8685 - DNA, 833 bp, Homo sapiens
aaaaggacctagtccttcaaataactagatcagtaggagaaagggaggaatcagaataaggagcctatgtgccaataaggtaatttcagcttcatccataacaaagctattgttgtaacctccataattagtgtaagcagtgtggtatccattccagcaatgggaacagtacttctggttgaaagartgcttgtctccaatttggcatgaaagttgaagctattataccatatgctaggcataacatgtctgattctaagactccttctccaatctcttccctaaatattttcattttattgccatccaaacttaggcagactagcttatatcatgtagaagtacctgaatactagatacaactccaatcagcattgagaccacaacaggtcaaaatggatgatggccagtaagtgaaacctctgctattacaaagaccagtatcaaattaatcatgaccaaactggctaattcagtgtgacttggtagctatgtcaacccaatataagatcaaaacccaagtctcttaatgttaagtttgatattcttcaaacaatttgttgcagattatttttctttttagtacaacaaatctagatggctatgaaatagtttaaaatcttttaggtttgttaatatccttctaggttttttttcatgctcttaaaatgagggaactcagggagacatacacaccttatagagggtttcatcccagatagatgttcggaaacaagaacattccaatgggcgagacaaacgcctcaaatcttcttctcgctctttaaaaatctaaattaaaaagcccaacatactgatcagcatataatagt

SEQ ID NO: 8686 - DNA, 592 bp, Homo sapiens
caaattttggacttgctagtctctacaattacttgagaaagttccttaaaatcaatctcaatctttctcaatctctctctctctaaacacacacacacacacacacacacacacacacacacatacgtatgtatgtatgtatatgtatattcacatattctattaattctgttattctggagaaccctaacacagacttcagtactgagagtgattctagagaataaccttttttttttttttttttttttttttttttaattgatcattcttgggtgtttctcgcagagggggatttggcagggtcataggacaatagtggagggaaggtcagcagataaacaagtgaacaaagaaacaagtgaacaaaggtctctggttttcctaggcagaggaccctgcagccttccgcagtgtttgtgtccctgggtacttgagattagggagtggtgatgactcttaacgagcatgctgccttcaagcatctgtttaacaaagcacatcttgcaccgcccttaakccatttaaccctgagtggacacagcacatgtttcagagagcacaggtttgggggtaaggtcacagatcaaca

SEQ ID NO: 8687 - DNA, 808 bp, Homo sapiens
aggacaagccatttcagttctgatttgtatattctctttttaaacctttcacaaacacattggtttgtgatttttttttttttcagagtagcattggtagctttgatgtagaagtggaaaaagyatgtgaaggattaatgcagttcctgcccatcccccacccccaccccccacaatctgtgttataattaggactttagagagttaaagattttggcatacagtgcttgaagggatgaaactagtagcagagctcgaatggattggaagacaagaacattgagtgaaatgggagacaatgaaagacaaaagtgggttctcttcgggtttgagaaataggtatagcagaagtaagggggagagctgggagaactaaaattgttggtaaattgcttaggatatatgaaattttttgtgcgttgacaaggtatagattttgactatgagtgggtaggctgaattacactaagacaaattgaagaggtttaaaaaaaaacttgaaaaaaccctgtcttgttttcagatgggttttctatatacttgctaatattactttaagatgagggtagaatttttggtggagaataattttattagtcagggtccaaagcctttgaattttgtccaagtgtgataagggtggttgaagagacatctaaaaaatagtgtagtcagatattgcaggataaatgatttggtgttgatgttgtcggctgtggagaacaggaactctggtccttgtggtgcatgtgacttctgaggatggggtttctcaagaggaggcctttaggcaagcagtaaattctat

SEQ ID NO: 8688 - DNA, 808 bp, Homo sapiens
aggacaagccatttcagttctgatttgtatattctctttttaaacctttcacaaacacattggtttgtgatttttttttttttcagagtagcattggtagctttgatgtagaagtggaaaaagcatgtgaaggattaatgcagttcctgcccatcccccacccccacccccsacaatctgtgttataattaggactttagagagttaaagattttggcatacagtgcttgaagggatgaaactagtagcagagctcgaatggattggaagacaagaacattgagtgaaatgggagacaatgaaagacaaaagtgggttctcttcgggtttgagaaataggtatagcagaagtaagggggagagctgggagaactaaaattgttggtaaattgcttaggatatatgaaattttttgtgcgttgacaaggtatagattttgactatgagtgggtaggctgaattacactaagacaaattgaagaggtttaaaaaaaaacttgaaaaaaccctgtcttgttttcagatgggttttctatatacttgctaatattactttaagatgagggtagaatttttggtggagaataattttattagtcagggtccaaagcctttgaattttgtccaagtgtgataagggtggttgaagagacatctaaaaaatagtgtagtcagatattgcaggataaatgatttggtgttgatgttgtcggctgtggagaacaggaactctggtccttgtggtgcatgtgacttctgaggatggggtttctcaagaggaggcctttaggcaagcagtaaattctat

SEQ ID NO: 8689 - DNA, 571 bp, Homo sapiens
tgccatgggcgtagcttactttctctggactcttctgggtcttaaggccagtttcctcatccactcaaaagaatgacagcaaggtgagcaaagcaaggcaggtaaatgaggaggactctttctggctgtccaacttttcatcaacttcccaaaggtttttggatgggacatgarcactcattccttctccaccctttagctaggccctgtcaactccaggaggaaggtagaagaggtcagagctgtggtctttcacttattcaagatgtttccttagtgttttgtgtttgggttttttttgttttttttttttttgacagagtcttgctctgttgcccaggctggagtgaagtgaagtggcataatctgagctcactgcaacctctgctttcgagttcaagcgattctcatgcctcagcctcctgcatagctgggactacaggcatatgctaccatgcctggctaatttttgtatttttagtagagacggggttttgccatgttggccaggctgatctcaaactcctgacttcaggtgatccagccaccttggcctcccaaagtgctggga

SEQ ID NO: 8690 - DNA, 801 bp, Homo sapiens
aataagattatgagattggggtagggctttcttaagctggccctaggcatgtgtctcagtctggacctatctgtatttctaagaatgaagttgtgacttatgctaggctcaaggaaagattaccctgtgacaactggttatgtgtctcaactaggtattggctccagatctatagagcactaaggggaagactggatcatgtgaagatataagcctactgggcaaaagctcatgaaagagtggtcattaatggaaaaaaaggaaaaagaaacataggccataatgtggagtactgagatcggcattccttagaagcagacaactccacaggaccttaaatatcttagttgctgttgcctagacctctgtagccacaaaaatcctgaccctcaagcttatagagaaaaacacccatggcacccttgtggcacactgaagaggttaattcagactctacttgtattagtctgattgtgtcactataaataaatacctgagtgtgggtaatttacaaacaaaagagaaaggggcaggatggctgactagatgcagctgggggagcttctcccacctagagagacagaacctattgagtagactgccatattccaagcagatcttcagaaagaaggcatccagaatcratagaggaaggatacagaccctggggctgatgaggaggaggttggaaccctgcacaaagttgctgagtaccagaagtcactgtgggtcccaagtggcaaccagagaaggggtgagtgagctaagaatagagtggactactctctccacagacctcca

SEQ ID NO: 8691 - DNA, 596 bp, Homo sapiens
gatttttcttaaaatcccagcagtatgcttggcacttagttaacactctaaatataatagaatgaatggattggacttaagagacaactgaaataaaggagagtttgaggaagggtttgttataggggagggatatgtgtcatgttgggaaatgccaacgtgagctctgctaaagatttaaaaagttataaatatttatagttaggaagaaacaggagagtgaagaaccaaactattaatagaagtgcccactctgaaaatgataatttattgttgctatccccacytctccttccaatttcatgagtggtaggaatgatgagtcaatcatggaaatttttccaaatgaattgggataccaatttagaatttgttttcctatttctcctaaaattcttctcaataaatcattttgtgcagccactaccaactaaatagaattagtataggacttgaaatccatttataattatagtacaaagctaaagatactgtgaaattaaagacatgtcacctctgaagtaagagagtaagggacaggtatatgcgctgaagcaggcctgtgaagtgcagccgaataccagagaaaaaagagg

SEQ ID NO: 8692 - DNA, 630 bp, Homo sapiens
tttgcacttgtgatgaagtgaacatgaggccatattgcagtgggtgggttcctaaatactataggacttgtgtccttataagaagagtggagggagacacacagggaggagaatgccatgtgaggacacagacacacgagggaggtcgccttgtgacagtggaggcagagagggaagtgctgcagctggaagcccagaaaccccaagggctaccagccacccctggaagccacgagaggcaagaaaatgtcctcccctccagcctgcatagggagtggggcaaaatccacaccttaattttggacttctggcctctagacggggagagaataaatttctgctgttttaagccactaggtttgtggagatttgttatggcagttctagggaatatagaaatggtaggtttggggaaatgagagtgtggcacagcgtggctggtctgaggagcggggaggagagaggagaatgagatgaggctggcrgtgtgggcagcagccagcatcatggcggcgtgttggttgtattcaggatgtgcttttcatcctaagagcagtgcattttaggaacacacccttctctgctgcggtatggggtgccctggaggccaggactgagagcagtgtggat

SEQ ID NO: 8693 - DNA, 783 bp, Homo sapiens
agctttaaataacacctcttaggaatgataaaagcctaaaacaatgttttggcaattccaatactaagaaaaagtttagcttctcttagtaacaggtgttttctaccawgaaatctgagttgcccacaatggaatccctttctcttatacagccttgccagagctctttttttttttttttttttttttttttttttttcagacagagtctcgctctgtcgccagactggagtgcagtggcacaatctcgactcactgcaatctccacctcccgggttcaagcaattcccctgcctcagcctccgagtagctgggactacaggcgcgcaccaccacacctggctaattttttttattttagtagagatggggtttcaccacgttggccaggatggtctcgatctcctgaccttgcaatccgactgcctcggcctcccaaagtgctgggattacaggcatgagccaccgtgcctggcctgccagagctcatttttaagatttagcctgacttgttttattcttcatccactcattcctttattcttataacccttcattcaacaaatatgaagcatctattatgtatgagacactgttacaggtctgaataaaaaattatgtggcacatacctactgttgctatctggtaaattatgtgctgcaattaacccaacattaataacagaaacaggaggacagtaaaatcaaaggcagcctgagtatcatcaaggatttattagctactctccatgtttccatggtcacattaaaacaacaaaacag

SEQ ID NO: 8694 - DNA, 826 bp, Homo sapiens
aaaatgtagacccccccccccatataatgtacagcctgccatggtttgaatatgtcccccaaatttcatgtgttggaaacttaatccctaatgtggcagtattgagaggtggggtctttaagagatgattgaatcatcagaactctgccctcatgaatggatgaagctattcatggattaatggattaatgggttattatgggagttggactggcggctttataagaagaagagagacctgggctagcatgttagcatgctcagccccactgcctggtgataccctgcatcacctcaggacttcagagtccacaccaccaaggaggctcctactagatgtggctccttgaccttggacttctcagctttcataactgtaagaaattccttttctttataaattacccagtttcaggtgttctattataagcracagaaaatggactaaaacacgtccttatcaagatataggctatttccaactccttatcacctttgtgacccttcccagataatcacaaacacttctccaagcaaccactgatcatatttctcttctcatagattaatgtgccagctctaaaatttcatatcgatggaatcatgcatagtgtatgtatgcacccttttgagtttgactttcctcactcagcgtaatgagttgaaatttatccacaaagaaaggaaatgcatctttatagaagttagtgagacttcctcagaaggggaccaagaagccatctttagaaatcaaatattgagtaaggagattttcttcacaacctcagttgggaagacccacatggctgcgggctggaggatccac

SEQ ID NO: 8695 - DNA, 782 bp, Homo sapiens
acctatgacctgtcagccctcactycaagatgtcctttttaagccacatattgatttatgattttgcctgtagcttctgccttcctgagacgtgcccctgcctttaaaaactcttgcttgtaagccagccaggaggtcaggtctccagtgggcgttgcccattctctctgcttggcgccctgcaaataaatgccctcctttctcccgctgtgaaactttggtgtggacgcttggctctattgtgctgggcaagtggaccccagatgggttcagtaacagtgacagggagcaagggaagatgctgtggggctcagatgccaggcccgtggtgcctgggacaggtgtccagtgagtgggtggccagaggggcctccactctagggaaggggtggtcgcttctcacctgcagctggttacagcttccttgggacacaggttgtggttgtcagatgctttttaaaattgtgtttcagagaaaagaaaactggtcaattttcagaggtgagactgcttagagggaaggtggcatgggttaaagccccagagagcaatgttgttgctagaacaccagggagcacggaattctgggcccggcttcctccttcacagccgtgcgccatggcggcctggtgccttctgtgccttggtttccatctgcagcctggagaggatggcaaggatgtggcctgtggggttgctgtgaggttggcatgagatgagcacagaagttctcagatgccccaggccctttgttaacattgtgtaaagtcaacagagggtcc

SEQ ID NO: 8696 - DNA, 781 bp, Homo sapiens
agattcgggcatccctgttttatattctgaccctgacagtttctgcttctaacatcttaggcaagtctctcaagtttcctcatctgagcctcagtctcctcatctgtgaaaagggagtgatactcccactccccrtctcatgggattgctgtgaggatttggtgaaacagtgtaagcgaaaatgcctggcacactgcctgcttcttagaggactacctaccccagcagactttctagaacatgtgaactctcagctagaaagagcctgggagctgtgaacgtctcaggaatccctgtatatcactgtcaagcctctgcactattgagttggaacagcttcttcatctgtcaagaatatgcaaaacatggcacaactcatttataaaactttggccatacctcctaaagctgaacatatgcatgctgaaggctctagcaattctactcccaggaatataccaagaaaaacgcattcatgtgttcacctaaaagtgcacaaatgttcacagcaaggctactcacaacagccccagacttgacaccactcaaatgcccatcaacagaaaaatggaaaaagtaaagtatgttgtattcacataatggactactacgcaacaatgagaatgaatgatctacacaacaacaaaatgctgagcaaatgaagccagacacaaataagcacccactgtatgattccatttatatgaagagcaggaaaaggcaaaactaatctatggtgctagaagtcaggatcatggaagggtaaaaccagagaggggca

SEQ ID NO: 8697 - DNA, 781 bp, Homo sapiens
agattcgggcatccctgttttatattctgaccctgacagtttctgcttctaacatcttaggcaagtctctcaagtttcctcatctgagcctcagtctcctcatctgtgaaaagggagtgatactcccactccccatctcatgggattgctgtgaggatttggtgaaacagtgtaagcgaaaatgcctggcacactgcctgcttcttagaggactacctaccccagcagactttctagaacatgtgaactctcagctagaaagagcctgggagctgtgaacgtctcaggaatccctgtatatcactgtcaagcctctgcactattgagttggaacagcttcttcatctgtcaagaatatgcaaaacatggcacaactcatttataaaactttggccatacctcctaaagctgaacatatgcatgctgaaggctctagcaattctactcccaggaatataccaagaaaaaygcattcatgtgttcacctaaaagtgcacaaatgttcacagcaaggctactcacaacagccccagacttgacaccactcaaatgcccatcaacagaaaaatggaaaaagtaaagtatgttgtattcacataatggactactacgcaacaatgagaatgaatgatctacacaacaacaaaatgctgagcaaatgaagccagacacaaataagcacccactgtatgattccatttatatgaagagcaggaaaaggcaaaactaatctatggtgctagaagtcaggatcatggaagggtaaaaccagagaggggca

SEQ ID NO: 8698 - DNA, 763 bp, Homo sapiens
caccatcatcatcttcatcctcactaacatttcttagtgcttactatgtgccagacatgatttcaaggactttcttttttctttttttttaaccaagtaatgtattaactttacctccaaaacaatctgctttgcagatgaggaaactaaggcacagagagataaagtaacttgtgcaaggtcacacagctagcaagaagtggagccagaatcagaatccaggccatctgaatccagggcctgtgctctgaaaaacagctttatgctgcctctaacagttgagaaacctggtctgtttatcagctgtcagcctcagcttccatttaggcagccacagacatcgataacattacctctgttcagggcagcgaggatggtaacttattgactttgtgtcttggaagggccgagcagttcctaactatctctgggcagctgctagtgcaatgcttcctggtggggaacagtctgattaatacactgacagagattacaaaagaaatagagwgttataatagcttgatccttctgcagcccaaagtccacagaaactctgaatttgtttcaaaataacttcagagctgcctctggcactgtgaaaatattgacgtatcttcccactgacctggaatcactttctcccctccctgccctggtcaagggaacttggaggcagggggctttggtgtctgggaggaaacaaggaagggagtgttaacactgaccccccgggaatgtggtcagacatgagctgtgagtctgg

SEQ ID NO: 8699 - DNA, 763 bp, Homo sapiens
caccatcatcatcttcatcctcactaacatttcttagtgcttactatgtgccagacatgatttcaaggactttcttttttctttttttttaaccaagtaatgtattaactttacctccaaaacaatctgctttgcagatgaggaaactaaggcacagagagataaagtaacttgtgcaaggtcacacagctagcaagaagtggagccagaatcagaatccaggccatctgaatccagggcctgtgctctgaaaaacagctttatgctgcctctaacagttgagaaacctggtctgtttatcagctgtcagcctcagcttccatttaggcagccacagacatcgataacattacctctgttcagggcagcgaggatggtaacttattgactttgtgtcttggaagggccgagcagttcctaactatctctgggcagctgctagtgcaatgcttcctggtggggaacagtctgattaatacactgacagagattacaaaagaaatagagtgttataatagcttgatccttctgcagcccaaagtccacagaaactctgaatttgtttcaaaataacttcagagctgcctctggcactgtgaaaatattgacgtatcttcccactgacctggaatcactttctcccctccctgccctggtcaagggaacttggaggcagggggctttggtgtctgggaggaaacaaggaagggagtgttracactgaccccccgggaatgtggtcagacatgagctgtgagtctgg

SEQ ID NO: 8700 - DNA, 769 bp, Homo sapiens
tcattcatcatatttcagatagaacccctttttcttcccctcctaggtaggtcttcctttgctcccaggaaaattttcataactcgtaactcatttagaagcaaaatgacctgatctgaactgatatgaaactgtttacattctttattcattcatttagtgtgaatattcacacacatcacctcaaaatattcacgtggggtgttaggtaatatatgatattyggtaggcctttctagaatccgaacagttctgaattcacacaaaacaaacctagctccaagtgttttggataaaggattatggacctgcattcttattttatgtgctctattcatgctatgctccacaggcctgatttttctccatattttctgcaacaccctgcacatatcagatgctccctaagcttggttgaataccagacacttgcctgattgaatgccacttggccagacttatgccctcactggtgtgatggttgattttaggtgtcaacttgaccggattaagggctaaccagatagctggtaaagcagtatttcttgctgtgtctgtcagagtgttccagaaaagactggcatttgaatcagtgagctaagaggaatccctctcatatggtttggctgtgtccccacccaaatctcatcttgagttgtagctcctataatttccacatgtcgtgggagggacctggtgagaggtaattgaatcatgggtatgggtctttcccatacttttctcctgacagtgaataagactcacgaga

SEQ ID NO: 8701 - DNA, 814 bp, Homo sapiens
gacaaatgcgccataattatgtaagagtaacataaatggaaactgggtaaagggtacacaggaaacttgcaatactctttgcagcttttcagaaaatataaaactatcctaattttttaaaaggtaagattataatctaaggaattcataaaggagacgtaaaatcagtgtatttgtgcatctcaaatattcttttttggttagaaaaataaagggcttatttcttttgtttgagttttcatatgaccaaggactcagttgtatgacaaagaagaactctgatcataatagcagaacccactgtttacagtgctcagtgttattaatagagacagaatagaagaagtgcatttacttaatattattgcactagccaattcatttagtgatgctattttacatttgggttccttttcctctgccatctctggtgatatgcacaaaccacttaagataagtaattttctcaatactaaatacacatgaaagagtaaaaatatatgaagattttcatttatgtagttttattttcatttactaagtaatgtggattgacactggaattacttaaaataagatttgatgaatagtgttttgtttcacaaccatttttaattaattaaaaactttcaatggaattaggccaatttataaatgccttattgattggagaacattattcaaaatttattgtccttttcctcaaataggtaacttcagagaataaaataatagttgatcaaaaaatgggaaattaagccaggyattgtggcatgcatctgttgtatcaactacttggaaggatgagacagga

SEQ ID NO: 8702 - DNA, 612 bp, Homo sapiens
tctgtaatacaagctgatgatctcaaaccaactggcccaagaccacatcgagaggccctgatagatcaggaccagtccaggaggttgaaatgagggggacccatatgttgccctctctttgggggactttgtaaatggcaaatcaagggccggattcagcaaaagttaaaaaaacactagagytccaagaatagcagtgcaggacactttgctaagaaattatccaggccactgaggctgtaacaacctacagagtccctgatattcccattttagggatggagaaactgaggcccacacaggctaagcagctgccaatgacaggggatctggggtccaactcaccctgagtgcccagctccccaccagctgccccaacaaaggggcttcctttagaaaagaccctcattctcaggtaaccagccccacggctggcttctctggaagccctcgtgggtgcccctcccacccagcccactctacacgcaaaacccagttcaacaactctccatgatgccggctgggtttgtgctgcctgtggagctgggaacctaaggggcgtcactaataacctggtgctgagatatagggacagggatcgctcttgtcctg

SEQ ID NO: 8703 - DNA, 793 bp, Homo sapiens
ttcatggaaggagtgggtggtggggtcagaagtgtccatcctccagcagggagagtgcaccctgggagggtccccagacaccgggcagccagcgtgagggtgaggagctgccagttctgtttctcttcttgcctgttcttcacacttgtatgtgccttcttcttcctttttctgcccatacttatactttctgctcctaaatgtttgggaggcaacccaaaaagcagcctggccgcaggtgaggaaggacggttaacaagtccggagagatcggtggtaaccagagtgtgctcagcccttagtgtggggccaagaactaaggactttttctcatgtttgttgaggaggtgaggagaaaagcaacacaaaaaacattctgttctaaaagccttcatggaaagaagacaaggcctgtaaggagagaagagaggggggcaggaagttgtaaggaggccatagaatggtccagagtggcaactagtaggggcaagagctgttagggagacagtggggctgagaaggaatggccagtgcatggaagaccaggagtggggaaaaggtgagacgtggcagtgagtccggaggacagcggtgagcccctcccatagggaccctcctgcgtaaaggtggtcttgtagaatcatagactgctgggcctggaagggatgctgcctgggggagagctggcatctcaactggacacagggaagtccaggaagcaactgacctgaggctgaagttgatgaattaggtagacacaaacctacaggacccwtgaaggcatgactgcaaa

SEQ ID NO: 8704 - DNA, 811 bp, Homo sapiens
caatcagccaatgggtagcggactgcctacttctcacgcagttgcatgggctctttataaaaagacccaatggatgaacaaactctggtaccatctgacaagggaatatccagcacaaagaagcaatgagctattgagccatgagaagacatagaggaaacttacatgtatatggctaagtgagagaattcagtctgaaaaggttacatgctatgggaatctaactctatgagattttagaagaagtaaaagtatagagacagaagatctgtggttgccagggcttgtggaaatggggggatgggagggggaatacgttgacrtccaggagctttttacagcagtgaatctactctgtatgatactataatggtggacacatgtcattatatgtttatccaaacccgtaagatgtacaccataaagtgaactctaatgcaaagtaagaattttggccaggtgtggtggctcatgcctgtaatcccagcactttgggaggctgaagcaggtggagtgcttgagaccaggagtttgagactagcctggacaacatggcaaaatcccatctctacaaaaaatataaaaattagtcacgtgtggtggcatgcatctgtgatcctagctactcaggaggctgggtcaggaggattacttgagcctgggaagtggaggttgcagtgagccaagatcgcaccactacaattcaccctgggcaacagagagaaatcttgtctcaaaaacaaaaacaaaaacgtatggcccgggcgcagtggctcatgcctgtaatcccagcactttgggaagctgaggc

SEQ ID NO: 8705 - DNA, 580 bp, Homo sapiens
attgacccctactgcattggttggagctcagtgtggaaataaaaaccatcttagttcttttaagccaaaggtgttctcatgcacaccatgtggaactaggaaatttgtggaagggccaataatcaaaacaacaaccggaggctaatttccatcatgccagcccaccttacccctgactcccacaccctgccccaaggaccccaaagagacagcctcccccacagtgccttggctgtctcggtgccccctgtcttccgaaktagtggcccctgcacacactcaccatggtggttaagcatcagtactgcaaggcagacaggctggggctggagctggagctggagtgacaaccctattgtttactggctgtttgaccaagctcagatttttttttcttaaacctgtaaaacggggtaaacatgggactgacccagcagggtcttggaagtattaaataagacaatgcctatcaagtgcctgagctgatgcctggccaaaaagagcaccggctatatgcagtgaacacctattatctccttctatgccaggcacggttcccagcagtaagcgggagagatta

SEQ ID NO: 8706 - DNA, 1623 bp, Homo sapiens
tcgtcccccgggggtggtgctgggccttgtggggcagaaggaaaggtaaaccatgaccctgaggagctcagagactggggttcttgggaagccaattcaggcctagaaccagggccaaagtctgggtggttttagaggaaaaagagactggctctggggttgaaaactgtgtcaccagggaccaggcaggaatttaaaatgagcagagtgggctggggtaagatgataaatagctactattccttggcctcagcatcagagagacaagagggagtggtggggactggggcacatgccttgtctgaagacagtcrcctctcagctccggttgatggtggtccctagagaacagggcccaatatgatcggatgctccgtgccctgattttccagagggaatcaaaacacaggtttttatgtagtacccacagattcttaaatattggcttcattcatttaaaaattctatgtgggctgaggaaagccccacaggcttgggcgccagattgggcccctgaggcctccagtttgcagcctctgttcgctgcagctgaatggagcaggcagagaaggagcaaatctcagcctgaccccgagtcaggagctatgggttgggacggtggccaggacccagctccagcagctccaagggacgtggagaagttttctgtcatctggtcccctcctccactccatggagatgattcccccgcccgccagctccagcaggctggggggtgaaagggagcctgggcgggagccgaggtctcctttctcacatgggacacagctgtggatgtttttcaggcggatcctaatttctctctccccatcccccgtggctctgccacaccaggaagtgggtgactctctgtgtcccaagttgtcccccaaaagtccgctccatgctccaagctacctgcttccacaagcacaactttgaagcttcaccatgtcccttataaccaattttcagatgaaacaggctcagggagggaaaacatctggcccaggcccctgcaatcaacacacagaggagctggacttaaacccaggcctcacgcacttgaccactgggccctcatcctgtctcttcctggtagaacccagcccaccctccaagtcttgctccagcgcttcctcctggcttattgaacaagcagccaggcccttggcccactgccaggtattcagacatgaacagatagtgtgtctcaggctcccctgtgctatttgttgaatgaatatttcactcattttctccaaagtcgtgggtggttgtccatatccaatctgttgtctcagcctctgaccacatgtctgtacacttccccgatgcctcctcctggatggcccccaggcatcctccaaatcagtatgcccaaagcaagttcagcaacttcccccaaactgtccctctgcctgtctcccttcttttggaaggctgcacaactgttcagcgtccaaagccagaaacatgagcatcatccataaagcctcccgccgccatgcctccaacccaattggtcaccaaagcctgggagtctcgtcctcaacctccctcaaatccatccaccctcccctcctctgaggctgccatgccaggtcaatctcatcacctctc

SEQ ID NO: 8707 - DNA, 1623 bp, Homo sapiens
tcgtcccccgggggtggtgctgggccttgtggggcagaaggaaaggtaaaccatgaccctgaggagctcagagactggggttcttgggaagccaattcaggcctagaaccagggccaaagtctgggtggttttagaggaaaaagagactggctctggggttgaaaactgtgtcaccagggaccaggcaggaatttaaaatgagcagagtgggctggggtaagatgataaatagctactattccttggcctcagcatcagagagacaagagggagtggtggggactggggcacatgccttgtctgaagacagtcacctctcagctccggttgatggtggtccctagagaacagkgcccaatatgatcggatgctccgtgccctgattttccagagggaatcaaaacacaggtttttatgtagtacccacagattcttaaatattggcttcattcatttaaaaattctatgtgggctgaggaaagccccacaggcttgggcgccagattgggcccctgaggcctccagtttgcagcctctgttcgctgcagctgaatggagcaggcagagaaggagcaaatctcagcctgaccccgagtcaggagctatgggttgggacggtggccaggacccagctccagcagctccaagggacgtggagaagttttctgtcatctggtcccctcctccactccatggagatgattcccccgcccgccagctccagcaggctggggggtgaaagggagcctgggcgggagccgaggtctcctttctcacatgggacacagctgtggatgtttttcaggcggatcctaatttctctctccccatcccccgtggctctgccacaccaggaagtgggtgactctctgtgtcccaagttgtcccccaaaagtccgctccatgctccaagctacctgcttccacaagcacaactttgaagcttcaccatgtcccttataaccaattttcagatgaaacaggctcagggagggaaaacatctggcccaggcccctgcaatcaacacacagaggagctggacttaaacccaggcctcacgcacttgaccactgggccctcatcctgtctcttcctggtagaacccagcccaccctccaagtcttgctccagcgcttcctcctggcttattgaacaagcagccaggcccttggcccactgccaggtattcagacatgaacagatagtgtgtctcaggctcccctgtgctatttgttgaatgaatatttcactcattttctccaaagtcgtgggtggttgtccatatccaatctgttgtctcagcctctgaccacatgtctgtacacttccccgatgcctcctcctggatggcccccaggcatcctccaaatcagtatgcccaaagcaagttcagcaacttcccccaaactgtccctctgcctgtctcccttcttttggaaggctgcacaactgttcagcgtccaaagccagaaacatgagcatcatccataaagcctcccgccgccatgcctccaacccaattggtcaccaaagcctgggagtctcgtcctcaacctccctcaaatccatccaccctcccctcctctgaggctgccatgccaggtcaatctcatcacctctc

SEQ ID NO: 8708 - DNA, 1623 bp, Homo sapiens
tcgtcccccgggggtggtgctgggccttgtggggcagaaggaaaggtaaaccatgaccctgaggagctcagagactggggttcttgggaagccaattcaggcctagaaccagggccaaagtctgggtggttttagaggaaaaagagactggctctggggttgaaaactgtgtcaccagggaccaggcaggaatttaaaatgagcagagtgggctggggtaagatgataaatagctactattccttggcctcagcatcagagagacaagagggagtggtggggactggggcacatgccttgtctgaagacagtcacctctcagctccggttgatggtggtccctagagaacagggcccaatatgatcggatgctccgtgccctgattttccagagggaatcaaaacacaggtttttatgtagtacccacagattcttaaatattggcttcattcatttaaaaattctatgtgggctgaggaaagccccacaggcttgggcgccagattgggcccctgaggcctccagtttgcagcctctgttcgctgcagctgaatggagcaggcagagaargagcaaatctcagcctgaccccgagtcaggagctatgggttgggacggtggccaggacccagctccagcagctccaagggacgtggagaagttttctgtcatctggtcccctcctccactccatggagatgattcccccgcccgccagctccagcaggctggggggtgaaagggagcctgggcgggagccgaggtctcctttctcacatgggacacagctgtggatgtttttcaggcggatcctaatttctctctccccatcccccgtggctctgccacaccaggaagtgggtgactctctgtgtcccaagttgtcccccaaaagtccgctccatgctccaagctacctgcttccacaagcacaactttgaagcttcaccatgtcccttataaccaattttcagatgaaacaggctcagggagggaaaacatctggcccaggcccctgcaatcaacacacagaggagctggacttaaacccaggcctcacgcacttgaccactgggccctcatcctgtctcttcctggtagaacccagcccaccctccaagtcttgctccagcgcttcctcctggcttattgaacaagcagccaggcccttggcccactgccaggtattcagacatgaacagatagtgtgtctcaggctcccctgtgctatttgttgaatgaatatttcactcattttctccaaagtcgtgggtggttgtccatatccaatctgttgtctcagcctctgaccacatgtctgtacacttccccgatgcctcctcctggatggcccccaggcatcctccaaatcagtatgcccaaagcaagttcagcaacttcccccaaactgtccctctgcctgtctcccttcttttggaaggctgcacaactgttcagcgtccaaagccagaaacatgagcatcatccataaagcctcccgccgccatgcctccaacccaattggtcaccaaagcctgggagtctcgtcctcaacctccctcaaatccatccaccctcccctcctctgaggctgccatgccaggtcaatctcatcacctctc

SEQ ID NO: 8709 - DNA, 1623 bp, Homo sapiens
tcgtcccccgggggtggtgctgggccttgtggggcagaaggaaaggtaaaccatgaccctgaggagctcagagactggggttcttgggaagccaattcaggcctagaaccagggccaaagtctgggtggttttagaggaaaaagagactggctctggggttgaaaactgtgtcaccagggaccaggcaggaatttaaaatgagcagagtgggctggggtaagatgataaatagctactattccttggcctcagcatcagagagacaagagggagtggtggggactggggcacatgccttgtctgaagacagtcacctctcagctccggttgatggtggtccctagagaacagggcccaatatgatcggatgctccgtgccctgattttccagagggaatcaaaacacaggtttttatgtagtacccacagattcttaaatattggcttcattcatttaaaaattctatgtgggctgaggaaagccccacaggcttgggcgccagattgggcccctgaggcctccagtttgcagcctctgttcgctgcagctgaatggagcaggcagagaaggagcaaatctcagcctgaccccgagtcaggagctatgggttgggacggtggccaggacccagctccagcagctccaagggacgtggagaagttttctgtcatctggtcccctcctccactccatggagatgattcccccgcccrccagctccagcaggctggggggtgaaagggagcctgggcgggagccgaggtctcctttctcacatgggacacagctgtggatgtttttcaggcggatcctaatttctctctccccatcccccgtggctctgccacaccaggaagtgggtgactctctgtgtcccaagttgtcccccaaaagtccgctccatgctccaagctacctgcttccacaagcacaactttgaagcttcaccatgtcccttataaccaattttcagatgaaacaggctcagggagggaaaacatctggcccaggcccctgcaatcaacacacagaggagctggacttaaacccaggcctcacgcacttgaccactgggccctcatcctgtctcttcctggtagaacccagcccaccctccaagtcttgctccagcgcttcctcctggcttattgaacaagcagccaggcccttggcccactgccaggtattcagacatgaacagatagtgtgtctcaggctcccctgtgctatttgttgaatgaatatttcactcattttctccaaagtcgtgggtggttgtccatatccaatctgttgtctcagcctctgaccacatgtctgtacacttccccgatgcctcctcctggatggcccccaggcatcctccaaatcagtatgcccaaagcaagttcagcaacttcccccaaactgtccctctgcctgtctcccttcttttggaaggctgcacaactgttcagcgtccaaagccagaaacatgagcatcatccataaagcctcccgccgccatgcctccaacccaattggtcaccaaagcctgggagtctcgtcctcaacctccctcaaatccatccaccctcccctcctctgaggctgccatgccaggtcaatctcatcacctctc

SEQ ID NO: 8710 - DNA, 1623 bp, Homo sapiens
tcgtcccccgggggtggtgctgggccttgtggggcagaaggaaaggtaaaccatgaccctgaggagctcagagactggggttcttgggaagccaattcaggcctagaaccagggccaaagtctgggtggttttagaggaaaaagagactggctctggggttgaaaactgtgtcaccagggaccaggcaggaatttaaaatgagcagagtgggctggggtaagatgataaatagctactattccttggcctcagcatcagagagacaagagggagtggtggggactggggcacatgccttgtctgaagacagtcacctctcagctccggttgatggtggtccctagagaacagggcccaatatgatcggatgctccgtgccctgattttccagagggaatcaaaacacaggtttttatgtagtacccacagattcttaaatattggcttcattcatttaaaaattctatgtgggctgaggaaagccccacaggcttgggcgccagattgggcccctgaggcctccagtttgcagcctctgttcgctgcagctgaatggagcaggcagagaaggagcaaatctcagcctgaccccgagtcaggagctatgggttgggacggtggccaggacccagctccagcagctccaagggacgtggagaagttttctgtcatctggtcccctcctccactccatggagatgattcccccgcccgccagctccagcaggctggggggtgaaagggagcctgggcgggagccgaggtctcctttctcacatgggacacagmtgtggatgtttttcaggcggatcctaatttctctctccccatcccccgtggctctgccacaccaggaagtgggtgactctctgtgtcccaagttgtcccccaaaagtccgctccatgctccaagctacctgcttccacaagcacaactttgaagcttcaccatgtcccttataaccaattttcagatgaaacaggctcagggagggaaaacatctggcccaggcccctgcaatcaacacacagaggagctggacttaaacccaggcctcacgcacttgaccactgggccctcatcctgtctcttcctggtagaacccagcccaccctccaagtcttgctccagcgcttcctcctggcttattgaacaagcagccaggcccttggcccactgccaggtattcagacatgaacagatagtgtgtctcaggctcccctgtgctatttgttgaatgaatatttcactcattttctccaaagtcgtgggtggttgtccatatccaatctgttgtctcagcctctgaccacatgtctgtacacttccccgatgcctcctcctggatggcccccaggcatcctccaaatcagtatgcccaaagcaagttcagcaacttcccccaaactgtccctctgcctgtctcccttcttttggaaggctgcacaactgttcagcgtccaaagccagaaacatgagcatcatccataaagcctcccgccgccatgcctccaacccaattggtcaccaaagcctgggagtctcgtcctcaacctccctcaaatccatccaccctcccctcctctgaggctgccatgccaggtcaatctcatcacctctc

SEQ ID NO: 8711 - DNA, 794 bp, Homo sapiens
agctgtatctgaagcagacatggctctctcattctccctttttaaaacccaccttgggttgggtttccattgcctgcagctacaagaaatcctgacaaatagctgagccttctgaatatacatctcatcaccttactgtccgcactgccatgaccccatgcgaaattctctcatgaggaacccctytgaatatccaaagctgggggaggcgtctcttcctccacagagctagtttcttttctcactcatgggcaatatgagcaatgatcgctggttctggttgcctcaagctccttttggaataaggaaaagagcaagtggaataacctaaaggactaaaatgggctcgagttcccaggggctaaggctgggccctcagccccactactgttcagcatggacaggcacacagcagatgcttctcggccattcactgcttgacagtgcaaggcaagctttctcaacctgggccctcgggcattctggactggctgcttctctgtgaaatacgccaggtttggttaggagcgagttgcccagtctgtgttctactgacatttagtgccaaataactcctggttgggggctgtcccatgcattgcaggacttgtttagcagtgtccctggcctcactacccgctagatgccagtagcacctccttccctgagttgtgacagccacacatatctccagacgttgccaaacattccttgcagggcaaaatcaccccctggttgagaatatctgctgtaagcaaagtgtgtctcacaggacctggcacatagcaagtgct

SEQ ID NO: 8712 - DNA, 1328 bp, Homo sapiens
atcaacttaattgaaatgtaaacacaatctcctatttccttccacttcaaatgatgataaacgaaacagaaacagaacaaatttaacaagccaccaactcaccttgggtaacctatgaggatgtaattccccaagccagcactgtagagtaatagcatatactttacagaggtgcttcatcttacagctcataatgtcctcatgccaatcccataagaaggcaagccagccgggattagtgccagtcccaaaagcaacagaggaagcagaggctggtgagggcaaggggcacaggctccaggtgggagaatcccagtcatgtattttgttccttactccttaccacagaattcttgatctttgtgggcaggagaaggtcaatagcatttagcatttcaggcacatgatgctaggcacacttctacctgctcggtcttactctgatcatacagataagaaactgtggcgcagatgttaattaacttgcgcaaggtcacgcacacgttaatggtagagctatgtttcacactcggccctgtcccattccgaagccatcttctctaaactgtatcagcttctactcaaagtatgatccactcgacagcagcatctgcatcagggagagcttgttagaagtgcagaatctcaggccccatcccagacctactgaatcagaaccagcattctaacaaaatctcaagaggcactgtggcaccacactgttaaagagagaagaatgtctacccaagggccaactgtgtcagctccagcggtgttaaacctcatttagtatcatgcctcttggacccaaatacgttgatgttcacgtaatgctgaccaccacaagaaccctctttaaatagagattttttaaaaagagggaggaggcagtcttgacagagttctacaaacaaattagaagatgacactaaaatgtcgatcacagtcagatcttaaggcrgaagctaaactgaaactgcagagtcagcatgccctctggtggatcacaaggaagcctgaatagggaatttgtctctggaggaaaatccagaaacacactcagatatgaagatgacaaggcacttgccatgaaaacgatcccactgactcaggagcaacttggaacaaaacccttttaattcaggtagtaaactttcgaatgagagagtaacaagagcattctagaaagccaaagacaaacaaggataaacgaataatccagatattttttcccgatagcagaaaatttaacctgaaactgaaaccctatttctggagttgtctcatcatttttttttaaaaaaacaaaaaacaaaaaactctccttt

SEQ ID NO: 8713 - DNA, 625 bp, Homo sapiens
aaggcagggggccaggtgtgctcaccccaattgatcggcaccaaggaggagccctgggggatggtggggtcactgtaactggcacccagactgagagggcagtgggaaagagggggctgaggactgtgggtgcagggaccagctcttggcaccagaagcctgggtagaggggcacactcaaggctacagccakcctggtcagtggacctgccaccaagcacgagtgtggacatggtgtcaggacattagccttcaggcgctggtggcaagggtaggtccagactgtcgtgggactgagggcacaagatgtagtcggcccccgctttttgctgctcacggccgcctggccgctggccagtgtccgagcttcggccctgtaagggtggggtgcctgggctcggggaaagggtttggggagggacatgggcacgcagagagcacgcagcccccgagctgagtctcgactgcccatcatcccatcagctgggacgcaggggcaggaacagcccctcctgccacatcctgaagagtcagggcagggctggggtctggcgagttacgtaaatggcagcattggttccaggcgtcccagtggtgggagtgagcgctggaggcagagcctggg

SEQ ID NO: 8714 - DNA, 625 bp, Homo sapiens
aaggcagggggccaggtgtgctcaccccaattgatcggcaccaaggaggagccctgggggatggtggggtcactgtaactggcacccagactgagagggcagtgggaaagagggggctgaggactgtgggtgcagggaccagctcttggcaccagaagcctgggtagaggggcacactcaaggctacagccatcctggtcagtggacctgccaccaagcacgagtgtggacatggtgtcaggacattagccttcaggcgctggtggcaagggtaggtccagactgtcgtgggactgagggcacaagatgtagtcggcccccgctttttgctgctcacggccrcctggccgctggccagtgtccgagcttcggccctgtaagggtggggtgcctgggctcggggaaagggtttggggagggacatgggcacgcagagagcacgcagcccccgagctgagtctcgactgcccatcatcccatcagctgggacgcaggggcaggaacagcccctcctgccacatcctgaagagtcagggcagggctggggtctggcgagttacgtaaatggcagcattggttccaggcgtcccagtggtgggagtgagcgctggaggcagagcctggg

SEQ ID NO: 8715 - DNA, 811 bp, Homo sapiens
tcctggaacctgaagggacctgggggcctaaacaccctcagggaaatcctggagctctctgcaagctagttcaaccgtatccatccatttagctaaagcacatccttcgctgaagccagcctggtctcatccccacttctacccccaagccttgttcatgatatgcctttgcctacgatgcccatccttctgcttcctgccaatccagaccttacytgttcttcccactctgagttccacctcctccaggaagctttccctgaacaacaccacccccaaccaggggagatttttctctgtttctgaccttctttggcatttatggctaccactctattggtatttgattatgaactttcacttcttacctttgctcatgagtgtttctggttggtttctccatttagaatgtaatccgtttgaagaactacatcttacatgtttatctatccctgtgggttgtccacaatttattgcatgcggtttttgtatcataaatctctgtatgcaggactcataggataccaggaaaggagcccccagctcatgtttaccagcatcaaaggtcagatttgccttcatgacaggacgggaggttaggaccgtttaggttttaagcagcagctcagaaaatagggtagatggatatcttcctaactttgtatagcagggaaagtgttcctttaagtgtactcttcatatgagtccagtgtgtaaagcaggtgagggtggagttgttctggctcccctggagtggagctgctctgtgtcccccacccctccatggtagctccaggcactgcagaggaaa

SEQ ID NO: 8716 - DNA, 740 bp, Homo sapiens
acactgcctctagtcttgtttaaacaataatgacatggttttcaattatttttcaggcaaaataattatattagaaaattagaaataccgaataagtctttccttagactagctctcctcattcgtgcatttttataaaaatgtttgaaaaaataatgagatttccacaaagatatcccctaacactgtaaatctataattccttcaacyataatctaaggcctgaacggtcctcttcttggcctcagagatttttgatatccctacataaaaagacaaagtaacttaggaaaggcgatggtttatttgtaaaactgcttaataacagctgcatgatcatatgctgaacatcttcatcattagattaggtgatctcttttgcaaataaagcttttttattttcttattcaaggaccaacctagattgatctcctgtagttttttgtttgtttgtttgtttgttttgagacggagtctctctctgtcgcccaggctggagtgcagtggcaggatctcagctcactgcaagctccgcctcccgtgttcacgccattctcctacctcagcctcctgagtagctgggactacaggcgcccgccaccacgaccagctaattttttgtatttttggtagagatggggtttcaccgtgttagccaggatggtctggatctcctgacctcgtgatccgcccgcctcggcctcccaaagtgctgggattacaggcatgagccactgtgc

SEQ ID NO: 8717 - DNA, 740 bp, Homo sapiens
acactgcctctagtcttgtttaaacaataatgacatggttttcaattatttttcaggcaaaataattatattagaaaattagaaataccgaataagtctttccttagactagctctcctcattcgtgcatttttataaaaatgtttgaaaaaataatgagatttccacaaagatatcccctaacactgtaaatctataattccttcaactataatctaaggcctgaacggtcctcttcttggcctcagagatttttgatatccctacataaaaagacaaagtaacttaggaaaggcgatggtttatttgtaaaactgyttaataacagctgcatgatcatatgctgaacatcttcatcattagattaggtgatctcttttgcaaataaagcttttttattttcttattcaaggaccaacctagattgatctcctgtagttttttgtttgtttgtttgtttgttttgagacggagtctctctctgtcgcccaggctggagtgcagtggcaggatctcagctcactgcaagctccgcctcccgtgttcacgccattctcctacctcagcctcctgagtagctgggactacaggcgcccgccaccacgaccagctaattttttgtatttttggtagagatggggtttcaccgtgttagccaggatggtctggatctcctgacctcgtgatccgcccgcctcggcctcccaaagtgctgggattacaggcatgagccactgtgc

SEQ ID NO: 8718 - DNA, 829 bp, Homo sapiens
gtttgaaacctgtccggtccctgctttctatgccaggcaaaaaagttgggctgggggtcgcactctccggctcgggcccccaggtcccatcacttcccagcctcygggctcgcagcccggggctcgggcggcgccagcccaggtagctccaggcctcgcagtgtcggtcgtttggtggcgtttgttctaacacagaaactgtttccaacgggggcctccctcgttcgctctcttccacgatatcttgtcgacctcacactcgcatcctcgaggcccgatgtggtcccagctacttctcctaaatgggccctgagattagattccggggttcgtgttccctgcagtctgtcgtgggcttctcaattccaaaaaaccccaggaacctaccagaagccggggtctctcactcggggatcatttatttatatgtgtaaggatatttataagggcgtagggaatagagaagacactgagttttagaaaatagtttgttcttggacttgtgtatctttctctctctgttttccctacatgcccacatcgcactcccaggcctccctcctttaccctttctggccgtcagcgtgctctggccctgtctgagacggcatagtggtgtttttgagtttcagtctgacttgctttctgcctgtcatccacacacttattgctggggttgaatgtgataacccagtcactccctaacccgccattctccagcatttacttaaatatttttatcttccatcttacattgcatgggtttcctttcttcccttccctaaaaacaacaacaacaaaaaaaaaaaaaaaaaaaagagaggaaagg

SEQ ID NO: 8719 - DNA, 829 bp, Homo sapiens
gtttgaaacctgtccggtccctgctttctatgccaggcaaaaaagttgggctgggggtcgcactctccggctcgggcccccaggtcccatcacttcccagcctctgggctcgcagcccggggctcgggcggcgccagcccaggtagctccaggcctcgcagtgtcggtcgtttggtggcgtttgttctaacacagaaactgtttccaacgggggcctccctcgttcgctctcttccacgatatcttgtcgacctcacactcgcatcctcgaggcccgatgtggtcccagctacttctcctaaatgggccctgagattagattccggggttcgtgttccctgcagtctgtcgtgggcttctcaattccaaaaaaccccaggaacctaccagaagccggggtctctcactcggggatcatttatttatatgtgtaaggatatttataagggcgtagggaatagagaagacactgagttttagaaaatagtttgttcttggacttgtgtatctttctctctctgttttccctacatgcccacatcgcactcccaggcctccctcctttaccctttctggccgtcagcgtgctctggccctgtctgagacggcatagtggtgtttttgagtttcagtctgacttgctttctgcctgtcatccacacacttattgctggggttgaatgtgataacccagtcactccctaacccgccattctccagcatttacttaaatatttttatcttccatcttacattgcatgggtttcctttyttcccttccctaaaaacaacaacaacaaaaaaaaaaaaaaaaaaaagagaggaaagg

SEQ ID NO: 8720 - DNA, 683 bp, Homo sapiens
tgcaaagccagccctgacccttgggtactagatcatagctaagggaagttttacattgcaactcattaatttttcctagctgcaaggagcttctaaaagaatttgaaaaggacatttcataacagtttgtcagtacaggagattttactattattaatatacacaacagatcacagtgaaggaaagacttgacttgggtggccatgacagctgactgtgggcagccgtgaagtaatggaaagaacaccagttaggtgtttcaatgctagtgagtttaaagtgaccttgggaaatattccagagttataacaaactgagtttgaatcataattctgctaccaactggctttactatttggacaaattataaaggcctttagtttcctgtacataacagtactgcctcatgtgttgtattgaggactaagtgcacagaatcatataaaatgttttttttgtttgtttkttttttttttttttgagatggagtcttgctctatcgcccaggctggagtgcagtggcgctatctctgcaagctctgcctcccaggttcacaccattctcctgcctcagcctccctagtagctgggactacaggtgactgccaccacacccggctaattttttttttttttgtatttttagtagagacggggtttcactgtgttagccaggatggtct

SEQ ID NO: 8721 - DNA, 683 bp, Homo sapiens
tgcaaagccagccctgacccttgggtactagatcatagctaagggaagttttacattgcaactcattaatttttcctagctgcaaggagcttctaaaagaatttgaaaaggacatttcataacagtttgtcagtacaggagattttactattattaatatacacaacagatcacagtgaaggaaagacttgacttgggtggccatgacagctgactgtgggcagccgtgaagtaatggaaagaacaccagttaggtgtttcaatgctagtgagtttaaagtgaccttgggaaatattccagagttataacaaactgagtttgaatcataattctgctaccaactggctttactatttggacaaattataaaggcctttagtttcctgtacataacagtactgcctcatgtgttgtattgaggactaagtgcacagaatcatataaaatgttttttttgtttgtttttttkttttttttttgagatggagtcttgctctatcgcccaggctggagtgcagtggcgctatctctgcaagctctgcctcccaggttcacaccattctcctgcctcagcctccctagtagctgggactacaggtgactgccaccacacccggctaattttttttttttttgtatttttagtagagacggggtttcactgtgttagccaggatggtct

SEQ ID NO: 8722 - DNA, 751 bp, Homo sapiens
tgcctcctgggattcacatccttagttgaccccctcctgttgagtgtgggctgaagctagtgactatctcctagattagattattgagacctgccttctgactctcttgctctcttgctctgatggaagccagctaccatgtgtgagtcatgaagagaccctcatagcaaggtgctgagggaggcttctagcgaacagccagtgagaaacggaggacctcagtgcaacagcccttgaggaacttgatcctgccaatagccacatgagtgagcctaagtggaccctcctccagagactgcagccccagatgacatcttactggaaccctgtgaaagtacacagtgaagctgtgcctggattcttgacccacagaaaatgggagacaatatatgtttgttgtttcaactcactatatctattgctatatcacagcaatagataactaatgcatatgcttatcaataacttatgaaataataatccagattgtaccaaaggggaamttactctctgagtgttttgggaagtggccttccaggtcacacaaacactgggtagcaaatgacagctgctatgcattaaaattggtttgaattctgtccacaggtccattaactcggcctttggaggaaggcatttaacataatgcctgccaagctccctaacaccatctcccaaggagcaccttgtgaagagtgcagcgtgtgaacatcacacctacatcaccccttcccctagacagttctaccct

SEQ ID NO: 8723 - DNA, 751 bp, Homo sapiens
tgcctcctgggattcacatccttagttgaccccctcctgttgagtgtgggctgaagctagtgactatctcctagattagattattgagacctgccttctgactctcttgctctcttgctctgatggaagccagctaccatgtgtgagtcatgaagagaccctcatagcaaggtgctgagggaggcttctagcgaacagccagtgagaaacggaggacctcagtgcaacagcccttgaggaacttgatcctgccaatagccacatgagtgagcctaagtggaccctcctccagagactgcagccccagatgacatcttactggaaccctgtgaaagtacacagtgaagctgtgcctggattcttgacccacagaaaatgggagacaatatatgtttgttgtttcaactcactatatctattgctatatcacagcaatagataactaatgcatatgcttatcaataacttatgaaataataatccagattgtaccaaaggggaaattactctctgagtgttttgggaagtggccttccrggtcacacaaacactgggtagcaaatgacagctgctatgcattaaaattggtttgaattctgtccacaggtccattaactcggcctttggaggaaggcatttaacataatgcctgccaagctccctaacaccatctcccaaggagcaccttgtgaagagtgcagcgtgtgaacatcacacctacatcaccccttcccctagacagttctaccct

SEQ ID NO: 8724 - DNA, 797 bp, Homo sapiens
cccttccccactacctctgggcctctgactcctcccccttctgccccccaaatccagttatttcctgatgtttctttttctttttttggagacagagtctcactctattgcccaggctggagtgcaatggcacaatcttggctcaccacaacatccgcctcccagattcaagtgattctcctgcctcagcctcccaagtagctgggattacaggcttgcgccaccacacccagctcatttttgtatttttagtagagacagggtttcgccatgttggccaggctggtcttgaactcctgacctcaggcaatccgcccatcttggcctcccaaagtgctgggattacaggtgtgagccaccrtgcccggccttcctgatgtttcttaaacattccatgcatccttcctgctgtcctcccagctccctggcaccctccaggccactacacacacacacacacatacacacacacacacacacaccacagagtggaaatccagtacacacacacacacacacacacacacacccccagtgtggaagtccagtgtctcctttaacacccacatcaaacagcctggggagaactgggaagactggggaataaagcttccctttgttcataaaaagaaatccaggcctaagacagataaaggacgtggccccagaacaggacagatccatgtggggaggggcagtgagacctctaggcaacctgcagacattccaagttgatggacagctccaagattctttaagccaagaaagggattcgggtgtcgagattcctgggcctt

SEQ ID NO: 8725 - DNA, 797 bp, Homo sapiens
cccttccccactacctctgggcctctgactcctcccccttctgccccccaaatccagttatttcctgatgtttctttttctttttttggagacagagtctcactctattgcccaggctggagtgcaatggcacaatcttggctcaccacaacatccgcctcccagattcaagtgattctcctgcctcagcctcccaagtagctgggattacaggcttgcgccaccacacccagctcatttttgtatttttagtagagacagggtttcgccatgttggccaggctggtcttgaactcctgacctcaggcaatccgcccatcttggcctcccaaagtgctgggattacaggtgtgagccaccgtgccyggccttcctgatgtttcttaaacattccatgcatccttcctgctgtcctcccagctccctggcaccctccaggccactacacacacacacacacatacacacacacacacacacaccacagagtggaaatccagtacacacacacacacacacacacacacacccccagtgtggaagtccagtgtctcctttaacacccacatcaaacagcctggggagaactgggaagactggggaataaagcttccctttgttcataaaaagaaatccaggcctaagacagataaaggacgtggccccagaacaggacagatccatgtggggaggggcagtgagacctctaggcaacctgcagacattccaagttgatggacagctccaagattctttaagccaagaaagggattcgggtgtcgagattcctgggcctt

SEQ ID NO: 8726 - DNA, 702 bp, Homo sapiens
ccttttttccctttccttcaaaataaaaaggaagagggggtgccctgctcgcaggagaagcgcggggcccatccccgcccgggccacgcggacccctccgcccggcttcgttccccgcctcccccggtcctttgtctcgctcccgcgctgccgcgcacatggtcccctgtcaaattctgggcggctcccggggacacgtgtctgggagcccgcagctccgccggcccgcgtaaccatggaaaccgcggccaatgggaggccgtgttgcccgtgggggcggagccgagcgcgcccggagcaggaggggccgggagggcgtgggtggggcggggccgatacgwcagcaagctcggggcggggcccgggtgaccccgaccccgggcggtccgcagtgcggaggatgctcaccgggctgacgtcttaccgcgtatttttgacatcttgacagcgtttcctcggcactccttggattttctttgcctatgaagtgctgagtgtgatcccaccagcaacgcttactagcgatatgcgttgtgcaagtgactgagccttgctttacctcatctgataaatgggggagttgtcagggtcccgcagatatgcgattagcccaggactagcacccagaggtgaccagtcacagcagtgaccctgccgacatacggcattttcctgctcgtatgcaaggaagtacctcattcg

SEQ ID NO: 8727 - DNA, 480 bp, Homo sapiens
  misc_feature (1)...(480): n = A,T,C or G
gnnnnnnnnnnnnnnnnnnnnnnnnnnnnnnnnnnnnnnnnnnnnnnnnnnnnnnnnnnnnnnnnnnnnnnnnnnnnnnnnnnnnnnnnnnnnnnnnnnnncccttatcaaaacctatccacaaaagagtatgaatgatttataggtcggtgcaaaagtaattgcagtttttgccattattttcaatggaaataattgaaaattattcactaatacatagtgaagagtaaaattttccctgaatcagagaaaatagctaatagattccagagattttcaatccgtcagggaggtattaggaataatcagagttaggtggcccagaaatcatccgctggaatggtttttcactgtgtgtcttctcttaacaactgacccagattttcttcccatttctggggattaagaatcagagaaactcagaractttattaagtcatgttatcccagtgtctcctctatttacaaagggcagtttac

SEQ ID NO: 8728 - DNA, 3332 bp, Homo sapiens
cttgagcctgggcaacatagtgagaccccatctctaaaattaaaataaacaaacaaatatatatktaaggaaaacctagactgaattcattgaatttagtgaatacacattttgttgtcaaagtgaatattctacacatctctaaaattaaaataaatgaacaaatatataaataaatgaaacgtagactgaattcattgaatttaacgaatacatattttggtgtcaaagtaaatattccacacaaggcaatacattttgaaggagtttatgaacttctatgatttctggttatatgtagaaaatcacatgctttaacttccgaaagcatctttattgtcacacagtaaatatttaaaaggagagattgggttttagcagcagaggagggggaaggacattacaggccagagaaacagtgtgaccagaatcttgaaggtgggaaagtacaaggtccagtttgattagaaatcaggagggcagcaggagggaaagcaagagagaaactgccagattagggagggccctgagggccagaagaggattttgtagttaatttggaagaaaacattgtaattaaataaaaagtttttaaagcagtggagctgtatgcattaggaaaattataataacatccaacatctgttgatcatttacagtgttctaagcgatttacactgtaggctgagctctttaggtatatgagctcattgaaactcacaacactcttgcaaaggtgatatcatcattttatggaagcagctgaggctcagagaggttcattcactttgcccaaggtgacacagctagtaagcaccaggaccaggattttaaacttagaggtgtccggttccaaagcctccattcttaaccacaaaataataaatgccagaacaaaagaagtgaaaaaaagaattcaaaaactcttgtgacttaaatgttactgaagttggtgtgaggggagaggagaaaggggagtcaaaaacaactgctagaatttgagccagtgtgggaattctgcaggtagtgaaatcggaaagaggtaaggtttagagggcaaactggagagcttgcaaaactggtgagtggtgggaataggagtctgaagtccaggatacagcctggggctggaatggaaatcaagggtcatttacataatgacagtgtttaaaacgcctctaagaagagttggtcactgaggtcttaaagagagcagaagagaagcaaagattcggactaaggtccaaattacagggaaagaatgaacagctattagagaagacacatcaatagtgacaagaggtaaaagtttagagctatgataaatgtgcatatttatctttacagggaatatttccccatagggaacagtttctagagtaatgctgaatttgtaaaattatctgaatctttgagtcctctagtagcacatttcttctcttagaaattgggatttggcccagctatttgggaggctgaggcacgagaatcgcttgaacccgggaggcagaggttgcagtgagctgagatcgcgccactgcactccagcctaggtgacagagggagactctgtctcaaaaaaaaaaaaaaagaaaagaaaagaaaagaaaaaagaaattgggatttgggggctgggcaccgtgtggctcatgcctataatcccagcactttgggaggctgaggtgggaagatcacttgagcccaagagtttgaggctgcagtgagctatgattgtgccaatgcactccagcctgggcaacagagcaagaacctgtctcaaaaaagaaaagaaaaagaaagcaaagattatcttccatcagaaataaatatgattaacatttattagtatattctttcagtcttttctggattcatacatactctttttcaaacagggatccttctgaaaatagtttttctcacaagatattgtgtatatttttgcaaggcattcagtttagtattcataagaatttgatagtgttataatgataataatgcatcataaaggcagattaaaatgcatttagccaaacctctcattggacatctaggttgtttccacattataaataatgctgcaattcataatttttttaattaaaaataattctttttagagacagggtctcactctgtccccaggctggagtgtgtctattcacaggtacaatgacagctcactgcagccttgaactcccgggcccaagtgatcctcctgccttggcctcccaaagtactgggaatacaggagtgagccaccatgcctggccactttttacttatttctgaatatttcctagaagcaaaatcactggtcaaatgccatgagtgtgttcaatgcagagttcatttctgaacatgactatcaatttgctggtagtacttatgttagactgtagtgaaccatgctatctctttcctacttcctcatttccattcttgtaagtcaaaaggaaaccttacaacaaggatcaacagcaacctttcagaaaaagcatacacgttttttgttgttgattttttttttctttaacaccttcaggtatgggttagcagtcaccctctgtttacccttacaaaccgctttgggcactcagtgttttttaaacaaagaggcctggtaacttggatggtaaggctgtctgtcccaaccggtccagctcctcactggcagagggacttctgcatttccagcctgtgattttagttagaggcaaatccaaggtggggagcctcactcaggtgaggaagatatttgtcaggtctgctaggatttctctcccaggcttcagaaatttgcaagcatctttgcatttcctggcattctctggcctggaatgctgttttttgtcttgggcctccctggcagagcaaggcagtccccttttctgtcttcagagcctttctctgggcttgggacaggcccactgtgttggcacaagcttcatttggtctgctggggagcttggctgcaggctctgggtgctcggcatctcccctggctgctcctttctgtcctattcaatcagcctcagcacctgcacttgtcagttaggcctgatgttaccctggatgggaaatggaacttctttactgttgctctaattccatgtttcacaaaccgcagggcctatggatggattgggaagtaaatttaaaatgtgaaggaaaaaaaatcggagtccatcgcaacaatggtaggtattgtttcattaaacttttttcagattttatatatgcaaactgtaagggtcctattcaaagaccttgaaagccaagaatgtgaactgtgcatttcaaacgtatgtcagtattcctatggggctgtg

SEQ ID NO: 8729 - DNA, 3332 bp, Homo sapiens
cttgagcctgggcaacatagtgagaccccatctctaaaattaaaataaacaaacaaatatatatgtaaggaaaacctagactgaattcattgaatttagtgaatacacattttgttgtcaaagtgaatattctacacatctctaaaattaaaataaatgaacaaatatataaataaatgaaacgtagactgaattcattgaatttaacgaatacatattttggtgtcaaagtaaatattccacacaaggcaatacattttgaaggagttkatgaacttctatgatttctggttatatgtagaaaatcacatgctttaacttccgaaagcatctttattgtcacacagtaaatatttaaaaggagagattgggttttagcagcagaggagggggaaggacattacaggccagagaaacagtgtgaccagaatcttgaaggtgggaaagtacaaggtccagtttgattagaaatcaggagggcagcaggagggaaagcaagagagaaactgccagattagggagggccctgagggccagaagaggattttgtagttaatttggaagaaaacattgtaattaaataaaaagtttttaaagcagtggagctgtatgcattaggaaaattataataacatccaacatctgttgatcatttacagtgttctaagcgatttacactgtaggctgagctctttaggtatatgagctcattgaaactcacaacactcttgcaaaggtgatatcatcattttatggaagcagctgaggctcagagaggttcattcactttgcccaaggtgacacagctagtaagcaccaggaccaggattttaaacttagaggtgtccggttccaaagcctccattcttaaccacaaaataataaatgccagaacaaaagaagtgaaaaaaagaattcaaaaactcttgtgacttaaatgttactgaagttggtgtgaggggagaggagaaaggggagtcaaaaacaactgctagaatttgagccagtgtgggaattctgcaggtagtgaaatcggaaagaggtaaggtttagagggcaaactggagagcttgcaaaactggtgagtggtgggaataggagtctgaagtccaggatacagcctggggctggaatggaaatcaagggtcatttacataatgacagtgtttaaaacgcctctaagaagagttggtcactgaggtcttaaagagagcagaagagaagcaaagattcggactaaggtccaaattacagggaaagaatgaacagctattagagaagacacatcaatagtgacaagaggtaaaagtttagagctatgataaatgtgcatatttatctttacagggaatatttccccatagggaacagtttctagagtaatgctgaatttgtaaaattatctgaatctttgagtcctctagtagcacatttcttctcttagaaattgggatttggcccagctatttgggaggctgaggcacgagaatcgcttgaacccgggaggcagaggttgcagtgagctgagatcgcgccactgcactccagcctaggtgacagagggagactctgtctcaaaaaaaaaaaaaaagaaaagaaaagaaaagaaaaaagaaattgggatttgggggctgggcaccgtgtggctcatgcctataatcccagcactttgggaggctgaggtgggaagatcacttgagcccaagagtttgaggctgcagtgagctatgattgtgccaatgcactccagcctgggcaacagagcaagaacctgtctcaaaaaagaaaagaaaaagaaagcaaagattatcttccatcagaaataaatatgattaacatttattagtatattctttcagtcttttctggattcatacatactctttttcaaacagggatccttctgaaaatagtttttctcacaagatattgtgtatatttttgcaaggcattcagtttagtattcataagaatttgatagtgttataatgataataatgcatcataaaggcagattaaaatgcatttagccaaacctctcattggacatctaggttgtttccacattataaataatgctgcaattcataatttttttaattaaaaataattctttttagagacagggtctcactctgtccccaggctggagtgtgtctattcacaggtacaatgacagctcactgcagccttgaactcccgggcccaagtgatcctcctgccttggcctcccaaagtactgggaatacaggagtgagccaccatgcctggccactttttacttatttctgaatatttcctagaagcaaaatcactggtcaaatgccatgagtgtgttcaatgcagagttcatttctgaacatgactatcaatttgctggtagtacttatgttagactgtagtgaaccatgctatctctttcctacttcctcatttccattcttgtaagtcaaaaggaaaccttacaacaaggatcaacagcaacctttcagaaaaagcatacacgttttttgttgttgattttttttttctttaacaccttcaggtatgggttagcagtcaccctctgtttacccttacaaaccgctttgggcactcagtgttttttaaacaaagaggcctggtaacttggatggtaaggctgtctgtcccaaccggtccagctcctcactggcagagggacttctgcatttccagcctgtgattttagttagaggcaaatccaaggtggggagcctcactcaggtgaggaagatatttgtcaggtctgctaggatttctctcccaggcttcagaaatttgcaagcatctttgcatttcctggcattctctggcctggaatgctgttttttgtcttgggcctccctggcagagcaaggcagtccccttttctgtcttcagagcctttctctgggcttgggacaggcccactgtgttggcacaagcttcatttggtctgctggggagcttggctgcaggctctgggtgctcggcatctcccctggctgctcctttctgtcctattcaatcagcctcagcacctgcacttgtcagttaggcctgatgttaccctggatgggaaatggaacttctttactgttgctctaattccatgtttcacaaaccgcagggcctatggatggattgggaagtaaatttaaaatgtgaaggaaaaaaaatcggagtccatcgcaacaatggtaggtattgtttcattaaacttttttcagattttatatatgcaaactgtaagggtcctattcaaagaccttgaaagccaagaatgtgaactgtgcatttcaaacgtatgtcagtattcctatggggctgtg

SEQ ID NO: 8730 - DNA, 3332 bp, Homo sapiens
cttgagcctgggcaacatagtgagaccccatctctaaaattaaaataaacaaacaaatatatatgtaaggaaaacctagactgaattcattgaatttagtgaatacacattttgttgtcaaagtgaatattctacacatctctaaaattaaaataaatgaacaaatatataaataaatgaaacgtagactgaattcattgaatttaacgaatacatattttggtgtcaaagtaaatattccacacaaggcaatacattttgaaggagtttatgaacttctatgatttctggttatatgtagaaaatcacatgctttaacttccgaaagcatctttattgtcacacagtaaatatttaaaaggagagattgggttttagcagcagaggagsgggaaggacattacaggccagagaaacagtgtgaccagaatcttgaaggtgggaaagtacaaggtccagtttgattagaaatcaggagggcagcaggagggaaagcaagagagaaactgccagattagggagggccctgagggccagaagaggattttgtagttaatttggaagaaaacattgtaattaaataaaaagtttttaaagcagtggagctgtatgcattaggaaaattataataacatccaacatctgttgatcatttacagtgttctaagcgatttacactgtaggctgagctctttaggtatatgagctcattgaaactcacaacactcttgcaaaggtgatatcatcattttatggaagcagctgaggctcagagaggttcattcactttgcccaaggtgacacagctagtaagcaccaggaccaggattttaaacttagaggtgtccggttccaaagcctccattcttaaccacaaaataataaatgccagaacaaaagaagtgaaaaaaagaattcaaaaactcttgtgacttaaatgttactgaagttggtgtgaggggagaggagaaaggggagtcaaaaacaactgctagaatttgagccagtgtgggaattctgcaggtagtgaaatcggaaagaggtaaggtttagagggcaaactggagagcttgcaaaactggtgagtggtgggaataggagtctgaagtccaggatacagcctggggctggaatggaaatcaagggtcatttacataatgacagtgtttaaaacgcctctaagaagagttggtcactgaggtcttaaagagagcagaagagaagcaaagattcggactaaggtccaaattacagggaaagaatgaacagctattagagaagacacatcaatagtgacaagaggtaaaagtttagagctatgataaatgtgcatatttatctttacagggaatatttccccatagggaacagtttctagagtaatgctgaatttgtaaaattatctgaatctttgagtcctctagtagcacatttcttctcttagaaattgggatttggcccagctatttgggaggctgaggcacgagaatcgcttgaacccgggaggcagaggttgcagtgagctgagatcgcgccactgcactccagcctaggtgacagagggagactctgtctcaaaaaaaaaaaaaaagaaaagaaaagaaaagaaaaaagaaattgggatttgggggctgggcaccgtgtggctcatgcctataatcccagcactttgggaggctgaggtgggaagatcacttgagcccaagagtttgaggctgcagtgagctatgattgtgccaatgcactccagcctgggcaacagagcaagaacctgtctcaaaaaagaaaagaaaaagaaagcaaagattatcttccatcagaaataaatatgattaacatttattagtatattctttcagtcttttctggattcatacatactctttttcaaacagggatccttctgaaaatagtttttctcacaagatattgtgtatatttttgcaaggcattcagtttagtattcataagaatttgatagtgttataatgataataatgcatcataaaggcagattaaaatgcatttagccaaacctctcattggacatctaggttgtttccacattataaataatgctgcaattcataatttttttaattaaaaataattctttttagagacagggtctcactctgtccccaggctggagtgtgtctattcacaggtacaatgacagctcactgcagccttgaactcccgggcccaagtgatcctcctgccttggcctcccaaagtactgggaatacaggagtgagccaccatgcctggccactttttacttatttctgaatatttcctagaagcaaaatcactggtcaaatgccatgagtgtgttcaatgcagagttcatttctgaacatgactatcaatttgctggtagtacttatgttagactgtagtgaaccatgctatctctttcctacttcctcatttccattcttgtaagtcaaaaggaaaccttacaacaaggatcaacagcaacctttcagaaaaagcatacacgttttttgttgttgattttttttttctttaacaccttcaggtatgggttagcagtcaccctctgtttacccttacaaaccgctttgggcactcagtgttttttaaacaaagaggcctggtaacttggatggtaaggctgtctgtcccaaccggtccagctcctcactggcagagggacttctgcatttccagcctgtgattttagttagaggcaaatccaaggtggggagcctcactcaggtgaggaagatatttgtcaggtctgctaggatttctctcccaggcttcagaaatttgcaagcatctttgcatttcctggcattctctggcctggaatgctgttttttgtcttgggcctccctggcagagcaaggcagtccccttttctgtcttcagagcctttctctgggcttgggacaggcccactgtgttggcacaagcttcatttggtctgctggggagcttggctgcaggctctgggtgctcggcatctcccctggctgctcctttctgtcctattcaatcagcctcagcacctgcacttgtcagttaggcctgatgttaccctggatgggaaatggaacttctttactgttgctctaattccatgtttcacaaaccgcagggcctatggatggattgggaagtaaatttaaaatgtgaaggaaaaaaaatcggagtccatcgcaacaatggtaggtattgtttcattaaacttttttcagattttatatatgcaaactgtaagggtcctattcaaagaccttgaaagccaagaatgtgaactgtgcatttcaaacgtatgtcagtattcctatggggctgtg

SEQ ID NO: 8731 - DNA, 3332 bp, Homo sapiens
cttgagcctgggcaacatagtgagaccccatctctaaaattaaaataaacaaacaaatatatatgtaaggaaaacctagactgaattcattgaatttagtgaatacacattttgttgtcaaagtgaatattctacacatctctaaaattaaaataaatgaacaaatatataaataaatgaaacgtagactgaattcattgaatttaacgaatacatattttggtgtcaaagtaaatattccacacaaggcaatacattttgaaggagtttatgaacttctatgatttctggttatatgtagaaaatcacatgctttaacttccgaaagcatctttattgtcacacagtaaatatttaaaaggagagattgggttttagcagcagaggagggggaaggacattacaggccagagaaacagtgtgaccagaatctygaaggtgggaaagtacaaggtccagtttgattagaaatcaggagggcagcaggagggaaagcaagagagaaactgccagattagggagggccctgagggccagaagaggattttgtagttaatttggaagaaaacattgtaattaaataaaaagtttttaaagcagtggagctgtatgcattaggaaaattataataacatccaacatctgttgatcatttacagtgttctaagcgatttacactgtaggctgagctctttaggtatatgagctcattgaaactcacaacactcttgcaaaggtgatatcatcattttatggaagcagctgaggctcagagaggttcattcactttgcccaaggtgacacagctagtaagcaccaggaccaggattttaaacttagaggtgtccggttccaaagcctccattcttaaccacaaaataataaatgccagaacaaaagaagtgaaaaaaagaattcaaaaactcttgtgacttaaatgttactgaagttggtgtgaggggagaggagaaaggggagtcaaaaacaactgctagaatttgagccagtgtgggaattctgcaggtagtgaaatcggaaagaggtaaggtttagagggcaaactggagagcttgcaaaactggtgagtggtgggaataggagtctgaagtccaggatacagcctggggctggaatggaaatcaagggtcatttacataatgacagtgtttaaaacgcctctaagaagagttggtcactgaggtcttaaagagagcagaagagaagcaaagattcggactaaggtccaaattacagggaaagaatgaacagctattagagaagacacatcaatagtgacaagaggtaaaagtttagagctatgataaatgtgcatatttatctttacagggaatatttccccatagggaacagtttctagagtaatgctgaatttgtaaaattatctgaatctttgagtcctctagtagcacatttcttctcttagaaattgggatttggcccagctatttgggaggctgaggcacgagaatcgcttgaacccgggaggcagaggttgcagtgagctgagatcgcgccactgcactccagcctaggtgacagagggagactctgtctcaaaaaaaaaaaaaaagaaaagaaaagaaaagaaaaaagaaattgggatttgggggctgggcaccgtgtggctcatgcctataatcccagcactttgggaggctgaggtgggaagatcacttgagcccaagagtttgaggctgcagtgagctatgattgtgccaatgcactccagcctgggcaacagagcaagaacctgtctcaaaaaagaaaagaaaaagaaagcaaagattatcttccatcagaaataaatatgattaacatttattagtatattctttcagtcttttctggattcatacatactctttttcaaacagggatccttctgaaaatagtttttctcacaagatattgtgtatatttttgcaaggcattcagtttagtattcataagaatttgatagtgttataatgataataatgcatcataaaggcagattaaaatgcatttagccaaacctctcattggacatctaggttgtttccacattataaataatgctgcaattcataatttttttaattaaaaataattctttttagagacagggtctcactctgtccccaggctggagtgtgtctattcacaggtacaatgacagctcactgcagccttgaactcccgggcccaagtgatcctcctgccttggcctcccaaagtactgggaatacaggagtgagccaccatgcctggccactttttacttatttctgaatatttcctagaagcaaaatcactggtcaaatgccatgagtgtgttcaatgcagagttcatttctgaacatgactatcaatttgctggtagtacttatgttagactgtagtgaaccatgctatctctttcctacttcctcatttccattcttgtaagtcaaaaggaaaccttacaacaaggatcaacagcaacctttcagaaaaagcatacacgttttttgttgttgattttttttttctttaacaccttcaggtatgggttagcagtcaccctctgtttacccttacaaaccgctttgggcactcagtgttttttaaacaaagaggcctggtaacttggatggtaaggctgtctgtcccaaccggtccagctcctcactggcagagggacttctgcatttccagcctgtgattttagttagaggcaaatccaaggtggggagcctcactcaggtgaggaagatatttgtcaggtctgctaggatttctctcccaggcttcagaaatttgcaagcatctttgcatttcctggcattctctggcctggaatgctgttttttgtcttgggcctccctggcagagcaaggcagtccccttttctgtcttcagagcctttctctgggcttgggacaggcccactgtgttggcacaagcttcatttggtctgctggggagcttggctgcaggctctgggtgctcggcatctcccctggctgctcctttctgtcctattcaatcagcctcagcacctgcacttgtcagttaggcctgatgttaccctggatgggaaatggaacttctttactgttgctctaattccatgtttcacaaaccgcagggcctatggatggattgggaagtaaatttaaaatgtgaaggaaaaaaaatcggagtccatcgcaacaatggtaggtattgtttcattaaacttttttcagattttatatatgcaaactgtaagggtcctattcaaagaccttgaaagccaagaatgtgaactgtgcatttcaaacgtatgtcagtattcctatggggctgtg

SEQ ID NO: 8732 - DNA, 670 bp, Homo sapiens
agtccaacactacttagaattaatatgttagctgttagaagccgggagctgtcacgctgcatgtccctgctgctccagtgtttgggagaggctttgcactggaaacattgagcttcaaagcaaaccttcaaccttctattggtactcactgttcccatatatagaacagagcagcacacacttgtctattgcttcaaggcaagagcaaattctgaaggtattaaatagagtcttacttcaaccaaacaagagagcccagagaaagctaaggacaaggttctgtcccttcccttacattttaaagattttatttatttatttatttatttatttatttatttatttattttttgagatggagtctygctctgttgcccaggctagagtacagtggtgtgatctcggctcactgcaacctccacctcccaggttcaagcgattctcctgcctcagcctcctgagtagctaggattacaggtatgcaccactatgcccggttaattttcctatttttagtagaaatggggtttcaccatgttggtcaggctggtctcgaactcctaactttgtgatccgcccatctcagcctctcaaagtgctgggattacaggcatgagccaccgcgcctggcctagattataataatttagagtggcagaatttaagatca

SEQ ID NO: 8733 - DNA, 670 bp, Homo sapiens
agtccaacactacttagaattaatatgttagctgttagaagccgggagctgtcacgctgcatgtccctgctgctccagtgtttgggagaggctttgcactggaaacattgagcttcaaagcaaaccttcaaccttctattggtactcactgttcccatatatagaacagagcagcacacacttgtctattgcttcaaggcaagagcaaattctgaaggtattaaatagagtcttacttcaaccaaacaagagagcccagagaaagctaaggacaaggttctgtcccttcccttacattttaaagattttatttatttatttatttatttatttatttatttatttattttttgagatggagtcttgctctgttgcccaggctagagtacagtggtgtgatctcggctcactgcaacctccacctcccaggttcaagcgattctcctgcctcagcctcctgagtagctaggattacaggtatgcaccactatgcccggttaattttcctatttttagtagaaatggggtttcaccatgttggtcaggctggtctcgaactcctaactttgtgatccgcccatctcagcctcycaaagtgctgggattacaggcatgagccaccgcgcctggcctagattataataatttagagtggcagaatttaagatca

SEQ ID NO: 8734 - DNA, 645 bp, Homo sapiens
gttcacaaaaattcagtgtctcctcaccatctaaagaacatagtcatcaccaaatgactttttttatccaataaaatgtaagtgggaagaaatttgtgttatatgtgttcagaagctttaaggaccagcatgcgatttagcacactctcttttccctacccctgtattgtggaagcatgtgtggaggtgggtcctccactatcctgaattcctgagggcctgtgatgaggagaatcatcttgctaaactatgatggacatgtagcttaatgacaaatgaaatttgatattatggtctatcctgactaatatagaatcaaattctgrggtcttcatcctcaagttaaatatcatcaggtggttggaactaattgcattttatgagcatttatgtttatcatgctctccaattaaagtagaatatctgaaagtcacaattaggcctttcagatgcaatgtaggaaagagaaggcattatatggtttcattgtctcttgaaacatcaagatatagggagactccatgatgctagaggaactgcagtgatggttgtcttctcaaggtagcatgcacacagcaactaaggaaaaggtgaatcggatgggaaagaggagagtcatagtgtaagtgaaccttgcctagatgg

SEQ ID NO: 8735 - DNA, 845 bp, Homo sapiens
ggccccaccactgtgaggcaccaggcactggcagccaagggcaggaggactggggctctggcctccaggagctcaaggcctcattgacaattgacagtgagctggcacaccagagtcccaggccaatctcagcatgtgcaggctctgccggattgtgaggcagcagggaggaaggcccagtcacttggcaggtcaggggatattgcagagggtgtagattaaactgggctgtcaaggaaacaggaatttgccagacagggagctggaggaagagttctacacagaagacatggcccctgcaaagccatggagctatgaggtgtcgggctgcgggaagcgtgggcagctctgtggtctggagcaggagtccttgagtaggaggaagctggaaggtcactgcaaacaagatctaggctgggaggagggatcggctgggtcagccatacggccagagtgggggggacctgttgtgatgggaggggaagccagaagtgcctagggtctgtcggtgaggggacgagaaagaggcaggtgtccagaaagggaaggtttgcgggcacccgcagggggctagccagtggcatacagaccacagtggctggcaggagatagaggcatgaagccrgctccagggctctcggggagcgctccccagctaggctggaagaagggtaatgtggcaggagggggccaaggaggatcttggaaagagcagttgcagcagaaggatggaaatcagggtcgagggcctctgttgaagcccaggaaggagctgcaagaaaggagtgggcatcacagccagcagccatgcagggcaaggcaaggggagcaggaaacacgaccct

SEQ ID NO: 8736 - DNA, 598 bp, Homo sapiens
tgargttgccgccgacctcctgggcggcacagctccggctgcccaggtagaccttggtccgctccagcggggccagcgcctgcgtggagatcaggatctggaagtccgtgcgggagcagctcacgttcatgggcaccactgggaatcggagggaggagctggaagccttagggtcaggcggtctgaccctcacctccccaacaccccctaccctcccacaaagggtggtggatggggaaactgaggcccagagtaggaaaagctcttacggaatcctacagggcacagtgtgggatatcttatacgggttactctgttcacctccatcagactgtgagctcctcagggaaggcaccaagtttgatcctctcagcgtcctctgggcccagcacagagcttggcaggcccagtgaatgctgagtgaatgaatgaatgttcttaataattataaaaattcatctgctaatcacttggccatgtgccaggcaattcattcaattatttaacaaatatattgatggcctgctatgttcaggtcctattctcagcaccacaaatacaaaaatgaggaaaaaacacagctgaaattcttgccttg

SEQ ID NO: 8737 - DNA, 598 bp, Homo sapiens
tgaggttgccgccgacctcctgggcggcacagctccggctgcccaggtagaccttggtccgctccagcggggccagcgcctgcgtggagatcaggatctggaagtccgtgcgggagcagctcacgttcatgggcaccactgggaatcggagggaggagctggaagccttagggtcaggcggtctgaccctcacctccccaacaccccctaccctcccacaaagggtggtggatggggaaactgaggcccagagtaggaaaagctcttacggaatcctacagggcacagtgtgggatatcttatacgggttactctgttcacctccatcagactgtgagctcctcagggaaggcaccaagtttgatcctctcagcgtcctctgggcccagcacagagcttggcaggcccagtgaatgctgagtgaatgaatgaatgttcttaataattataaaaattcatctgctaatcacttggccatgtgccaggcaattcatycaattatttaacaaatatattgatggcctgctatgttcaggtcctattctcagcaccacaaatacaaaaatgaggaaaaaacacagctgaaattcttgccttg

SEQ ID NO: 8738 - DNA, 785 bp, Homo sapiens
ctggcaggcagaggcctggaactctcaacccctctccgggaaatgcctcagacatatttcagcctctggtgtctgggcagtcggggatttatgggccagccatctcccacgatgatctcggtggtgctgaactgtgtgtcacccccagctggcactgtggctgccctcccagtggggaggcctcctgcagcctgggccacatctggagcctcgcccagtgtgagtgcccttgtctgcccctgggcccccacarggatctgagggggagggaggtgaggtggagtggggggtgggcactcctgccccgaagcccctggaacaggagctgggataagaacccccgctaacttcctctccttctctgcagaaggggcttgtcctaaatcacacagggctgggagagggcctgggagagttctggaaataagactatcagaggcaaaaggaactttaaagatctttctgtcaatatcctcatcttacaggtggagaaactgaggcccacagagacatggggccatgccagctagtggaggcatagccaatggagctgggctctccagggctgtgctaacagagccacagctctcccaccccagcttgcatgtggagcccactaaggcccgaaggggctggcctgcccaagttcacggctctgccgcaagcttgctgcagatcaccatctcctccattcctggccccaactccccttgcatatggagcaaggaaagatcttttgaatgctgaacgggcctgagacaccttcctgaaggaaagctgtcctt

SEQ ID NO: 8739 - DNA, 765 bp, Homo sapiens
tctcatctgtttccttctggctgtggggccccatgtaggggctatctcttctcacacaattttacscaactttgggcttccctgggcaggaacggaagccagaggcagagggccaaagtggcaaattgtaccttaaaatggggacacggagttcctgagccaaaaggccacatgactggggccttttcattaagagattctcaagggagatttcccactgaataggttccctgagaggcgggagtaaagcaaaagacgtgtggtgaggtttgtgccaagtggctcttgtggcccttcttgggaggccacacagaggaagttgccaagttgagtcaaagctgtaccagttcatgaagctggtcacacgtagcttctttccaactcttcctccacagctctcatgagcaacccagtgccctttcatggccagtgtcacaggcagcatctggcaggcatgacagtgaggcaggaattttagaacgaaaagggaccttgcaagttgactaatataaaatactgtcttccggtgggaaaaaactatcccccagaggtcatgtgatttgacgaatgccaagcatcaacagggccaggaccagagacaggtctcctgattcattctgtcattttgtttgtttttgttttttgagacaaggtctttccttgttgtccagactggagagcagtggcacattcatagctcactgaagcctccacctccagactcaagtgatcctcccacctcagcctcctgagtagctgagactg

SEQ ID NO: 8740 - DNA, 765 bp, Homo sapiens
tctcatctgtttccttctggctgtggggccccatgtaggggctatctcttctcacacaattttacgcaactttgggcttccctgggcaggaacggaagccagaggcagagggccaaagtggcaaattgtaccttaaaatggggacacggagttcctgagccaaaaggccacatgactggggccttttcattaagagattctcaagggagatttcccactgaataggttccctgagaggcrggagtaaagcaaaagacgtgtggtgaggtttgtgccaagtggctcttgtggcccttcttgggaggccacacagaggaagttgccaagttgagtcaaagctgtaccagttcatgaagctggtcacacgtagcttctttccaactcttcctccacagctctcatgagcaacccagtgccctttcatggccagtgtcacaggcagcatctggcaggcatgacagtgaggcaggaattttagaacgaaaagggaccttgcaagttgactaatataaaatactgtcttccggtgggaaaaaactatcccccagaggtcatgtgatttgacgaatgccaagcatcaacagggccaggaccagagacaggtctcctgattcattctgtcattttgtttgtttttgttttttgagacaaggtctttccttgttgtccagactggagagcagtggcacattcatagctcactgaagcctccacctccagactcaagtgatcctcccacctcagcctcctgagtagctgagactg

SEQ ID NO: 8741 - DNA, 771 bp, Homo sapiens
agaaacccaaccgtgttcactaatgcccctgccagccctcttcttccacaaacacaatcctaataagtccagcttgtaagtagccatgtgcacagatgatctgtcattcttgtaggagttttgtaacatttttagattgcgatttgctgacaaaggttggggattctatactcagaactgtcagcacattcctggggtgggagaagtcagcccccgctagkgccacagctaaccacggccccaccctgcaccccaccccatcctcgccccaccaaggtggcctggctgggtcaggtggacccaggccagtgtctcagaacccctggcaggagcatccaaactgaaggattcttcaggcgaggtggccccggtccaagggattgaccaagtgcccctccctagcctccacgcctccaagactgcatttttgaggactggtcaggacaaggtgaggaggagcactgctggctctcccttgggctctaggcacgcaacggaaagaaagctttcaggccctggagggcaggggtgggaactctcattttttctaggagattcccagcaccaagccgggcggcgtgctctacaggtgtgctgtttaggaagcaagccaacccatcccgccaccagggccaagccccgaggacgaggactccaaggaggaacagcagaacatcccagaacagaggggcagtcttgcaactgggacccagacacagcttgctttgaacttgacttcaggagatctggagcaacccgagctattcctct

SEQ ID NO: 8742 - DNA, 771 bp, Homo sapiens
agaaacccaaccgtgttcactaatgcccctgccagccctcttcttccacaaacacaatcctaataagtccagcttgtaagtagccatgtgcacagatgatctgtcattcttgtaggagttttgtaacatttttagattgcgatttgctgacaaaggttggggattctatactcagaactgtcagcacattcctggggtgggagaagtcagcccccgctagtgccacagctaaccacggccccaccctgcaccccaccccatcctcgccccaccaaggtggcctggctgggtcaggtggacccaggccagtgtctcagaacccctggcaggagcatccaaactgaaggattcttcaggcgaggtggccccggtccaagggattgaccaagtgcccctccctagcctccacgcctccaagactgcatttttgaggactggtcaggacaaggtgaggaggagcactgctggctctcccttgggctctaggcacgcaayggaaagaaagctttcaggccctggagggcaggggtgggaactctcattttttctaggagattcccagcaccaagccgggcggcgtgctctacaggtgtgctgtttaggaagcaagccaacccatcccgccaccagggccaagccccgaggacgaggactccaaggaggaacagcagaacatcccagaacagaggggcagtcttgcaactgggacccagacacagcttgctttgaacttgacttcaggagatctggagcaacccgagctattcctct

SEQ ID NO: 8743 - DNA, 818 bp, Homo sapiens
actttcccctcagtctgaaatctactccctcactcattcactcatctctcgctttcagcactcactgaaatgcctgtgcttagtgtgactttcactgtcactgggcgtagactccactcggttattcactcaggcatttattcacctttccattcattccacacacatattaaatacccagacgttctaggcaaactcatcttttagtctggaatttccttatgaatgaatgaattctaagctaagggaaaattagaactatagtgttttctctgtagggtgggtgaattttgaactctcataaatgcaggttttaagtgggcttgccatagccaaccttctgctacaattataccatgggacacagtgaccctggattgccactttctcttcccaaacaaggacccacaaaggaaattctatgggaactagaaatgygcttcagaatttcccttttacagggacatccttcacgaagacatacggaggcccctcactctcagaaagatggagaaatgtccccacagcagcttcatggttgtgataaatgggagcaaacaagatctccatgtcttaaaaaattaaaaaaacagaaaacaaaaacaattccatgcaccacctgtacctgagtcagcatgcccaattttaaagtcagagtgcaatggcctgcaggcccaagcatccaattctataaatacagacaagctgaaagccaaaggccagaccatcccaatctgtcaccctttctacatggataaattatgtacaaccctctggatggatacgcccagaggcctgaggtcctgtctgagcaattt

SEQ ID NO: 8744 - DNA, 779 bp, Homo sapiens
gtaaactgccctttgtaaatagaggagacactgggataacatgacttaataaagtytctgagtttctctgattcttaatccccagaaatgggaagaaaatctgggtcagttgttaagagaagacacacagtgaaaaaccattccagcggatgatttctgggccacctaactctgattattcttaatacctccctgacggattgaaaatctctggaatctattagctattttctctgattcagggaaaattttactcttcactatgtattagtgaataattttcaattatttccattgaaaataatggcaaaaactgcaattacttttgcaccaacctataaatcattcatactcttttgtggataggttttgataaggggaaatgggagagtccataaagacacagaatgtctgaggatggtgtgaggaggaggcatgacgaggggaggaaaaacacaagacgattaggaagtcaaagacaaacttcacaatactcaatagtattgtacaaaggatcagttttgagaaagatggtcctccctccagaaattactgaaagcctatacaggaattgtcggaggtgtccagaaacttctgtgctctggtgtgcaggctcctaagagcagatatttacctttcagctgtactggccctggctctcccaatccgcctcaggcagcatctgtcatcatgtcttgttttgacagcagcgtggagctgaccactcagcgaagacagaggaaatttccaagaatagaagaaagaaaagcatcagggag

SEQ ID NO: 8745 - DNA, 779 bp, Homo sapiens
gtaaactgccctttgtaaatagaggagacactgggataacatgacttaataaagtttctgagtttctctgattcttaatccccagaaatgggaagaaaatctgggtcagttgttaagagaagacacacagtgaaaaaccattccagcggatgatttctgggccacctaactctgattattcttaatacctccctgacggattgaaaatctctggaatctattagctattttctctgattcagggaaaattttactcttcactatgtattagtgaataattttcaattatttccattgaaaataatggcaaaaactgcaattacttttgcaccaacctataaatcrttcatactcttttgtggataggttttgataaggggaaatgggagagtccataaagacacagaatgtctgaggatggtgtgaggaggaggcatgacgaggggaggaaaaacacaagacgattaggaagtcaaagacaaacttcacaatactcaatagtattgtacaaaggatcagttttgagaaagatggtcctccctccagaaattactgaaagcctatacaggaattgtcggaggtgtccagaaacttctgtgctctggtgtgcaggctcctaagagcagatatttacctttcagctgtactggccctggctctcccaatccgcctcaggcagcatctgtcatcatgtcttgttttgacagcagcgtggagctgaccactcagcgaagacagaggaaatttccaagaatagaagaaagaaaagcatcagggag

SEQ ID NO: 8746 - DNA, 661 bp, Homo sapiens
ccccaagtgatagctcccactatgacacacagatgggtccattgtgtggaccaatagcaccatagtggccactcctttcactatctgtattgcctctgaatcctcagaacaatcctgggaagcatataaagtaatcctcattttacatctaacaaaaacagagaagttaaataccttgcctaaggttacacagcatgttgcagagtgggaatttgcacaaaagtcatccggttccaatacaatgtctttctgctaaaccatattgctggctttcaatgtgacaccatttgttgatcatctgcctaggtgtgaggtatggcagggtgggggttgaggggaatcagtctaagccttgtctacactagaatccttactctgaacccctgccatatgccagatactgagctaggggcacggcaacaaataaacatgtctagcttcttttttttttttttttttggtatacctgttttgtgcatgaaattgtgcagtgggttatgacagaaaaccaaaaaagcargaaaggaaatttagagttctattacgaagacaagacctgtggagcaatgatctggccacagagatgtagcacaggtaacttttgtgttggagggagaatttcagattgtgaaaatctgtggggaatgcaaggagtattctg

SEQ ID NO: 8747 - DNA, 988 bp, Homo sapiens
  misc_feature (1)...(988): n = A,T,C or G
tggctgcaattaacctagtatgtggattactgccatgcaggtaattttgaggtgactggggattttatcatgcactttcagaacaggatttcagcctgaactaggggttctaacttccataaaaattccttactcaactcagaagttttcaacagcagctacccatctggctgcctcctcaggggctttgtagatgaggggagtaactgttcggtttctggagaatgatggtttttaaaaagcgaaagagcaaggtgtgcagattggcagtgcagaaatgctgaggttctttctggccagcttctctactgcagccatcaaccataaggatgtcaggatcagaataatctccaggatcctaaaggcaaggaaaagctacgtctatccagaatggctgggaaaataaggggttataaccagctatgctctcaacactttctagagattaaatataacaaaaatgcttaacacaaactactggagataatttactctttcacagcagattcmaaaagcctctgatacatttcagggtctcagaatcattgttattataataacattttagttcaaatggagtaactagttgtggcagagagtacaggatttgaagtcaaatgatctagatcggaagataacaatctacagctcatgggccaaattgggccactactgcctgtttttctagaaaaagttctattggaacacagctacactcatttgtttacatactgtctatggctgctacacaatggcagagttgtcagggaccctaagacctaccaagcctaaactacttactgtcttgccctatacataaaaaagttttctaacccctgatccagactatgatctagctctgtgatcttaggcaaatcaccatttnnnnnnnnnnnnnnnnnnnnnnnnnnnnnnnnnnnnnnnnnnnnnnnnnnnnnnnnnnnnnnnnnnnnnnnnnnnnnnnnnnnnnnnnnnnnnnnnnnnntaa

SEQ ID NO: 8748 - DNA, 430 bp, Homo sapiens
cggtcggtggcagaggcagggccggcggtcggtggcagaggcagggctggcagtcggtggcaagcccttcgcaggcctctcaggctgggatggaagtcmcaacacagcccgcagcagccaggaagaagcagggtgatggaagccgcccctgtgggcagccacgggggtgattctgcagtggtgggacccaggtgggaagccagggccgctgactaccttccgagagacagcccgcggcaagtgtgtgccagagatcacctggcgtgctcgctgcagggacgcagacctctcccagctagaggccaagggtggcttcatggtctccttgagttccggctcgggcagggttggactcacactcagattagacagtgcttcgaagagaaggagcccgtcacttcacaggcagccatctgtctcatctgtccac

SEQ ID NO: 8749 - DNA, 381 bp, Homo sapiens
  misc_feature (1)...(381): n = A,T,C or G
gaannnnnnnnnnnnnnnnnnnnnnnnnnnnnnnnnnnnnnnnnnnnnnnnnnnnnnnnnnnnnnnnnnnnnnnnnnnnnnnnnnnnnnnnnnnnnnnnnnnnaacagcacacggattgcatggatgcgaagctcccctcaactaatctatggggaaaatcatcagaaaaatgggtgcctctgggagagtaagggcagggactagccagaaggggcagcagggccaggtggagactcactcgcctctgtggatactctggtcatgcggcttggggagtgcgtgtcccttgaagagcctgatccagaaacagtgccgtgttttctgaaactgaatgcaacgaagtgcggcttcatccactgagtcactgcccatccccycaa

SEQ ID NO: 8750 - DNA, 656 bp, Homo sapiens
cagcgcagaatagcagatttctggaggttattcctctcacttaacattaacagaaacttttctctgttgagagctcccacttcctagccctggaagcctcccttccagtctttattgttgtgatttgactattttcaacacctcatagaactggaatcatgcagtactcgattttctgtgcctggcttatttcacttagcatggtgtcctcaaggtccatccaggctgcaaatggcagaagcacctgtgtctcgcggctgagcggcattcgtcagatgtgcacaccacattttctttctttttgagatggagtcttgctgccacccaggctggatggagtacagtggtgtgatctcagctcactgcaacctctgcctcctggggtcaagcgactctcatgcctcagcctcccaagtagctgggactacaagtgtgtgccaccatgtccagctaattgacaccacattttctataaacattcatcacctgtttattttaaggctttcctgtggatcagacaaactggagtgcatatgtttcagggagtggagagctggctgggtccgggtgggctggagtgggtggtaggtgccagtgggaacagccagggyggggaaccctgagaggaggtgagaggatgagggcggctgtatgca

SEQ ID NO: 8751 - DNA, 1423 bp, Homo sapiens
catatataagaaaaaaaaaggaattcaaacaatatttagtaaagtgaaaataacctgtatttattttaatttgttgactataacattctatgttatattattctgtactttctggaggtgactaaagaaaatgacttttgaaataagttcataaaatgtaaagtcagctgaggtggaaaactcacagtagtgttggcctgaattaattgaaaagtttctaatatgtctttcttataatctccagggttttctcttagctaacagaatgtttagtatatattaactttatgagagttaaatctcccaaatataaagcgttagctaaccatgtgtgggtattgattatattagtgagattagcttagtctgccaaagaatgatatgcagagtaatgaagaaattatatatagctatcttaatagtgaaaataaatctattagtcttgtatcagtcagggttcaactggagaagcagaaccagtaggagggcgggagggagaacaaagaaaataatgacatattactacagagactgactacgcaagttggagatcaataaggcagtcgttttggggaaacaaacaaaaaaaacaaacaaaaactcgagcaggaagaaatgtaactggcaccattggatccaattatcccattactgagtatatactcaaaagaaaataaattattctaccaaaatgacacatgcactcctatgttcatggctgcactattcacaataacaaagacataatcaacctaggtgcccatcaattacacactgtataagtaaaatgtggtacttatacaccatggaatactacacagccataaaaaagaatgaaatcatgtcctttacagaaatgtggatggagctggaggctgtaatcctaagccaattaatgcagcatcagaaaaccaaatgctgtatattcttacttatatgcgggagctaagcactgaacamatataggcatcaatatgggaaaaacagactctggactacgtgagggtcgagggagagggatgggttaaaaaactacctattgaggaccatctctacagcctgccccgtccgtctctctccgagtcgctcctcctgctgctctcctgctcctggcaggccttgtgcccaccgggttacctgccctcaagcctccgcccagagaagcacagctgcaggggcgcgtcctgtcactccgccccgccagctaccctcccctgagcccgggtgcccggcttaggccgctccgtgtgaggagacctgggacccggcaccctccgggtcctacccagtgcttctgccctggcgtgcgacaccctcctttgccctgtgcggggcctggaggggccccttcagatcgcagccgtcaccacagctgctgccgccctcggaagagcatgacataggggtggctttcccagctggc

SEQ ID NO: 8752 - DNA, 1309 bp, Homo sapiens
atttaagaaaatccaaattatgataattggaacttctggaagacactggaataaaagggatgtcttagggttttcaggttttcatagaaatgaaagaagccagagtagaaatggaagctaaacaggggcctgatcaaattcaagatggaatatcctactcttccagtttcccttgagtggtgtaacatcaagcacttggctatcctcagcaaactaacacaggaacagaaaaccaaacaacacatgttctcacctataagtgggagctgaacaatgagaacacacgcacataggcaggagaacaacacacactggggcctgtgtggtagagggtggggagagggagagcatcagaaaaaagagctgatacatgctgggcttaacatttaggtgatgggttgataggtgcagcaaactaccatggcacacatttacctgtgtaacaaacctgcacatcctgcacatgtaccccagaacttaaaataaaataaaaaagaagttggctaatagcctcacattgtaagggccaagatatggtgaacaggatcctcaaactctcatagaaatctaggatctggatctactgtgggtgtctctgactgtataaggtctcctgaagcatcaggaatagatagtttataagaatccaaagcttacaaatggccaataagcacatgcaaaaatgctcaacatcattagtcactggggaaatgcaaatcaaaaccaaaatgagatactacttcacaccaagtaagatggctagaatctaaaagtcagaaaacaaatggttggtaaagatgtagaaaattggaaccctcatacactgctggtgagaatgaaaaaaaaacgcagccagtttggaaaacagtctagtggttcctcaaatgatttaacgtagaattacctatgaaattctacttctaggtttatacccaaagaaaatgaaaaagcatgtccacacaaaaacttgtacatgactgttcatagcrggattactcataatagctaaaatgtgggaacaactcaaatgtccatcaactgttgaatgggtatattcatacaatgtcatgaatgaaatactgattcacactacaacatttatgaaccttgaaaacatgatgctgagtgaaagaagccagccacaagagaccacatattgtatcattccatttatatgaaatctccagagtaggcaaatctgtagacatggaaagcagattagtggttgcctagggctgggggcaaagtgtaggaggatcagaaggtgatagctaaagggtatagggtatttttttgaggtgataaaaaa

SEQ ID NO: 8753 - DNA, 1309 bp, Homo sapiens
atttaagaaaatccaaattatgataattggaacttctggaagacactggaataaaagggatgtcttagggttttcaggttttcatagaaatgaaagaagccagagtagaaatggaagctaaacaggggcctgatcaaattcaagatggaatatcctactcttccagtttcccttgagtggtgtaacatcaagcacttggctatcctcagcaaactaacacaggaacagaaaaccaaacaacacatgttctcacctataagtgggagctgaacaatgagaacacacgcacataggcaggagaacaacacacactggggcctgtgtggtagagggtggggagagggagagcatcagaaaaaagagctgatacatgctgggcttaacatttaggtgatgggttgataggtgcagcaaactaccatggcacacatttacctgtgtaacaaacctgcacatcctgcacatgtaccccagaacttaaaataaaataaaaaagaagttggctaatagcctcacattgtaagggccaagatatggtgaacaggatcctcaaactctcatagaaatctaggatctggatctactgtgggtgtctctgactgtataaggtctcctgaagcatcaggaatagatagtttataagaatccaaagcttacaaatggccaataagcacatgcaaaaatgctcaacatcattagtcactggggaaatgcaaatcaaaaccaaaatgagatactacttcacaccaagtaagatggctagaatctaaaagtcagaaaacaaatggttggtaaagatgtagaaaattggaaccctcatacactgctggtgagaatgaaaaaaaaacgcagccagtttggaaaacagtctagtggttcctcaaatgatttaacgtagaattacctatgaaattctacttctaggtttatacccaaagaaaatgaaaaagcatgtccacacaaaaacttgtacatgactgttcatagcaggattactcataatagctaaaatgtgggaacaacycaaatgtccatcaactgttgaatgggtatattcatacaatgtcatgaatgaaatactgattcacactacaacatttatgaaccttgaaaacatgatgctgagtgaaagaagccagccacaagagaccacatattgtatcattccatttatatgaaatctccagagtaggcaaatctgtagacatggaaagcagattagtggttgcctagggctgggggcaaagtgtaggaggatcagaaggtgatagctaaagggtatagggtatttttttgaggtgataaaaaa

SEQ ID NO: 8754 - DNA, 578 bp, Homo sapiens
tatatcagatacttttacagcacctaagcactttatatgcagtactttactttaatcttcacaagaaagcgatggcatttgcacaaccctgagtgtgagcacctccttgagttttgtaccctgatggctcactcgcttcaccctagtcccagccctaaaaagccctgggtgtcagtgcaacgtgggatcaaggcagctgggtggggatctttagaattggacagtcttggttcttgagcagagctccagccacgttggctggccagtaggatcagaagggccagccagagtttctgcagtcagcaacaaggaaccagkaggccatctccgctaggggcagcatggtggagaagactgcagggctgggatcagagttcccatctgtgtatgccacaggtggggtccatatgcagttttctgggcctcagattcttactctgcacaatcaagagtattaatgaccctctctgcctcctttccaggttcagtttgatggtggccgtgaaggggtctgatgctcagtaacttgaggtgcccctgcagcatgaggtggtggagagggtatctgagtgggtatg

SEQ ID NO: 8755 - DNA, 578 bp, Homo sapiens
tatatcagatacttttacagcacctaagcactttatatgcagtactttactttaatcttcacaagaaagcgatggcatttgcacaaccctgagtgtgagcacctccttgagttttgtaccctgatggctcactcgcttcaccctagtcccagccctaaaaagccctgggtgtcagtgcaacgtgggatcaaggcagctgggtggggatctttagaattggacagtcttggttcttgagcagagctccagccacgttggctggccagtaggatcagaagggccagccagagtttctgcagtcagcaacaaggaaccaggaggccatctccgctaggggcagcatggtggagaagactgcagggctgggatcagagttcccatctgtgtatgccacaggtggggtccatatgcagttttctgggcctcagattcttactctgcacaatcaagagtattaatgaccctctctgcctcctttmcaggttcagtttgatggtggccgtgaaggggtctgatgctcagtaacttgaggtgcccctgcagcatgaggtggtggagagggtatctgagtgggtatg

SEQ ID NO: 8756 - DNA, 578 bp, Homo sapiens
tatatcagatacttttacagcacctaagcactttatatgcagtactttactttaatcttcacaagaaagcgatggcatttgcacaaccctgagtgtgagcacctccttgagttttgtaccctgatggctcactcgcttcaccctagtcccagccctaaaaagccctgggtgtcagtgcaacgtgggatcaaggcagctgggtggggatctttagaattggacagtcttggttcttgagcagagctccagccacgttggctggccagtaggatcagaagggccagccagagtttctgcagtcagcaacaaggaaccaggaggccatctccgctaggggcagcatggtggagaagactgcagggctgggatcagagttcccatctgtgtatgccacaggtggggtccatatgcagttttctgggcctcagattcttactctgcacaatcaagagtattaatgaccctctctgcctcctttccaggttcagtttgatggtgkccgtgaaggggtctgatgctcagtaacttgaggtgcccctgcagcatgaggtggtggagagggtatctgagtgggtatg

SEQ ID NO: 8757 - DNA, 740 bp, Homo sapiens
aatcccagccctttgggaggctgaggagggcagatcacttgaggtcaggagttcaagaccagcctggccaacatggcaaaaccttgtctctactaaaaatagaacaattagccgggcacggtggtgcatgcctgtaatcccagctacttgggaggctgaggcaggagaatggcttgaacctgggaggcggaggctgcagtgaacagagatcatgccactgcactgttcagcctacgtgacagagcaagactccatctcaaaaataaataaataaataaataaataaataaataaataaaataaagtaaaataaaataaaagtgccaagatgaccaagttctgggtttggatgttttctgccttaagcttgtctgtaaagtgggtaataccttccaaaaatgatcaagacatatctgataatgaggccatgtgaaaatcataaaaacttttcatcatttctctgcaatatgaagccctggtacccagtaaccacattctatcaaaagagccaagtgaatacctgcatagctttgattttttgttctcattacaaagaatctctaagtgaaccagacactatataatgccagatagtaagtgctaygaagaaatctaaagaagggtatgaggtggagtgtgactggggtatcgtattccagggagtagtggagactggagcagaatctctatcaggtgggggagcctgcaagctctgtggacatgcagcgggaaagagcaca

SEQ ID NO: 8758 - DNA, 713 bp, Homo sapiens
cattctttcatttctgtatgacattagtttcctccctccccrgcgtagaaatcccagggtgctctcctcattcactcaccattaacctgcactgccattcatacagctgcttcctgttccattgtaatttctggctgtcaattttcccataagagtacaaagccatcagctgaaagcaaaagttgagtgagagttctaggtgtttcagaaacatccaaatcactggcctgtttttttttttttttttttttttacttccctcctggtgaatagttttggaaaagaaggaatatccccattacaataatgtaaccatccctgtggaaaaaggaaatagaatgcaagatccattttactctggaggccgttgaaatatttacagaggatgagagccacctactggcaaagacgtgcaccaagtctatggagggcaggcttttctgttctgtaaagaatatgtaacaaacctgcacgttgtgcacatgtaccctaaaacttaaagtatgataataagaaaataaaaataaaaaaataaaaaataagaaaaagaattctgttcccttgaaggagattttcgttcatttgtaaaaggccatctttctcggaaagaattacccctaatattggaagaagcccatttttttagcttttgtatcacagagagagaaaacactcccagattcaggaagcacatgttctttgaacaatgggca

SEQ ID NO: 8759 - DNA, 733 bp, Homo sapiens
  misc_feature (1)...(733): n = A,T,C or G
attaaagtgatctgcaaatagtgtaattgaagaagttaatcaggagtgtgtgtgagaattacttagatagtaggaagaggcttcaatttaggaggaatttcttattctttgctcaggttacagacccaacctttcagattgcacttttcaaatgggagaggagagaaactgggaatgggagaggagagaaactgggaaattcagttatatttcacaatatgtctcttgtctctttcttttaccactgaatgtggggtactcagtttaggagcaggggaaaatattanaaagtttaatatacctggttctctctcttcctttctctgtttgtatgattgtttaacgactttcaaatattaagtctcctttaattcttggttattttctatactgcttatttctttaatgtgattttcctttttgttgcttgtcatttcagtgggcaaaaattgtacgcatattatcatcytaccctgaaaaatctctgtggctataccctgatcatattcagaagttaattttttatatattctaaagtattggagaactgaggtgaagtggtggctgagctggcagcaaggggcattgtcataacctgcctcacacagttccctgcctgtgcagtgcccctggagaaggacacataaaaccttgtttctgccctgaatcccttggaggagatacaggaagtcgtggcacagtgccacctggagacagctaggttttgtgagat

SEQ ID NO: 8760 - DNA, 733 bp, Homo sapiens
  misc_feature (1)...(733): n = A,T,C or G
attaaagtgatctgcaaatagtgtaattgaagaagttaatcaggagtgtgtgtgagaattacttagatagtaggaagaggcttcaatttaggaggaatttcttattctttgctcaggttacagacccaacctttcagattgcacttttcaaatgggagaggagagaaactgggaatgggagaggagagaaactgggaaattcagttatatttcacaatatgtctcttgtctctttcttttaccactgaatgtggggtactcagtttaggagcaggggaaaatattanaaagtttaatatacctggttctctctcttcctttctctgtttgtatgattgtttaacgactttcaaatattaagtctcctttaattcttggttattttctatactgcttatttctttaatgtgattttcctttttgttgcttgtcatttcagtgggcaaaaattgtacgcatattatcatcttaccctgaaaaatctctgtggcyataccctgatcatattcagaagttaattttttatatattctaaagtattggagaactgaggtgaagtggtggctgagctggcagcaaggggcattgtcataacctgcctcacacagttccctgcctgtgcagtgcccctggagaaggacacataaaaccttgtttctgccctgaatcccttggaggagatacaggaagtcgtggcacagtgccacctggagacagctaggttttgtgagat

SEQ ID NO: 8761 - DNA, 671 bp, Homo sapiens
tagagctgggacagcttccagcatttcgggagacacgcggagcatgagaaagttgctgagarttcactagcggcgcctacctcggaccaagggtatgaggacactgtgactgacctacctgtgtaggcgcagaacggactcgggcgtcggggactcgcgggacaggaagatcgcggtgcgcggagagtctttgacgtgtccctggccaagggggaaagaatcccacgagccaagcgcacagaaggctcagccgctcttgcccggcttctgatggccatgacctttcctgctccggctctgtccgctccctgaggacgcactcaccgccttctccagaagcgtgggcccttggccccgcgctggagattccagaatcagcggcccggagagaggacgcggcgctgccagaccagcccgcttcctgttcatccatgcgggatccagctttcctcgtcgccagtccagttgctccgcaggttctaggtactttttgcaccttggagggggtctcaaccccagcctcataccctgtggagtttccggcaaatcactcgccggctctgaaccttcgattcctcctatgaaaaccggatgccagagtccccacctcaccgggttgcgacgaagccgaggtggcgcaacgttgaggcccaggaccccggcccgtagta

SEQ ID NO: 8762 - DNA, 1846 bp, Homo sapiens
tcatactaatgtgctttttaatctcttttctcttgctgagatgttctaaggattacctagcaatacaataaacataccaaagactgcccctcaaagtctcgaaacatagagaaaaatacttcattgtacttttaaaaatgagcaaattggtccgttgctttacatttagagaaacatcacttcaaaaggtgtttaagaactggagaaaaacatactaagaatattacacaatatagccaacatgctttaaaaaataaatgtagccctggttttccaactttttataagcccttcatatcatgtagtagtaagtgttttgaagaataaataaatagtgaaagaatagggaattgtaaggaaaggaagaggtattattttagatagggtatgagaagacaaagccaatggaatgttaatggtatttgtaacccctctagattgtgcctgcttcagcaccacatgttctgatacttctagtactgcctgtctcaagcaaggacggctcactccatcagggctcttgtcctaggtttcattgaacctatcttcagccataaacttctggaaattgtatgtgagattttctgtaacagtaagtggacatttttcttgggagtttaaaaaactttaagagtagtaaactagatgatgaactatttgttttatatcctgttgtatagacaagggacatgaccaggcacgcacacaaaggcttctggaataacatccctgggaacactcacagagacaacagcatgtggtgtcccacttagcccattgcactctggaacagcagatggggatgttcaggctctggaagaagaacacagccctcaagttgctggtttttagctgaatcattaaagatgcaccaacacttcccctggtgtaaccaaggtctgtggcctaagccttatggtaatagtcaagtgtcccagaaaatcctggtctccagccaaactctgctactgcattcgtcattggttcggaggggcaagggaggagagatcttccctctaatgtagtctgggagctgggatccatgttttgtggttgcagcattgacagcaattctggcctaagtcacccctactgagatggatttggaaattatagggaaagctgcatgataaagtaagaaaactctggttccttgtttctcactctaaagtttaacacctagttgagaataaataggctttggatcaaaaatagtccaagaaatcacttgtgttactccccacttcaggtaactttagttgccctcttttctctcagtttgatgcatccaagtattccttgacttgcaaagaagcaacacactctgctccctccattcccataggcacagaccctagtgtcatcaccatggaagctgtttattatttattcatctgtttgcttatgttcggttatttatatactgatttagttcatgatgaatttgtggtgccccaagggaaacacaccactgttgtaataagatcctgacttcctagctcctatgtattcagatatgaaggaagggaagaggctgaggraagccagaggggcttctgggaaatggccatggggaacaggatctcaagagacctgggtggctgttgtggtagtcaggtaactctgctccaaacctcctagattttgctcttcactttgttctctgcctaacatgctatttgcaagaactctctttttaaaaagcataactatcttgaagggaggttgaaaattaaatcattcttatttaggtgttaattcatgatgtttctcccaatttgcagtagagttcagatgcattgatggttagactgggaaagcagagagagagtttattttggagtat

SEQ ID NO: 8763 - DNA, 812 bp, Homo sapiens
aatccctgagtaagccaaaaactacataccacacatgatattattttacccatgaagcaaaccacttaaatgccttatttgtgtcaacattgtgctgaaacctggaaattaaagcgggaatttaattttaaaagcactttatagtcctttgtttatattccttaaaattacagagttgattgtagattatccattttacagccgtagaaacaaaaacaagtcaaagacatttcacagatgacccaaaatacaatttgaatttagatgatctggatttatttgtctatttgaatttgctgattcttcattctccttaaatttcaatatgaaccaatcacagttgtgaacatgaaaatgttagagggaagcagtaatactaaatggaaaagcctattatgtactgctgattcttggaaatcatatggttcracttaacagtttcatctttccatcttaaaggagctctatggaaataaatggctgtacatagaatgactgaggacaggctgagtggcgcaaatatggaacaggggcttccaaggcttcaatagccctgggtgcctggtgtataaagcagaatagctagcattagtaatagtcacaatacagtatttattcagcttcatccccatttgtacaacatcctccttgcagctgcaatttctcccaaatgtttccaggaatgggatgttggattgattgactagacatagtgatacagtttgaatgtctgtcccttccaaatctcatgttgaaatgtaatccccagtgttggaggtgggacctggtgggaagtgtttgggccaagagga

SEQ ID NO: 8764 - DNA, 812 bp, Homo sapiens
aatccctgagtaagccaaaaactacataccacacatgatattattttacccatgaagcaaaccacttaaatgccttatttgtgtcaacattgtgctgaaacctggaaattaaagcgggaatttaattttaaaagcactttatagtcctttgtttatattccttaaaattacagagttgattgtagattatccattttacagccgtagaaacaaaaacaagtcaaagacatttcacagatgacccaaaatacaatttgaatttagatgatctggatttatttgtctatttgaatttgctgattcttcattctccttaaatttcaatatgaaccaatcacagttgtgaacatgaaaatgttagagggaagcagtaatactaaatggaaaagcctattatgtactgctgattcttggaaatcatatggttcgacttaacagtttcatctttccatcttaaaggagctctatggaaataaatggctgtacatwgaatgactgaggacaggctgagtggcgcaaatatggaacaggggcttccaaggcttcaatagccctgggtgcctggtgtataaagcagaatagctagcattagtaatagtcacaatacagtatttattcagcttcatccccatttgtacaacatcctccttgcagctgcaatttctcccaaatgtttccaggaatgggatgttggattgattgactagacatagtgatacagtttgaatgtctgtcccttccaaatctcatgttgaaatgtaatccccagtgttggaggtgggacctggtgggaagtgtttgggccaagagga

SEQ ID NO: 8765 - DNA, 812 bp, Homo sapiens
aatccctgagtaagccaaaaactacataccacacatgatattattttacccatgaagcaaaccacttaaatgccttatttgtgtcaacattgtgctgaaacctggaaattaaagcgggaatttaattttaaaagcactttatagtcctttgtttatattccttaaaattacagagttgattgtagattatccattttacagccgtagaaacaaaaacaagtcaaagacatttcacagatgacccaaaatacaatttgaatttagatgatctggatttatttgtctatttgaatttgctgattcttcattctccttaaatttcaatatgaaccaatcacagttgtgaacatgaaaatgttagagggaagcagtaatactaaatggaaaagcctattatgtactgctgattcttggaaatcatatggttcgacttaacagtttcatctttccatcttaaaggagctctatggaaataaatggctgtacatagaatgactgaggacaggctgagtggcgcaaatatggaacaggggcttccaaggcttcaayagccctgggtgcctggtgtataaagcagaatagctagcattagtaatagtcacaatacagtatttattcagcttcatccccatttgtacaacatcctccttgcagctgcaatttctcccaaatgtttccaggaatgggatgttggattgattgactagacatagtgatacagtttgaatgtctgtcccttccaaatctcatgttgaaatgtaatccccagtgttggaggtgggacctggtgggaagtgtttgggccaagagga

SEQ ID NO: 8766 - DNA, 812 bp, Homo sapiens
aatccctgagtaagccaaaaactacataccacacatgatattattttacccatgaagcaaaccacttaaatgccttatttgtgtcaacattgtgctgaaacctggaaattaaagcgggaatttaattttaaaagcactttatagtcctttgtttatattccttaaaattacagagttgattgtagattatccattttacagccgtagaaacaaaaacaagtcaaagacatttcacagatgacccaaaatacaatttgaatttagatgatctggatttatttgtctatttgaatttgctgattcttcattctccttaaatttcaatatgaaccaatcacagttgtgaacatgaaaatgttagagggaagcagtaatactaaatggaaaagcctattatgtactgctgattcttggaaatcatatggttcgacttaacagtttcatctttccatcttaaaggagctctatggaaataaatggctgtacatagaatgactgaggacaggctgagtggcgcaaatatggaacaggggcttccaaggcttcaatagccctgggtgcctggtgtataaagcagaatagctagcattagtaatagtcacaatacagtatttattcagcttcatccccatttgtacaacatcctccttgcagctgcaatttctcccaaatgtttccaggaatgggatgttggattgattgactagacatagtgatacagtttgaatgtytgtcccttccaaatctcatgttgaaatgtaatccccagtgttggaggtgggacctggtgggaagtgtttgggccaagagga

SEQ ID NO: 8767 - DNA, 810 bp, Homo sapiens
aaccaggtaagcatgacccattccttcaagatggagccaggtaactgtcaacaatcccttcaggttgcaactgggtaagcatggaccattccttcaggatggagcctgccaagtgtggaccattccttcaggatgcagccaggtaagcatcagccattccttcataatgcggccaggtaagcatggaccattccttcaggatggagcctgccaagtgtggaccattccttcaggatgcagccaggtaagcatcagccattccttcataatgcagccaggtaagcatcagccattccttcataatgcagtcaggtaagcatggaccattccttcaggatggagcctgccaagtgtggaccgttccttcaggatrccgccaggtaagcatcagccattccttcataatgcggccaggtaagcatggaccattccttcaggatgccgccaggtaagcctgaaccattccttcagaatgcatccaggtaagcatggaccagtttttaagtatacagtcagttaagtatgacacataccctcaggatacagccaggtaagcatgaaccattccttcaggatgccaccaggtaagcatgaaccattccatcaggatggagccagataagtatgaaccattccatcaggatgcagcaaggtaaacatggactaatctgtcaggatgcagtcgggtaagcatgaaccatttcttaatagtggagtcaggtaagcacataccattcctttagaatgcagccagttaagcatggatcattcctttaggatgtagccaggtaagcatggaccattctttta

SEQ ID NO: 8768 - DNA, 883 bp, Homo sapiens
gctsggattataggcatgagccaccacactggacctcctgctacatatttagtttatacattaaagttgctgccccttccccaatttttttttaattatgaaaattaaggccaggcaccgtggctcacacctgtaatcccagcactttaggaggccgaggtgggcggatcacttgaggtcaggagttcgagaacagcctggccaacatggtgaaaccccatctctactaaaaatataaaaattagcctggtgtggtggcaggtgcctgtaatccaagctacttgggaggctgaagcaggagaattgcttgaacctggcaggcgggggttgcagtgagccaagatcgtgccattgtactccagcctgggcgatagagtgagactcagtctcaaaaaaaaaaaaaaaattaaaggttgccataaacatgggccaatatggtaagtgctaactgaatgtttattgaatgaataaacactgggcagagagacatgcagctgacctcctgggggtgaccctggtcctgaagcactggctggttccatagccccccagggtccattgggacacagacaccacatccccccacaagccagtacctaaagaatcccgtcttcaggccatagcttcggaggatacattccgtgaaggcacaggtggagcccttgaaagaaaagggattgtctgggcaggctctactccaccagccacttaatagaccccctaccccagggtcctgcccctcaccttccccttcgtcccagtgacgtggatgatgttcagccggtccaagtcctccacctgggacagacagacaaggtccctgcctcagctacgggaatcacaaatgggggtgggaggtggtcacaggccctctctaccttac

SEQ ID NO: 8769 - DNA, 883 bp, Homo sapiens
gctgggattataggcatgagccaccacactggacctcctgctacatatttagtttatacattaaagttgctgccccttccccaatttttttttaattatgaaaattaaggccaggcaccgtggctcacacctgtaatcccagcactttaggaggccgaggtgggcggatcacttgaggtcaggagttcragaacagcctggccaacatggtgaaaccccatctctactaaaaatataaaaattagcctggtgtggtggcaggtgcctgtaatccaagctacttgggaggctgaagcaggagaattgcttgaacctggcaggcgggggttgcagtgagccaagatcgtgccattgtactccagcctgggcgatagagtgagactcagtctcaaaaaaaaaaaaaaaattaaaggttgccataaacatgggccaatatggtaagtgctaactgaatgtttattgaatgaataaacactgggcagagagacatgcagctgacctcctgggggtgaccctggtcctgaagcactggctggttccatagccccccagggtccattgggacacagacaccacatccccccacaagccagtacctaaagaatcccgtcttcaggccatagcttcggaggatacattccgtgaaggcacaggtggagcccttgaaagaaaagggattgtctgggcaggctctactccaccagccacttaatagaccccctaccccagggtcctgcccctcaccttccccttcgtcccagtgacgtggatgatgttcagccggtccaagtcctccacctgggacagacagacaaggtccctgcctcagctacgggaatcacaaatgggggtgggaggtggtcacaggccctctctaccttac

SEQ ID NO: 8770 - DNA, 818 bp, Homo sapiens
ctttaaaaataagttgcactttattgagcataagagcactgaragaccctaaatcctagcagcaccctgctcagtccacaccggctaggttggggtgggggacagctttcctggacacactgaaataactctgtggtccctggggcacccacagggtggcgccactgaagtatcccagtaccagagctctacggatggaggatggtaaggcagcgagttgccaagttcacaaaagctattaagtggcataaccaaaattcagctgccatcttcgtggaccccaattctgagctctctctaccaagtcagtgcaccgcagatgatgtaggatggggtagcacagagtccagtgcacattgttcctgagaacttggttacaagctctggggagtaagcaggggcattgctgggtcactgattcctgcttcttgcactcttctcaatcaggaggctgtaggagtgcaattggaacctgagcgcttggtcaagatcctagaggtgcttcgggaactccctgtcccaaactacaggtatgtgacactccatatctgcccagcaacctgagacaactcattcactcgctgcctggagccttaactgggtcctactgctcccaggtcccagccctaatgcctgccctgggcattccctgtgtgatccctgcccccgctttctgcaggaccctggagttcctcatgaggcacttggtacacatggcctcattcagtgcccagaccaacatgcatgctcgcaacctggccatcgtgtgggctcccaacctgctgaggtaggtgcctgtgtgagcagtgtatggggat

SEQ ID NO: 8771 - DNA, 818 bp, Homo sapiens
ctttaaaaataagttgcactttattgagcataagagcactgagagaccctaaatcctagcagcmccctgctcagtccacaccggctaggttggggtgggggacagctttcctggacacactgaaataactctgtggtccctggggcacccacagggtggcgccactgaagtatcccagtaccagagctctacggatggaggatggtaaggcagcgagttgccaagttcacaaaagctattaagtggcataaccaaaattcagctgccatcttcgtggaccccaattctgagctctctctaccaagtcagtgcaccgcagatgatgtaggatggggtagcacagagtccagtgcacattgttcctgagaacttggttacaagctctggggagtaagcaggggcattgctgggtcactgattcctgcttcttgcactcttctcaatcaggaggctgtaggagtgcaattggaacctgagcgcttggtcaagatcctagaggtgcttcgggaactccctgtcccaaactacaggtatgtgacactccatatctgcccagcaacctgagacaactcattcactcgctgcctggagccttaactgggtcctactgctcccaggtcccagccctaatgcctgccctgggcattccctgtgtgatccctgcccccgctttctgcaggaccctggagttcctcatgaggcacttggtacacatggcctcattcagtgcccagaccaacatgcatgctcgcaacctggccatcgtgtgggctcccaacctgctgaggtaggtgcctgtgtgagcagtgtatggggat

SEQ ID NO: 8772 - DNA, 818 bp, Homo sapiens
ctttaaaaataagttgcactttattgagcataagagcactgagagaccctaaatcctagcagcaccctgctcagtccacaccggctaggttggggtgggggacagctttcctggacacactgaaataactctgtggtccctggggcacccacagggtggcgccactraagtatcccagtaccagagctctacggatggaggatggtaaggcagcgagttgccaagttcacaaaagctattaagtggcataaccaaaattcagctgccatcttcgtggaccccaattctgagctctctctaccaagtcagtgcaccgcagatgatgtaggatggggtagcacagagtccagtgcacattgttcctgagaacttggttacaagctctggggagtaagcaggggcattgctgggtcactgattcctgcttcttgcactcttctcaatcaggaggctgtaggagtgcaattggaacctgagcgcttggtcaagatcctagaggtgcttcgggaactccctgtcccaaactacaggtatgtgacactccatatctgcccagcaacctgagacaactcattcactcgctgcctggagccttaactgggtcctactgctcccaggtcccagccctaatgcctgccctgggcattccctgtgtgatccctgcccccgctttctgcaggaccctggagttcctcatgaggcacttggtacacatggcctcattcagtgcccagaccaacatgcatgctcgcaacctggccatcgtgtgggctcccaacctgctgaggtaggtgcctgtgtgagcagtgtatggggat

SEQ ID NO: 8773 - DNA, 597 bp, Homo sapiens
cctctccttcatctctctttctggtcagtgaccaaatccctgtcaaatctccccccagaactgtcccctcctctccaccctagcactactgcacccaggctgcagctgcagccttcagtgactgcccctcaccacttgctcatggcactccctggctaaggaacctttagtgactccccatttcctcttgaccaagtatgaattcctttgctggtatggaagttccccggtgatttggccccaccctgtcccaaccatattttccactcctgctcaacacacacaccctgtcttaggctgggtcctctcctctttgcttcctaaacaagccaccttctccatctccttggtgtttgctcaccgtggtycctgatttagaatgcctttctaggcctctctccctcctaatcctacccaactcatgcatgggggccctcccaaatgattcagtcccatagtgattgccccatcccacagttgggcctgtaacacacccctgagcactaaatcagaaaccatcatcacatgtttccatatgtgtctccatatgtatctcttgctcctgagcagaactcaagtcccatgagagcagggagt

SEQ ID NO: 8774 - DNA, 556 bp, Homo sapiens
tgtttgaaccctagtcataataacttgaaatttcacagtccacaatcacaattacatttgattctctaccccgtggcccttcttcatctcattatagcgctcatcactataggagcttgtgttataggttgtgttctgcctccctagaatgttaagttcatgagagcggggccctgactgtattggcttcttgacttccccaacacctagaactgtgcttgatgcatagtctctccaatacatccattatgacacctttctaaatgtttgttgaagaaatgaatactcctgtcaaaaagatataaatgcattttcccataaataaacttaacttctaatatccagtcactatccctgattgcagaaaacaatgtactcaactcctagtaaacacagtcagctctggctttacctcatgcaatgtagaatctcctctcccgctccttctccccttactggagatttatttaagactgctttatggagagcatatacttttagatctctgcaataaatccccaaagcctacttagaaacttaaragtctttgtccgga

SEQ ID NO: 8775 - DNA, 589 bp, Homo sapiens
aaaagacgatgccaaatataagcagtgctgactttatccctccaatctaggtgtctctaactccctttcctgcccaccccactagcagtatgtccctggagaaaggatgtaggcttgagtcagatggcaggcaatccttttttcaggcaaggtgaaaccttagacaaatggcttaacatctctgagtctgagcttcctaatccaaaaaatggaaaygctaacagcaattagcctacctgcttcatggggttgtatgctgatcaaatgaagtaatgatacatatgaaagcagtcaccccattcacaagatgtgtctcgttgccaacctcgtacccctttctcatttcactgtcaggacaccttgggaagcaagtcagatgagaacagaaaagggtagattctgaataccttgctgtggctaccatcacttctagagccccagatttcttatctaaggattaacattttttcaaatctcccttctgggaaaagggatttcataaaaatgcaaattgtgaatggattatttcattatatctcatgaccaaccactgggtccactctgagcttgccttatatttaggcccagg

SEQ ID NO: 8776 - DNA, 589 bp, Homo sapiens
aaaagacgatgccaaatataagcagtgctgactttatccctccaatctaggtgtctctaactccctttcctgcccaccccactagcagtatgtccctggagaaaggatgtaggcttgagtcagatggcaggcaatccttttttcaggcaaggtgaaaccttagacaaatggcttaacatctctgagtctgagcttcctaatccaaaaaatggaaatgctaacagcaattagcctacctgcttcatggggttgtatgctgawcaaatgaagtaatgatacatatgaaagcagtcaccccattcacaagatgtgtctcgttgccaacctcgtacccctttctcatttcactgtcaggacaccttgggaagcaagtcagatgagaacagaaaagggtagattctgaataccttgctgtggctaccatcacttctagagccccagatttcttatctaaggattaacattttttcaaatctcccttctgggaaaagggatttcataaaaatgcaaattgtgaatggattatttcattatatctcatgaccaaccactgggtccactctgagcttgccttatatttaggcccagg

SEQ ID NO: 8777 - DNA, 760 bp, Homo sapiens
cgagttgagagccttytgatgttgttctaacatatatccgtgcagtctgctcatgtacgtcgctggtttttctcttgggaggtccatgcctggatgggttatagcaatcattcttgagtgtctaacagaagtccataaatgggcaactccaggctttccatctgttaaacattcatcgtccacggcacatgtgggtgttggcaccaagtctgagtgcccctcagagcagatttcccatgacagttcttattgttaaaaccctcctaatttttttaaaaaaattttcttacagaaaaatttaaatgtatataaaagaggacctgagtgtaatgaacctgtacatgcccatcacccacgtgcagtcattagccatttgtggccaatcttgattcatccataaccctcccagctcacctcatcttatatttttaaaacaaacccaagatgtcagatcgtttaatctgtaaatatttcagcatgcatctctaaaagacaaagacaattttaaatataataacaatgacattttaacacctaaaaactatcattttccccttaatatcatcaaatatccaatgtccaaatttccaacagcttcagacgatcaacagtttttctttgaatcaagatccacataagatctgtagactgcaataaatggctgtctcttacatgtctttttatctgtagaattcctccaccatcttggtttcttccctttgcaattcgtgtgttggattggagaaatcaagttgtttgt

SEQ ID NO: 8778 - DNA, 760 bp, Homo sapiens
cgagttgagagccttctgatgttgttctaacatatatccgtgcagtctgctcatgtacgtcgctggtttttctcttgggaggtccatgcctggatgggttatagcaatcattcttgagtgtctaacagaagtccataaatgggcaactccaggctttccatctgttaaacattcatcgtccayggcacatgtgggtgttggcaccaagtctgagtgcccctcagagcagatttcccatgacagttcttattgttaaaaccctcctaatttttttaaaaaaattttcttacagaaaaatttaaatgtatataaaagaggacctgagtgtaatgaacctgtacatgcccatcacccacgtgcagtcattagccatttgtggccaatcttgattcatccataaccctcccagctcacctcatcttatatttttaaaacaaacccaagatgtcagatcgtttaatctgtaaatatttcagcatgcatctctaaaagacaaagacaattttaaatataataacaatgacattttaacacctaaaaactatcattttccccttaatatcatcaaatatccaatgtccaaatttccaacagcttcagacgatcaacagtttttctttgaatcaagatccacataagatctgtagactgcaataaatggctgtctcttacatgtctttttatctgtagaattcctccaccatcttggtttcttccctttgcaattcgtgtgttggattggagaaatcaagttgtttgt

SEQ ID NO: 8779 - DNA, 725 bp, Homo sapiens
atccattccccactcacccaggaacttctaaaccagacatgagcttgtaatgagtactttcttccccaacagaacttcatgcatcccagagatgcagaatgagaatgatctccatcctggtcagcgaaatacagcatacggtgggataaaggattgaaaaagatgcatgctccgtgaattacttccccatgtggtttctgcctggctgagttatgatggtcaaatcttacctctgcagcctaaactagatcagagatgcagcatgactgaggcagttttagttgttattgttgttgtatagttctttgctttagtctgtaggttgcctaacgctacacagctaatgaaacactgtcccctctccctctccctctccctctccttctccctccccctccccctccccctctccccacggtctccctctgatgccgagccgaggctggactgtgctgctgccatctcggctcactgcaacctccctgcctgtttctcctgcctcagcctgccgagtgcctgcgattgcaggcgcgcrccgccacgcctgactggttttcgtatttttttggtggagacggggtttcgctgtgttggccgggctggtctccagctcctaaccgcgagtgatccgccagcctcggcctcccgaggtgccgggatggcagacggagttgcgttcactcagtgctcaatggtgcccaggctggagtgcagtggcgtgatct

SEQ ID NO: 8780 - DNA, 559 bp, Homo sapiens
taatattaattactagttaaaatgcataatattttaccccaacaaatgtttaaattaaacagataccacagaggatgcaccctgtttgctccacggcattcctgacccctggcacrcaacagaagtataaaaacattttagccagtacaactttactgttataaaaacattttaggcagtacaattgcaaagtctagatgcttttactgtcttcctatagtgtttctctctccccactcgtcttttcttttttaacttgtaatttctgggaaactgggacagaaaatatatttgccagtattagacactactttcctcctttaaggaagcagtgcctaagaatttcaaatgtttatcatctaaatgatttgaaataagcaaacaaaaattagactcctatccaggaagggggcatttttggttctgattaactgaatattctagatattgcagaaatcttgttgttgtttcctttccactggattatacaatgcttctggattataattaaggcctttaactgggcatgatggcacacacctgtagttttgagtcttgg

SEQ ID NO: 8781 - DNA, 565 bp, Homo sapiens
ctaagtaccagtcaaggaaaatatctaatttcttcaaggaaaaagagttcatatttcttttgaaacatatcatgttgccatagttaccaaatgctctcattttatttcctaacaataatatcaccatctagatacacatagcttacaaaagtaaatgttttattgtggaattttataaggacacaggatctgcttccartgacttttaaaaaattaaaatggaaggattcttgctaataaatacacctgagttgaaattaaatgttttctgagcaagagcataggagaaaaggaggagcagagagaaattgaaaaagacacatacagttttaacatttcaaaggtgaaggtgatttaaattaggatttgggcatggttgttcttctccaccccagtgtatataaacattctcatatgggttgccatgtctccaggagtgataccatcatctggacaggccattagaaattaaaacatacttacacatatacacatgcacatcttagaataagaaaaattataaaccagcttatttctatttgtcttgccaaatataaactttaga

SEQ ID NO: 8782 - DNA, 565 bp, Homo sapiens
ctaagtaccagtcaaggaaaatatctaatttcttcaaggaaaaagagttcatatttcttttgaaacatatcatgttgccatagttaccaaatgctctcattttatttcctaacaataatatcaccatctagatacacatagcttacaaaagtaaatgttttattgtggaattttataaggacacaggatctgcttccaatgacttttaaaaaattaaaatggaaggattcttkctaataaatacacctgagttgaaattaaatgttttctgagcaagagcataggagaaaaggaggagcagagagaaattgaaaaagacacatacagttttaacatttcaaaggtgaaggtgatttaaattaggatttgggcatggttgttcttctccaccccagtgtatataaacattctcatatgggttgccatgtctccaggagtgataccatcatctggacaggccattagaaattaaaacatacttacacatatacacatgcacatcttagaataagaaaaattataaaccagcttatttctatttgtcttgccaaatataaactttaga

SEQ ID NO: 8783 - DNA, 811 bp, Homo sapiens
tattctagcctaaatggtgtatcacaaactgcaaattacaatatttgatgttttaatgcactatgtcggggggtggggggcaaggggagagaggaagagcattaggacaaatacctaatgcatgagaggcttaaaacctacatgacagtttgttaggttcagcaaaccaccacggcacatgtatacctatgtaacaaacctgcatgttctgcacgcatatcccagaacttaaagtaaaacttaaaataagaaaataataataataaagaatgtgttatttaaatgtaatctttagcatttcagttttgtttactggagtcataatctcaatattatttttaaatatagagaattcaaaattatttaacataaagtatacttcattttatttgtaaagttttrcccatcatttttaaaatgaatgatttaggcagagcattatggcatttgagaagaactggccttcattgtaagttgactgtaggatttattgatacaagcaaaaatgcataaaaaagaaaaatttttcataattttgtttttcaaaaacttatatatgcgtatgtgtatgtgtgtatgtatatgtgtatatttaaatatgtatcatgtactttagagagatttttacatccagtatggctcttaagataaaggccatgattcccattttataagttttctcttgattagaaaactagttttgtgtggtggtgggtgagatgttatattgtttacttcctcaaactctgttagccttccttaaacttattttggtttattattgtttgtatttttaattgtatgcttggag

SEQ ID NO: 8784 - DNA, 811 bp, Homo sapiens
tattctagcctaaatggtgtatcacaaactgcaaattacaatatttgatgttttaatgcactatgtcggggggtggggggcaaggggagagaggaagagcattaggacaaatacctaatgcatgagaggcttaaaacctacatgacagtttgttaggttcagcaaaccaccacggcacatgtatacctatgtaacaaacctgcatgttctgcacgcatatcccagaacttaaagtaaaacttaaaataagaaaataataataataaagaatgtgttatttaaatgtaatctttagcatttcagttttgtttactggagtcataatctcaatattatttttaaatatagagaattcaaaattatttaacataaagtatacttcattttatttgtaaagttttacccatcatttttaaaatgaatgatttaggcagagcattatggcatttgagaagaactggccttcattgtaagttgactgtaggatttattgatacaagcaaaaatgcataaaaaagaaaawtttttcataattttgtttttcaaaaacttatatatgcgtatgtgtatgtgtgtatgtatatgtgtatatttaaatatgtatcatgtactttagagagatttttacatccagtatggctcttaagataaaggccatgattcccattttataagttttctcttgattagaaaactagttttgtgtggtggtgggtgagatgttatattgtttacttcctcaaactctgttagccttccttaaacttattttggtttattattgtttgtatttttaattgtatgcttggag

SEQ ID NO: 8785 - DNA, 711 bp, Homo sapiens
atttccactggacttacctttcttctcaactttttaccattcattttctattccaagaattttcaaatctgcagttccctggtgatcaaatggtcttttcttacaaaacttgtattcagatctgccaggagaaccatcaggtgttatactgttttctgacaaatatatgcagacaatagctggctgcatgcctagattagtgtgtggtaaacacagttgactgattgactgggatctactttgcatttgatggttgcagagtacttaagtgctttgtgtatttctrtctttgggttgcttagagatagaaagccctaaggttttagaatcccaggataattatatttcagaatgagaagacataatgagctatagtttagattccactaaaaccagagtattcagtaatttttatagaccagttaatttactcatcttccttactatatttgttttctctttcagtgactggaactattgttttccagtaaatcctagagggaaacactctgtaaatgaattgatagttacataaatataatatttgtcaaggcacgaagtgctaggagcatattttccaggttaagcaccataaattaatccatacatactgagaaattaagaagtaggaacactataaccatgtatatacacatattctgcttaaacatttgtgtcgattgatttgacttttctttaaatccaatattt

SEQ ID NO: 8786 - DNA, 674 bp, Homo sapiens
cactggctcagtggagcacacagccctggctgcgcctccccaactttagctggcatcatggcaacagttgctccagatargtcaccgctgccagcagaaggatacttcacctatgttattattctctaaaagtataattgtgagatttgtcctcagactaattttaagaaaataagcagtccacagatgaattttaagaaaacatcagagcaactcaaattgagaaacactttacagaatacctgaccagtactcctcaaaactgtgaagggtataaaaacaaaaaagactaagaaatagtcacagaccagataagattaagggggcatcacagtaaaatgaaatgtggcatcctgaactcagttctgggatagtgaaagaacattagtggaaaaacttgtgaaatcaaagaataggagttcagttaatggtaatgtactaatgatggtgtcaacctaaaagtgcctgagacaggtctcaatcaatttagaggtttatttttccaagattgaggatgtgaccagggaaaaagagacaaaatttacagtgggatctgtgggatgcactttttccaaaaagagttttaaggagctcaatatttaaatgggaaagagcagcaggaaggcaaagagggaagaaaaatggagagaagggtaggtagtgaggtcagcaaa

SEQ ID NO: 8787 - DNA, 674 bp, Homo sapiens
cactggctcagtggagcacacagccctggctgcgcctccccaactttagctggcatcatggcaacagttgctccagataggtcwccgctgccagcagaaggatacttcacctatgttattattctctaaaagtataattgtgagatttgtcctcagactaattttaagaaaataagcagtccacagatgaattttaagaaaacatcagagcaactcaaattgagaaacactttacagaatacctgaccagtactcctcaaaactgtgaagggtataaaaacaaaaaagactaagaaatagtcacagaccagataagattaagggggcatcacagtaaaatgaaatgtggcatcctgaactcagttctgggatagtgaaagaacattagtggaaaaacttgtgaaatcaaagaataggagttcagttaatggtaatgtactaatgatggtgtcaacctaaaagtgcctgagacaggtctcaatcaatttagaggtttatttttccaagattgaggatgtgaccagggaaaaagagacaaaatttacagtgggatctgtgggatgcactttttccaaaaagagttttaaggagctcaatatttaaatgggaaagagcagcaggaaggcaaagagggaagaaaaatggagagaagggtaggtagtgaggtcagcaaa

SEQ ID NO: 8788 - DNA, 674 bp, Homo sapiens
cactggctcagtggagcacacagccctggctgcgcctccccaactttagctggcatcatggcaacagttgctccagataggtcaccgctgccakcagaaggatacttcacctatgttattattctctaaaagtataattgtgagatttgtcctcagactaattttaagaaaataagcagtccacagatgaattttaagaaaacatcagagcaactcaaattgagaaacactttacagaatacctgaccagtactcctcaaaactgtgaagggtataaaaacaaaaaagactaagaaatagtcacagaccagataagattaagggggcatcacagtaaaatgaaatgtggcatcctgaactcagttctgggatagtgaaagaacattagtggaaaaacttgtgaaatcaaagaataggagttcagttaatggtaatgtactaatgatggtgtcaacctaaaagtgcctgagacaggtctcaatcaatttagaggtttatttttccaagattgaggatgtgaccagggaaaaagagacaaaatttacagtgggatctgtgggatgcactttttccaaaaagagttttaaggagctcaatatttaaatgggaaagagcagcaggaaggcaaagagggaagaaaaatggagagaagggtaggtagtgaggtcagcaaa

SEQ ID NO: 8789 - DNA, 800 bp, Homo sapiens
tgtgcagaacgtgcaggtttgttacataggtatacatgtgccatggtggtttgctgcacccatcaacccgtgatctacattaggtatttctcctaatgctatccctcccctacccccaccacctgccgacaagccccagtgtgattttttaactattttactgatgtggaaagtgaaacttagggagattaaaagcaaagcaataatttaagtcgctatttccataaaaacatgtttctgagttggagcatagatcttccagtaataccctctgctcttttatttgtgaaatcactttccaataaggtattatggactatattcaataacacaacaacgttgacccagatcaatttctgaaattcagtcaggtgtatgacattggctcaaaactccttakcaagccatgaacgagcatgtgtgatcatgagttacatagtttgtttgataagggaattataatttcacaagaacaactgttgccttctacaagccagcctgcagaagattccttgtgcacttcacagaaggtagctgggtaaatgtacattgttctaactttttaaattataatttttctcttggtttcctaaagaataataaaaatgttaaaagctaaagcacttattagatgcttaaaaattaataaagaatgcataggtacaattgaattactatatattgcaagattataaatattcctggattataatataaaatagcattaatatctgtattttacataagaggaaattaggcggctgtggtcacttagctaatagatgtaggatttaggatcc

SEQ ID NO: 8790 - DNA, 647 bp, Homo sapiens
tatctgggttcttaattctattatggtcattcatcctcaagcctgttatttgaattgtstgcgtctcaatttgctcatctgtcaaatcgggatggcaatactgacaaagactattgtataggatcttctggaagattaaaatgaggtcgtgaataagaaattcacttcgataaattataatgcattagtaagttttattataaccataaaataatattaaaacagtaatattaattcctgaaaagaataagcttatatgtgaatgttttaattgtctgagtctgtacagctttattgttgtatatatcataacaaattagccttccattcattagattaagaaagcctgctgagtcctttaacttgtatatttaataccttttgaacagttgtcaatttacagaaaaaaacggagtaaaatgtatggaattcccatatatttcctcatccctctaacccctaattaacatctttgcttcaattaatgaaccaatattgatacattattattcattattagtccatagtttacattagggttcactctgtgttgtacattctatgggtttggacaattgtgtaatgatgtgtatctaccattacagtctcatatagaatagtttcactgccctaaaaatccctcatgc

SEQ ID NO: 8791 - DNA, 647 bp, Homo sapiens
tatctgggttcttaattctattatggtcattcatcctcaagcctgttatttgaattgtgtgcgtctcaatttgctcatctgtcaaatcgggatggcaatactgacaaagactattgtataggatcttctggaagattaaaatgaggtcgtgaataagaaattcacttcgataaattataatgcattagtaagttttattataaccataaaataatattaaaacagtaatattaattcctgaaaagaataagcttatatgtgaatgttttaattgtctgagtctgtacagctttattgttgtatatatcataacaaattagccttccattcattagattaagaaagcctgctgagtcctttwacttgtatatttaataccttttgaacagttgtcaatttacagaaaaaaacggagtaaaatgtatggaattcccatatatttcctcatccctctaacccctaattaacatctttgcttcaattaatgaaccaatattgatacattattattcattattagtccatagtttacattagggttcactctgtgttgtacattctatgggtttggacaattgtgtaatgatgtgtatctaccattacagtctcatatagaatagtttcactgccctaaaaatccctcatgc

SEQ ID NO: 8792 - DNA, 550 bp, Homo sapiens
atcctgccctagaaaaaggaccagagacagaaagggcagcaatacgtctgtcgcctgcacgacatgcactaaaagtcaacggctaggagagagagaygcaaaaacaaagcatcttatatttttctttttatttcaatttttattttagattcagaggctacatgtgcagaatttggctgatagagacaatcgcccggatttgctgaagcagggtgagttatccctaagaaaagcttacacagaagtggaagacagtttattatctaggagagccaccacatctcaaaatgtcaaaactgccagtgtgttcttgcacactgaaaccactcacaggtcaaccaactgtcttggtttgtccaggactctctcattttttttactgaaagtcatgcaactggttaacttctctgtccttgctaaacaaagatagtttgtctcccagcttgaagtcacctgagatcaagagatctactactaacacatcatagagaagcagcagaaatactacctatattttgaaatacaggtagtattatcattgatctggtgg

SEQ ID NO: 8793 - DNA, 1603 bp, Homo sapiens
acatggaaaatagccctatttgtgacccctttttaaattgtaagggagtgagcagagaggtcagcttgggttaagataagacaggcagacccctcgacagctgaaggcatgggagcacaggaagtctggagattggggctgacatagggaagaagatactccaggaagaatgaatgcaagagcaccttgcctagtttgaattttccttagaaatgtctcattgtctggacccaagatgtggcttatattgaagttatttatctaaattctcctctcctccactggattctagatttttgtgggcagttcctggtcttaaacattaatatttctgctgatgtgcctagcacaggatctgtcacaataggagaatggtaaaataagtgagtccatgccaaaggaaacctgatgttcattaggcctggtgtagtatttctgccactctgtgtggctgtgcctcaagaaggtcatcccaatatggacagtcattcacacctgcctctttagacagcctgtaggagggaaagagctgggcaccatcatgccaagtccttgaagactttcaacatgaaggagctaaaattcccaagtataatagaatatggcttataaaggtatattaatattctgtgctgcaaaacagataacaacaagtttagaggcttaaaacaacatccattcattttctcaattgctgtggttcaataggccaaacccagcttagctgggtcctctgattagagtcacacaacactgtaatgaagcattgactgggctgtgttctcactggaaagctggactggggaaggatccacttccaagctcacacaggtggttggcagaattcatctccttgtggttgtagaaatgagggctccagttccttgctagctcttggctggggacttccacagctcctagagtcacccatagttctctgccatgtggtcttctctataggcagattgattccacaacatgacgtattgcttcttcgaggcccataggagagcaagagtgagtctggaattttatataacacaatgcagtcgcaaargagctatcccagcacctttgccatattctattgactagatgcaagtcccacccaaactcagtgggagggaattgcacaaaggcatgacagcaggaaacagggataattgggttttatcttagaatctgtctaccatgtgagaaaataaaatttaaaataaaattcagcaattctcccttgagtagcttctctgaagctgttcagaagagatttagcaagcatcacttggcaacaattctgatttccccactggatggcaaagccaaagggaaaagaatgccctacagtataaatttccccccttttcatgcagtggtagccttgcaataggtctgtaggccagagagcattagaaaccaatctcatttaacactttgacctactgcctaaacacagtgtctaattaaagaaagggtgtgtggaagagggatgaaagtccaatcacttcagaaaccctggattgaaattctagagtatgtattcccaaccttctgacattcctgggcaggaccaaatgcctttaccttgacatttatgcatagctta

SEQ ID NO: 8794 - DNA, 603 bp, Homo sapiens
tgaatcacattctaaacttctctgtgcagtgaccctttagtgaaggaggaaggagccactatttctacctacttagcagcaagagattctaagttagctccttttcctccttgaactccatccccataaaagggttatttgagtttactgtacaaattagaattgttccttctccccatctcccaccctcaattgccctctgtccctcagcagtgccacaaatgaagatgtgcrtctggcttgctgcccaccataacccctgcattgttttcttctgattctcacagtagtcacttgcaattgtctttcatcctgttgcatatcagttgtatggttcttttcttactttgatccttattctaaaaaacaatcacgtatttcctcaattttgacagcatggactttaagccttgtaaaggtctttgaagatctcaaccccctcatcttacagttaagagtagtggtgatgaagctattgaatcattcatcaagagtcatagtgacttttaccaggagtggaagagatcgcacatgaattttttaattgattatacactatattggcttcatgggagggtacaatagagacctggtcccaaagta

SEQ ID NO: 8795 - DNA, 603 bp, Homo sapiens
tgaatcacattctaaacttctctgtgcagtgaccctttagtgaaggaggaaggagccactatttctacctacttagcagcaagagattctaagttagctccttttcctccttgaactccatccccataaaagggttatttgagtttactgtacaaattagaattgttccttctccccatctcccaccctcaattgccctctgtccctcagcagtgccacaaatgaagatgtgcatctggcttgctgcccaccataacccctgcattgttttcttctgattctcacagtagtcacttgcaattgtctttcrtcctgttgcatatcagttgtatggttcttttcttactttgatccttattctaaaaaacaatcacgtatttcctcaattttgacagcatggactttaagccttgtaaaggtctttgaagatctcaaccccctcatcttacagttaagagtagtggtgatgaagctattgaatcattcatcaagagtcatagtgacttttaccaggagtggaagagatcgcacatgaattttttaattgattatacactatattggcttcatgggagggtacaatagagacctggtcccaaagta

SEQ ID NO: 8796 - DNA, 603 bp, Homo sapiens
tgaatcacattctaaacttctctgtgcagtgaccctttagtgaaggaggaaggagccactatttctacctacttagcagcaagagattctaagttagctccttttcctccttgaactccatccccataaaagggttatttgagtttactgtacaaattagaattgttccttctccccatctcccaccctcaattgccctctgtccctcagcagtgccacaaatgaagatgtgcatctggcttgctgcccaccataacccctgcattgttttcttctgattctcacagtagtcacttgcaattgtctttcatcctgttgcatatcagttgtatggttcttttcttactttgatccttattctaaaaaacaatcacgtatttcctcaattttgacagcatggactttaagccttgtaaaggtctttgaagatctcaaccccctcatcttacagttaagagtagtggtgatgaagctattgaatcattcatcaagagtcatagtgacttttaccaggagtggaagagatcgcacatgaattttttaattgattatacactataytggcttcatgggagggtacaatagagacctggtcccaaagta

SEQ ID NO: 8797 - DNA, 650 bp, Homo sapiens
caaagaaatgtaggacaagatgtaaaggcaacaactggtctaccacctgtctagcttcaggaagagatggccaccaaaaaagaatgatcaagatgaaactcttaccaccacaaagaaagtgtaaaaattgctggggggttacacaactttgagtggaagaggccatgcaatttgttttgaaaaaaaaaagtactattattttacaaaacmaaatatattgtttaattaaaatgtatagaatgcataacattctataagtggaatcacattatacatgccaaatttaaaaaaaaaatatccacaatatgctgtgggagctatttatactcataaacatagctctagaacgttctagaatatcatattgtatcagatttctatgcattctttttagcctatctataccttatggtctttaaagaaggctaatgcaagtaaatacctgctttcttttttcttcacttccttgaatgtttcttgcgttttctttgaaataagaagccattttcctcgagcatttattcacaccatagcctatgcaacaatgcaagacaccatggttttgtgggtccaggccattcctttatttggggggcctttgatgtcccagagcaagttctcaccagagctgacctcattgtttggacaca

SEQ ID NO: 8798 - DNA, 778 bp, Homo sapiens
ttccttccctcttcttagtgtctgatggctgctggcatttcttgacccttggccgcatgactccaatctctcccctccatgtaagtttctgtggccaaattcctctcttcttataaggagaccagtcattagattagggcctgccctcctctaacctgacctcatctttacttcatcacatctgcatagacccactttctgaataaggttaagttcacaggtaccggagttacgtcttcagcatatcttttggggaacatgatttaatccacaacaagttcattctaagtttttcattctatggattttttttctttgattctacctcaccttttaattgttaataatttcaatttgggattcaagtgtaattgttatcacaggcaatacacaaatgacgattttagtgctgtatygatatgaagcctgcggcaagagagtgccctggggcttagggtgggagaaggaagagaggagtgtttctgcttcccttctgtacttctgtattgtttttcctgctggagagtaactgcttgaaaatttaaaatgtcaggcggggcgcggtggctcatgcctgtaatcccagcactttgggaggctgaggcgggcgggtcacctgaggtcaggagtttgacctgacccagcctggtcaacatggtgaaaccccatctctactaaaaatatgaaaattagccaggcatggtggcttatgtctgtagtcccagctactcaggaggctgaggcaggagaattgcttgaacctgggaggcaaaggttg

SEQ ID NO: 8799 - DNA, 475 bp, Homo sapiens
ggggtttcaccatgttgtccaggatggtcttgatctcttgacctagtgatctgcccacctcggcctcccaaagtgctaggattacaggcgtgagccaccgcgcggccaagtggctattcttttgtggtggtggtacgtagctgcattgctcccaggggtggagagggaggaatttaaaggtggtgtttctctccttctccctrgtatctgacagcatgccttgggatttatgtaacatctcattcatagactagagcaggtcaagcattggcccctgaattcagggtctacctgtgctggagaagaggtggggggttagtgggcactgactcttgccccaaccccacactgggtacagcaggaacggggtggtggtcctccttgctggtgagtgaggtccctctccaggtgacctgaggctcctatgactgactgtgagcctctgcctgtccttgagtcccttgctgtgtgtcat

SEQ ID NO: 8800 - DNA, 821 bp, Homo sapiens
aattttctttctgaaagtttggtggatagatgtcagttactattttagaactcttaatatagtatttaaagctatttttttttaacatgaagtcagtaaggacatcgcccttgacttctggcatggcttctcaactaaaagcttctactttagtatctcatacctcctttggatattgggtagcttctaataagttactgatcccttactcatttttgatgtgracaatcacagatatcataaatcctctgtgcttccgtagcatccccaaatcataagcagctccaaatgcccatcttatctattcttggtataaatgcttactgttttatctcttaaaataatgtgacttgaagtcaggactacagcttagccactgggaaatagctcacatgaagagatagaacattttgatgggtgcatggcagtttcctacgcaggaaatgctttcgccatttttattgttttttcctccacagcctttattaagctcctactgtatgccaggtactttgggctgcaggtacagctgtgaaaaaaaacaggtaaaaatccctgcccccctggggccttattgcagctggggagacaggaaacaggcagaatccatcaggaaagatatcgtgcagatggtgggaatgcagcttttgactgttgcctcccccatcagatccttagcaccaaaaaaggtggcagtgtctcccggctgggtgtccagagcctggcacacagcaggcactcaatgaatgtttacagagtggatgaagactcacattgactcaggaactgcagctcagagagagcaaggaacccaaccaggg

SEQ ID NO: 8801 - DNA, 1034 bp, Homo sapiens
gggagtaggcactggagagcaggggtgggagcggtcattaggatgaggtgtcctggaagcccacccctgccagggccctccaggctgcaggcagtctccagcccgaggccctttggagttgtgtggctccccctccagctgctctgtccacagatcttcctgctctccccaactcccctctgcccttcagccccacagccagccattagctgacttgttgaccatgacttcaaagcatccagaatccagtcggctctcaccaccctctttgccattgtttccaaaagggtgttgcccctgggtttgtcttttggagccccccaggagaagggaggacttcaaagacagaaagagagctaggcaccaaacctcaagcaggccttgctttcccagactctcaaacttaaaaaaaaaaaaaaaaaraaagccagacagagacaggcaggtgtcctcccagccgggcctcgatggctgtactgcacccccctcctaaacagcaggcgggaaccagccctgggacaggctccacacactcactgagcaccgcctcctgcacagcgcagtccctgctctcagcctgagcaggcgcagcagccctgccctcccaagaaaggggatggtgagaagcctagtgtcccctccacagagaccagcgccacacatgacagccacacatgacagtgttggtaccagcactcagtctttgagccacaagtgcttataagatgtaagtaatagtacggaaccctcccacatcctcaggaggaacggtcagccccattttctagatgtgaaaactgacacccagagagatttcagcacatgctctgggtccccgggtcccatgcacagcccttgtgctggacggccccaaccctactttctaattctttatcctaaacccggactgtgggcctcatcttagggagatggtgctgccacctgcctctggaggacactctgccttggcctagtcctgccctgcccctcgccgagtggagcctccacagaggcttgtgcatggctttgggatc

SEQ ID NO: 8802 - DNA, 1034 bp, Homo sapiens
gggagtaggcactggagagcaggggtgggagcggtcattaggatgaggtgtcctggaagcccacccctgccagggccctccaggctgcaggcagtctccagcccgaggccctttggagttgtgtggctccccctccagctgctctgtccacagatcttcctgctctccccaactcccctctgcccttcagccccacagccagccattagctgacttgttgaccatgacttcaaagcatccagaatccagtcggctctcaccaccctctttgccattgtttccaaaagggtgttgcccctgggtttgtcttttggagccccccaggagaagggaggacttcaaagacagaaagagagctaggcaccaaacctcaagcaggccttgctttcccagactctcaaacttaaaaaaaaaaaaaaaaaaaaagccagacagagacaggcaggtgtcctcccagccgggcctcgatggctgtactgcacccccctcctaaacagcaggcgggaaccagccctgggacaggctccacacactcactgagcaccgcctcctgcacagcgcagtccctgctctcagcctgagcaggcgcagcagccctgccctcccaagaaaggggatggtgagaagcctagtgtcccctccacagagaccagcgccacacatgacagccacacatgacagtgttggtaccagcactcagtctttgagccacaagtgcttataagatgtaagtaatagtacggaaccctcccacatcctcaggaggaacggtcagccccattttctagatgtgaaaactgacacccagagagatttcagcacatgctcygggtccccgggtcccatgcacagcccttgtgctggacggccccaaccctactttctaattctttatcctaaacccggactgtgggcctcatcttagggagatggtgctgccacctgcctctggaggacactctgccttggcctagtcctgccctgcccctcgccgagtggagcctccacagaggcttgtgcatggctttgggatc

SEQ ID NO: 8803 - DNA, 469 bp, Homo sapiens
aacgtgtttcttattgtccccacacgtgttctaattggaagtcttgtttcgtgaaagagtttttttcttttttttgcctggtgatgttttccaattccctccgcgccactctgaagtatattactggcataagaaatttgaaagttaaccaaaagtcgggtcctaaatctcgtggctcggggttggttatcttccaccgtccttcagagcagcctggatttgcaggtcttgttagccctccatgtgagccagtagcactcttagttgttgagtgtttgtagagtgggattcgccagaaggaatcttgagcagcagggccttgcggagaggcctttagagattwgactgggcaacttatagactccccccatttcaaaaatattcctctggcacaggccctcacatatccctctgaaattgaactcactttcaggggcaaactgttgccctttttcttttctttggactt

SEQ ID NO: 8804 - DNA, 780 bp, Homo sapiens
gcccatcggtggtggttctctcttgaaggatacttttaagtgatacggagataataaagatttggtcccaactgccagaagctcattacctgatggaaaagacagatgctcacacagtgaatataacccaaagcagattgataagtactggaattaaaagtagggggcacagaggaaggaggactcattttcagatagaggtgatgatgatgatttgagtgttgttaataatttttgttttgctaacaataatgcagtaaaaggagcctatcctaatcagtgatgccttctctgtgccagtcaccatgctaggcacttaacccgtgttgcctctaatccttatgatgcccctgacaggtggtcatcatcatccctactctacagatgagagtggtcataagaggatacatggagtgcatcacatgtaagctggactttgcagggttcataagatttaaagggccaatcatcaggaagaaagattgcaaggcagaggagggaaactaatggrcattcttaagggttgggcataactggggaaaactagaggttctcagaataagaaaaccaagagaacttgagcggttgaggttgtagaaggaagaaggctgggtaatgaggaagagacactgaaagctgagactgggagagccacgcagaggcagactgtcagtttaggttctttcccagcaggagaaaataggagaccaggatatggggggctcacattttctagttatgtgctgggactgtgctgagctgtcttatttaatcctgttg

SEQ ID NO: 8805 - DNA, 738 bp, Homo sapiens
taatttctactctaccaagtggtatgatcccccataacagcatccactcattcgttcrtcattcatttcttcattccttatttgctcactcttatttcatacaagcagtttactaaatcagaacgtcagtgtaacttaggagtctgcatgaatgcagcatcacagtcatcatcatgggtcaccgctgtgtacctgctgggagtcggactccacactcttcactgtatactcactatccttctccttataataaccatttagagtaactactctcattatgtagacatttgttattatgtaattaatatttgccatagctttgatttaatgtttttccaaataacatttatcagtatttactaggcaatgggcactgcgctaagcccttcacaagcatcatctcatttaatcctcatagcactcgtgtaaagttgattattgccatcattcctattttacagctgagaaaacagttcccaggaggtaggttcaaagtctcacatctcatccctaagggtgtctctaaccactacaggacatgagatttgtactgatattggccctgttccaaagtagttgttggttccaattcttccacaatggcgtgctgtttctgaggcttgactgtcattagcatccaccctcaattgcacaggcacatcaggacggcactgtgacatcaggtgaaaagaaggccttggagagttctaaaattcagctgtgggccttacactctgg

SEQ ID NO: 8806 - DNA, 738 bp, Homo sapiens
taatttctactctaccaagtggtatgatcccccataacagcatccactcattcgttcatcattcatttcttcattccttatttgctcactcttatttcatacaagcagtttactaaatcagaacgtcagtgtaacttaggagtctgcatgartgcagcatcacagtcatcatcatgggtcaccgctgtgtacctgctgggagtcggactccacactcttcactgtatactcactatccttctccttataataaccatttagagtaactactctcattatgtagacatttgttattatgtaattaatatttgccatagctttgatttaatgtttttccaaataacatttatcagtatttactaggcaatgggcactgcgctaagcccttcacaagcatcatctcatttaatcctcatagcactcgtgtaaagttgattattgccatcattcctattttacagctgagaaaacagttcccaggaggtaggttcaaagtctcacatctcatccctaagggtgtctctaaccactacaggacatgagatttgtactgatattggccctgttccaaagtagttgttggttccaattcttccacaatggcgtgctgtttctgaggcttgactgtcattagcatccaccctcaattgcacaggcacatcaggacggcactgtgacatcaggtgaaaagaaggccttggagagttctaaaattcagctgtgggccttacactctgg

SEQ ID NO: 8807 - DNA, 738 bp, Homo sapiens
taatttctactctaccaagtggtatgatcccccataacagcatccactcattcgttcatcattcatttcttcattccttatttgctcactcttatttcatacaagcagtttactaaatcagaacgtcagtgtaacttaggagtctgcatgaatgcagcatcacagtcatcatcatgggtcaccgctgtgtacctgctgggagtcrgactccacactcttcactgtatactcactatccttctccttataataaccatttagagtaactactctcattatgtagacatttgttattatgtaattaatatttgccatagctttgatttaatgtttttccaaataacatttatcagtatttactaggcaatgggcactgcgctaagcccttcacaagcatcatctcatttaatcctcatagcactcgtgtaaagttgattattgccatcattcctattttacagctgagaaaacagttcccaggaggtaggttcaaagtctcacatctcatccctaagggtgtctctaaccactacaggacatgagatttgtactgatattggccctgttccaaagtagttgttggttccaattcttccacaatggcgtgctgtttctgaggcttgactgtcattagcatccaccctcaattgcacaggcacatcaggacggcactgtgacatcaggtgaaaagaaggccttggagagttctaaaattcagctgtgggccttacactctgg

SEQ ID NO: 8808 - DNA, 738 bp, Homo sapiens
taatttctactctaccaagtggtatgatcccccataacagcatccactcattcgttcatcattcatttcttcattccttatttgctcactcttatttcatacaagcagtttactaaatcagaacgtcagtgtaacttaggagtctgcatgaatgcagcatcacagtcatcatcatgggtcaccgctgtgtacctgctgggagtcggactccacactcttcactgtatactcactatccttctccttataataaccatttagagtaactactctcattatgtagacatttgttattatgtaattaatatttgccatagctttgatttaatrtttttccaaataacatttatcagtatttactaggcaatgggcactgcgctaagcccttcacaagcatcatctcatttaatcctcatagcactcgtgtaaagttgattattgccatcattcctattttacagctgagaaaacagttcccaggaggtaggttcaaagtctcacatctcatccctaagggtgtctctaaccactacaggacatgagatttgtactgatattggccctgttccaaagtagttgttggttccaattcttccacaatggcgtgctgtttctgaggcttgactgtcattagcatccaccctcaattgcacaggcacatcaggacggcactgtgacatcaggtgaaaagaaggccttggagagttctaaaattcagctgtgggccttacactctgg

SEQ ID NO: 8809 - DNA, 738 bp, Homo sapiens
taatttctactctaccaagtggtatgatcccccataacagcatccactcattcgttcatcattcatttcttcattccttatttgctcactcttatttcatacaagcagtttactaaatcagaacgtcagtgtaacttaggagtctgcatgaatgcagcatcacagtcatcatcatgggtcaccgctgtgtacctgctgggagtcggactccacactcttcactgtatactcactatccttctccttataataaccatttagagtaactactctcattatgtagacatttgttattatgtaattaatatttgccatagctttgatttaatgtttttccaaataacatttatcagtatttactaggcaatgggcactgcgctaagcccttcacaagcatcatctcatttaatcctcatagcactcrtgtaaagttgattattgccatcattcctattttacagctgagaaaacagttcccaggaggtaggttcaaagtctcacatctcatccctaagggtgtctctaaccactacaggacatgagatttgtactgatattggccctgttccaaagtagttgttggttccaattcttccacaatggcgtgctgtttctgaggcttgactgtcattagcatccaccctcaattgcacaggcacatcaggacggcactgtgacatcaggtgaaaagaaggccttggagagttctaaaattcagctgtgggccttacactctgg

SEQ ID NO: 8810 - DNA, 738 bp, Homo sapiens
taatttctactctaccaagtggtatgatcccccataacagcatccactcattcgttcatcattcatttcttcattccttatttgctcactcttatttcatacaagcagtttactaaatcagaacgtcagtgtaacttaggagtctgcatgaatgcagcatcacagtcatcatcatgggtcaccgctgtgtacctgctgggagtcggactccacactcttcactgtatactcactatccttctccttataataaccatttagagtaactactctcattatgtagacatttgttattatgtaattaatatttgccatagctttgatttaatgtttttccaaataacatttatcagtatttactaggcaatgggcactgcgctaagcccttcacaagcatcatctcatttaatcctcatagcactcgtgtaaagttgrttattgccatcattcctattttacagctgagaaaacagttcccaggaggtaggttcaaagtctcacatctcatccctaagggtgtctctaaccactacaggacatgagatttgtactgatattggccctgttccaaagtagttgttggttccaattcttccacaatggcgtgctgtttctgaggcttgactgtcattagcatccaccctcaattgcacaggcacatcaggacggcactgtgacatcaggtgaaaagaaggccttggagagttctaaaattcagctgtgggccttacactctgg

SEQ ID NO: 8811 - DNA, 2615 bp, Homo sapiens
tatacatgcatgtgtacacacacacacacacacaatggagaatggaagaccaattccaggatgattgttttaagagcttaatgacacgagtaacaaatatataatgtatgataattgtataacacaatgtataatgtatgtataatgtatattttttgcctattcaggatacagtgaaaattaatgtttgtcagtaatataattctaaatcccaaaataaaatgtagcaagaagggggctcttactgatttgatttctgaaaacaaattgccataggcataactgcctattgtcatctaccaaaccacatggtccttttcaaagaaactgcagcatcagtgagcctaacagtctaatctagctaattatgtttggctggcaatacattgtccctgtggattcagtgtcttttaagcttcctgatctccactggcttaaatatacaatagattaaatgtttcaccctcaccgcgggtacattttgcttattgatgaatagggccatatgcatctattttgtgggttattattgaaaaaagtctgaattgagtcaacaaatatctgttaattccttaagcactaattgaatgcttattagttgctctgattaatttgagtaagttgtgtttgactctttgcctttactttattcaagactagtctatgttaaattctcggagtagtaatctcagtacatagcatggttagtgcatgaactgagccagggatgatcttggagttgagattgggtagggagtgaagtgtagttttgaaatgcatcaaaataccaaagcaggaaaaattggacatggaagtagggatgatcaaaacataatagaaattaggaactaagtaaagataagacagacactgacaccaagagctcagaaaaattaagaggctgaaatcaggcatgaaatcaggaagcaggaggaaacccaaaccacagggctagacaggacagatggtcaaagcctgagcatacaaccaggagctgaagggaccagcttggccgtcagttgcaagggtgtgaggcagaagcaacacaaaagatcttgatatgaagcaattatttttggtcttaaactgctgggactccagatgacccagaccacggtcagcaggcagaagccaggtaaatttatataattctcagctctgttaattcaattattgaagctacttgtcttctgaaagggttttaagtctgaaataattttctattaaaatgaaaaaacatttgaaggtgtctggccttcaagatttgggtaactacaaagaaggaagatgatatttaagagtaaggatgtggagttgtaataaaaraagaaagggtttcagtgtgagtattggaaggtgaggaatggcaaatccttcctacttcaacttttgttttttagtagtctcaaattgcttttatttttcctagattaaagatatatctcccattcttgaaaatccctggactattagacttaaattttaatgtctttcctatttatttataaggtaaactattacaccgtccacagattcttccatgaaggaaattgctagtgtcactctatacatttagtatttcaagttcaatattatgattttccattttcatcaactatgtcaatttgacattcaaacacaggcaattttacttaaaatggtggatccttacatgagggaaataaaatgtttgtttcattataaagtttcctgccagttctgaaactcaatggtgtaatgatgagtcttcatcaggccaaaaaaaaaaaaaatgcaatgtttgacttactgtatttgtcaatatgccggtagctcttaagcagttgattttttttcccccaatgaataagtgagttgtaagaattgaggttctaaagaatataaccacctctaggaataatgatgataaaggaactgacttagaaattttgagtagaggaaaggaagttgcatggatcatataagtttttctcccttatcatgcattcatataaattattattaagtttatcttatatccattacgtgcagatactgtgcgaagtggcattctgaatgtgtgacaagagacctagatcaatgcagaactaagataattctgatggcagtttccaattttaatttagcgagcatatttatacttctaatggaattcacttattaactgacaacattgttttagtgttgataaaagcatggaagtgtttataatagtctgaaactattacaaatgggaaaggagaaaaaaagaataaaacaaaaaccaatctatgttacatccagtaaacatgacttcgaggtgaatattttgtatttttatttttaacagctttatggagctataaatcacatgccatacaattcacaaacttaaagtacacaattcaatggttttcagtaatgttacttttattaatttttaatttttaaaacagtggtatatatcacataaaatttgccattttaaccatttcaagtatacaattcaatgccattaattccactcacagtgttgtgctaccattaccactatttccgaaatgtttttataactctgaactgaagctccatggccagtgagcattaacaccccattcccctccaaccaatcccag

SEQ ID NO: 8812 - DNA, 717 bp, Homo sapiens
cagtactggatatcctactagaaatgttggctgttctttcctaaaggcatgttgaagccttcagtccaggaacgtatgaccaaggagcaagccaagagcaagggcagagtcaactgaatggcacaatcagcaaatttggggtaagtcaacttttcctagaccctagccttggcactagctccactgcgttcatttcatagatgctgttctcatggccttaatattttctccaggcccttgtaaaacaatatgcatgggatcatcaaaatctgtgatgatttccatcaggagccacaaacatcctatcccatgttattatcattaagattatgtagaagtcattgaaattgtggttagaaacaaatgtggtatccatttgtagatgtaattgttaatgggatttaggcttgagaaaatactttacaaaggttgaagcaaatcctttattatctggattatttttctagaaatcatctctgcttctgcctacagagctcagagacaggctagacatggatcgaaattcccatgtctataaatgtagggctgaastacaggtaaacaacaggttaactaatattgactttagtaaaacaagtgtcatctcaattgctttctcatatctgtgaactctaaatgatgatataggctacaaccaccaaaatcagaagaatcatttctgacaacagcactcctgaagaaataggatagccatag

SEQ ID NO: 8813 - DNA, 717 bp, Homo sapiens
cagtactggatatcctactagaaatgttggctgttctttcctaaaggcatgttgaagccttcagtccaggaacgtatgaccaaggagcaagccaagagcaagggcagagtcaactgaatggcacaatcagcaaatttggggtaagtcaacttttcctagaccctagccttggcactagctccactgcgttcatttcatagatgctgttctcatggccttaatattttctccaggcccttgtaaaacaatatgcatgggatcatcaaaatctgtgatgatttccatcaggagccacaaacatcctatcccatgttattatcattaagattatgtagaagtcattgaaattgtggttagaaacaaatgtggtatccatttgtagatgtaattgttaatgggatttaggcttgagaaaatactttacaaaggttgaagcaaatcctttattatctggattatttttctagaaatcatctctgcttctgcctacagagctcagagacaggctagacatggatcgaaattcccatgtctataaatgtagggctgaacyacaggtaaacaacaggttaactaatattgactttagtaaaacaagtgtcatctcaattgctttctcatatctgtgaactctaaatgatgatataggctacaaccaccaaaatcagaagaatcatttctgacaacagcactcctgaagaaataggatagccatag

SEQ ID NO: 8814 - DNA, 571 bp, Homo sapiens
tttttaaattataagttataaattataattataaattaatataattataaattataataaactattcctgtaattattataataactatacattataataaactgttgcattctcatgcaactctattccctgttaagcaactagggttatccttttgatcctagatatgaatctgccctggcaaaccagaggcttctataccacctgcaagggtctcatcattagccatatattatctcagggtcctctacagtgtctctttttatattcacttccatggaggaaatgatgtcaatcaccaaatcaagagaattctttgggttctttattataaggggactaatctcattcgtgagggctacacccacgtgacctaatcacgtcccaaagcctccacctcctaataccatcatcttcggggttaggatttcaacatatgaattttgtggagacacacatattcagacaatagcacttatattttggtgatccctcagaaaattaaaagtagaattactgtatgatctagcaattccatgcctgcatgtatacccccmaaaatggaaagca

SEQ ID NO: 8815 - DNA, 787 bp, Homo sapiens
cttgagcccaagaggttgaggctgaagtgagccatgatggagccactgcactgtggcctggatgacagagccagaccctgtctcaaaaaagaaaaaaaaaaaaagrttaaaaaaaaatcaagctaattaactgagaacatacaacataaatcgaccactttacttatttgtaaaaggaaataagataggactcaataaaataaaaaataaaaaacatataattaattaaaaagattaagagctttatggtaaacgattctccattagttaccaatatatttggaattaagatagaaagctatgtaaaaaatgacaaaccaaaacaaataaatgaaaaggacacaaaaggacctaaaaagaagacaagaagaatttttttcaaataataaacagaaaaggtcgctgatgaagtcactgtaagttttttttccccaacattcaaagaaaaaaataattattggccgggaacagtggctcacgcctgtaatcccagcattttgggaggccgaggcaggcggattacaaggtcaggagattgagaccatcctggctaacacggtgaaaccccgtctctaccaaaaatacaaaaaaattagctgggcatggtggcaagtgcctgtagtcccagctacctgggaggctgaggcaggagaatggcgtgaacctgggaggcagagcttgcagtgagccgagatcgcgccactgcactccggcctggacgacagagcgagactccatctcaaaaaaataacaattattattattattacccaaagcacaaaaaaga

SEQ ID NO: 8816 - DNA, 787 bp, Homo sapiens
cttgagcccaagaggttgaggctgaagtgagccatgatggagccactgcactgtggcctggatgacagagccagaccctgtctcaaaaaagaaaaaaaaaaaaagattaaaaaaaaatcaagctaattaactgagaacatacaacataaatcgaccactttacttatttgtaaaaggaaataagataggactcaataaaatmaaaaataaaaaacatataattaattaaaaagattaagagctttatggtaaacgattctccattagttaccaatatatttggaattaagatagaaagctatgtaaaaaatgacaaaccaaaacaaataaatgaaaaggacacaaaaggacctaaaaagaagacaagaagaatttttttcaaataataaacagaaaaggtcgctgatgaagtcactgtaagttttttttccccaacattcaaagaaaaaaataattattggccgggaacagtggctcacgcctgtaatcccagcattttgggaggccgaggcaggcggattacaaggtcaggagattgagaccatcctggctaacacggtgaaaccccgtctctaccaaaaatacaaaaaaattagctgggcatggtggcaagtgcctgtagtcccagctacctgggaggctgaggcaggagaatggcgtgaacctgggaggcagagcttgcagtgagccgagatcgcgccactgcactccggcctggacgacagagcgagactccatctcaaaaaaataacaattattattattattacccaaagcacaaaaaaga

SEQ ID NO: 8817 - DNA, 675 bp, Homo sapiens
  misc_feature (1)...(675): n = A,T,C or G
gaagatcaagaaccttacacagagggtctccaccttctgatggttcaacctacaatttttcgactttaccgtggtgtgaaagtgacacacattcagtagaaatcgtacttcgagtacccagacaaccattctgttttttgcttctagtgcagcattcaatacatttcatgagatactcaacacttaattataaaacaggccttgtgttctgcccaaccataggctaatgtaagtgttctgagcacactgaaggcaggctaggctaagccgcagtggttagtaggtacattaaatgcattctcgactttccatattatcaacttaacaatgggttgattgggatgtaatgccatctaagttaaggggcctcttatactcgttcttaatcgatarggcaccaagtaagcatttcaaatcacnnnnnnnnnnnnnnnnnnnnnnnnnnnnnnnnnnnnnnnnnnnnnnnnnnnnnnnnnnnnnnnnnnnnnnnnnnnnnnnnnnnnnnnnnnnnnnnnnnnncacacacacacacacacacctataacataaaatttcagaaagttgttttgaaattccagcagagacagttctcatatgagagataaagagcattttctaggctgggcatggtggctcatgcctgtaatcccagcacttgggaaggcaaaggcaggt

SEQ ID NO: 8818 - DNA, 675 bp, Homo sapiens
  misc_feature (1)...(675): n = A,T,C or G
gaagatcaagaaccttacacagagggtctccaccttctgatggttcaacctacaatttttcgactttaccgtggtgtgaaagtgacacacattcagtagaaatcgtacttcgagtacccagacaaccattctgttttttgcttctagtgcagcattcaatacatttcatgagatactcaacacttaattataaaacaggccttgtgttctgcccaaccataggctaatgtaagtgttctgagcacactgaaggcaggctaggctaagccgcagtggttagtaggtacattaaatgcattctcgactttccatattatcaacttaacaatgggttgattgggatgtaatgccatctaagttaaggggcctcttatactcgttcttaatcgataaggcaccaagtaagcatttcaaatcacnnnnnnnnnnnnnnnnnnnnnnnnnnnnnnnnnnnnnnnnnnnnnnnnnnnnnnnnnnnnnnnnnnnnnnnnnnnnnnnnnnnnnnnnnnnnnnnnnnnncacacacacacacacacacctataacataaaatttcagaaagttgttttgaaattccagcagagacagttctcatatgagagataaagagcattttctaggctgggcatggtggctcatgcctgtaatcccagcacttgggraggcaaaggcaggt

SEQ ID NO: 8819 - DNA, 681 bp, Homo sapiens
tctgatgctatttttggattttcctgctactgtctctatttcccgaagacccaccctgttctcacatttatcaaagctttgagaccagaggtatttgagggatgagatcractccattagtgccttaggaattaaagatgccaggcccgtttcctgagaatgctctgttttagtaatcacggctttgtgccacattatgctgtatacatctattcttttgcatggatggcatgtgctttcagtaagattggtttagggctgaggtgattgtgagctgcatctctggaagagtggggattggaggaagatggtgatcccctgtcccacccaagctgtgggtacatcatctctcgaccactacccccaggtcagtgcaagctctctccctgagaagggcaaccagggctatgaagagacagcaagtatggcagtggaaccttagcaaggagctgtgtgaacaatgctgaggaatgcattgctctcatgcagagcagagttggtccggattacagctgggatctcctgttggcttacagggtggaggctgaaacccatgcagacatccccagtcactcatgaaggcctgctgttcagggttccctgctttattccctgtgccatgccctgcatgatgccagtaccgtggggcccatgggttaccaatctgcaaacacgagagac

SEQ ID NO: 8820 - DNA, 902 bp, Homo sapiens
acctgcctcggcctcccaaagtgctgggattacaggtgtgagccacygcgcctggccaacttctgttgtttacaaactacccagtctatggtcttttgttatagcagccagaacaaactaagacagggaccaaacccaccttggttcaaatcccaactttgcaacttcctagctgtgtaagcaagttgccttccctccgtgaacctcaattacttcatctgtaataggggataataggatctcctaagcttgttctcatgattaactgagatgaggtaggcacatctccaggcagtggacatagcacagtaaatggcagctgttattgttattaggaggtatgtgtaagaacacttcgtctctaagtagttaatttggagactgaaacattttcgacatgagcagatgcccagtggcgctaatgacaatctgtgggcaaaaaaaaaaatctctgcaggatacatctaggattaaatcaaatgaggtaattcatggatagaaagtgctcagaccagtgtctagcacggactgggtggtgctccaaaaatgagagctccccctgatatttacaattcaacaagctttcttatggagacttaaaatggtttgagcacactgtaaataaccatggtttacaggagatattttttcaggaattcatctcatgttctccatcaagggacccctatcttgtgcaaccaatttatctctctttacaaaccttattaggttctgtctgtgtactttcaagaaaagttactttttggcaagcttgaatgggaaaagggatatgattgctttaaaactagagatctggtgtgtgaggttgccatggagacgatttaatgtaaactttattttacagcatgcccagctaagtaattggtcagaagggaagggga

SEQ ID NO: 8821 - DNA, 752 bp, Homo sapiens
tggacagaattgatccgctcctaccatctgttgaatactaccaacatttattttcttgagacagcatctggctctgtcactcaggccagagtgcagtgccacgatcatcccccctcagcctcccaagtagctgggactacaggtgcatgccactatgcctagctaatttttgtattttcagtagagatgggtttgtaccatgttgcccaggatggtctcaaactcttgagatctgcctgccttggcttcccaaagtgccgggactacaggcgtgagccactgcacccagcctctactaacagttattataaaatataaagaaagatttcttctcgtgcagcttaaaagcttcaggtctgatggactggacagaagttggaacacgggagtaggaatttaccttactcagaaggacaccttgtccactggcctggaaacactagatttataaagtaggaagcaaggtcattgataagggcgaatgcggaagtgataggaaagcgttaaaggctaaaagtcactgttgtaaagactgggaaagagagctgacttgaggcacgtaaaggctggccataattgaggctggagattctgaatttgtagtggatgcagccaacctctcagagataggaggagagaagatagtggagctagagttagatctggggttggcatatttattgtgtgtgtttatttaaaagacaagaaggcaaggggattggggctatggaccagaaygcaggtgaggttat

SEQ ID NO: 8822 - DNA, 752 bp, Homo sapiens
tggacagaattgatccgctcctaccatctgttgaatactaccaacatttattttcttgagacagcatctggctctgtcactcaggccagagtgcagtgccacgatcatcccccctcagcctcccaagtagctgggactacaggtgcatgccactatgcctagctaatttttgtattttcagtagagatgggtttgtaccatgttgcccaggatggtctcaaactcttgagatctgcctgccttggcttcccaaagtgccgggactacaggcgtgagccactgcacccagcctctactaacagttattataaaatataaagaaagatttcttctcgtgcagcttaaaagcttcaggtctgatggactggacagaagttggaacacgggagtaggaatttaccttactcagaaggacaccttgtccactggcctggaaacactagatttataaagtaggaagcaaggtcattgataagggcgaatgcggaagtgataggaaagcgttaaaggctaaaagtcactgttgtaaagactgggaaagagagctgacttgaggcacgtaaaggctggccataattgaggctggagattctgaatttgtagtggatgcagccaacctctcagagataggaggagagaagatagtggagctagagttagatctggggttggcatatttattgtgtgtgtttatttaaaagacaagaaggcaaggggattggggctatggaccagaacgcaggtgagrttat

SEQ ID NO: 8823 - DNA, 798 bp, Homo sapiens
tggatccctagccctaaaacaatgccytgcacagggtggccatgtaatagctatgggatgaggggtcagaaggtgcatcaggacgaacgaccactcatgaacaaggcaaaacaaaggacattttcagatgagcaaaagggctgattgcccccgtctcctcatgctcgtcaagtagaaggaaattgtgccaagaagaaaggccccaatatataagaaagaagagccccaaattctgcataaatttagaaagtttaaagtaaacactggttacataaacaccacggtaataatcataactaatactgagggtgaaaatcaagttagagtaaaaatcctggcagaagccaacacaatggcgtgaaagattggggaggggaattcggactaaaagactcttgatttggttgtagaggacagtaaggacactgatacattttcagtttatgcaataaaacctcaggttaaaaggaaagttattttcagattatatatttttcttaatgtctgtttcttataagatcacatttaaaggtaaagatttagaaatagcaaaagaaagaatagaaacagatataccaggcatatattaactaactgaaagaaagctgctgtacctattagatttaatagacttaaagcagaaagcattaaaggtataaaaatatgtattactggttaaggatttttaaaaagaaaccaattcaaaagaaagagaaaaactacaaataaatattagcaaattcataaccaaagtaggaattttttttttttttttttttgagatggagtctcactctg

SEQ ID NO: 8824 - DNA, 798 bp, Homo sapiens
tggatccctagccctaaaacaatgccckgcacagggtggccatgtaatagctatgggatgaggggtcagaaggtgcatcaggacgaacgaccactcatgaacaaggcaaaacaaaggacattttcagatgagcaaaagggctgattgcccccgtctcctcatgctcgtcaagtagaaggaaattgtgccaagaagaaaggccccaatatataagaaagaagagccccaaattctgcataaatttagaaagtttaaagtaaacactggttacataaacaccacggtaataatcataactaatactgagggtgaaaatcaagttagagtaaaaatcctggcagaagccaacacaatggcgtgaaagattggggaggggaattcggactaaaagactcttgatttggttgtagaggacagtaaggacactgatacattttcagtttatgcaataaaacctcaggttaaaaggaaagttattttcagattatatatttttcttaatgtctgtttcttataagatcacatttaaaggtaaagatttagaaatagcaaaagaaagaatagaaacagatataccaggcatatattaactaactgaaagaaagctgctgtacctattagatttaatagacttaaagcagaaagcattaaaggtataaaaatatgtattactggttaaggatttttaaaaagaaaccaattcaaaagaaagagaaaaactacaaataaatattagcaaattcataaccaaagtaggaattttttttttttttttttttgagatggagtctcactctg

SEQ ID NO: 8825 - DNA, 798 bp, Homo sapiens
tggatccctagccctaaaacaatgccctscacagggtggccatgtaatagctatgggatgaggggtcagaaggtgcatcaggacgaacgaccactcatgaacaaggcaaaacaaaggacattttcagatgagcaaaagggctgattgcccccgtctcctcatgctcgtcaagtagaaggaaattgtgccaagaagaaaggccccaatatataagaaagaagagccccaaattctgcataaatttagaaagtttaaagtaaacactggttacataaacaccacggtaataatcataactaatactgagggtgaaaatcaagttagagtaaaaatcctggcagaagccaacacaatggcgtgaaagattggggaggggaattcggactaaaagactcttgatttggttgtagaggacagtaaggacactgatacattttcagtttatgcaataaaacctcaggttaaaaggaaagttattttcagattatatatttttcttaatgtctgtttcttataagatcacatttaaaggtaaagatttagaaatagcaaaagaaagaatagaaacagatataccaggcatatattaactaactgaaagaaagctgctgtacctattagatttaatagacttaaagcagaaagcattaaaggtataaaaatatgtattactggttaaggatttttaaaaagaaaccaattcaaaagaaagagaaaaactacaaataaatattagcaaattcataaccaaagtaggaattttttttttttttttttttgagatggagtctcactctg

SEQ ID NO: 8826 - DNA, 538 bp, Homo sapiens
atccctaagtctatttagcactgagcttgtatggtccactgcacttatttgtgctactcatcaggctcctttaaggcattgattttgagacaccagatttttaatgcatattgattctgctctcaaagtaatagactattgtgggcagaaagaaccctggatctgaaggagagggtgtctttatcctcacactggtttggctaatttgtgtgcctctgtttcctcatttgcaacatgagctgcttggatgaaataaatttgacctcccacagtaacattctgtctcactgatttcatgccattagagactttggatgggtaccttaacaaatgcatagkaatgaatactctggacgaaaaacatcgccaacttttatttgcagttatgatatgattattccattagtcatgtcactgataacttgatgagctttagtctggccaaattttttgttaataattgttatttatttatttttatgttcctgaggagaaaaaaaaatctatcaaacagaaacagggcatttggcacttggaa

SEQ ID NO: 8827 - DNA, 745 bp, Homo sapiens
  misc_feature (1)...(745): n = A,T,C or G
aaggcccactttataatacaaaatagttataaacacctttttatttcttatcatctacctctccaaggcagagttcgccttttttttcaattattgccgctctaaaaatgcccccmccatcttgaaccaagttgttcaacgcgtacagattctatacgtgtatatactcccccatcccatcataaaaatagttgttgcccactaaatatagttttcctatgaagaaacataactgtgaaaatgtgttctcataaactgcagatcagtgaatattataagcagacacgatcctaaagctaacatcatccatttggtttgtttttctcttcccctttctcagcctcctcatgtagaatagattgtgtttgtgacatgaagaactattgtcttaaaatatggattttatgaattgtgatcatgagttgttctcaattaaaaataattaaatgtaggagaagtggaatcataactgcctcttctgggcaaatatggagagaaacgccattcattttatggctgctggagaaaatggagttaatgcaacaccctctgatgctgcaagtgacaggtgggaaactggtgcagggaaatatcctgtgccatgtaggctgcaccagcctgggccctactgctctctaagtggccctaccaccattgtccttcatcgcccagagaggctggtctcagttccgcctgcagcaactatgttgatttgcttgtaacatgntttgtccttttggatcca

SEQ ID NO: 8828 - DNA, 745 bp, Homo sapiens
  misc_feature (1)...(745): n = A,T,C or G
aaggcccactttataatacaaaatagttataaacacctttttatttcttatcatctacctctccaaggcagagttcgccttttttttcaattattgccgctctaaaaatgcccccaccatcttgaaccaagttgttcaaygcgtacagattctatacgtgtatatactcccccatcccatcataaaaatagttgttgcccactaaatatagttttcctatgaagaaacataactgtgaaaatgtgttctcataaactgcagatcagtgaatattataagcagacacgatcctaaagctaacatcatccatttggtttgtttttctcttcccctttctcagcctcctcatgtagaatagattgtgtttgtgacatgaagaactattgtcttaaaatatggattttatgaattgtgatcatgagttgttctcaattaaaaataattaaatgtaggagaagtggaatcataactgcctcttctgggcaaatatggagagaaacgccattcattttatggctgctggagaaaatggagttaatgcaacaccctctgatgctgcaagtgacaggtgggaaactggtgcagggaaatatcctgtgccatgtaggctgcaccagcctgggccctactgctctctaagtggccctaccaccattgtccttcatcgcccagagaggctggtctcagttccgcctgcagcaactatgttgatttgcttgtaacatgntttgtccttttggatcca

SEQ ID NO: 8829 - DNA, 790 bp, Homo sapiens
gatccatggtacaggctactgctaaacttggcacagtatcaagtatagtacctccaaggaccagggctgggmagtctttagtgctaacatcccctttagagttcacacatcttgcccttccatgaatgacccctcagtctggcctccccagcctcaaggtccactcaggcacaagagccacagtaccctagatagtgtcacatgacaccgttgtcatccaaggataatacagaccaactaggctacatctgtgatgagcagctagcaaagccgctggtcttctcctaggactaagtccaggtgccttccacaatctcatggtctttcaggtccctggttacttttctcaaaggccatttccaaaagaatacatgccttcacatcacaacctgtactgtgagtccattctagaggtcactgaaaggccctgtaaagagaggacatggatacgggacctggccctgaggttattactggccgtaaggcagagttaatccatacagaaaccagtgtgtccatgtgctctgcacaaaaacagacctgttgtccatccagtccactgacaagagggtttccccgagagccgaagtggactgaagctacagtttttagctggtgcgggccacaggcagggtcagattgagaagaagcaaagctggggaagcagaagttgggagtcttgtgttgctccctcttcctgtgtggtgctctgggtttctgtggatcgtgaaggcgatctcaagagtgtttccctccaaacctgatagctgcctattcctgtctggttggg

SEQ ID NO: 8830 - DNA, 381 bp, Homo sapiens
catacctggaatataaagcrattgttatcagtttgtctgaggaatcgtaacattggaaggttgcccagaaaccatctggcctgtagagatgctattcagtgagagtgttcaggggtcaccaggcaaaggtgaataacaatggcaatgtaggttatttttaaaacaaaggtatattttttaattttaaaaaataattttaaagtgactcattctgattatatatactgtttttgcatgacattttcttacttgtatgaaatgatgctatccttacttagcaatgaaagtgatgaatctcactttgattcccaagttgaaaaacaatattccagtctttgaaatccaaaagattgagagcctttttcatctccgtggcgcttg

SEQ ID NO: 8831 - DNA, 3025 bp, Homo sapiens
tgcataccataaagtgaaaatgtaattgaagttatcttgtatggtaagatcagaaaagctttttattttcttttttatgtcagtcttctatgaccatgtcttacttttataaaaagaaacaagaacattaattcctctactaagagggaaaacaaagagtcaattgttaagagataattttttaatgttatggccaaaaggggttttacccatagacggtccactgtgtactaaaaacaacagaggctaacatttctaaaaaaccttctatgcgccaagcactgtacaaacattactctgcacaatccaagtttatattatcatcattttacagatgagcaaactggttctctcagaagtgctcactaacgggctgggtgcagtgcttatgcctgtaatcccagcacttagagataagcctgggcaacatagcgagaccttgtctctaagaaaaaaataagaaattagccaggcatggtggcatgtgcctatattcctggcttctggggaggctggggtgagaggatcacttgagcccaggaggtcaaggctgcaggcagctatgctcacaccactgcactccagcctgggcaacagggctcagagaatgaccgtctctaaacaaacaaacaaacaaaaaaagaaagcgccagaccttgaaaactgactggagccacagcctgagctattaatccttacaatagtcttcttttgggcaaaaagagggctagtggttattgtaccctttctggccaaatcccccatgtctccattgcagcttggccttaggatataagagcagaaaagtcctaaagtcctttccagacttggcagtagaattagaactgataaagaatagatgtatcttttgcccttaagaggtaggacgtagtttccaacccccaagtcccctgaaatcccatcctgaggggggactccctcagaagtatgaacacaggtcattctattccagtagcactcatggaagataccactaagaaggagcaatggcattgctgaggggtcctttggggatccacggggttgagagtcctgagttgagaggacagtaggttgctgctgccctgaaaatgtcccttccagacagaggtgacgtccttgtgtcgaacagataatttgagggaattattttataaccgagcatggtaaaggaaaacctcaaaggacagcatggggtcaataaacactcccaggcctgaaggggcacagagagaggggagtcactggagctggtgacagaggggctaatcggagttggtcaggggatatgctagcctgtgctggacctgcaggcagggggctggtgaatgcatacctgagcccccaatctcctcgtcttacattccagtttctggccagcataccccactggccaaacctcattaaaacccagagagatcagtgtctgcatgcacagagctcatggagagaagagaagaagagatcttaagggttaactagaagacaccagaacagtcccgaaggtgtgctgtggactgaactgtgttcccctatgctaaagccctaaagaccaatgtgactatatttggaaaaagggttttcagtgaggcaattaagcttaaatgaggtcataagtgtggggccgcacaggactggtgtccttataaacagaggaagagataacagagctcagatctctctagctcgctcgctttctctctctctctctctctcagattgtaggcacagaagcaaggctatgtaaagacccagccagaaggtgcccatctgcaagcagaggagggccaggacccagctctacaagcatcgtggtcttggacttccagcctccagaactataagaaaataaatttcccttgtttaagccaggagtcctcaaccgaaattgatccgtggcttgttaggaatccggccacacagcaggaggtgggtggtgggcaggcaagtgaagcttcatctgtatttacagccattctccattactctcttaccgcctgagctctacctcctgtcagatcagcagtggcaatggattctcacaggcgctcgaacctcttatgacctacgcatgcgagggatctaggtttcctgcttctcacgagaatctaatgactgatgatctgtcattgtctcctatcacccccagatgggaccatttagctgcaggaaaacaagctcagggttcccatgattctacattatggtgagttgtataatttcattttatattacaatgtaataagagaaataatgtgcgtaatgaatgtaatgtgcttgaatcatccctcaaccccccattctgtgaaaaaactgacttccatgaaaccgttccctggcaccaaaaaagttgagaaccgctggtttaagccacccagtctgtgctgttttgttacagtagcccaggctaatacgaggagagaggaagagaagaacaatggcctgcccgtcattggattctgtgtgctctgccacagaatgcatagagactgccatcattcgacccaggaggtaatctgacctttattcctgcgagtatggtttatgattgaagtcccagaaataaacagactgaatttgcaggctggaaatgccatcaagacagctgctaaagatctatggggttaatcctaaacaattagcaattcaaagatacatttcctacagaggcacagggggtttccattcataggaaatatccagaaaccaaaacatatgtgggaaaaaaattaaaaatctccacatttctcaaaaaaaaaagtaatttaagaattaaatcttaatgtggggtgyagggagaagggagggtgcatggagtactatgaagagaaaagaatcttgaggcatatattttcctaaagtgtgggaaataatgacattttctagcttggtgaagtagtgtgattgcaattggctatttaaatatggctttgcatggcaaaaaaagaaaaatctcttcaatttaattgagtgctccattaaaagttagttaacttaaggcaaaatatattgtggaatccatgca

SEQ ID NO: 8832 - DNA, 806 bp, Homo sapiens
caaataggcccaggccacgggtgtctgtggtgctgctgcctcccctcggccacctctggtgcccaggccacctgcatcccatccgacaatcacagggcaaagatggcctctggtccacccaggtccacccatgctctcacagtgaaccccagtctcttctagcaagttcagcctggccgtccaagttcagcttccccatcccacctgcgtgctcggagcagamagcacagggccgagattggtggcgttatcatcctcaaagccgtgagcaagaggccccagtgggagagcgggcttggtccaatggctaagaggttctataagccagagtccccaggttctaatcccaacccagctactggctagagaggtgctcttggacaagttacttcattttgagcctcagtttcccagcctgggtgatggtatgacagctcccgtggggtggcaggattaaaaggaccgatgcagggagaggagcaacacatggtcatttgaacataaaggggtctgtgtgctcattagtgttgagttcagactcaggtcttgctgggccaagagatgactcgggctccaggcagcatttagcccagagcctcccaaatgtcatgcgtcgcattacctgggggtctcgtcccagttcagattctgatttagtagctgtgtttgtgtcctggggctgcagttacaaattgccacagactggaggctcaaaatagcagaaatccacgctctccccgttctgccagccagaagtcccaaatcaaggtgtggcaggccaccctcccaccgaaggctctgcggga

SEQ ID NO: 8833 - DNA, 613 bp, Homo sapiens
ggttcttcagagaagcaaagaactgagccctcctcaaagtcaccctttggacggaggtgtcctgaggactctctcctaatgccctcatcctggagaggttttatgaagttcttctatggcyggcatgactcagcaagaaagagtccagtggagcccagctttgaatgcacttgtgagtcttcaccagacccagtgcctgctgttaccttcagaaaccagaaaccagaaaacaggttcctccttctgtctagaatgtgttaagcctaatactcttcgaggataaaatgaagttcaagacccacacaggaaactgatattgaacctcaagccagcttcaaagacaaacagaattaaacattcaattttatgtttaaaataaaggtgacaattcttgcttgccaaaatactagtacagttagtaaaatttacattctcatcccttctttttgtcctcctacattctctcctgtccccctcttttcttccttccttctatcctttctctctcttttgctttctcaagaaatattttcagaataccttcaatttactcttttctcattattttatttatccattcatctcacaggctgtggagaaagaaaaaagaaaa

SEQ ID NO: 8834 - DNA, 613 bp, Homo sapiens
ggttcttcagagaagcaaagaactgagccctcctcaaagtcaccctttggacggaggtgtcctgaggactctctcctaatgccctcatcctggagaggttttatgaagttcttctatggctggcatgactcagcaagaaagagtccagtggagcccagctttgaatgcacttgtgagtcttcaccagacccagtgcctgctgttaccttcagaaaccagaaaccagaaaacaggttcctccttctgtctagaatstgttaagcctaatactcttcgaggataaaatgaagttcaagacccacacaggaaactgatattgaacctcaagccagcttcaaagacaaacagaattaaacattcaattttatgtttaaaataaaggtgacaattcttgcttgccaaaatactagtacagttagtaaaatttacattctcatcccttctttttgtcctcctacattctctcctgtccccctcttttcttccttccttctatcctttctctctcttttgctttctcaagaaatattttcagaataccttcaatttactcttttctcattattttatttatccattcatctcacaggctgtggagaaagaaaaaagaaaa

SEQ ID NO: 8835 - DNA, 613 bp, Homo sapiens
ggttcttcagagaagcaaagaactgagccctcctcaaagtcaccctttggacggaggtgtcctgaggactctctcctaatgccctcatcctggagaggttttatgaagttcttctatggctggcatgactcagcaagaaagagtccagtggagcccagctttgaatgcacttgtgagtcttcaccagacccagtgcctgctgttaccttcagaaaccagaaaccagaaaacaggttcctccttctgtctagaatgtgttaagcctaatactcttcgaggataaaatgaagttcaagacccacacaggaaactgatattgaacctcaagccagcttcaaagwcaaacagaattaaacattcaattttatgtttaaaataaaggtgacaattcttgcttgccaaaatactagtacagttagtaaaatttacattctcatcccttctttttgtcctcctacattctctcctgtccccctcttttcttccttccttctatcctttctctctcttttgctttctcaagaaatattttcagaataccttcaatttactcttttctcattattttatttatccattcatctcacaggctgtggagaaagaaaaaagaaaa

SEQ ID NO: 8836 - DNA, 784 bp, Homo sapiens
actaatgtcaagaaaattccaacaaataaagccacggaaggccatgaagagagagttctcacatttgtatgcctgataacacaaaagactacaaaaatcacaactttgcacaaaggccattgcaaccttatgcaaaagatatttctgcacagacatctgtccagcaactgcctgtccaacctcaaaatggtgttgcgcttgttacagatcttagtagtcaagaataattacttcaaaacaattatgaaagcctcctttttttttctttaaaaaccttagccttccttwccctcctgagtacaaacatagtttactatggcatgcatattcccactgcaatgttctattcccaaatacacatttttttttctttttgaaagactatgttatttaggttgacatatatgatatcagaagtgggatgtgaaaaaggtcactattggaagaaattgatggcttttggaaccagtgtgcagtactcacttgagccctttgatccctccacttccacagctcacctttttggcccttatgagctgagcctctctcctttcgacaggggcttttttactttatttgggatctagtttaaataaggccactttaataagaaatcttacatcgcttctgggctataaaatacttttttttccagtcttttctggtaagtcctggtataaagacaagtctttttcgattgaatactcttgctttctagagaatttacattcggtctgtgaggcatgtcttctctgggttccatgtgtagtttagtatttcattt

SEQ ID NO: 8837 - DNA, 820 bp, Homo sapiens
cccaggcacaaccagaggaaccctagtaccttgatattctgtcccctcttcccccttccctatggggaatcccacaatggagaggtgcccaaagatagccttgcctacaggtttgaaaaaggaggctcctgtagtgttgccattgtggcctagaacacaaaccagcactgcagggtgcatttcagagtggggaaaactcttgggtatatcacggttgggattttgaaacaacagcctaattaggcaacttcctggtccttcacttccctccccaaagttcaacatttttaacatggattgtagtgccatttttttttttaaatgctggaatgtagtattgatagggactggaggaagagaaactctaggcagacaggggcaggtccctggcaaagccccaccttcaagccaaaaaacctgagaccatggcccaaagtaaaaacttatattcctgytttctctcttgaatgttgcgttttcctaaaccacccatgtctctgccccaccccatcctgtgcctataaagacccccgactcagctagcagagaaaagcagcagctgggtgttggggactatggctgacatcagagagagcagcttgacttcagagggatggcttgatggcataactttagagaagaatccggctggagatggctgcactccagaggaagtttacctaccctcctcccatccccttttcagctctcctttccactgacagccactttcatcagcaataaaatccaccacatttagcatccttcaattcattcatgcaccctcatttttttttcctggatgagggacaagagcttg

SEQ ID NO: 8838 - DNA, 3309 bp, Homo sapiens
  misc_feature (1)...(3309): n = A,T,C or G
tcttcatagtaactccgtaaactggaacactgtcaaaaagcagcagctagtgaattgtttccatgtatttttctattatccaataagtgaactatgctattcctttccagtctcccaagcacttcttgtccccatcaccacttcggtgctcgaagaaaaagtaacaaatcaaggaacacaactaaagaaacacacacacaaaccaaagacaactacagcgtctgcaaaagtttgctagaagactgaaactgttgagtataaggatctggtattctacgatcatgagttcacttcagagtttgttcaagacatacgtttcgtaaggaaacatcttagttagaagttattcagcagtaggtaccatccctaagtatttttcaccaaattcgtgacaataaagagctatctaaccagaaaaattagcgagtaccggcaccatccatagggctttgtctttacgcttcattagcacttaccatgccttacaatgtctaggattgaccctgatagcatttcgaaaacaagctaatgctttgtccagttcttcagtgaagacaagctcacgccctaatgcgctataggcataagcatcatttggatccacttcgagagttctctggaagaattgaatcgcaatatcgtgttcccgttgcagaccgaaacagttccctgcagcacaccaggcctctggctggcgaatttttatccatgtctgtgaagtctttggacagaactgaaagagcaacctctttcggaggatgccaaagtgttgtagagtagatctccatgccttcgactctgtaattctcaatcctcctaacctctgagaattgtctttcagcttgcgtggactctgaaagtttacaataggcccttccgatttggcacagtacccaaccggtattgcagtggtgagaagctagatggctcaagatgctgatagcttctttgccgtggtaagaacacaaagctaaataacctttccccctttcacgaagaaggctcatcaagccttccgctgctgctttttgtagattaaaagcctgaatctgaggcgcgattgcggctattttcccttctgaaatgacggaagagtccaattttgtcacttccaggctatcacttatgttcggtggagttattgctcctttattagttttacttttggttcttctgtttgggattttaggtggaaacttcatttttaattttctcctattctcctcggttgtggagctgtcactagtcaagagtcgtgaatttcttcgaggcggtgcatttgggggagatgccatagtggggctcaatacctgaggtgttgcccttgtcggcggaccagaactttgtgtttttgcaaggactggagttacctttcggctctttcccctctgcgagaagacagacggtgttccggtttggccgattctggcaacaggcttttttgaaggggctccggtggatggcacgtcaatgacagacggtgtctcataccagtgcagttttgtcaatagggtccgtctccgggacttggggtttctaatggcaaaatgccaacacttggggttaatggactaacagctgctggtcctcctaataaacttcgaccagtttttggtttatgttgaacctgtttagatcatatggaagttcctgttcccagtgggacagtatcaggtgaaaggacagctgaatcgatagaagacactggggagtctgtattcaaggagtactttgaattggaagattctaaattccatccgtttcattcgacggtgtcctggggtgtttccgtaagaacggtctcgggctgtctgtgacataaactaggacgaggtccaagtgttgtggcgcaacacttggacaggcagttgctaaagctctctagagaggtgaatcaaaatgtttggtcaggatctggcttttcccccctatttcacatcatgattcaaagggacaccagaggaaaggatttcaacgaaggctcttttggtcacattctgatcctttggtaagccgatctgtcttgcaatatacatgtcccgacgatggaaggggaaagcgagctgaatcaccaaactcaggaacgataatatcatcgtggctttctgcttatgaaacatnnnnnnnnnnnnnnnnnnnnnnnnnnnnnnnnnnnnnnnnnnnnnnnnnnnnnnnnnnnnnnnnnnnnnnnnnnnnnnnnnnnnnnnnnnnnnnnnnnnnggcacagtgatggtggtcggggggggtaggaatatggaaagtcgtggcgaagtattagggaagagcaacgtggtaacgtggtattatatattagagggttaatgtgattcacttataaatgaaaggacagacaggaggaggtgccttaacggtgttcaaagagtacgtgaagcatggagtatactagatatatttagattatatatatttatatcgtttacattatatataaataattaattttcatatcccactcccccccccccccatagcggctccggcccggccagccycggctcatttaaaggcaccagccgccgttaccgggggatgggggagtccgagacagaatgacttctttatcctgctgactctggaaagcccggcgccttgtgatccattgcaaaccgagagtcacctcgtgtttagaacacggatccactcccaagttcagtggggggatgtgaggggtgtggcaggtaggacgaaggactctcttccttctgattcggtctgcacagtggggcctagggctggagctctctccgtgcggaccgctgactccctctaccttgggttccctcggccccaccctggaacgccgggccttggcagattctggcccttcctggcccttcagtcgctgtcagaaaccccatctcatgctcggatgccccgagtgactgtggctcgcacctctccggaaacattggaaatctctcctctacgcgcggccacctgaaaccacaggagctcgggacacacgtgctttcgggagagaatgctgagagtctcttgccgactctctcttgacttgagttcttcgtgggtgcgtggttaagacgtagtgagaccagatgtattaactcaggccgggtgctggtggctcacgcctgtaaccccaacactttgggaggccgaggccgtaggatccctcgaggaatcacctaaccctggggaggttgaggttgcagtgagtgagccatagttgtgtcactgtgctccagtctgggcgaaagacagaatgaggccctgccacaggcaggcaggcaggcaggcaggcagaaagacaacagctgtattatgttc

SEQ ID NO: 8839 - DNA, 3309 bp, Homo sapiens
  misc_feature (1)...(3309): n = A,T,C or G
tcttcatagtaactccgtaaactggaacactgtcaaaaagcagcagctagtgaattgtttccatgtatttttctattatccaataagtgaactatgctattcctttccagtctcccaagcacttcttgtccccatcaccacttcggtgctcgaagaaaaagtaacaaatcaaggaacacaactaaagaaacacacacacaaaccaaagacaactacagcgtctgcaaaagtttgctagaagactgaaactgttgagtataaggatctggtattctacgatcatgagttcacttcagagtttgttcaagacatacgtttcgtaaggaaacatcttagttagaagttattcagcagtaggtaccatccctaagtatttttcaccaaattcgtgacaataaagagctatctaaccagaaaaattagcgagtaccggcaccatccatagggctttgtctttacgcttcattagcacttaccatgccttacaatgtctaggattgaccctgatagcatttcgaaaacaagctaatgctttgtccagttcttcagtgaagacaagctcacgccctaatgcgctataggcataagcatcatttggatccacttcgagagttctctggaagaattgaatcgcaatatcgtgttcccgttgcagaccgaaacagttccctgcagcacaccaggcctctggctggcgaatttttatccatgtctgtgaagtctttggacagaactgaaagagcaacctctttcggaggatgccaaagtgttgtagagtagatctccatgccttcgactctgtaattctcaatcctcctaacctctgagaattgtctttcagcttgcgtggactctgaaagtttacaataggcccttccgatttggcacagtacccaaccggtattgcagtggtgagaagctagatggctcaagatgctgatagcttctttgccgtggtaagaacacaaagctaaataacctttccccctttcacgaagaaggctcatcaagccttccgctgctgctttttgtagattaaaagcctgaatctgaggcgcgattgcggctattttcccttctgaaatgacggaagagtccaattttgtcacttccaggctatcacttatgttcggtggagttattgctcctttattagttttacttttggttcttctgtttgggattttaggtggaaacttcatttttaattttctcctattctcctcggttgtggagctgtcactagtcaagagtcgtgaatttcttcgaggcggtgcatttgggggagatgccatagtggggctcaatacctgaggtgttgcccttgtcggcggaccagaactttgtgtttttgcaaggactggagttacctttcggctctttcccctctgcgagaagacagacggtgttccggtttggccgattctggcaacaggcttttttgaaggggctccggtggatggcacgtcaatgacagacggtgtctcataccagtgcagttttgtcaatagggtccgtctccgggacttggggtttctaatggcaaaatgccaacacttggggttaatggactaacagctgctggtcctcctaataaacttcgaccagtttttggtttatgttgaacctgtttagatcatatggaagttcctgttcccagtgggacagtatcaggtgaaaggacagctgaatcgatagaagacactggggagtctgtattcaaggagtactttgaattggaagattctaaattccatccgtttcattcgacggtgtcctggggtgtttccgtaagaacggtctcgggctgtctgtgacataaactaggacgaggtccaagtgttgtggcgcaacacttggacaggcagttgctaaagctctctagagaggtgaatcaaaatgtttggtcaggatctggcttttcccccctatttcacatcatgattcaaagggacaccagaggaaaggatttcaacgaaggctcttttggtcacattctgatcctttggtaagccgatctgtcttgcaatatacatgtcccgacgatggaaggggaaagcgagctgaatcaccaaactcaggaacgataatatcatcgtggctttctgcttatgaaacatnnnnnnnnnnnnnnnnnnnnnnnnnnnnnnnnnnnnnnnnnnnnnnnnnnnnnnnnnnnnnnnnnnnnnnnnnnnnnnnnnnnnnnnnnnnnnnnnnnnnggcacagtgatggtggtcggggggggtaggaatatggaaagtcgtggcgaagtattagggaagagcaacgtggtaacgtggtattatatattagagggttaatgtgattcacttataaatgaaaggacagacaggaggaggtgccttaacggtgttcaaagagtacgtgaagcatggagtatactagatatatttagattatatatatttatatcgtttacattatatataaataattaattttcatatcccactcccccccccccccatagcggctccggcccggccagccccggctcatttaaaggcaccagccgccgttaccgggggatgggggagtccgagrcagaatgacttctttatcctgctgactctggaaagcccggcgccttgtgatccattgcaaaccgagagtcacctcgtgtttagaacacggatccactcccaagttcagtggggggatgtgaggggtgtggcaggtaggacgaaggactctcttccttctgattcggtctgcacagtggggcctagggctggagctctctccgtgcggaccgctgactccctctaccttgggttccctcggccccaccctggaacgccgggccttggcagattctggcccttcctggcccttcagtcgctgtcagaaaccccatctcatgctcggatgccccgagtgactgtggctcgcacctctccggaaacattggaaatctctcctctacgcgcggccacctgaaaccacaggagctcgggacacacgtgctttcgggagagaatgctgagagtctcttgccgactctctcttgacttgagttcttcgtgggtgcgtggttaagacgtagtgagaccagatgtattaactcaggccgggtgctggtggctcacgcctgtaaccccaacactttgggaggccgaggccgtaggatccctcgaggaatcacctaaccctggggaggttgaggttgcagtgagtgagccatagttgtgtcactgtgctccagtctgggcgaaagacagaatgaggccctgccacaggcaggcaggcaggcaggcaggcagaaagacaacagctgtattatgttc

SEQ ID NO: 8840 - DNA, 536 bp, Homo sapiens
gattgcttgagctcaggaggtcaaggctgcagtgagctatgatcatgccactgcactccagcctgggcaacagagcaagaccctgtaccaaacattttttttaataaaaaagaaaaactttgattaaattataccctctttcaggaagtacttctgcctctgcttcaatggaatgtgggtctcctctccttcaagcccctcttggtacacagtctggtctttccagtgacrgttaccacaccgcgacagtattcgagttatgcttttaacccaccatcctcatcttcccattaacctctaagggcctggcttagtttctggcccctgctaagtagtcagtaaacatgtaccttaagtgagggagtgagtgaatgagcgccaagtctacagcaggcatgggacatcactcaactgttcaagggatgcctggcacccagcaggtgctccataaatggaagaatgaatgaattctaatccccatccacctctgttattctttcttgtagatgtacatgctcacttgttcatctgaattg

SEQ ID NO: 8841 - DNA, 1163 bp, Homo sapiens
tctgatctctctcaggggcctccaacccacccactggctctccctgctgacaaagcaactatttcctggccccaaagccccagtctctggaaatgaccctccttccttctccagctcatggctgtcagaggctcctaactgcacccacccccgatcagccaaagccaattactccacgtccaagacacaggcgtgttaaaatgtaaacggccattcatcatctggcagcgtgaccgtttgcccctatcaggccccagtccggcctcaccacgcctccatgctctcctcagcgtcaaagaaacagccttgtcctgccagggccttcgccaggcccggcctgggaagtcagggctctctgacccaatggagcgaatcgttgcgagcatttatttaatagcattatcttgatgatgaataaatcacaccttcatgaaccatttttccatttgtagccccaagtcaagactcccaaaatgttaccagatgtcaggcatgaaatatacacccctggcaagctctgccatgcacaggagtcaygctgctttcaatccacgggagagccggacacgagcgttccaaggcaggagcagaactccatgttggccattataaagacaagattccttttcccccgctttttatagcctctctgggtaagatgtgtctggaaggaggtgtgggccaggaaagagcatatgtctgatgcctgggattccaggacagaaagtacagccgactccaagctcttgggatgggattggagggtctcaaaaccttgccagctttggagtcagagagaaaagagtcccaaccccagatttatcatttgctaacaaatgtgaccttgggcaaatcagctcacctctctggccctcaacagagataatcctgggacctatttcacagtcatggagaggattaaatgggaagaggaataaaaggagtttggagaagtgcccaggacatagtatgcactgagcaaattccgtagtaagaggagtattagtaatagctactattgattaggtggtgttgtgagttgaacagtgttcccccaaaattcatgtccacccagagacacagaatgtgaccatttgtggaaatagggtctttgcaaatgtaattagttaagatgaggtcatactagattagggtaggcccta

SEQ ID NO: 8842 - DNA, 670 bp, Homo sapiens
cattattagatttaattgtatctaatacttgaatacctaatatattactttctctctctctctcttttttttttttttttttgagatggagtttcattcttattccccaggctggagtgcaatggcgtggtctcggctcactgcaaactccgcctcccggcttcaagcgattctcctgcctcagcctcccgacttgctgggattacaggctctcgccactacacctggctaatttctgtatttttagtagagacggggtttcaccatgttggtcaggctggtctcgaactcctgrcttcaggtgatccacctgcctcgacctcccaaagtgctggcactataggcgtgagccaccgcacctggccccaatatattactttcaaggacaaaaactgcaattacttttgcaccaacctaatatttaaggtaggacaccgtgaagcccagtgagatctctgtggtggacaaacagcgtggctgctaggctgtgagccctcccgcctgtctgctctccatgctgtgcgccactcctgagagctgggtcagcagtcgcactgttggctttgctctgacctcgagtctatttcttttccatgtgtgtgtgcagccgctgcctggagtggaaatctccactgagggacagaccttctttcaaggctcacatcaggca

SEQ ID NO: 8843 - DNA, 670 bp, Homo sapiens
cattattagatttaattgtatctaatacttgaatacctaatatattactttctctctctctctcttttttttttttttttttgagatggagtttcattcttattccccaggctggagtgcaatggcgtggtctcggctcactgcaaactccgcctcccggcttcaagcgattctcctgcctcagcctcccgacttgctgggattacaggctctcgccactacacctggctaatttctgtatttttagtagagacggggtttcaccatgttggtcaggctggtctcgaactcctggcttcargtgatccacctgcctcgacctcccaaagtgctggcactataggcgtgagccaccgcacctggccccaatatattactttcaaggacaaaaactgcaattacttttgcaccaacctaatatttaaggtaggacaccgtgaagcccagtgagatctctgtggtggacaaacagcgtggctgctaggctgtgagccctcccgcctgtctgctctccatgctgtgcgccactcctgagagctgggtcagcagtcgcactgttggctttgctctgacctcgagtctatttcttttccatgtgtgtgtgcagccgctgcctggagtggaaatctccactgagggacagaccttctttcaaggctcacatcaggca

SEQ ID NO: 8844 - DNA, 2244 bp, Homo sapiens
ttacttatatctttataattaataataatgaaacatctggcccctcttctctcttgagtaacttgtgatattagctaataaaggaaagcaaacgtttaacacttgggggggggacattagcataaaagtgctgcctacaattgtgaggcatactttttgttccttttaccagtgccactggatccctaatgctgttcataaaaaatcacctcctggggtcgccagtttgctgtctccatttgcaaaccgcctcctgggaggttccatctgttacaatgggtattggcattccttggctaattttttttttttttctggttagcagaagcagacagaacacaaataaacaaacatattggagaactcagattgtacggcatagggaaaagaagtcaggaggactgggattctgaattccaccttaccacccactggctgggtgaccagcgataagttacagtgcccctgtgggcctcttggatttttgagatcctgttcagcaacagcatcttgtgactagagaaaggatttgcaatggcccggattcccctggaatctctttcttcccacctagggctggtccaggtgggaccagcatctgggcggaggctgggtacatgcccagacagccctgcatggtctgtgagccaagcatagcctgcctgctactagggtgtgattgttcttgtgatttggcaatacccggcaaacatgtcccatcggggctgagctaagaataggtccgatgcttgaggcccaggaaaatcagcagcccagcacacatgaggttgcccaacaaggcagaaccaagctgccaccaccactttaggggcatgatgaccaaagagatgaggtttggccaatttttccatatgtatcctcttttttcaccctcctctggtatcagggccagtgccttcccactctcttttctccctctcttctacttctggataaactgatttctggagaggtactgaacatgggcatggtatagtgaaaaaagccggtgtttcgacatagggggctcaggttgaaatcctggctgtactattttctagctgtttgacccatgagcatgagacccttttgaggctcagttgcctcagtgaaatagtggtgttaattatccttaattataaaaaattttatgagttactgaaagcagttagtatctagagcaaggttctcaaaatttatcatacatgataatcacttgaggagtgggggaagcttgttaaaatagagctaggccagatgcaatggctcatgcctgtaatccaagcctttgggaggctggggcaggaggattgcttgagcccaggagtttgctaccagcctgggaaacgtagtgagacccagtttctcaaaaaaaaaaaaaaaaaaaaaaagctgggttttgtggtgtgcacctgcacctatagtcccagctacttgagaggctgaggtcggaggatcgcttgaccccaggaagtagaggctgcagtgagccatgatcacaccactgcactccagccagggcagcagagcaagaccctgtctcaaataatagtaataataataataataataataataataataataataataataaaataaaataaatataaaaaaccagagggccccactgtactacacccccactttctgattgggtgggttggagagcatggtcttcctagcacgtctccaaaggatgctgatgatgctggtccagcaatcatggtgaggaggagcacgaggttagaggtccagtrtgtgagctctggggtctgaccatgagagttcaaccctgggccctgccccttctagcagagtgtctttgggcaagttcctgaacctttctgaaccttatttggaaaatgggagaataataattgttactttatagtgttgatctgaagattaagtgagttcattcatacaaaagcacttaaaacagcatctggcaaacagtaagctttgagtgaacattagcttttattagtatcgcagagtctgcacagggttcagtacgtgttctttttctgctctctccctgcagttattgccagtttcgcttgaatttctgtctctaggccacctctcccagggtctgtgctctgacccttgcccttctgcatggaagggcaggcatatattgggaggatctggggccaccaatgtgcacagactgaatgttaaagtttagagatcacagacgaacctgaaaccctcagacaggaatgggcttaccccagg

SEQ ID NO: 8845 - DNA, 713 bp, Homo sapiens
tacccctgggtttgtgatgctctagaacattttaaataatatataggggtgtcatccctagccacacaaaatgtagcttcagttcatttcaagktttaaaatgagtagatcacctaagaataggctcaggagacagaagaacaaaacacagccacaaaatcaaacaaaccaatgatgtcagcactgaaaatactggaaacctgctattttttttatgataaatggcacttctgcaatgagacctgggctggcaggcagttttcctaactccatcaaaagccaccatctagggaagaaacccttcaccaatggttagttatgggatcgtcaaaggcaggtcatatgccatccaaagaaagagctgagtgctgatcgactgtgttgtactgtactcactgtgcttagaaaagcaggcattcataatcttccatgtctctcatacatttagaaatccaaatatatctgcacatttatttttagacttaccgttttacacctaaaagcctcttaattaacctatcagtcacagactttaaactgttcatatgtctgcagtgcgtgcgctggttttcttccaaatgctaacctgcctccagcccctgggttcttgagaaactctgggaagccagtcttgagccaggaagataagggtcctggctccccaaggccttcgcctgaacgccatttggcacacactggcttgcagtttgggt

SEQ ID NO: 8846 - DNA, 713 bp, Homo sapiens
tacccctgggtttgtgatgctctagaacattttaaataatatataggggtgtcatccctagccacacaaaatgtagcttcagttcatttcaagttttaaaatgagtagatcacctaagrataggctcaggagacagaagaacaaaacacagccacaaaatcaaacaaaccaatgatgtcagcactgaaaatactggaaacctgctattttttttatgataaatggcacttctgcaatgagacctgggctggcaggcagttttcctaactccatcaaaagccaccatctagggaagaaacccttcaccaatggttagttatgggatcgtcaaaggcaggtcatatgccatccaaagaaagagctgagtgctgatcgactgtgttgtactgtactcactgtgcttagaaaagcaggcattcataatcttccatgtctctcatacatttagaaatccaaatatatctgcacatttatttttagacttaccgttttacacctaaaagcctcttaattaacctatcagtcacagactttaaactgttcatatgtctgcagtgcgtgcgctggttttcttccaaatgctaacctgcctccagcccctgggttcttgagaaactctgggaagccagtcttgagccaggaagataagggtcctggctccccaaggccttcgcctgaacgccatttggcacacactggcttgcagtttgggt

SEQ ID NO: 8847 - DNA, 713 bp, Homo sapiens
tacccctgggtttgtgatgctctagaacattttaaataatatataggggtgtcatccctagccacacaaaatgtagcttcagttcatttcaagttttaaaatgagtagatcacctaagaataggctcaggagacagaagaacaaaacacagccacaaaatcaaacaaaccaatgatgtcagcactgaaaatactggaaacctgctattttttttatgataaatggcacttctgcaatgagacctgggctggcaggcagttttcctaactccatcaaaagccaycatctagggaagaaacccttcaccaatggttagttatgggatcgtcaaaggcaggtcatatgccatccaaagaaagagctgagtgctgatcgactgtgttgtactgtactcactgtgcttagaaaagcaggcattcataatcttccatgtctctcatacatttagaaatccaaatatatctgcacatttatttttagacttaccgttttacacctaaaagcctcttaattaacctatcagtcacagactttaaactgttcatatgtctgcagtgcgtgcgctggttttcttccaaatgctaacctgcctccagcccctgggttcttgagaaactctgggaagccagtcttgagccaggaagataagggtcctggctccccaaggccttcgcctgaacgccatttggcacacactggcttgcagtttgggt

SEQ ID NO: 8848 - DNA, 713 bp, Homo sapiens
tacccctgggtttgtgatgctctagaacattttaaataatatataggggtgtcatccctagccacacaaaatgtagcttcagttcatttcaagttttaaaatgagtagatcacctaagaataggctcaggagacagaagaacaaaacacagccacaaaatcaaacaaaccaatgatgtcagcactgaaaatactggaaacctgctattttttttatgataaatggcacttctgcaatgagacctgggctggcaggcagttttcctaactccatcaaaagccaccatctagggaagaaacccttcaccaatggttagttatgggatcgtcaaaggcaggtcatatgccrtccaaagaaagagctgagtgctgatcgactgtgttgtactgtactcactgtgcttagaaaagcaggcattcataatcttccatgtctctcatacatttagaaatccaaatatatctgcacatttatttttagacttaccgttttacacctaaaagcctcttaattaacctatcagtcacagactttaaactgttcatatgtctgcagtgcgtgcgctggttttcttccaaatgctaacctgcctccagcccctgggttcttgagaaactctgggaagccagtcttgagccaggaagataagggtcctggctccccaaggccttcgcctgaacgccatttggcacacactggcttgcagtttgggt

SEQ ID NO: 8849 - DNA, 1421 bp, Homo sapiens
  misc_feature (1)...(1421): n = A,T,C or G
aggcaccacaaaaaccatttagttgttctgtggattaactatgtccaggtttcttccttacttgatgatccttgaagctgtcccttcatggatgctggtaattgccaatggttaattggtgagccttatagtcttttttggtgccctgcaataccaaaaaccttttctttgagacagtgtctaatgattccaaaatgtgaaaccttccttgtctttgaaaactcaaattatagttcattctatcaatggtcactcccacactaccagatggccccatttcctaagacagatgtatccagcacttcctactatcatcctcactgtatctgaacagtgatatttatttttttgtacagaggttaaacatgatttttttcccctaaaagtcagttaacttcagaattatattttctactctactgagcacaggcctcactaaaccatctgactggttgggcttttgaaccatgctgcagtccaggagttttgttttttactctttttgttttttcatctttcagtagtaattttgtgacatgatacatttgctggcaccttggctaactatgttcatgcattcctttacaccttctaaaactgtaaatgtaatccaacacacggctgtcggagggagttcaggaagtaggatactgcgaatcagaggtgtggtgggagagatgagtgtgcggagcagataactgtacttgattagctggatttaaatagtgtcagatgaatttgccaggtgaaaataaaaattgtcagttcagtttaatttcatggtgaatcaaacaaggaaattagattctgctactntgtcannnnnnnnnnnnnnnnnnnnnnnnnnnnnnnnnnnnnnnnnnnnnnnnnnnnnnnnnnnnnnnnnnnnnnnnnnnnnnnnnnnnnnnnnnnnnnnnnnnnaggtggaaggcaaaaaaaaaagtttttttttttagttttggagaaggcttttactttttttttttttttttaaaaaaaaaaaaaaagttttgcgttttggggggttgtgttaaaaaaaaaaagtttttcaaaattttttcccccccctttcaaaaagaaaagaaaaaaaatttacattttaaaatagagtgaaaaagaaaagggggctccaaaaattcagtagaactgaagcatgaaatgaccacatgggaagttgcctccttgatttgcagcaaaagttcttggcaagagatgggtctcaatagcacgaggaaaactttttccctgctgactttacttccaaagaaagagtttcagggttgactgactacctttggatagcagagacagcattgagagctgtaaacagaatgagaggcaaaaggtggtttgattctaggagrgggctgagactaagatattctcatctttgatttaatagatatatggacaaccttaaa

SEQ ID NO: 8850 - DNA, 814 bp, Homo sapiens
ccaagtgaatctgtgactttgtcttagagtaaccttacctactgaacccagttccatttttgtggagactttaaacccagcttagattttttaaaaaatgctcaaaaacactcagatagctcaaaacacacatttggagagcttcataatttgagagagaactcaccaatgattcccagaaaatgcaagaaaacagggaagacagtggtctcagtatgcacctacgcctggttgcttgatgttcccggggtggctggagttctgtcctgaatcctaccaatgataccaaatgtcttaaaaggaaagtcttagacaagtttaagtgttaagtgagtttaattgagcaaagaaaaacaaaacaaaacmaaacaaaaaaaaaaaacgattttacctgctgggcagtccttcaaaccagagtaagttcagagaatgccaaccaataacatgatctaatagcatttataggaaatggaagtttggtatagagacaacttaactggttacagcttaattggttaattggttacagagactcctgcaattaactaaaactcagctactgtagctaaactccatatcggtttggtctgttaggctttgtataggagcctagtccaaatcaagagcctttcacaaattttatttaacatcccaaatggtgacttgggtataattagtcttgtaaatatttctttcagcactacaatgaaatcaaaagattggttgtgattcctactttaggtagctttgttattcttaatctgctcacaaaaagctaagggtattttttttccttgaatcagctcctacgatt

SEQ ID NO: 8851 - DNA, 814 bp, Homo sapiens
ccaagtgaatctgtgactttgtcttagagtaaccttacctactgaacccagttccatttttgtggagactttaaacccagcttagattttttaaaaaatgctcaaaaacactcagatagctcaaaacacacatttggagagcttcataatttgagagagaactcaccaatgattcccagaaaatgcaagaaaacagggaagacagtggtctcagtatgcacctacgcctggttgcttgatgttcccggggtggctggagttctgtcctgaatcctaccaatgataccaaatgtcttaaaaggaaagtcttagacaagtttaagtgttaagtgagtttaattgagcaaagaaaaacaaaacaaaaccaaacaaaaaaaaaaaacgattttacctgctgggcagtccttcraaccagagtaagttcagagaatgccaaccaataacatgatctaatagcatttataggaaatggaagtttggtatagagacaacttaactggttacagcttaattggttaattggttacagagactcctgcaattaactaaaactcagctactgtagctaaactccatatcggtttggtctgttaggctttgtataggagcctagtccaaatcaagagcctttcacaaattttatttaacatcccaaatggtgacttgggtataattagtcttgtaaatatttctttcagcactacaatgaaatcaaaagattggttgtgattcctactttaggtagctttgttattcttaatctgctcacaaaaagctaagggtattttttttccttgaatcagctcctacgatt

SEQ ID NO: 8852 - DNA, 874 bp, Homo sapiens
gagcaatttctcatgtttagcaaattgttcttcaggtaatttgttctttaggttttttgtacaaaagtacaaaatagttatcacagcaaactttccagtgttttttattttgaagctatatattttggagggaacttggttttctttttatttttattttttgccatgtcaggcttgagcaggatagcaaatatataaattgagctctctaattataatctcaatatatgaattcttgctaattaaaatactttgcaccagcaaaaacaatttccacatatgtgtttaggtggtagttaagtaactccatataaaaataagtgcactttcccctcctttcttcagtgactagaaaacttccatacttttaaaataatcaaataataatttagagagcaacagctctcaactctttgctggtgcttatcacactgcctttcttcactccattcttagctctgctarttccttcttgtctgtaatgataataagggaatgtgggtgggtcagcacttctgtgtaggtcccctttccaaatttgtcttccaaaaagccaaccaaataaacaaccaaaaaatcgtgcaacaaaacacaaatagcattccaacagcttggcaagtgatgcattcacctgagattaagtggttttaggctgtcagtaacaaaattctgctttactgtcttattagaaaggcaacaaattcttcaaagaaaccaagaagtttacaaccttgacaaagtctctcattaccttcctcctcttatgtcttttctcttcacattatctgttgtgtatctactatagaaggctgcaaaacatacagcagaaatgatggcttgaaggcaattgatgtttgtaaataaatacacaaca

SEQ ID NO: 8853 - DNA, 874 bp, Homo sapiens
gagcaatttctcatgtttagcaaattgttcttcaggtaatttgttctttaggttttttgtacaaaagtacaaaatagttatcacagcaaactttccagtgttttttattttgaagctatatattttggagggaacttggttttctttttatttttattttttgccatgtcaggcttgagcaggatagcaaatatataaattgagctctctaattataatctcaatatatgaattcttgctaattaaaatactttgcaccagcaaaaacaatttccacatatgtgtttaggtggtagttaagtaactccatataaaaataagtgcactttcccctcctttcttcagtgactagaaaacttccatacttttaaaataatcaaataataatttagagagcaacagctctcaactctttgctggtgcttatcacactgcctttcttcactccattcttagctctgctaattccttcttgtctgtaatgataataagggaatgtgggtgggtcagcwcttctgtgtaggtcccctttccaaatttgtcttccaaaaagccaaccaaataaacaaccaaaaaatcgtgcaacaaaacacaaatagcattccaacagcttggcaagtgatgcattcacctgagattaagtggttttaggctgtcagtaacaaaattctgctttactgtcttattagaaaggcaacaaattcttcaaagaaaccaagaagtttacaaccttgacaaagtctctcattaccttcctcctcttatgtcttttctcttcacattatctgttgtgtatctactatagaaggctgcaaaacatacagcagaaatgatggcttgaaggcaattgatgtttgtaaataaatacacaaca

SEQ ID NO: 8854 - DNA, 874 bp, Homo sapiens
gagcaatttctcatgtttagcaaattgttcttcaggtaatttgttctttaggttttttgtacaaaagtacaaaatagttatcacagcaaactttccagtgttttttattttgaagctatatattttggagggaacttggttttctttttatttttattttttgccatgtcaggcttgagcaggatagcaaatatataaattgagctctctaattataatctcaatatatgaattcttgctaattaaaatactttgcaccagcaaaaacaatttccacatatgtgtttaggtggtagttaagtaactccatataaaaataagtgcactttcccctcctttcttcagtgactagaaaacttccatacttttaaaataatcaaataataatttagagagcaacagctctcaactctttgctggtgcttatcacactgcctttcttcactccattcttagctctgctaattccttcttgtctgtaatgataataagggaatgtgggtgggtcagcacttctgtgtaggtcccctttccaaatttgtcttccaaaaagccaaccarataaacaaccaaaaaatcgtgcaacaaaacacaaatagcattccaacagcttggcaagtgatgcattcacctgagattaagtggttttaggctgtcagtaacaaaattctgctttactgtcttattagaaaggcaacaaattcttcaaagaaaccaagaagtttacaaccttgacaaagtctctcattaccttcctcctcttatgtcttttctcttcacattatctgttgtgtatctactatagaaggctgcaaaacatacagcagaaatgatggcttgaaggcaattgatgtttgtaaataaatacacaaca

SEQ ID NO: 8855 - DNA, 874 bp, Homo sapiens
gagcaatttctcatgtttagcaaattgttcttcaggtaatttgttctttaggttttttgtacaaaagtacaaaatagttatcacagcaaactttccagtgttttttattttgaagctatatattttggagggaacttggttttctttttatttttattttttgccatgtcaggcttgagcaggatagcaaatatataaattgagctctctaattataatctcaatatatgaattcttgctaattaaaatactttgcaccagcaaaaacaatttccacatatgtgtttaggtggtagttaagtaactccatataaaaataagtgcactttcccctcctttcttcagtgactagaaaacttccatacttttaaaataatcaaataataatttagagagcaacagctctcaactctttgctggtgcttatcacactgcctttcttcactccattcttagctctgctaattccttcttgtctgtaatgataataagggaatgtgggtgggtcagcacttctgtgtaggtcccctttccaaatttgtcttccaaaaagccaaccaaataaacaaccaaaaaatygtgcaacaaaacacaaatagcattccaacagcttggcaagtgatgcattcacctgagattaagtggttttaggctgtcagtaacaaaattctgctttactgtcttattagaaaggcaacaaattcttcaaagaaaccaagaagtttacaaccttgacaaagtctctcattaccttcctcctcttatgtcttttctcttcacattatctgttgtgtatctactatagaaggctgcaaaacatacagcagaaatgatggcttgaaggcaattgatgtttgtaaataaatacacaaca

SEQ ID NO: 8856 - DNA, 874 bp, Homo sapiens
gagcaatttctcatgtttagcaaattgttcttcaggtaatttgttctttaggttttttgtacaaaagtacaaaatagttatcacagcaaactttccagtgttttttattttgaagctatatattttggagggaacttggttttctttttatttttattttttgccatgtcaggcttgagcaggatagcaaatatataaattgagctctctaattataatctcaatatatgaattcttgctaattaaaatactttgcaccagcaaaaacaatttccacatatgtgtttaggtggtagttaagtaactccatataaaaataagtgcactttcccctcctttcttcagtgactagaaaacttccatacttttaaaataatcaaataataatttagagagcaacagctctcaactctttgctggtgcttatcacactgcctttcttcactccattcttagctctgctaattccttcttgtctgtaatgataataagggaatgtgggtgggtcagcacttctgtgtaggtcccctttccaaatttgtcttccaaaaagccaaccaaataaacaaccaaaaaatcgtgcaacaaaacacaaatagcattccaacagcttggsaagtgatgcattcacctgagattaagtggttttaggctgtcagtaacaaaattctgctttactgtcttattagaaaggcaacaaattcttcaaagaaaccaagaagtttacaaccttgacaaagtctctcattaccttcctcctcttatgtcttttctcttcacattatctgttgtgtatctactatagaaggctgcaaaacatacagcagaaatgatggcttgaaggcaattgatgtttgtaaataaatacacaaca

SEQ ID NO: 8857 - DNA, 874 bp, Homo sapiens
gagcaatttctcatgtttagcaaattgttcttcaggtaatttgttctttaggttttttgtacaaaagtacaaaatagttatcacagcaaactttccagtgttttttattttgaagctatatattttggagggaacttggttttctttttatttttattttttgccatgtcaggcttgagcaggatagcaaatatataaattgagctctctaattataatctcaatatatgaattcttgctaattaaaatactttgcaccagcaaaaacaatttccacatatgtgtttaggtggtagttaagtaactccatataaaaataagtgcactttcccctcctttcttcagtgactagaaaacttccatacttttaaaataatcaaataataatttagagagcaacagctctcaactctttgctggtgcttatcacactgcctttcttcactccattcttagctctgctaattccttcttgtctgtaatgataataagggaatgtgggtgggtcagcacttctgtgtaggtcccctttccaaatttgtcttccaaaaagccaaccaaataaacaaccaaaaaatcgtgcaacaaaacacaaatagcattccaacagcttggcaagtgatgcattcacctgagattaagtggttttaggctgtcagtaacaaaattctgctttactgtcttattagaaaggcaacaaattcttcaaagaaaccaagaagtttacaaccttgacaaagtctctcattaccttcctcctcttatgtcttttctctycacattatctgttgtgtatctactatagaaggctgcaaaacatacagcagaaatgatggcttgaaggcaattgatgtttgtaaataaatacacaaca

SEQ ID NO: 8858 - DNA, 752 bp, Homo sapiens
aagcacagattctcagaccacctcatgcctattggtttagaatctctaagggtgtgctcaggagtcagtattttgttgttgttttagagacagtgtctttctctgtcacccaggctagagtgcagtgcataatcatggttcactgcagccttgaacttctgggctgaagtgatctttctgcctccgccttccaagtagctaggactacagacactggctaccatgccaagctaatgtgtttttagtttttgtagagatgaaatctcactatgtttctcaggctggtctgaaactggcctcaggcgatcctcctgcctgggcctcccaaagcgctgggactacaggcgagatccactgcacctggctaggagtyagcattgttatcaatctcccaggtgataccgtcagctgtaaggatgtgcttttgggactctccaatagcgcaggttccacatggacagggaggatgctctgctctcctgagtgtcttagtagcgtggtagaaatcacccctcaaaggggacatctttgagtgaaagcgtcctcagctgccatgctctgccctgtcaggcgtgagagcgctgtgaagcaggcattgggaatttgcttctcaggggctagggaagtggcaccttgaaggcctgcaacacccgattgggccaaaggaggagtagaaagaatgggagggcctgtatagcaaagccccacagacagaaatgtgtgtcctcacagttctagaggctggaagtcca

SEQ ID NO: 8859 - DNA, 743 bp, Homo sapiens
tcccagattcacacactcacactctgggacacagaaaagagcaaatgtgcccaaagaatcaagaaggaatgaattttctcactgctaacctagtccagttagtcctaattcttaagataaaatgttaatttctctttaatagttttaggatcaagtaattctcacagacataaaaactggaaagaaccttggatttactgcctagttggccattgtttctcctttaagacctcagattcaagtttgaggggatcatggcggacgggaggcaggactagattgcagctccaggaagagcagcatctggcggcttgcgtcatgaattttagctccaggttgactacaagaacaaaccagcaaacccaagagaacccacagaccctctgaaagaagcagamtgctcctgcaggacctgggagataccccaagtactgtgagtgccccagctgcagaagtgggaaagggagacctcctctcctgaacacacacccctactggagaagctgaaggtatgtttgcaggagaaacttccaactttacctggatctgagtcaagttagagagctgagtgaaacacaggggtacaggaagcagcagaaaggccctgggagctcactggatctccaagcagcccattcctgcctggcaccacaggaatccaccgggagggtggccagaggaggggtggggggtgaaactccacagggagaaggaattctgtagccaaactttgtaacaatttg

SEQ ID NO: 8860 - DNA, 770 bp, Homo sapiens
aattcccaatttatactaaatttctcccaatagagatttatttcaatgatctagcaaatatccttggtcatgctggagaatgatatcagaaaatcccatcctaaattgatttcattagattgcttttctgtcactcataggtacagcagaaacagttataaaatggagggaggtcctgagatgtttgttcagagcctactggttttacggactctactctttgatacacggcaccacctgtttttttgtttgtttgtctttgttttttgtttttgtttttttgagacgcagtcttgctgtgtcgcccaggctggagtgcagtggcgtaatctcagctcactgcaagctccgcctcccaggtttatgccattcttctgcctcagcctcctcagtagctgggattacaggcgcctgccaccgcacctggctaatttttttgtattttttagtacagacagggtttcaccacgttagccaggatggtctcgatctcctgacctcgtgatccacccgccccrgcctcccaaagtgctgggattacaggcaccatctgtttctatatacagtaaaatgtcatgtatttacactctttgtatttggaattcttgtccacttcataaggtgttgcttctggcctttttataatgaaagactcaaaaagcaaactataattaaagccacaaagagcatgtttattctgcttcatcagaattggttttagaattctagagtccaataagagaaggcttttcaggcacaaggcatatcag

SEQ ID NO: 8861 - DNA, 770 bp, Homo sapiens
aattcccaatttatactaaatttctcccaatagagatttatttcaatgatctagcaaatatccttggtcatgctggagaatgatatcagaaaatcccatcctaaattgatttcattagattgcttttctgtcactcataggtacagcagaaacagttataaaatggagggaggtcctgagatgtttgttcagagcctactggttttacggactctactctttgatacacggcaccacctgtttttttgtttgtttgtctttgttttttgtttttgtttttttgagacgcagtcttgctgtgtcgcccaggctggagtgcagtggcgtaatctcagctcactgcaagctccgcctcccaggtttatgccattcttctgcctcagcctcctcagtagctgggattacaggcgcctgccaccgcacctggctaatttttttgtattttttagtacagacagggtttcaccacgttagccaggatggtctcgatctcctgacctcgtgatccacccgccccggcctcccaaagtgctgggattacaggcaccatctgtttctatatacagtaaaatgtcatgtatttacactctttgtatttggaattcttgtccacttcataaggtgttgcttctggcctttttataatgaaagactcaaaaagcaaactataattaaagccacaaagagcatgtttattctgcttcatcagaattggttttagaattctagagtccaataagagaaggcttttcaggcacaaggcayatcag

SEQ ID NO: 8862 - DNA, 671 bp, Homo sapiens
ctatcttatgtcatcaaaacaacattactaaaaaatagatactgttatctccattctgctgaagataaactgatactcagacagtctaagttatgagcccaaggtggagctgtgatccaaacttaagttggctaaattatgagcattaaattgatgttaatatttaattataatacacttacaaggtcctatcatgaactttattttataaatgagaaatttagggaacagagcttagtaagtttccaataagaggcaaagttgggttcaaatctacaacttttctcatcaataccatactgcatgtttcagttaccactttagcaagggacagttaacaatctaatgagtataagaatcctttctataggatgaactcctcaaaagagacattgatagctaggggttagaatgagagactagaagagaggaaaggggtctgggggataagaaggcttcaaagacaacttagtcctgtcccagtattggctgaaggatagtgatcatagagaggtaatttttattctctatgaaaatccatggagacatgtgaggcccaaagagagatgaaagtatctgggtgaggactgttcattgcaggaccttcaatgtggragactcgcctacaataatagagaagagttcaggtaggctttgcatgagctgtggta

SEQ ID NO: 8863 - DNA, 619 bp, Homo sapiens
ttgggagattgacaacaggaggatactcacatctgaatactccaggattccaagggtgtcttagtctatttggctactataacaagataccttagatgtgtaaatcactgagcgatttgtatgtaatagaaatatgtttctcacagtctggaggctaagtctaatataaagtcaccatagattcagcatctggtaaggcagattcagggtctcttcasctcaccttcagctccatagatggcatcttattgtgtcatcatcacatggcagagggggaaacactgcactcagtggtgaaaggggagaacagtatgtcctcgcatgatggaaggtgggacacagtgcccttacatggcggaaggtgggaacaccatgtcctcacattatggaagcgggcaacactgtgtcctcacatggtagaaggggcaataccatttcctcacacaatagaaggcaggaacactgtgtcctcacatggtggacggggcgataccatgtcctccacatggtggaaggcaggaacaccatgtcctcatatggtagaaggagaaacaccatgtcctcgactgatagaagcagggaatgccgagtcctcacatggtggtggcaaaaacacctt

SEQ ID NO: 8864 - DNA, 634 bp, Homo sapiens
tttgccccatctccgtggtctgggtcttggccagcctgcccagaccacgcagttgggtggtgtcagagctttgtccgttggtgccatccaatcactccacgcagccttctcaattttttaatacttatcatttaatacactttattttagacgcagttttagtgtatacacgaacaaattggcacccggaaagttacagagctttcaccaccatctacttctaatgctggtgaccaataccaaccctagtggatcttataagaattaaaagaaacaatattgcaaagtgcctgggacaaaaactggttcaaaacagcctcaaaagccctgtcttcttcttttyttatttatttgtttgttttgtttgttggttttagttttttttttgtttttttttgttttttttttgctgccgctggtactgtgggaaggtaggctgctgatcacatcttacgctgccccaggtctaatggacactgatacgcagtcatggccagtcacctgggaagccagtgagaagatttgcacaccctcagctttctgtgcaccctaaatgggaagagggtagaaatgaagccctactgtgaatactctttgtcttctctcacccatccaccatcctaagcaatactta

SEQ ID NO: 8865 - DNA, 639 bp, Homo sapiens
  misc_feature (1)...(639): n = A,T,C or G
tctaytaaaaannnnnnnnnnnnnnnnnnnnnnnnnnnnnnnnnnnnnnnnnnnnnnnnnnnnnnnnnnnnnnnnnnnnnnnnnnnnnnnnnnnnnnnnnnnnnnnnnnnngggtgactgaatcccagaccaaggttctttcaagtgttaagcatctaactcaagtgcccagaggaggcctaagatcccccagatattaacagaaaggccaggggtctttccactaagccgcactgcctatcatggagcacactaatgctttcccagcaaggggaggagggtgatgagaaaatccaccttccccagcttccccattcctagcggatggcctttgctaagggaaggtctgaggtagtggtgctagagcattcctcccttcctccctctgctcagaatctcaccccacatttgggccctgtgcacccaatatacccagggtgtggaagatgttgttgaagccatgcagactcaccagcctcgccatcatgctcctggcacagatgcctttacacagacagctcagaaacgagtctcaaaacaacaacttggacaccagagagtttcaaaatgctggaagagtcagtccctgaggttttgggcccctgaaaggctttccagctcatattctgccagctgaga

SEQ ID NO: 8866 - DNA, 639 bp, Homo sapiens
  misc_feature (1)...(639): n = A,T,C or G
tctactaawaannnnnnnnnnnnnnnnnnnnnnnnnnnnnnnnnnnnnnnnnnnnnnnnnnnnnnnnnnnnnnnnnnnnnnnnnnnnnnnnnnnnnnnnnnnnnnnnnnnngggtgactgaatcccagaccaaggttctttcaagtgttaagcatctaactcaagtgcccagaggaggcctaagatcccccagatattaacagaaaggccaggggtctttccactaagccgcactgcctatcatggagcacactaatgctttcccagcaaggggaggagggtgatgagaaaatccaccttccccagcttccccattcctagcggatggcctttgctaagggaaggtctgaggtagtggtgctagagcattcctcccttcctccctctgctcagaatctcaccccacatttgggccctgtgcacccaatatacccagggtgtggaagatgttgttgaagccatgcagactcaccagcctcgccatcatgctcctggcacagatgcctttacacagacagctcagaaacgagtctcaaaacaacaacttggacaccagagagtttcaaaatgctggaagagtcagtccctgaggttttgggcccctgaaaggctttccagctcatattctgccagctgaga

SEQ ID NO: 8867 - DNA, 639 bp, Homo sapiens
  misc_feature (1)...(639): n = A,T,C or G
tctactaaaarnnnnnnnnnnnnnnnnnnnnnnnnnnnnnnnnnnnnnnnnnnnnnnnnnnnnnnnnnnnnnnnnnnnnnnnnnnnnnnnnnnnnnnnnnnnnnnnnnnnngggtgactgaatcccagaccaaggttctttcaagtgttaagcatctaactcaagtgcccagaggaggcctaagatcccccagatattaacagaaaggccaggggtctttccactaagccgcactgcctatcatggagcacactaatgctttcccagcaaggggaggagggtgatgagaaaatccaccttccccagcttccccattcctagcggatggcctttgctaagggaaggtctgaggtagtggtgctagagcattcctcccttcctccctctgctcagaatctcaccccacatttgggccctgtgcacccaatatacccagggtgtggaagatgttgttgaagccatgcagactcaccagcctcgccatcatgctcctggcacagatgcctttacacagacagctcagaaacgagtctcaaaacaacaacttggacaccagagagtttcaaaatgctggaagagtcagtccctgaggttttgggcccctgaaaggctttccagctcatattctgccagctgaga

SEQ ID NO: 8868 - DNA, 485 bp, Homo sapiens
catcactcctttccatttcttttcttgaaggcatctcctggcctcctggagactttgccccacccgtctcctctggactggccactctggtcactctgacagcctcccttcagctgtgacgctgccacttcttctttcagtcatcacgggaatgccccctgtgggttttccacatttgaatcccagagattcggcagccggcccctccccagaagatcgcggggacctactgcccctgcagaatcccttgggcctgccccaaagccggcaagcaaaccctcaccccaaagcgtctggcattccctggtcacctcaggacagcccagcctgccatcctccccgatatgcaggccgtgccgccgtgtgactcgcaggattcaggagtcagggggccagagtcggcagccaggctttccctggaggctgtgcccagagctccycagagtgtgaaatgtggtgacagcggtgcccgctggctgcttgca

SEQ ID NO: 8869 - DNA, 665 bp, Homo sapiens
agagagagagagmgagagagagagagagagagacagacagacagagagagagatctatatatagccataagtgtctttgtcaatggtgatctgttgggaaatatgccaccatctgtttgatctgcagggtcagaagtttattttgatttctgtgtcatattgttcaagaacaactgcaaaatgttctacaagctgttaaaacacttgtagttcaagtaaaagggatacttcccattcatatttcatcctttctctagttgcgtgatggaattatggcctaatttatttttattggaaatgtttcaattatggcttttagaaaatgttctcatgcttttggacctttaaaaaaacttttgggtttattgtagaaaaaagtatttctaggttagttcaatcaccttcagccatccaagatttcacatctgactttctgatcaatatgtgtacaagttgatacaggtcaggcaactctgggtcatatggataaaaaaaaattaagttcttatacaagtaatttatggtttcctctgagtttagggaaaaattttaaatttatatatagctttttatttagcatgggtaaggcttaaattctacagctgcctataaacttagctcatgggagagatggatctttagaggcaactggtattcttgggtct

SEQ ID NO: 8870 - DNA, 787 bp, Homo sapiens
cttgaggccaggagttcgagaccagcctggccaacatggtgaaacccygtctctactaaaaacacaaaaattcgccgggcgtggtggcagacacccgtagtcccagctactcgggagcctgcggcaggagaatcacttgaacccaggaggtggaggttggaggttgcagtgaactgagatcatgccactgcactccagcctgggtgacagagcaagactctgtctcaaaaaaaataaaataaaataaaataaataaataaataaaataaaaataaaaaaaagcttttgcctctcaaagctagagattacacaatttaaatggtgacaggaagaagcaaaatagacattaaaagtacacaaaagaaagagataatcaattgagcaaaagtgataggaaaggagatccatagcagagtcatgggaatcagctttagaccaccagtgttaccttttccattttgaagaatagaaaaaagaattatgtgaaaatagaagtaagtttataggtttagtggtaagtatttagagagttcccatctaatggatgttttctaatagaaagagatgtggtacagtcagtgttttgagaaaaatgaattttgaagtagctgtgtaataaatgaatgatgtacataaaagaattgccaagttgaaatgttatgtacttatagtagtaccattctgtgtaatttttctttagcagcacttagcaccccaggtgtaaacatagaagatggaaactagactgatccagaattacattctactttctactatatgtacatat

SEQ ID NO: 8871 - DNA, 578 bp, Homo sapiens
atcaactaaacttgtgaaatattaccaagtgcaaaaatcttacaaattgtcatatcacatgccaattcatttatttgtgtgtttgttgctcactcatttttttaaaatttgatcaagaartaatttaaaacactatttgaagatacacataatagagcaagaaaattaggttaaaactggtcaaatggaacaaatgaaggatagagaaaataggtcagaaagtagggtcaatttacatttaacttgcaagtaggcatgtattctttaaatgataaatctaatagttgtagagatcaagtatttgcttacatggggcataatttgcagctatcaaaaattaaaatataaaagttactagaatttgctgcaccatttctaaaagcatatatttaaagagcttcttagagtagtatgaagaaagggaaaaggttgttctttttattacctgtaactcctaccccagtctaacttggggtcagaaagtctccttggaaataatagaaaagggccaagaatattgactatctcctataccttaattctaaaatgttatcatatccataaaaacatctgtgttt

SEQ ID NO: 8872 - DNA, 628 bp, Homo sapiens
aataggtgaaaaatatgaaattatcttttaaaagattagataattttaaggttggcatttgctttttcaagatttacatggctgacttaagatttgagatgttttaaaacaatggtatttaaatacatttatgtgaaaatgggtaacaaattgtgttgtataatttccaagaatatatgtgattaacatccgcatgtatgtatttaagccagttctttacatattgaatcataagcttttccctttttcacattttccttctgatcctcatacagataaagacattgtttttattatctgtcattctgtgacttccttttttttaaacgacattgactcaacatttttcatgttgcttcacaatctcgtaattaacattttaaattgctttttaaataccttgaggtggcaaaaaattttgatagcagaaaagaaaagaaaaaattatggccaggtgcagtggttcacgcctgtaatcccaacacttygggaggccggggcaagatgatcacctgagcctaggagtgggcaacaaagtgagaccccatctctacaaaaaaattttaaaattaaccatgtttggtgacatgcacctgtgttcccagctacatgggaggctgaggcagga

SEQ ID NO: 8873 - DNA, 628 bp, Homo sapiens
aataggtgaaaaatatgaaattatcttttaaaagattagataattttaaggttggcatttgctttttcaagatttacatggctgacttaagatttgagatgttttaaaacaatggtatttaaatacatttatgtgaaaatgggtaacaaattgtgttgtataatttccaagaatatatgtgattaacatccgcatgtatgtatttaagccagttctttacatattgaatcataagcttttccctttttcacattttccttctgatcctcatacagataaagacattgtttttattatctgtcattctgtgacttccttttttttaaacgacattgactcaacatttttcatgttgcttcacaatctcgtaattaacattttaaattgctttttaaataccttgaggtggcaaaaaattttgatagcagaaaagaaaagaaaaaattatggccaggtgcagtggttcacgcctgtaatcccaacacttcgggaggccggggcaagatgatcacctgagcctaggagtgggcaacaaagtgagaccccatctctacaaaaaaattttaaaattaaccatgtttggtgacatgcacctgtgttcccasctacatgggaggctgaggcagga

SEQ ID NO: 8874 - DNA, 769 bp, Homo sapiens
cgtaacaaatcaatgcaagaacagtgaccaggacctcagaagcaatgtatcctttattagcattgcttttgtttttgttttgagatggagtctcgctctgttgcccaggctggagtgcagtggtacaatctcggctcactgcaacctccacctcccaggttcaagtgattctccgaccttagcctccagagtagctgggattacaggcacgagccactatgcctggctaattttttatatttctagtagagactgggtttcaccatgttggctaggctggtcttsaactcctgagctcaagtaattcacctgcctcggcctctcaaagtgctgggattacaggcatgagccacagtgcctgcctctgatattagtattattaccccaattccttacctacccccaactcccatctgggtctatataagccagaatttaggaaatctagagaaatcctaggagagagggtggtggctttcctctctcactcctctagccagctatgggtggggggcgggggagatgctagggcttcctctcctggcggtgggggggtcgggggagtgcctgtagaaaggggagcccacattgcattctctggctggatgtttgcctcctcagtggtcaggctaatcttcccctaggcccacttgagcagtgacaggtgggatgaggacagcaggggtctcttacatggcccctgcttggtgaggccaggatgagtgagtgtgctgtggccaagtgggctctgggagcatgagagccactt

SEQ ID NO: 8875 - DNA, 797 bp, Homo sapiens
tgcgtccccacacccagacctgcctgcaagcctccggcatggatagactacaggctggatgccttaagaaccgacagcagtgagggagaagggaaagagctttgtagttgcagagacctgagttgtaaccttggtcctgtgccgcctccctgtgtgaccttgggtaagtcacttcacctctctgagcctcggtttctacatctgcataacgacagcatatttaccattgatgtgacctacttcccacgcagggatgtggtcaggatggaaggaaatactgggcatgataggcctggataaccggtaaagaaccatgcaaaggcgaagacaaggagtgcagagagagctcatggttcctccaggctggttggcgatcaggctcatctcatctgcaccaactgctctacytgttagatggagaccttgcatcatgaatttctcgaaatgctcctggaacttatttatatgcctcaaaatcctctaaactcatttatagtaacccatagttttaattttataaataaacgtatttattaaatcttagattacgttattcctctgcctcaaattccttcagggcctttccattgccaggattagattttgccaaattaaaatataggacactcagttcaacttgaatttcagatgaacaacatatacttgtttaattaaaaacttaaatgaacatttagcagagtataactgagcaaagaacatagtcccctggaggcagaataggttcagagcaactctggggggtgcaacatcgtcagaataatatttatggacagaaa

SEQ ID NO: 8876 - DNA, 654 bp, Homo sapiens
aaaaaggggcatatattgcatttattggcatgccctttattaccattaacctacaatggttttccccacgtygaaattttacctttcatcacaactgatatttttgaagttttgaggcctgttactttttagaatatccaacaatttggatttgtctgcttgtttcctttttattagattcaggttaaatattttggcaaaataattccagaaaggtgctattgactttactaacttttaagattctcttatttgaatgtgtgtgttttaacatacctctggtttttctaatcgatctttatatttcctggtcctaatgcttaatacatttatgttttcatttcattttgcatttccttgttaaagccattcacatttcatttaacagaagaggtattaatcaatcaactggctctgacatttcatgttttatattttccaaaaaaaatcaactaacaataaaagtataccaagaatattaaaccctttcactccgagtattttttaaaccatgttaacataactctgctgggtctatggactaatatggcagtagtcagtggcattgctactcttctcaataataatgtctgcacagtgatttgcgatttttaagacattttcatatacattatgtcatttattaagacctct

SEQ ID NO: 8877 - DNA, 654 bp, Homo sapiens
aaaaaggggcatatattgcatttattggcatgccctttattaccattaacctacaatggttttccccacgtcgaaattttacctttcatcacaactgatatttttgaagttttgaggcctgttactttttagaatatccaacaatttggatttgtctgcttgtttcctttttattagattcaggttaaatattttggcaaaataattccagaaaggtgctattgactttactaacttttaagattctcttatttgaatgtgtgtgttttaacatacctctggtttttctaatcgatctttatatttcctggtcctaatgcttaatacatttatgtwttcatttcattttgcatttccttgttaaagccattcacatttcatttaacagaagaggtattaatcaatcaactggctctgacatttcatgttttatattttccaaaaaaaatcaactaacaataaaagtataccaagaatattaaaccctttcactccgagtattttttaaaccatgttaacataactctgctgggtctatggactaatatggcagtagtcagtggcattgctactcttctcaataataatgtctgcacagtgatttgcgatttttaagacattttcatatacattatgtcatttattaagacctct

SEQ ID NO: 8878 - DNA, 850 bp, Homo sapiens
ctccccttagctctgaattagtgcaaggatttgagggaaatttgtcttcaggtggaccttccaatactggcattaggatattaccatagccattctgctttaaagttttgaaacttacagaaatgtagcttgggaaacatacgctcctgtgaatgcctgatttttcatatgctctcatttttccctcctttttggtcttgactctcaatattttccaaattgtaaggtacaagtttttctgtgtatttaatagcattcttataaagaaatagtctttcatttctgaggaaaatgtttcctaagagtttttgaaaataaatataaaatcatagtgattttagtctcatttaagtttccaagtgctgtaaagaaaactgtaaaactcgcaatgaagaaataagatattcagatcttctgactgtagtaatttctcacctttgacttactcaaaaagcttcctgtaattttaagtttttgccaagtacatgtctttcaaccrtaaactttcacacctacaatataatccagatggagaatttatgcttgttgaatactgaggcagatctataccatgttacacagtgaaggcattcaagacagcatttagtttgatatgaagctgaaacgtttaacagaattcttttccccccacatgctttcatcctgaagcaaaactagccaggatcagagctacttaatttgctatctggggaatttatatcatcccagtttttttttttttttttcaatcctgtttagaagtgatgctttcttcaacagggaccattatagaaaaaaattgcagaagtttacaagctatgactgtaaaaggatttataaattagatgga

SEQ ID NO: 8879 - DNA, 271 bp, Homo sapiens
  misc_feature (1)...(271): n = A,T,C or G
accttcatgttctttgattcacaaaagaccaggaaccttccgtatttggggagggaggaagtaagagagagaggagtccaacttatttatgttggacagtaaccagccaaagtttttatacagagagagagatgagtctcatatntgcccagctgattcccgactcnnnnnnnnnnnnnnnnnnnnnnnnnnnnnnnnnnnnnnnnnnnnnnnnnnnnnnnnnnnnnnnnnnnnnnnnnnnnnnnnnnnnnnnnnnnnnnnnnnnnwgtgt

SEQ ID NO: 8880 - DNA, 740 bp, Homo sapiens
atgcctgtaatcccagctactggagaggctaaggcaggagaatcgcttgaacccaggaggcagaggttgcagtgagctgagatcgatccactgcgctccagtctgggtgacagagcaagactctgtctcaaaaaaataaaaaattaaaaaaaatttatctttctgcatggtgagtaaaacacagtgtaatgaacattgaacatagtctctgcctggtggggaggaaggctggctcctaccaaggatgttttgtatatgccatttgtctctttatttccagcaaagcacactgggaaagtcactaaacagccacacctgtagctcactcttaccaytccttacccatgacagatgtttcacctccattttaaaagtgggaaaattaagattcagagagcaacacagagtcaaaggcaggcctacacatgtctgaggaaccgcaagtcctaagaagaaaaagaaccctagccttctccatgaatggccattgtcattttcagagatctttctgtgtgacagacttgatgtcaacttgatacttgaattccatttatccagtatttatggtttgccagctctgtctaaaacctgttggcaactacagttatacaactgtacataggtgaaacatacatagactgatatagtttagatagttgtccctgccctaatctcatgttagattgtaatctccgattctagaggtggggcctggtgggagctgttcagatcacagggat

SEQ ID NO: 8881 - DNA, 809 bp, Homo sapiens
  misc_feature (1)...(809): n = A,T,C or G
ctttgacggaggacaacagaaggaggctcacttctgccggcctctctgaggagggtccagggcagcggagacctgaagggtgagaaggagtcagccccggggagcccaggggaggggtgaggcttcagccggagggagcagcctatgcaaggccggtgtggtgggcaccaggtgggccaggaggagagggcatgagaggacatgggcgagatgggcagggcccaatccacagccctggccaggagccgttgaaggctccatacagggccctggctggatcagatttgttgatggccgtgggtcaggaaatgtggcctgaggggacacggtgaggctgctaagagggccagggcaagcagttcaggtgggagatgacggtggcttcaactaggtggtggtggcagaagtgaaggaagaggggacagtcggggagacgccgggggtcagtccacacactcagcaccggctcctgctaccacacccgctccgtcagatttgctcctggctcgaaccatctgagaactcaggtgaggctggctgcarggaagccagaccctcaggcccacactgccttggaggctgaggctgactccagaggcagaggttgggggtgccaatgccaggccccacccgcagaggatatgccctaagatgcatcggcaaaacgggaaacagcaagtggtcaattgtgccaccctgccggctgtnnnnnnnnnnnnnnnnnnnnnnnnnnnnnnnnnnnnnnnnnnnnnnnnnnnnnnnnnnnnnnnnnnnnnnnnnnnnnnnnnnnnnnnnnnnnnnnnnnnnac

SEQ ID NO: 8882 - DNA, 668 bp, Homo sapiens
gcacttccggaggaaaatggcgaagtgggcggggcggcgcatgcgcagagagaaaagctggttcccaaggtccttgatggtaacatcattggaaggtgacactacatttcctatgaggctctgcggtcccccgttaggaacgcacgccggacattctgttttgcccagcagtgagtccagttacccggagacccggacttaatggatcaggactggtccctacccacgtgacacagatgtggcattctggttcgttattaaatcctggtttcacagcctgggacattgtgaaaataatggagaaattccaatagaaaacaattggtctatgctgttaatgagtaactttttttttttttgagatggagtctcgctctgtcacccaggctggagtgcaatggtgcgaccttggctcactgcaaactctgcctcccaggttcaagagattctcctgcctcagcctcctgagtatctgggattacaggcgggcgccaccacamtcgcctaatttttgtatttttagtagaaacggggtttcaccatgttggtcaggctggtctctaactcctaacctcgtgatctgccctcctaggcctcccaaagtgctgggattacaggcgtgagccaccgcgcccagccctcaagtctattttttatagatgcattcg

SEQ ID NO: 8883 - DNA, 603 bp, Homo sapiens
tataggcggcaaaactgaaagccactgtaacacatgcccactggagcttcggctgtaaacattcagccctagacactgcctggagttggagccccacagcctgyccctctgtatgctcccctaaaggtttgagcagtggggcgctgaagaagtgagccacacccccatcgcatgccctgcaagggggacaagggaattttcccatttcagaagtagtaatagaattaaatgaaatctacagagaggtcctaaattttattttagccctagcttcagtattctactacacccaagtctttttactagaaatgctaacaactggtaaaaaaaaaaaacaaaaaacaaaaaacaaaaacaacaacaacaacaaaaaactaattgaatcttttttgtaattctcctcaattctcctcaaactctggttaagcttgataagcagtgggaatagtctacatttgtgtaaagataatatgggactttgctagtacacgcaatagataatcctctaaaaagggttgtatacaatagacggggactagcagaaaataataaatagttttaaagattgataggttgatagatgaaggtggattgattagtaaa

SEQ ID NO: 8884 - DNA, 802 bp, Homo sapiens
tcccagcccctccagtggaaacactggcagtgcctccctctcacctgttacccwgacacattcactcagttaccaaggcctatggcttcctcctacatatttctcaaatttttccccttgtagctattcccaccattgcaccttaattcagggcctcttcacttctttcctggattatacgaattctcaattcagctttcagaatattatttttcaaagcataaaagttatttcattatttccttcaaaaaatcacttcataatatctgatgtattagggataaatttgaagcacattaaatatttaatgtctaggactctgcctatttttccagcccttcatctcctgctgtatattaagggatacctactgtaagatattaataaaccatattaaaaggattctgatcaactgcaatctagtcttgttcatcttcacaaaaatactcaccggaatttgatttatatatactttatgttagcatttatcaaaattcccactgaatcttgtatgttacattatcatagtctttaccacattgtgctataataaacaatttacttggttattttccctattagaaaataaattccctgtagacattatctattttgctgtatgctcccagagcctagtggtgtgctcaataatttgttgttaaataaatgtataaatatattaaatgctgtagtgaacaaactgcagttattgcctttaaggaatcatattggaggaaacacaggtttaataattaattataataccaacttagatatctgctactaaactggtactaacaaa

SEQ ID NO: 8885 - DNA, 813 bp, Homo sapiens
ggataatcacatcagcctttgctttcaatctaagaaagaagcttttacaagttcacataataatcttcccaagtctagtaatctgatgagaaagctttgtcgtytaaggaaaagattttgtggcagagcctattaacaatgtgaagggctgctttataagatagcaaattccctatcactggagatgtccaaccaaaaactgaataacttacttttagggaattttttaaaaggtgcccccatactgggtggaaagataactcattttatataaggtcaattcccagcatgaaattgactattctttgtttctaatagttaccaataaaacgcaccttctcagatcctaatgatagaaaagagatttgatagaactattgtattttttaaagtctgtatcttccaggcttcatatcagacagtatataaaagacatgtttcttctatctgttcattaaatttctcaaattttattgactttttcttccacttttaacactatttattaaaattcattttaattctttttacagtttgtatacgtatgtgcatgagtgtgtatgcatgtgtacacacgagggacagagagacagaaagtatgctctgtggagttgaatgtcaagagggatttatttttgttctttccaaatacttggacaaaagagttacacctgcagcacattacaaggttaacaagggatttgaatcttgaaatgccattcatcttgaaggagcaagtgcccagttttctataaatgaaatgccatgttatttttagataagcctttttttttttttttttttttgccaaga

SEQ ID NO: 8886 - DNA, 813 bp, Homo sapiens
ggataatcacatcagcctttgctttcaatctaagaaagaagcttttacaagttcacataataatcttcccaagtctagtaatctgatgagaaagctttgtcgtctaaggaaaagattttgtggcasagcctattaacaatgtgaagggctgctttataagatagcaaattccctatcactggagatgtccaaccaaaaactgaataacttacttttagggaattttttaaaaggtgcccccatactgggtggaaagataactcattttatataaggtcaattcccagcatgaaattgactattctttgtttctaatagttaccaataaaacgcaccttctcagatcctaatgatagaaaagagatttgatagaactattgtattttttaaagtctgtatcttccaggcttcatatcagacagtatataaaagacatgtttcttctatctgttcattaaatttctcaaattttattgactttttcttccacttttaacactatttattaaaattcattttaattctttttacagtttgtatacgtatgtgcatgagtgtgtatgcatgtgtacacacgagggacagagagacagaaagtatgctctgtggagttgaatgtcaagagggatttatttttgttctttccaaatacttggacaaaagagttacacctgcagcacattacaaggttaacaagggatttgaatcttgaaatgccattcatcttgaaggagcaagtgcccagttttctataaatgaaatgccatgttatttttagataagcctttttttttttttttttttttgccaaga

SEQ ID NO: 8887 - DNA, 1436 bp, Homo sapiens
  misc_feature (1)...(1436): n = A,T,C or G
tccttctaagaaattgtttatccccagagaaaagacctgaagatactcacatttgtcagccacagtaaaaggaagagcttaccactcaatctcctctgcaataaagctccctagctgttaaatttcactcacatactcaaggcttccaatcaactttttaatatctcacacttaaaaactaaattgaggatgtcttgaatctccagacatttcagaagtytttttttttacatgaactagagaaaccaaaacaaataatcaaaataaataaatgaataatgaggcagaagatatagagatttatatacgcattgaagggaaactgtaagaaaaaaaccaaacatagctaacatcttcagagacagtacagaatgaactgcatccaaaagataatgcaatcaagaagaaaccaccaaagaaaatgatatcaatatgctgaagagatatctgtgctcccatgtttattgcagcactattcacaacagccaagatatggaatcaaactaaatggccatctatagataaataaagaaaatgtggtatgtacgcaatggaatactattcagccataaaacagaatgaaatcctttcatttgtggcaacatggatgaacctgcagggtattacgttaagtgaaataagccaggcacagtaagacaaatactgcatgaactcactcacatgtggaatctgaaaaagttgatttcatggaagtagagagtacaaaagtggtattaagagactggggaggggtagggggagcaggggcctggataggttagtcaatgaatacaaagttatagttagtaaaaaacatttatgttgtttcattacacagtagggagatttcagcaaataacaatatagtgtatatctcaagatacctcgaagattttaaatcttatctccacaaagaaatgataaatgcttagagtaaaaaatatggtaattaccccgatttgatcattatacaatgtattcgtgcactggaacatcactacacaccccataaaaatacaattattgttcgattataaatacaacattattttaaaaactatcaaaagcagaaagagttgtacaaaagttaaaatataatgagcaataagggtggctttttnnnnnnnnnnnnnnnnnnnnnnnnnnnnnnnnnnnnnnnnnnnnnnnnnnnnnnnnnnnnnnnnnnnnnnnnnnnnnnnnnnnnnnnnnnnnnnnnnnnnaaaaaactagaatattggctataaatacttaattaaaaattgttttcaatataaaattttatacccaatcaaattattaagtatgaggatagaataaaaacattttcaaatatgcaaattttatctaaagtttctcagaatgcttagaatatctcaggaagttatcaaactaagtcccagaaaaataagtaaatatactaagggtgagaaatgtat

SEQ ID NO: 8888 - DNA, 849 bp, Homo sapiens
ggatccccattacttacttaaattaaaggtcttccagattccccagacatsctacacaaagcccacattcctgctcaaatggaagattcactatctcacaagtataccatgcactgttctctttctactcacacttattccttgacgtagcaggaggcaaacatatcactaaatttcccaaactttgcctgaaatcacatgcatctttatgaaatctcagctcaaatgttctttcatgaagttgcttctcataattttccacagaatgtgacctctcccacctttatgctaacaatggtcataactttatttatgcctctcttgtggaaataagtattatacttatttctatttctgcatgctatagagcttttaacaagtaatacacctgtagatgcttagagcacaaacgtagaaaaaataaattgtaaaaaaataaaaataaaatagattgtaaacctgagcttagagatccctggatatgaaaaaaactaactactaaggcatagcatgcagttccatttatttccccttggctccccaagatgtttaaactggtttatggttcattctgcttctattattaacatagcctaaactttttttttctgatagcacaacctctatccacttgggtgcccaaaagagtagatttcctctatttccctaatcctttctgttagactgatggtacttagaaacagaaactgcattttacatatttatatactacttgcattgctttgcatatcgtaggcactcaaacatacattagagtgaatataattgtttcgttgttaaatcaatatgtggccctgaaaaattttactcataatacataacagatgc

SEQ ID NO: 8889 - DNA, 714 bp, Homo sapiens
ttattatagttatcacaaggtatcaggcactgaattcacttttattaaaaatcaggaaaaacagagtaaagttgccaaggacatatagctagtcacttgctragaggagattcactctatctgtctggctccaaggatgacactcaacctctatgccatattgacttattcattccagcattaactttaaaaacagtacactatcattaacagttataaaaacaataccacgagtgccctaataagtaatcatatgagtaatatagaaatggataataaataagaagacagaagttgaaaaatattctcccttttaatccaacccaagagggagaaaagagtgatataataggcaaagcatgaaaacaaagctgagtgaaaaaaggtaatcctctatgatatgaaagataaagttgataatttagtattctttattaccaaccagtattagaaattttttaaaatacatacacttaccaattttgtaaaatagcatttggtgaatcatatggtactatgctcaattataaagattagtttacatattactatggtaatttttatcttgtaagcttcaacattttcttgaacttacaaaaacatctactgtactcttcaataagaaaacatcactgtctcagcagcataacatatgcatcttgccaatcaacgaatttaatactttatatagaaggtgacacggtttttttgaag

SEQ ID NO: 8890 - DNA, 732 bp, Homo sapiens
caatgctgaccttggaggttccttccagaagactttgagtctacatctcaaggacccctgaagcactgagcaagcacgcaggtgccatgcccagccaggtctcccggcaccagccaaccagccccgccaccaccctacgagctggggcttgtgtgaacccgctcgcactgtggaccggggcacctggcaccagagcccaggcagtgcttcctgtggaccccaggacaggtaggatgcagggagagcttttagctcatggcccacaccttctgggggcacccctccctgggcctggcgcaacagccacacacatcactctgcagaccctagaaggggaacacccagcagatcccgtctccaaggcactcggctctggctctgtttcgcttcctaaatggcccagtctgttgttacaggaggacacccacctctgcccaggaggcccaggctaagagggctgcaggtcacgcatggaaggcccacctgactcagccttaagaggaggaagaagatgaggcttgtcrccctggggacccgcaccacccttgatgacgcccgactggaatccagctcgtgcactccagcctcctcctgcactcggacacctggcactgctctcctggccccaagcttatagggcacagggtgcactgaaggggccccacccagcccctcagagccagcgagactggatgctctgcctctgagccccttcagcccctcagccccact

SEQ ID NO: 8891 - DNA, 783 bp, Homo sapiens
tcctccacccccacctccaaggtacgatgtgactcagggccagctgtatccctgcatcagtgcccatttgtggggcaggaacaagaacccagaacyttccctgaagacagactccaggaggtaggaggggccctgagggacccccagcctgatgcctctatggaccacagggaaagccaaggctgagaggtggcttctccaaaccatgctttggaagctaaacacagggactctttccgccaccttatgctggttcccagctgctgtagtaacctgggctgagaaacagggtgaggcctgtggccagagccagccagcatcacagccacaggtaggcatcagggctggcccaccctgccaactgcagcattccctgggcacagacgggtcccaaggctcatcctcagcaaaaaggtaaagtgaactggactggatcttggggtgaccacacaactccacagccccatctccagctgcctgggactcccccaagcctccaaccagggtgccggtacgagggccccactcccacccaagcccagctctctcccacctccacctgcgctgggcccgactgtcaactgttttcaatgcgttgcttgtcactttctctcccgccacacttcctgagggagccccagaccgaagtggaggctgacagtgtgtgcatttggaaggagaggggatgggaagactggaggacgagtttctgcagaccgcagcggaagtcagaggcagctgtcgggcaggcacctgacagcgccgattaaataaaataactaa

SEQ ID NO: 8892 - DNA, 795 bp, Homo sapiens
agacaaatggggcctagggctctcagccatgcctccccccaccccccacaaccaaaactccagcagcacagcctgggagctggtgggcacaggctgggccctcccccaagtgtctcatctgcctaattacttctttattgtctcacaatcacactctctctctatgctgccctgagatatttccttcccctgttcatcccagaggcaattagaagaggaagggcggggggaggtcttcaaatgcagcgaggagayggtgggcagaggggggccagtgcgggggtcggggaacacaggcagggctcggccccagccccacggctggcccccgtgaaatttcaaattaggctataaatacatcagacagcatcggcatggagctgctaccaccaaaggtggccagctgggaggagatggggtttgggggattaccttggggttctccaggattccagcctcgtagctgcggaggggaaaggaaagacagggtcagctggggagggacatggcatgtccccatcccccaacacacacaccccattgtgcccatgagcctggtctgccttttactctctgccagagcatctgctgccaacctgcctgaaacattctgggcccaccatagtcacccgtggagctgcaggttgtaagaaagagctggggcctttacctgtcttctggggactgccccggggctctgcacgtggttgggggggcctctgcctctgccttaaacactcttcccctgtgccacatctgggcctcttctccatccttgaatgccacctcctctaa

SEQ ID NO: 8893 - DNA, 795 bp, Homo sapiens
agacaaatggggcctagggctctcagccatgcctccccccaccccccacaaccaaaactccagcagcacagcctgggagctggtgggcacaggctgggccctcccccaagtgtctcatctgcctaattacttctttattgtctcacaatcacactctctctctatgctgccctgagatatttccttcccctgttcatcccagaggcaattagaagaggaagggcggggggaggtcttcaaatgcagcgaggagacggtgggcagaggggggccagtgcgggggtcggggaacacaggcagggctcggccccagccccacggctggcccccgtgaaatttcaaattaggctayaaatacatcagacagcatcggcatggagctgctaccaccaaaggtggccagctgggaggagatggggtttgggggattaccttggggttctccaggattccagcctcgtagctgcggaggggaaaggaaagacagggtcagctggggagggacatggcatgtccccatcccccaacacacacaccccattgtgcccatgagcctggtctgccttttactctctgccagagcatctgctgccaacctgcctgaaacattctgggcccaccatagtcacccgtggagctgcaggttgtaagaaagagctggggcctttacctgtcttctggggactgccccggggctctgcacgtggttgggggggcctctgcctctgccttaaacactcttcccctgtgccacatctgggcctcttctccatccttgaatgccacctcctctaa

SEQ ID NO: 8894 - DNA, 795 bp, Homo sapiens
agacaaatggggcctagggctctcagccatgcctccccccaccccccacaaccaaaactccagcagcacagcctgggagctggtgggcacaggctgggccctcccccaagtgtctcatctgcctaattacttctttattgtctcacaatcacactctctctctatgctgccctgagatatttccttcccctgttcatcccagaggcaattagaagaggaagggcggggggaggtcttcaaatgcagcgaggagacggtgggcagaggggggccagtgcgggggtcggggaacacaggcagggctcggccccagccccacggctggcccccgtgaaatttcaaattaggctataaatacatcagacagcatcggcatggagctgctaccaccaaaggtggccagctgggaggagayggggtttgggggattaccttggggttctccaggattccagcctcgtagctgcggaggggaaaggaaagacagggtcagctggggagggacatggcatgtccccatcccccaacacacacaccccattgtgcccatgagcctggtctgccttttactctctgccagagcatctgctgccaacctgcctgaaacattctgggcccaccatagtcacccgtggagctgcaggttgtaagaaagagctggggcctttacctgtcttctggggactgccccggggctctgcacgtggttgggggggcctctgcctctgccttaaacactcttcccctgtgccacatctgggcctcttctccatccttgaatgccacctcctctaa

SEQ ID NO: 8895 - DNA, 659 bp, Homo sapiens
aagatttcggaaagaaagcagccaagagctagaagggaccttgtacctgatcycaagcccaatccaaccagaggctctgctgtacaaatttatttaatttaaagaaataagacaactaaggaatcttctaggtaccatttgaccacacaaggaggcctgtcaaagagtttgtgggcaaaacgccacacgtttgggctgcttgccttccattctaccccagctccctcatcagtgcaccagacaatgactgccgcttccacagtatctgtaaagaaggatggggcaaatgtaaaaagcactacatttaactgctatttttgtctcaaggaggatgagggttgataaatgtgtccttgagataagccagagacggcaggacataaaatctgtccaaagagatagtttttttggcttttttttttttctttctgagacaaggtcttactctgtcacccaggttggagtgcagtggggtgatcacagctcactaaagcctcaacggctggggcttaagcaatcctcccacctcagcctcccaagtagctgggactacaggaacacaccaccatgcccagctaatttttagattttcttgtagagatggagcctccttatgttgcccaggttgatctcaaactcctgggctcaagccatccacc

SEQ ID NO: 8896 - DNA, 659 bp, Homo sapiens
aagatttcggaaagaaagcagccaagagctagaagggaccttgtacctgatcccaagcccaatccaaccagaggctctgctgtacaaatttatttaatttaaagaaataagacaactaaggaatcttctaggtaccatttgaccacacaaggaggcctgtcaaagagtttgtgggcaaaacgccacacgtttgggctgcttgccttccattctaccccagctccctcatcagtgcaccagacaatgactgccgcttccacagtatctgtaaagaaggatggggcaaatgtaaaaagcaytacatttaactgctatttttgtctcaaggaggatgagggttgataaatgtgtccttgagataagccagagacggcaggacataaaatctgtccaaagagatagtttttttggcttttttttttttctttctgagacaaggtcttactctgtcacccaggttggagtgcagtggggtgatcacagctcactaaagcctcaacggctggggcttaagcaatcctcccacctcagcctcccaagtagctgggactacaggaacacaccaccatgcccagctaatttttagattttcttgtagagatggagcctccttatgttgcccaggttgatctcaaactcctgggctcaagccatccacc

SEQ ID NO: 8897 - DNA, 693 bp, Homo sapiens
ctagcactcatccacaggttggaatttgcataaagaactaaaagtagaactaccatttgatccagcaacttcactactgggtatctacccagaggaaaagaagtcattatacaaaagaagatacttgcacaggcatgtttatagcagcacaattcacaactgcaaaaacgtggaaccaacccaaatgcccatcaatcaatgagtggataaagaaactgtagtrtgtgtatgtgatggaatactatttagccataaaaaggaatgaattaatggcatttgcagtgacctggatgagattggagcctatcattctaagtgaagtaactcaggaatggaaaaccaaatatcgtatgttctcactcataagtgggagctaagctatgaggatgcaaaggcgtaagaatgagacaatggactttgggaactcagggggaaagagcgggaaggggataagggataaaatattacaaattgggtgccgggtatactgctcaggtgacgggtgcaccaaaatctcacaaatcaccactgaagaacttacacatgcaacgaaacaccaccttttccacaataacttcttatggaaataaaatatttttaaaaaattaatccaagcataagaaaagaaagcacctcctgtttctgttgcagttctcagttctcatacaggctcctgtgcttcccagtaagcat

SEQ ID NO: 8898 - DNA, 687 bp, Homo sapiens
gacccagggattggggactcaggtttgggtgccaggacagtggagtaggggacccagggattggggactcaggtttgggtgccaggacagtggagtaggggacccagggattggggactcaggtttgggtgccaggacagtggggtaggggacccagggattggggactcaggtttgggtaccaggacagtggagtgggggactggggaaatggtcagaagaggtcaaatcgtggggcctttgaatgaaggccaaagagtttgcacttcatatgatggggcaagagggaattgttaaaaaggaacaaggtagtcagatcygtgttggagaaaggacccctagctgctggccggggagcgggagcaggagaccctcgaggactctgtacctagggaccagaaatgatgaggcctgagctagtgtgctggctgggaggatggtgaggggtctgctggcaggtattagacggtatcgggaagtggggaggtggttaggaagtagactttgcagctgatgggatgtggggctgggacgctggaggagtcatgcgggcctttgctggttttcaggctggagggactgggtagatacctccactgagaaacagaacacggatgaggggcgctttggtggtcacgtgtctgcccctgtgggagctccaggatgagtgtcctttctccccagacc

SEQ ID NO: 8899 - DNA, 687 bp, Homo sapiens
gacccagggattggggactcaggtttgggtgccaggacagtggagtaggggacccagggattggggactcaggtttgggtgccaggacagtggagtaggggacccagggattggggactcaggtttgggtgccaggacagtggggtaggggacccagggattggggactcaggtttgggtaccaggacagtggagtgggggactggggaaatggtcagaagaggtcaaatcgtggggcctttgaatgaaggccaaagagtttgcacttcatatgatggggcaagagggaattgttaaaaaggaacaaggtagtcagatccgtgttggagaaaggacccctagctgctggccggggagcgggagcaggagaccctcgaggactctgtacctagggaccagaaatgatgaggcctgagctagtgtgctggctgggaggatggtgaggggtctgctggcaggtattaracggtatcgggaagtggggaggtggttaggaagtagactttgcagctgatgggatgtggggctgggacgctggaggagtcatgcgggcctttgctggttttcaggctggagggactgggtagatacctccactgagaaacagaacacggatgaggggcgctttggtggtcacgtgtctgcccctgtgggagctccaggatgagtgtcctttctccccagacc

SEQ ID NO: 8900 - DNA, 811 bp, Homo sapiens
aaggtgtcaaaagttatggaacaaaatgaaggaaaggggatagggactgctgaggggtgggctacaatctgaattgggggttaggaggggatggagtgagaatgttctatttgatcacagccttgattcatgtgagagatcctggaggagaaagtgggcaaaagccgcccaagtggctgtagcaggctgggtgctgcattacatagggcacattaagtgaaatgtgatggctattttgtgtaatcctttaaaatcccaatagaaataggactttgtgggaggactacattttgaaataattattttcaaaaatagttatttcaaaaaaagcacagcagttgcatcctattgaatagtgggaacactggatgataagttaaagtatcattttgtgttaaaatattgaagcaaatatggcttggtgtggtggctcacacctgtaatcccagcactttgggaggccaaggagggtggatcacttgaggtcaggagttcgagatcagcctggccaatagggtggaatccygtctctactaaaagtacaaaaattagccagttttgttggtgagtgcctgtaatccaagctactgaggaggctgaggcaagagaattgcttgaacccaggcggcagaggctgcagtgagctgggattgtgccattgcactccagcctgggtgacagagcaagactccattaaaaaaaataataataatattaaagctacccattaaaaaaatttgaaagtcccagaaatgtggcaagacaaacaaccctattaatggccctaatgaagccctatagatttctcaga

SEQ ID NO: 8901 - DNA, 790 bp, Homo sapiens
ttatttaggcagaaactgcaaagcccttgctcttaaacactaggttgtattgactcttgtttacccctgggctcaagtaatcctcccatctcggcctcccgaatagctgggattacaggtgcatgccaccacatccggctaactttatttactttttgtggagatgggatctcactctgttgcacaggctgttcttgaactcctggcctcaagcgatcctcctacctcagccacccaaagtgctgacattacaggtttgagccactgggccaggcctacattgactcttgacagcttatagatggatgatctgtgcctcacgccttctgcgttttttttttttttactttattgaaatataattcatgtaccatacgattcatctatttaaaatgtgtaatctccayaatcaattttagaacattttcatgactctgaaaagaaactgcataactattagcagtcactcctcgttctccccagccactaatctgccttctgtctttatagaattgtccattctggttattccacgtaaacagaatcaaacaatatgtgaccttttgtgactggcgtctttcactcaccataatgtttccaagatcatcagtgttgtagtatatatatatatatgtatgtactacttcattccttttgtatggatagaccacgttttctttatacattcattagtagatggacagttgggttgtttacactttctggctatcatgaatcatgctatgaatattcacgtataagtttttggcgtggacacgttttcatttct

SEQ ID NO: 8902 - DNA, 635 bp, Homo sapiens
tccaaagtcagataactttgtttcaactcatctagtgctttggatttaattgcaagttgattttctatatcctggaagagtaagaggaaaaggttttcaatgcacaatattacaaaacaattaataaggtgtcagagacaggagttcactcttttcaagtaaaaatgtcattagattatataattaaatagcattacatcaaagaaatttaaatcataatactcttagttcaattacatatgacacaactctgtattttaggagaatctaggcaacacgtctgaaccatcatggcagagcagaaaggatgctggtccgagatctggtccccattccacgtctgccctgcactggctgtttgaccaggcataagtcatcgaacctttcagtctccattttctcatttggaaaaagtgatgatacccacagcatgtgtgccaagctaagaactcaaataaaatcacgagcaagaaggtgcctttaaaccatatagcatcatataaatgacagacgatataactgttggtagttcagtaataactttaatcattttctacctcttagtttattaattcactcataagaggcaccctgacctggtctactctttatagayacatttttaaaaacctaca

SEQ ID NO: 8903 - DNA, 805 bp, Homo sapiens
gacatggtaagtagtttagagaagaaatgtgccagtgtaactgcattatatgagtagtgagtaagtaagcatctgctgtgtgtaagactatatgctagttacactatggttcattatatacacaaataaaaactgatagaaacaatacagaagttggataagcttcccaaggctttaatagctagcattgattcaatagtagtgttaactcaaattcctcaacaaactttacaaatatttcctgaaaggagagccagaaaataaccttaaaagaaaaaggataagaaactctgtaaagtaaatctataaaacctaattcaattcaatggttcagaaaagtattgttgataaaagattgaactcattcacaacttaatcaccaatattatgcaaacacctatttacattgacggattacagtcattgccttgtagatattagctgcccacttaccctctgagcttcattttccttatctatgaggtgggggaaaatcagaatgcttgccccatagaattagcttgaggactaaacaagtgatacagatcaaccagtaaatcaagtgtcttggctacaggaagttctttcgaatatggaattcagatcatttctttcctatgtcttcccaattgcattgagaataaaacccaaacaccgtatcatggcctttgatgccctaaacatctggcaattgtcyatatctctgtcctcaccttatgtcatattcccttcatgcagtgtgtactagtctcaagtcttggctgtgttctgataccctgaatccagcaaagaaatgctcacctca

SEQ ID NO: 8904 - DNA, 729 bp, Homo sapiens
tccctcccgtcagcccgtccgcggcccgtccgtccgtccgtccgtcgtcctcctcgcttgcggggcgccgggcccgtcctcgcaaggccccccggccggccgtccggccgcgtcggggcctcgmcgcgctctaccttacctacctggttgatcctgccagtagcatatgcttgtctcaaagattaagccatgcatgtctaagtacgcacggccggtacagtgaaactgcgaatggctcattaaatcagttatggttcctttggtcgctcgctcctctcctacttggataactgtggtaattctagagctaatacatgccgacgggcgctgacccccttcgcgggggggatgcgtgcatttatcagatcaaaaccaacccggtcagcccctctccggccccggccggggggcgggcgccggcggctttggtgactctagataacctcgggccgatcgcacgccccccgtggcggcgacgacccattcgaacgtctgccctatcaactttcgatggtagtcgccgtgcctaccatggtgaccacgggtgacggggaatcagggttcgattccggagagggagcctgagaaacggctaccacatccaaggaaggcagcaggcgcgcaaattacccactcccgacccggggaggtagtgacgaaaaataacaatacaggactctttcgaggccctgtaattggaatgagtccactttaaatcctttaacgagg

SEQ ID NO: 8905 - DNA, 696 bp, Homo sapiens
aataagacatttattaggtgccaaaagacccctctggggatgggtttgccgagctctgcagcctctcagtctccatggcttgcaattgtctctcagccccagctggcaggcctgcactaggaaggagtcaggcaagcagcatctgatttacacaaggaaaaaaatgtgtcaggcaagtttaggtaaagaaaggagatctctaactttattgagtttttaaataaatcatcagaagtatgaggtttcagaagattttaggtagtaaacaacatagagaaaaataaacttaagcttacttgctaagctttttagagaaatagtcaagtcagtgtttttctgttctgttttctcaaactgcttatatgcagkgagtcattgacagcatagaatgtatcttctgaggccattaatacccaaatgtgcttctgtgagtgtccattcagattgcagtggtgtgcttagatggaaccaggctgtagtttcttcccttgataatcttttgagagttcaaccccaagatgtcaaccatggtctctgatacggtttggctgtgtcccgacccaaatctcatcttgaattcccacttgtggtgggagggactcagggggaggtaactgaatcatggagcagatctttcccgtgctcttctcatgatagtgaataagtctcacaagatctgatggttttaaaaagagg

SEQ ID NO: 8906 - DNA, 794 bp, Homo sapiens
tccctagtgagtcccgctgcctaggaagtaaaaccagggagtaagctctaaattactacaaaaagtgtggaggaacataggcactgggagaagtcgcctaactgaatgtctttgtttttttttttttttttgagacggagtttcgctcttctcgcccaggctagagtgcagtggcacgatctctgctcactgcaatctccgcctcccgggttcaagtgattcttctgcctcagcctactgagtagctgggattacaggcatgtgccaccatgcccagctaatttttgtatttttagtagagatgggtttcaccatgttggcgaggttggtctcaaactcctgacctcagatgatccacccgcctcggcctttcaaagtgctgggactacagacgtgagccaccgcgccyggccagttctttttaatcctctgttgtgcacgtaacctaactggatttcacagtcaaacttatcacatctgttccagcagggagaccatgggaggatttttctctctccatcaactaaggctgttgaggagtcgatacaaatcccactctcgcctctgttgttttaataggacctgtgttggttcattccttgacgtggattatccagcattcaacaacttcacatatccatgtcatttacttgtccgtcttctgtgtggtttgtcttctggaatctgggagtggggggcctcttcttccccactgtctccgagggtctagacccatgcctgacacatggtgaacttccttcctctttgtaggatgaaggcattccatttcctgg

SEQ ID NO: 8907 - DNA, 794 bp, Homo sapiens
tccctagtgagtcccgctgcctaggaagtaaaaccagggagtaagctctaaattactacaaaaagtgtggaggaacataggcactgggagaagtcgcctaactgaatgtctttgtttttttttttttttttgagacggagtttcgctcttctcgcccaggctagagtgcagtggcacgatctctgctcactgcaatctccgcctcccgggttcaagtgattcttctgcctcagcctactgagtagctgggattacaggcatgtgccaccatgcccagctaatttttgtatttttagtagagatgggtttcaccatgttggcgaggttggtctcaaactcctgacctcagatgatccacccgcctcggcctttcaaagtgctgggactacagacgtgagccaccgcgcccggccagttctttttaatcctctgttgtgcacgtaacctaactggatttcacagtcaaacttatcacatctgttccagcagggagaccatgggaggatttttctctctccatcaactaaggctgttgaggagtcgatacaaatcccactctcgcctctgttgttttaataggacctgtgttggttcattccttgacgtggattatccagcattcaacaacttcacatatccatgtcatttacttgtccgtcttctgtgtggtttgtcttctggaatctgggagtggggggcctcttcttccccactgtctccgagggtctagacccatgcctgacacatggtgaacytccttcctctttgtaggatgaaggcattccatttcctgg

SEQ ID NO: 8908 - DNA, 758 bp, Homo sapiens
agaatcttgctattaatatcgctgatttcagcagaaattacagaatccagtttagagaataactgagctaaagagaaaaaatattttgtgacgtttttgtctttttaattattgtgtggctaaaaatagggaatttctgccaacatatccactgtgactttgtccatctgagttttaaataaatcaggtgattggtctcttattattgctcctgggaacttgttctgtcatgtaacagaagtgacttttaggatttttatttttattttattttattttatttatttattttttatttttttttattttttatttttttatttttgagacggagtctcgctctgtcgcccaggctggagtgcagtggcgggatctcggctcactgcaagctccgcctcccgggttcacgccattctcctgcctcagcctcccaagtagctgggactacaggcgcccgccactacgcccggctaattttttgtatttttagtagagacggggtttcaccgttttagccaggatggtctcgatctcctgacctcgtgatccgcccgcctcggcctcccaaagtgctgggattacaggcgtgagccaccgcgcccggccaggatttttatttttgatataatatccccaggctcaattcttgagaraatttcctctgcacaatttcactttcatgaagaaatcaatgggaataaattaaaaaaaaaaaaaaaacagaaaagaattcacttggaagatggattacagtcagg

SEQ ID NO: 8909 - DNA, 820 bp, Homo sapiens
atccagaacaaagctgtcattgaatcataaccaacatgtaacttgagtgagaagtaaaccagaaaatcwgtttgtcaaataagacatcttaaccaagatccagcctttacaaacaatttccgtaatacagttgagacgcatggacaaaaaagagagaggctttggacttcctgattgactctccaggagagtcttccgctgaagaaaagctctctgttatcagtgtggtcacctcacagagccatgacaaatttggttataaaacatctctaccttatactctagaaaattgtacagccaattagatatttttcagagacagatgcattataaattcatagattctagggttttttttttttttttgccataaacaaccctaagccagggacatcctgcgaagagctctctataggtaagaactctctagtcacagcagttgtcactggttttcagcacatttgctgaaaatcaaatcatgccacctaatttctttctttggtagtatccccttggtaactggaaaagaaattaatcataagccacttgctttgcatccttcctccgcaagagcaaacaattttgccataggattaaaaaataatacaactagtaagtagtggcagcattaatattcatgttgaaatgtattcatcatttgtcagatgccaagtagataagaacctagcatacattagctccttagagccccacgaccattctatgagatagatatcgttaccatccacagttttgagatgattgaattaagaattaagcagaatgaatacatgcaaaatgtaagggtcaccaaaaattt

SEQ ID NO: 8910 - DNA, 820 bp, Homo sapiens
atccagaacaaagctgtcattgaatcataaccaacatgtaacttgagtgagaagtaaaccagaaaatctgtttgtcaaatmagacatcttaaccaagatccagcctttacaaacaatttccgtaatacagttgagacgcatggacaaaaaagagagaggctttggacttcctgattgactctccaggagagtcttccgctgaagaaaagctctctgttatcagtgtggtcacctcacagagccatgacaaatttggttataaaacatctctaccttatactctagaaaattgtacagccaattagatatttttcagagacagatgcattataaattcatagattctagggttttttttttttttttgccataaacaaccctaagccagggacatcctgcgaagagctctctataggtaagaactctctagtcacagcagttgtcactggttttcagcacatttgctgaaaatcaaatcatgccacctaatttctttctttggtagtatccccttggtaactggaaaagaaattaatcataagccacttgctttgcatccttcctccgcaagagcaaacaattttgccataggattaaaaaataatacaactagtaagtagtggcagcattaatattcatgttgaaatgtattcatcatttgtcagatgccaagtagataagaacctagcatacattagctccttagagccccacgaccattctatgagatagatatcgttaccatccacagttttgagatgattgaattaagaattaagcagaatgaatacatgcaaaatgtaagggtcaccaaaaattt

SEQ ID NO: 8911 - DNA, 652 bp, Homo sapiens
cctggcctctcctcgccccctgcctctactcacaattatgttatcggtcaagaaaagcaaaatcagactgtggctcccggctgggtttctggagctttgtagggttttactagcactttccgtgcccctgcgggcgcgcgaactattcacgtgctcgaaacgcccggattaccttccctgaggtcactcaccagggtgcccccggcacccccagttcggggaccgcggcccgccctcgccaggggattcaaataggtgtgggcagcggcgcgaagagcagctgcckgtttcctggtgggccgcgctggaacctcggggcgagctgccaccttcagcctgtgcgcttccctctccacggaagggaccggagttgaaatcacaaccaaccctgggagagcggggccgggaggcgggggaatcccaggcgagtgggagccgaagctctgggcttcctccccggccgggcgacacccgggggacaccggggctctctcgggccgttaccctgcctatgtggactggtgtgcaccctcgggggaggttcctagggtgccacggtgcccgagcgcgacgagtgactgctggggaggggggccgggtcccggagcgcctcctccgggtggtctcccccccagcggggaccgcgcgcagc

SEQ ID NO: 8912 - DNA, 602 bp, Homo sapiens
tacattttttaaccgatttttttctcagaggagaaaaatctgaacaatttggcctaagtttcactttgtccttctcttaggttgatctcatttaaattcagggcctacttccacttaagcaacttcttctttcattgtataggttctttaatatccaacctttttaaacttaacttgaagcctttaatttaaaaaactgtcccaatcatcattttcttttcaatgtatgcagttgcattttaaacatccatttaacacacaaaatgtgatttttgaaatttttttcactttcaaacccacctgctacatactcccagagagcgttttatttaattgyttaatagagaagattaagcagtttctttaagaatccaatttcccttcaacaagcacaacagcagctgcccaagctcccagaaactaagcaaaggcaagtagcaggcagcgttttgcttcactagaatgaatgttagttgaaaccttaaatacctctttaaaagactagattaaagagaataatgggaatattaagatactccggtagttagttaaaatattttttaaggaaaaccaggcagatatacatctattttgatgatttg

SEQ ID NO: 8913 - DNA, 727 bp, Homo sapiens
ctgtgggacatactacaggaatttgagacttgcagaatgtcaagactggaagtgcacttgggaattgtcttcatcaaatcactcatgatagagatgaggatatgaggctcagacagaaacatggcagcctgccttggaccctgcttatttttttttctcttggaagagccatcccctcttcacacccatttttctcctttcttctcaggttaacagagcattttccttctaagaggatttgtgtgttttcactctgatgaggtgcccattttataggtaggatagattgaggccccaggatgggtatcrtatgaggctagttagagagatttaggaatagattctttccttctgttctggggccatactctatagtcaacctgcccacccaccgcggtggctgcagacaatgaataacaagctagttaatgttggacaagctgtatcttactaaccattgttaatgggggcctcttgtgagtcactttgtaatttgagttagtgagtgaatcaagcctggttacatcacaaccaggaatattttgctcatttattttgatcagtgtagtttggatttaattatttatagaaatactgttgtttatagtacactaataaatgttctatagtaaatttggaaaaaataatggagtctaagaacctcaggattgcacagattgttttctgctattgagtgcatgcagggaatcagaggaagccatccctg

SEQ ID NO: 8914 - DNA, 738 bp, Homo sapiens
acttgtgtgaattcatatttgtggagagatttcatcatgaatgcaatcctcttctggatttgttgagaacagatagactgggaacctgaaacaggccacatactaaataagatcaatggattttgcagccaggtgcctgggttcaagtcctgcctctgtttcttaatagctgtgtgacattgggcaagttgttaccctctctgctgtttcttcatctgaaaaaagggagtgatgatatagtatctctaccttgggctgttgtaagaattaagtgagactgtacagggcagagtgcttaaaagaagtgcctgacccatttgtagcaagcactcaagatactttagtttagttgttatttttatatctggaaggggccttcccttaattttcagatggaaatgttgaagcagaggaaggaggcacttgctcaaggtttcccagtgagctgatggcaaggccttggctagaacccagttctcatcaagatgctcatttcaaccacctcccatagttcatgtccccagtcaatgagtctttgccatgtctatcttttatgtcgtgctaaagtagacattgaaaaggatctagaagtgaatgactggggacctgtattcttgaaattcatactcagaatttgtagtagaaacagaataatattcattagatgattacactaataagctrtgaataaatttaacattatttcggggcttttattgcatggagagttaagggatc

SEQ ID NO: 8915 - DNA, 811 bp, Homo sapiens
ggatcccaacatcagctctttttgggtctcaagcttgctggctttcatacaggaaatgttcatactagaaccatcagctctcctgggtctccatcttcatatatatatatatatatatatatatataatatatataaatatatatatataaaatatatatagctatatatactatatataaatatatagtatatataaatatataatatataaatatatatagcaaaatatgtatatatgtatatatatagctatatatgtatatatacacacacacacacacacagacatcctattacttctgtttctctggagaacccagactaatacatactttggaaacaagagtagtcctagagaaatagaattttaaggatgagttatcaaaactgacgctagtgtttctgtgattggacctataatctgattaaagacactaatgactctaaatttagtagaaaagagagcattaatagcctgtggtgtgatctggcaatagagacatgcaaaatatcttcatttgttattcctaatcaatcacttataagaagcaaagagctgggagactatgtatataatatttttaacatatttggcaaactaacacaggtaatgagtctaattatagatctagaagcaaagatgggtggtggatctagaagcaaaggcrggtaatgttactacataaaaatgggaaaagaaaagctcaggcaaactcagaaattcacactgccagttcatgcacctcataaatgacctgaaagcttctatgtgagctctgaagaagaaccatctctcctatggcctcagg

SEQ ID NO: 8916 - DNA, 721 bp, Homo sapiens
ttttagacaaatcacaatattgaatcctctctgggaacatcagtcctgtatgtaatcatggatctgaaattgacttcatgggaaattcaccagaagaccattttctaatttaacagaaaccaagaaacagcagtatgaaatagtaaaggtgtggaatattaagagtcagagttttaaagttcttgacatcagacggcgtggagatgagtaagatcactgagaattagatatgtgaccttggtaaatgacagatgcttttcatctataaatatccacaagctttttcatctgtaatatttggattacattagaaccaaaatcgtaggtctttttaaagatgaatgtaaataataagtgtaataataaatgaaaaaataaacttattagaatgctgtcaraaataaggctgcttaaatgctagtgattttttaattctctttttttagttctcttttattgctatgattgttgttactgaaaaattaaatttacattattaatagtgcaacaggcatattgttgagatgactaaggttaatctgtctccatttgcttaaatactctaaaagaaatacagcttgctattcttatcacaaaagtatatttttaaatcttttaatgtttctgctaaaatagaaaatgtgttaagatattagacagttacagttaacaagtttgaaatattaatattgaaaaactatactaggaagtaaaaatcatt

SEQ ID NO: 8917 - DNA, 790 bp, Homo sapiens
agcaacaaaacaagtaatttccaccggttgcacgcatttgccatgttctttgtttttacgcttccttgatccctatctcacgtgtgaagctcagaattgattgctgtgtctttgtctttgtgccctatgttttgttgtaaataaccaaaaccaactctaaatactttaggcataaaacgaaagtattgtcaaggccagctggggtcttgctaccgctcatggctgagctgttttcatgctcttctgggcgctcatcaccatggatttcaactcctcagaaggcatagcaagtcaggcctatgcctttataacccctcacactcgaggtaacagaacacacgtcttaacagcttattcaggctatgagcccatgttgttaccccaaggtatagggagaagaaaggccctcgctayggcgccctagtaggtggaccatactcctcatctaccttaagaggtctcctcgacaggaaggaatgtgcacactcgtgtgcttgatggtcagtgctacacagattccacttctgcttaacattcagccattcttttttccaaagttaaagttcaaaacagctgcttacaccagaactaatactgtcctctcttatccactgaacactcctttttcctgtctacaaggagagacaactcaatgtgttgtaagttgatgtgcacagtatcaggtctctagggactagctatctatccttgagtactgtcagaatcttttttttaatattatgaaactcacagactagattataaatgtaattatctcccacatatgcta

SEQ ID NO: 8918 - DNA, 765 bp, Homo sapiens
ccttgtgatccgcctgcctcggcctcccaaagtgctgggattacaggcatgagccaccgcacccggccaaaactagattttcttgagctttaattttattttctttttttgagatggagtctcgctctgttgcccagcctacaatgcagtgttgtgatcttggctcactgcaacctccacctcctgggttcaagtgattctcctgcctcggcctcccgagtagctgggattacaggcacctgccaccatgcctggctaatttttgtattttagtagagacggggttttactatgtaggtcaagctggtctcgaactcctgatctcaaatgatctgcccacctcagcctcccaaagtgccaggattacaggtgtgagccagccaccrcgcctggccctttttttttttttttttttttttttttttttgagatggagtcttgctctgttgcccaggatggagtgcagtggtgtaatcccagctcactgcaacctctgcctcccgagttcaagcagttctcctgcctcagcttctcaagtagctgggattagaggtgcacaccaccacacccggctgatttttgtgtttttagtagagacagggtttcaccatgttggtcaggctggtctcgaactcctgacctcaagtgatctgtctgcctcagcctcctaaagtgctgggattacaggtgtgagccaccacacctggcctgaatttacttgtaatgcttctgttctttgagctctggcagggaagaagtacctgg

SEQ ID NO: 8919 - DNA, 706 bp, Homo sapiens
tctttacttatgcaaatttctgcagcctgcttgaattccttcmctgaaaaaaatgggcttttcttttctaccacacggccaggctgcaaattttccaaatttttatgctctggtttcccttttaaatacacacgtggttgtgcatgcctgtaatcccagctatgcaggagcctgaggcgggagaatcacgtgaacccaggaggtggtggttgcagtgaaccgagatcatgccactgcactccagcctggcaacagaatgagaccccatctcaaaaaaagaaaaaaaaaaaaaagaagaagtgtagcctgaaaatgtgactaaattgctgcaacctcatgatcaaacttgaatagatgaggagttacttcttacagataagcaaagaaagcagtcaatccacactaagacatattctatagatgctcattgagttatgatggggttacatcctgataaatccatcagaagttgaaaatatcaccagtcaaaaatgcatttattgctggaaacactgcagacagtctttgattatgatggctcaacttatgattttttgatgagccagagcaattacttagtcaagaaaaagaaacaaaaggcacccaaaactatctctgaaaataatatgacttttttttttcttcagatagagtcttgctctgtcatccaggctggagtgcagtggtgtaatctcggctcattgca

SEQ ID NO: 8920 - DNA, 706 bp, Homo sapiens
tctttacttatgcaaatttctgcagcctgcttgaattccttccctgaaaaaaatgggcttttcttttctaccacacggccaggctgcaaattttccaaatttttatgctctggtttcccttttaaatacacacgtggttgtgcatgcctgtaatcccagctatgcaggagcctgaggcrggagaatcacgtgaacccaggaggtggtggttgcagtgaaccgagatcatgccactgcactccagcctggcaacagaatgagaccccatctcaaaaaaagaaaaaaaaaaaaaagaagaagtgtagcctgaaaatgtgactaaattgctgcaacctcatgatcaaacttgaatagatgaggagttacttcttacagataagcaaagaaagcagtcaatccacactaagacatattctatagatgctcattgagttatgatggggttacatcctgataaatccatcagaagttgaaaatatcaccagtcaaaaatgcatttattgctggaaacactgcagacagtctttgattatgatggctcaacttatgattttttgatgagccagagcaattacttagtcaagaaaaagaaacaaaaggcacccaaaactatctctgaaaataatatgacttttttttttcttcagatagagtcttgctctgtcatccaggctggagtgcagtggtgtaatctcggctcattgca

SEQ ID NO: 8921 - DNA, 706 bp, Homo sapiens
tctttacttatgcaaatttctgcagcctgcttgaattccttccctgaaaaaaatgggcttttcttttctaccacacggccaggctgcaaattttccaaatttttatgctctggtttcccttttaaatacacacgtggttgtgcatgcctgtaatcccagctatgcaggagcctgaggcgggagaatcacgtgaacccrggaggtggtggttgcagtgaaccgagatcatgccactgcactccagcctggcaacagaatgagaccccatctcaaaaaaagaaaaaaaaaaaaaagaagaagtgtagcctgaaaatgtgactaaattgctgcaacctcatgatcaaacttgaatagatgaggagttacttcttacagataagcaaagaaagcagtcaatccacactaagacatattctatagatgctcattgagttatgatggggttacatcctgataaatccatcagaagttgaaaatatcaccagtcaaaaatgcatttattgctggaaacactgcagacagtctttgattatgatggctcaacttatgattttttgatgagccagagcaattacttagtcaagaaaaagaaacaaaaggcacccaaaactatctctgaaaataatatgacttttttttttcttcagatagagtcttgctctgtcatccaggctggagtgcagtggtgtaatctcggctcattgca

SEQ ID NO: 8922 - DNA, 706 bp, Homo sapiens
tctttacttatgcaaatttctgcagcctgcttgaattccttccctgaaaaaaatgggcttttcttttctaccacacggccaggctgcaaattttccaaatttttatgctctggtttcccttttaaatacacacgtggttgtgcatgcctgtaatcccagctatgcaggagcctgaggcgggagaatcacgtgaacccaggaggtggtggttgcagtgaaccgagatcatgccactgcactccagcctggcaacagaatgagaccccatctcaaaaaaagaaaaaaaaaaaraagaagaagtgtagcctgaaaatgtgactaaattgctgcaacctcatgatcaaacttgaatagatgaggagttacttcttacagataagcaaagaaagcagtcaatccacactaagacatattctatagatgctcattgagttatgatggggttacatcctgataaatccatcagaagttgaaaatatcaccagtcaaaaatgcatttattgctggaaacactgcagacagtctttgattatgatggctcaacttatgattttttgatgagccagagcaattacttagtcaagaaaaagaaacaaaaggcacccaaaactatctctgaaaataatatgacttttttttttcttcagatagagtcttgctctgtcatccaggctggagtgcagtggtgtaatctcggctcattgca

SEQ ID NO: 8923 - DNA, 706 bp, Homo sapiens
tctttacttatgcaaatttctgcagcctgcttgaattccttccctgaaaaaaatgggcttttcttttctaccacacggccaggctgcaaattttccaaatttttatgctctggtttcccttttaaatacacacgtggttgtgcatgcctgtaatcccagctatgcaggagcctgaggcgggagaatcacgtgaacccaggaggtggtggttgcagtgaaccgagatcatgccactgcactccagcctggcaacagaatgagaccccatctcaaaaaaagaaaaaaaaaaaaaagaagaagtgtagcctgaaaatgtgactaaattgctgcaacctcatgatcaaacttgaatagatgaggagttrcttcttacagataagcaaagaaagcagtcaatccacactaagacatattctatagatgctcattgagttatgatggggttacatcctgataaatccatcagaagttgaaaatatcaccagtcaaaaatgcatttattgctggaaacactgcagacagtctttgattatgatggctcaacttatgattttttgatgagccagagcaattacttagtcaagaaaaagaaacaaaaggcacccaaaactatctctgaaaataatatgacttttttttttcttcagatagagtcttgctctgtcatccaggctggagtgcagtggtgtaatctcggctcattgca

SEQ ID NO: 8924 - DNA, 636 bp, Homo sapiens
tgtcgcccacccttgtgggatcacatagaggggaagggaggcaccaaagggaagcattgcctccagattagagtcagagggccccctgtctgggggtactgtggcagcctgaactgcaaaccacccacaggatatgctctctaaagcgaaaaaagaattgttggaaacatgaggattttgcaggctcaggccaattagggagctgcctggtccaccaccacccttaccaagttcagtgtttctcaacatgcgttgcaatgctgtgttttccttgtgtttagtgcccatattaccctagtcaggtgggggtaccaccccaccagcaggttgtcttgatgttctctcttcagttgctgtgtgaatcagctgttccatcatttaacggtttcactggcctgtgcataatagagtgtatggaaagcccatcatatcttgtgatcatatcctctgaaagtgtagcccgtgtcatgttgcttgggcagtgaagtatgctgtttggttaatgggacatctcacagagtatccaaaaaacatgagataagttatctcaagggtgrctatggtattcctatgagtgacatgtatttgtccctttaagacaggaagctgttggcatagtcctcgtcctcacacagg

SEQ ID NO: 8925 - DNA, 245 bp, Homo sapiens
taaaacaagccaacactgaagacacaaagaatgaggttaggttcattgaaaccagggtaacacctttggatgagctaaacacaaagatgacamtgaccttgagcaggtatagaagctcagagacatgcctgcaaaatgaaatccctgaggaattttgtagctacccagagatacgtggttcaaattaaaatgtctgactgatcactcccggcatgtgctgcacagttatgtgaacgtgtcacacc

SEQ ID NO: 8926 - DNA, 799 bp, Homo sapiens
ctgagtcttccatataaagatcatattcctgctccaagtggccattactgagctgagagatgtcattgccacagggaggacctataggcacatgtaggttgaatgaaactctagttctacctggaagcccagrcaagggatgggtcagtgagcaagactctcttcctagtctcaggccatacctgtggcgccctgatcctattctcatgacattggacctgggcagatgtgacaaattcagagaactatgattttgactcaagggtttgtagatttcctttttcactctaatttcagtgtctaaagtcctcacaaccatgaacaatctgagtatttgatgagacagggctaaatattgcagtttttctcctagaaatcatttgagggtatttgctttaagttgattggaacaatatggcgtaactgtttgcacaaacttgggacaaatgatattgggataacgatctactagaatagggacattttacccacagtttctgggagaaaaaccgaggaatttctatcatgaccagccttcaggcctcctgaaatatatctctcacagtgtcctattcttatgctgaggagcctgaggtccctgtgtgaggattagacagtggattgttatgtgtgtaggggaatcagcttaatgtgtctgtccatgtctgaatttattgcagaaattgaaaagaaggggaaggggaagaaaagaaggggaagaagatcaaagaaggaaagaagaaggggaagaaaagaaggggaagaagatcaaaacccaccatgccccaggtgactttca

SEQ ID NO: 8927 - DNA, 799 bp, Homo sapiens
ctgagtcttccatataaagatcatattcctgctccaagtggccattactgagctgagagatgtcattgccacagggaggacctataggcacatgtaggttgaatgaaactctagttctacctggaagcccagacaagggatgggtcagtgagcaagactctcttcctagtctcaggccatacctgtggcgccctgatcctatyctcatgacattggacctgggcagatgtgacaaattcagagaactatgattttgactcaagggtttgtagatttcctttttcactctaatttcagtgtctaaagtcctcacaaccatgaacaatctgagtatttgatgagacagggctaaatattgcagtttttctcctagaaatcatttgagggtatttgctttaagttgattggaacaatatggcgtaactgtttgcacaaacttgggacaaatgatattgggataacgatctactagaatagggacattttacccacagtttctgggagaaaaaccgaggaatttctatcatgaccagccttcaggcctcctgaaatatatctctcacagtgtcctattcttatgctgaggagcctgaggtccctgtgtgaggattagacagtggattgttatgtgtgtaggggaatcagcttaatgtgtctgtccatgtctgaatttattgcagaaattgaaaagaaggggaaggggaagaaaagaaggggaagaagatcaaagaaggaaagaagaaggggaagaaaagaaggggaagaagatcaaaacccaccatgccccaggtgactttca

SEQ ID NO: 8928 - DNA, 799 bp, Homo sapiens
ctgagtcttccatataaagatcatattcctgctccaagtggccattactgagctgagagatgtcattgccacagggaggacctataggcacatgtaggttgaatgaaactctagttctacctggaagcccagacaagggatgggtcagtgagcaagactctcttcctagtctcaggccatacctgtggcgccctgatcctattctcatgacattggacctgggcagatgtgacaaattcagagaactatgattttgactcaagggtttgtagatttcctttttcactctaatttcagtgtctaaagtcctcacaaccatgaacaatctgagtatttgatgagacagggctaaatattgcagtttttctcctagaaatcatttgagggtatttgctttaagttgattggaamaatatggcgtaactgtttgcacaaacttgggacaaatgatattgggataacgatctactagaatagggacattttacccacagtttctgggagaaaaaccgaggaatttctatcatgaccagccttcaggcctcctgaaatatatctctcacagtgtcctattcttatgctgaggagcctgaggtccctgtgtgaggattagacagtggattgttatgtgtgtaggggaatcagcttaatgtgtctgtccatgtctgaatttattgcagaaattgaaaagaaggggaaggggaagaaaagaaggggaagaagatcaaagaaggaaagaagaaggggaagaaaagaaggggaagaagatcaaaacccaccatgccccaggtgactttca

SEQ ID NO: 8929 - DNA, 799 bp, Homo sapiens
ctgagtcttccatataaagatcatattcctgctccaagtggccattactgagctgagagatgtcattgccacagggaggacctataggcacatgtaggttgaatgaaactctagttctacctggaagcccagacaagggatgggtcagtgagcaagactctcttcctagtctcaggccatacctgtggcgccctgatcctattctcatgacattggacctgggcagatgtgacaaattcagagaactatgattttgactcaagggtttgtagatttcctttttcactctaatttcagtgtctaaagtcctcacaaccatgaacaatctgagtatttgatgagacagggctaaatattgcagtttttctcctagaaatcatttgagggtatttgctttaagttgattggaacaatatggcrtaactgtttgcacaaacttgggacaaatgatattgggataacgatctactagaatagggacattttacccacagtttctgggagaaaaaccgaggaatttctatcatgaccagccttcaggcctcctgaaatatatctctcacagtgtcctattcttatgctgaggagcctgaggtccctgtgtgaggattagacagtggattgttatgtgtgtaggggaatcagcttaatgtgtctgtccatgtctgaatttattgcagaaattgaaaagaaggggaaggggaagaaaagaaggggaagaagatcaaagaaggaaagaagaaggggaagaaaagaaggggaagaagatcaaaacccaccatgccccaggtgactttca

SEQ ID NO: 8930 - DNA, 1493 bp, Homo sapiens
ccctgctgccaaccctcggaggctccctgagtcccagatcttctccccatgccaggctgaggcaccaagaacccagcccgttcaggggcactagcatcagccagtatagcttgggcaacaggctgtgtggcaggggaggcccggagagcagaagggacagatcaaaggccccactgcatgagaggcccagctgggagcagaccccagggaatcctcatttcctgactcatttgattaagttctttcctgcccatccaaacagacacacaaaccgtattcacatatgtattcatatgtgaatctacccagagatggagagcagacacacaggcatccagacacgcacagcagacgtgccctcatgggtgcaggctcatggctgtacttacacatgtgcaggtggcccagaattcatccctgttcccctaaaccaaaaataccttccgttagctgaaagtttaaactgtgtatcttgctgaacaaaatcaaccctcaggtccccctatcccttgttgactacaaactgaacaccctgaagtaccgtgagccccaacaccttgcatgggggctgggggagggggcacccagctggatgcatcaccttcctctgcattcagccagaggcttggtctctcaggacaatgagaacgtgagaacacagcacctactctcggggtctcccaggcattcctgggagggcaccttcctttccccaatcaggcctcctctgtaatcttcacaagagcttcagttttcccatggatcccccgtccctcccaccctctgaagcaggcaggcaggcagcatgacaagtgacaaatgaaaactcactttctcagccaggcatggtggctcacacctgtcatcctagcactttgagaggccgaggtgggaggattgcttgaacccaggaattcaaaagcagcctgggcaacatatcaagaccccatctcttataaagaaaataaaaagtcattttctcaagctgggtacagtgactcacaactgcaatcccagaactttgggaggccgggggcgggaggatcacttgaagcccaggagtttttgaccagcctgggcaatatagtgagaccccatgatgtataargatataagtaaattttttaagagtcattttataatgaacaggtgtggatcaggactgaggcaagctgggagtggggagggtaaagttcctagaagtctttggggctctggggtgtcattggttcgcagctgaaaccctgtttttggcagttagtcagggctgtcagaagctgccgctgacggcctccctccctgccacagggccaggttcactctccatgttagcatttgtgaactttagccgcctgcccagggccaggctttatcttggagtcagactttcaccaaggattctcagagaaagacgggcttcataacatctgcgccccagcctggcagaccccctacactccttcctatggatcctcggtccgctcccaattttt

SEQ ID NO: 8931 - DNA, 1493 bp, Homo sapiens
ccctgctgccaaccctcggaggctccctgagtcccagatcttctccccatgccaggctgaggcaccaagaacccagcccgttcaggggcactagcatcagccagtatagcttgggcaacaggctgtgtggcaggggaggcccggagagcagaagggacagatcaaaggccccactgcatgagaggcccagctgggagcagaccccagggaatcctcatttcctgactcatttgattaagttctttcctgcccatccaaacagacacacaaaccgtattcacatatgtattcatatgtgaatctacccagagatggagagcagacacacaggcatccagacacgcacagcagacgtgccctcatgggtgcaggctcatggctgtacttacacatgtgcaggtggcccagaattcatccctgttcccctaaaccaaaaataccttccgttagctgaaagtttaaactgtgtatcttgctgaacaaaatcaaccctcaggtccccctatcccttgttgactacaaactgaacaccctgaagtaccgtgagccccaacaccttgcatgggggctgggggagggggcacccagctggatgcatcaccttcctctgcattcagccagaggcttggtctctcaggacaatgagaacgtgagaacacagcacctactctcggggtctcccaggcattcctgggagggcaccttcctttccccaatcaggcctcctctgtaatcttcacaagagcttcagttttcccatggatcccccgtccctcccaccctctgaagcaggcaggcaggcagcatgacaagtgacaaatgaaaactcactttctcagccaggcatggtggctcacacctgtcatcctagcactttgagaggccgaggtgggaggattgcttgaacccaggaattcaaaagcagcctgggcaacatatcaagaccccatctcttataaagaaaataaaaagtcattttctcaagctgggtacagtgactcacaactgcaatcccagaactttgggaggccgggggcgggaggatcacttgaagcccaggagtttttgaccagcctgggcaatatagtgagaccccatgatgtataagkatataagtaaattttttaagagtcattttataatgaacaggtgtggatcaggactgaggcaagctgggagtggggagggtaaagttcctagaagtctttggggctctggggtgtcattggttcgcagctgaaaccctgtttttggcagttagtcagggctgtcagaagctgccgctgacggcctccctccctgccacagggccaggttcactctccatgttagcatttgtgaactttagccgcctgcccagggccaggctttatcttggagtcagactttcaccaaggattctcagagaaagacgggcttcataacatctgcgccccagcctggcagaccccctacactccttcctatggatcctcggtccgctcccaattttt

SEQ ID NO: 8932 - DNA, 820 bp, Homo sapiens
aggaccagctgcatgaaaaatcacctgaagtgcttatgaaaatacagcgttgagtcccaggcaccaccccagaccaactgaattaagagttgatgggctccagactgggtgctgtggctcacacctgtagtcccagctactcaggaggctgaggcayaagaattgcttgaacctgagaggtggaggttgcagtgagccaagatcacgccactgcactccagcctgggcgacagagcaagactccatctcaaaaaaaaaaaaaaaaaaaagagttgatgggctccagaatctacattctaacaaggtctccaagtgattcttccacattaacatttgagaatccctgaattagttctcagagcatccacactcacatggagcttcaagtcctcatatgaatcctccttgagtctgaagttcattactctcagagtagtctggcaaggaagacaaagtagagtttcggggtcagggacctggattcaaatctgattctatcatttgctatataggtgaccttggacaagttacttaatttttccaagcctcggtttctttattgatagtatgtggataagaatatcttcatagggatgtcgttgcaattaaacaggagaggaaggctatcattctttggaatatttattgaggtctacataccatttataccaagatgaataaaacattaccaggcactgtgctgcataccatgtataccaggaagaatgaagcatggtccatctcattaatttgttgctttgtctttttgtgcctgtccctttgtgattaaggtctgatttgttcagccttttctaaccct

SEQ ID NO: 8933 - DNA, 763 bp, Homo sapiens
cccaggctgaagtgcaatggcatgatctcagctcatcgcaacctccacctcccgggttcaagcgattctcctgcctcagcctcccgagtagctgagattacaggcctgcgccaccatgcttggctaattttgcattttcagtacagacaggctttctccatgttggtcaggctggtctcgaactcctcacctcaggtgatctgcccacctcggcctcccagtgttgggattacaggtgtaagccactgcgcccggcttactttgttactcttaatatctctgtgcctcagttcctaaactaaaaaaaggagatgatacagtgtccacttcatagggctgaggattaactgatattggtaaagagcttagaatggtactgagcatgcagtatgtatgcagtaatgaatactatttgtatcattatacacatctctcacccttcccacctactgatatgttggcacctttcctggtggtggtgttttatccgaatctgagattttaagctcagatcttctaactccaaactgctagttcctggatgagtggcatktgagtaaggtactaaatctttctcatttttcagttttctcctctgtgagaatgccaccttccttgcacaagtctgaatgacacaacatatataaggttccttgcatgttccttagcatttaacgaatatatcatatcacctttctggtttattacatgtgattctcacaacacactataagacagatattttataaagaaggaaacagga

SEQ ID NO: 8934 - DNA, 828 bp, Homo sapiens
tggtttttgtttttgttgatgttaagctaacattatataaatttatgtcagcacatgatcagatgttatttgctttcttcttttggatagataccagtgtagactagcagtatttaaagaaaataaagttagaatttttgcttatgagatatctgtgatatatcttataggccattatcagaatcacctggcaacccttttaactcttccctccttttcctaggagggtgtatcagattctcttggtagagggtagctagacactgtttaaaaattttccctgggtgattatcaacattctcactgtcatctacactgaagaaaagaacatagaagattctgatgtaatttacctaaggcccaaaccatttccagatttaagaatgcttcccaaaagcagagaggcaagataggcagttatttggggaggcccatgtatattggggtctgagatacagcagttgcccagttgtttcagagactggaatgctgaagmcctgggcacaggagtatactaatggtgaattaacagtgagtgacctcaatttcctttcaggaatgatcaccaaatgagacctgagagaccaactggtagtcacaaatggaagggaaatgagctctgtgcatcattatccaagttggcctctggtcctttttcatcttatgaacaagattagctacaaattgatccatgtattttctagaacatcaggcataggtccagacctgaacacagggaacagcccatgaggaaacctccttcctttggagggtaataactattaaaaaaggaaattaaatagcgtgtgactgccctggtcctggagg

SEQ ID NO: 8935 - DNA, 709 bp, Homo sapiens
tccatcaggagggcggccagaggagtggggggaaaataccacagggaaaaggaaatcttcagctgagctctaacaatttgaaaggggtgagaagactcctggccagaacttgggggaggccatgaatcgactgtgcagactccacaggctcgggaagaaccaagcccttttcttttgcagcttggagatgggtagtctggggcaagctcycaagtccagcttgcccactgcctgaaaacagactccgtgcttttagggagaaaatggtgggagtaagaccgacccttcagtttgcatgggagctgggtgaggcctgtgactgccagctttcccccagttccttgacaacctgcatggctcagcagaggcagccataaccctccaaggtacataccactattgacctgggaatcccacctccatcccccacagcagcttcagcaagacccactcaaggagattctgagctcagacatgccttgtcctaccccacctgatggtccttccctacctaccctgatagctgaagacaaagggtgtatcatcttgggagttctagggccctgtccactgtcagttcctctccatactaccacagctgatgctctctagaaagagccacctcccagcaggaggccaaccagcacaaaagtaaagcattaaaccaccaaagctaagaaccctcatggagttcatttcagccccctgc

SEQ ID NO: 8936 - DNA, 537 bp, Homo sapiens
tctcctcaaaaaaaatatcttttggatatacttaattttaaaataaattctcaaagtcctccaatacagtaaatcatcaatcaaagaggtgattgccactttttgtttggatctagaatgctgaaatagaggctcagtaactctatcctgactaagagactgcaaagaaaatttggtattagagggacttcactttgtaaaactttaaaatatcttttttttttccttaaaattttcaaagaaatgcagttttactcaaagttcttttaaactcttaagggacatgtagttctcattttacatagcttattacagattatactaaataatgtaatgtttgttatacattttatgtagccaatatgactrttaataataaaaaagcaagagtcaatgataaaaaaatctaaaaactaaaaaagaaaacaaaattacagtaatccagtagaaattaaaattacctgtggtattttcaatgacctgggtaacagtatttttcctctaaccttcacaccttcattagagggaatacaaaga

SEQ ID NO: 8937 - DNA, 537 bp, Homo sapiens
tctcctcaaaaaaaatatcttttggatatacttaattttaaaataaattctcaaagtcctccaatacagtaaatcatcaatcaaagaggtgattgccactttttgtttggatctagaatgctgaaatagaggctcagtaactctatcctgactaagagactgcaaagaaaatttggtattagagggacttcactttgtaaaactttaaaatatcttttttttttccttaaaattttcaaagaaatgcagttttactcaaagttcttttaaactcttaagggacatgtagttctcattttacatagcttattacagattatactaaataatgtaatgtttgttatacattttatgtagccaatatgactattaataataaaaaagcaagagtcaatgataaaaaaatctaaaaactaaaaaagaaaacaaaattacagtaatccagtagaaattaaaattaccygtggtattttcaatgacctgggtaacagtatttttcctctaaccttcacaccttcattagagggaatacaaaga

SEQ ID NO: 8938 - DNA, 812 bp, Homo sapiens
tgttgatctgtgaccttacccccaaccctgtgctctctgaaacatgtgctgtgtccactcagggttaaatggattaagggcggtgcaagatgtgctttgttaaacagatgcttgaaggcagcatgctcgttaagagtcatcaccactccctaatctcaagtacccagggacacaaacactgcggaaggccgcagggtcctctgcctaggaaaaccagagacttttgttcacttgtttatctgctgaccttccctccactattgtcctatgaccctgccaaatccccctctgtgagaaacacccaagaattatcaataaaaaataaataaataaawaataaaaataaaaataaaaaaataaagattgccagggagtgttgagttctgagtgattgtgatcatgaattttaacagaaagtaataaccctacttatgtgatttttttccagcagcaagcttggtttcaaacgaagaaaagcaaatggtagagttcatcccagggaactttccaatgaatatattggagaaacagtcactgaagctatttgcattatcccatataaatcataaaacaccctccaaggcagaaaattagaagtcatctgattggttgcaacttatgttaattctaccttttcacccccttatgcttctaccatccaaattcaatacttagctggattaccgcactagccgtatgttctattcccaatctctacctccaccaaaccacttccatcatgcattttttttttttttgaaacggagtttcgctcttgttgcccaggctggagtacaatggtgtgatctcgg

SEQ ID NO: 8939 - DNA, 1271 bp, Homo sapiens
acaaaataccaatttctaaatgacaaaaaaaatgagatggaactctggtcatgaatttgctaaccagagtctacagattgtagccattgtagccaatatggaaaacctttattgcttttttttttttttctgcaatgactacgttggacaaagcagttgtctctgagtgtgaatgtagctgagagaaatgataagacatcaaacttttgtctgcaactgctcctagttatagattttttttttttttttttttttttttttgctatttcctttatttgctatttggctgcttggaccagctagaattggaaaattggtgtctttcttcaaagaaaktcagttccctctcggttaccatacttatgtggttcctcctcttctgtgctcattctggtgattcatgaaaataggtaaaagagatgtgttaatatttataggtatatgaaaacctgaatagctgtgatcaactgaaatgagtgcgatggtttcctaaatggaattggagaaacaccctcagtggcctctttgaaagaaccttaaaaagacacagataccccagctttccctacagaggcactattgggaaggggcaagcccagtatactggtttgttttcaaactgctaataaagacatattcaagactgggtaatgtataaagaaaaagagatttaatggatccacagttcacatggctggggaggcctcacaatcatggtggaaggcaaaagaggagaaaggcatgtcttacatggaggcaggcaagagagcatgtgcaggggaactgccctttataaaaccatcggattgcataagacttattcactatcacgagaacagcatgggaaaaaccactcccatgattcaattatctcccaccacgtccctcccatgacaagtgggggttatgggagctacaattcaagatgagatttgggtggggacacagccaaaccatatcacccaggaaaggagggtttcaccacgtggctgtgccattctagaacagagggcctgtttctctctacgatgcaagtaccagtgcctctgaggatagaagaaaacaaatggttaatacccagggacactaaccaatgaaggggagacaagacatctttgagtaagagggcaagatggagagcaccttccagcatcagcagctgggccctgctctcagagctgcttagggcagctgctctgagaaagaaatgatagctgctatgatctaaatgtttgtgtcaatccaaaattcacaggttgaaatcctaaccc

SEQ ID NO: 8940 - DNA, 576 bp, Homo sapiens
tagccatttctataaaaaacctccccaattttgtggggtgatgtgtccccttcaagcgcagaaatagaggagaagatggcattaagtgtaattaaatatgcactcttgcgtttggggaaatgcattgggggaaatttgtctttaaagtgtcattcttctagcaaaggcacctgttatgctaatgatgctgccatagtctctcaactgggggcctagatgttttcttagcatagctactgtgaatacattacaccccatgccacactccgtggtctagcgtcttttgctgaaatgtaagcaccttggattcttaatttggcctccataatgaaacacatggctgggagaagtacttaagtyagtcccctcactggcgagaatacctgatgggaaaagactagaagaaaaacaaacatttattgagccattgtcatgcactaggcattgtgctgattgcttgtcttatgctctgctacttaattcaccacagccatgcgaagtaggtattcgtattgctattttacgggtaaggaagctgaaaggtcacaatttagttattcaactaatatttcttga

SEQ ID NO: 8941 - DNA, 800 bp, Homo sapiens
tccctgattcttcagtttacagatggcacgttgtgggactttccggcttctattatcatgtgagtcaattttcatagtatatcgtctctaacacgtctaatctctctctctctctctctctctctctctctctctctctctctctcattggttctgtttctctggagaatcytgactaatatacctgcctttcaatggcttgattgttttgtaggtcagaaatatgtgagcaggagagggcttgttaggtttggaacttggaaatgtagcttccagaggaccagattaccaactgccagaaaacggaaaatagataagtgctcatgttttaaaaagtcacttcatatgatatttttcttacattggaacattggcatatcaataacctatattacttcaaaatgcctcaccctgttctatcaccttaaaagttggcagttagtgtttcattttgatcaataagcattatctttagaaggtaaattagttaaatcttaaagtagataaacttaaaaggtatactcatcttattgaattttaattgttttacaacccagcagtgatttggccttagggagggttcctctgaggtagaccttggttcctctgaggtagacatttgaaaacacctctagaagattctgtaggttttcaggcacatttaactcagtcttattttgataattaattcacttacagacattaacaagttcggtggcatctaaatcaaaacaccactctcacgtgagtaaacgggcaagaggggtgaggggattggatagtcatctgaaggcaggaga

SEQ ID NO: 8942 - DNA, 1125 bp, Homo sapiens
aaatgttaaaatacccatttctgttttcctagaagtacaggaaggatgaaattatttttgatggagagagcatttagtgtctcagagagaagacaggacatcattcatcactttcatgatggtgagcctatagatcttactgtatttcttctgtcggttggccaggaagccggccagttgagttacaaaacatttctctttgaggtttctgaactgctgtttgttctctgccagctgggggcgcaatttctcgttgatttctaaaatgttcgtctctgccttctcgctggaccaagggccagctgataccaccatgctgacgtttgtggcagaagaggtggagccagggactggggagaagaaacccaaacatatgatgggttaaaaactggtgaaatcaaataggtttaatcaggactgagggatgtcagtaactgaaattcttaacttactgttgtgaaaaatgtgatcactccccacagcactttaggatccttcaccacaaaaacaaggttcgaggtgcctgaactcagagctgaaagcactgccagtagctcagactctgataagagtgaggtagactgtggccagcgtgccaggtaaccgtctgcagttgcaataacagaattagaaggtgggggtgtcatggaatcttaggagccctgcattccaattgcccaggctttcctgaaacacaggcaccctagtctcacctgagggtcaccaccaatggggatcattccttcagsattcactctcagtattcgtgtacccttgtgacgatgccacagacccgtgtctttcccaatacatctaagcatattcctcactgtttatctcttgtctgtacaacatcatcaaggcagaaacagtttcccaacaggttgtattttcttaatggtagtcatgaagtcaccccacctgctctcagttaaaacagagcttaaggcctttccacaggtgtaagatatcaaacttttagcctgccctgatttcctctgggtcttctgcagttttgtctgtatccactagaaagtgaatgaataattcatttgtaaaaaatgttgtcttgcctgtctcagtattcttcttgctgtttcccattgttatgttgatttctttttt

SEQ ID NO: 8943 - DNA, 1125 bp, Homo sapiens
aaatgttaaaatacccatttctgttttcctagaagtacaggaaggatgaaattatttttgatggagagagcatttagtgtctcagagagaagacaggacatcattcatcactttcatgatggtgagcctatagatcttactgtatttcttctgtcggttggccaggaagccggccagttgagttacaaaacatttctctttgaggtttctgaactgctgtttgttctctgccagctgggggcgcaatttctcgttgatttctaaaatgttcgtctctgccttctcgctggaccaagggccagctgataccaccatgctgacgtttgtggcagaagaggtggagccagggactggggagaagaaacccaaacatatgatgggttaaaaactggtgaaatcaaataggtttaatcaggactgagggatgtcagtaactgaaattcttaacttactgttgtgaaaaatgtgatcactccccacagcactttaggatccttcaccacaaaaacaaggttcgaggtgcctgaactcagagctgaaagcactgccagtagctcagactctgataagagtgaggtagactgtggccagcgtgccaggtaaccgtctgcagttgcaataacagaattagaaggtgggggtgtcatggaatcttaggagccctgcattccaattgcccaggctttcctgaaacacaggcaccctagtctcacctgagggtcaccaccaatggggatcattccttcagcattcactctcagtattcgtgtacccttgtgaygatgccacagacccgtgtctttcccaatacatctaagcatattcctcactgtttatctcttgtctgtacaacatcatcaaggcagaaacagtttcccaacaggttgtattttcttaatggtagtcatgaagtcaccccacctgctctcagttaaaacagagcttaaggcctttccacaggtgtaagatatcaaacttttagcctgccctgatttcctctgggtcttctgcagttttgtctgtatccactagaaagtgaatgaataattcatttgtaaaaaatgttgtcttgcctgtctcagtattcttcttgctgtttcccattgttatgttgatttctttttt

SEQ ID NO: 8944 - DNA, 805 bp, Homo sapiens
ctcctgtgttaaagatggatcagctaaaacaattcaacactgaagatacaaagaatgaggttaggttcattgaaaccagggtaacacctttggatgagctaaacacaaagatgacactgaccttgagcaggtatagaagctcagagacatgmctgcaaaatgaaatccctgaggaactttgtagctacccagagataagtggttcaaattaaaatgtctgactgatcactcccggcatgtgctgcacagttatgtgaacgtgtcacacctaacttgggtccattgtcttcagactgagcacaggttgccactggcatggtctgagaataggaatagagccatgcccactgacccatcctatgtctgggcttccaaatggaactatagtttcattcaaatcttcacgtgcctataggtcctgcctgcaggaatgacatctctcggcttagtaagggctgcttactgtgggaatatgactcccatctggaagaccaggtggagacttgttcccatcaaagtaagaaacctattgtccacgtcaagggcgaagctgatgtgctgttcctcaaatgagtaaaacacacttctgtagtgctggaatgagtcaggtagttcaaagtacattgacggagtcgaataacatctatccagtgagtcctgcaagacttcaggctcttccacttccatcagcatgccgctgagcctggaaaagcagacaaaactaaagaagcagccagggaaaatcagacaccacagagccccactagatttcagaagtaacgtaaggaagtggtaagaaaagaaa

SEQ ID NO: 8945 - DNA, 805 bp, Homo sapiens
ctcctgtgttaaagatggatcagctaaaacaattcaacactgaagatacaaagaatgaggttaggttcattgaaaccagggtaacacctttggatgagctaaacacaaagatgacactgaccttgagcaggtatagaagctcagagacatgactgcaaaatgaaatccctgaggaactttgtagctacccagagatamgtggttcaaattaaaatgtctgactgatcactcccggcatgtgctgcacagttatgtgaacgtgtcacacctaacttgggtccattgtcttcagactgagcacaggttgccactggcatggtctgagaataggaatagagccatgcccactgacccatcctatgtctgggcttccaaatggaactatagtttcattcaaatcttcacgtgcctataggtcctgcctgcaggaatgacatctctcggcttagtaagggctgcttactgtgggaatatgactcccatctggaagaccaggtggagacttgttcccatcaaagtaagaaacctattgtccacgtcaagggcgaagctgatgtgctgttcctcaaatgagtaaaacacacttctgtagtgctggaatgagtcaggtagttcaaagtacattgacggagtcgaataacatctatccagtgagtcctgcaagacttcaggctcttccacttccatcagcatgccgctgagcctggaaaagcagacaaaactaaagaagcagccagggaaaatcagacaccacagagccccactagatttcagaagtaacgtaaggaagtggtaagaaaagaaa

SEQ ID NO: 8946 - DNA, 621 bp, Homo sapiens
agtaaaaacaatataagattccacttctgctgcatttccatttacaatttacacaagagaatttcattttatcttattgtgatggaaactgagccgctgtcttagtatttatattgctttttcacttaaaaaaaaatcamcaagcccttttaaaagacactgtctaacactgaccccatcttccagcagtccagaaatgataaatggcactaaggaggcccttggtgaaggctaactttatggatgtctcccctgaccccgtatcaagtcaattgcattcagcatttctgctgaccacagggaaatgcaaaatgggcattctatttgcacactaattttactgagcccttgcgtcttcataaaatgataacatggggctaataaaaatcaagcatctcgggtgctaatataagcaaatgttgatgcaggcaggtaacaaattgctttgtcatttagaaggccgtaaaagagcattataatcatctttaggcaaaatggatgggtcgcctttgcttagcttttagctttcatttgcaaaatcaatttaaggtaatgcagcagctctgaggtggtgactaccccaccccctcctgtcaccaaatctccagactctgtgcaaag

SEQ ID NO: 8947 - DNA, 621 bp, Homo sapiens
agtaaaaacaatataagattccacttctgctgcatttccatttacaatttacacaagagaatttcattttatcttattgtgatggaaactgagccgctgtcttagtatttatattgctttttcacttaaaaaaaaatcaccaagcccttttaaaagacactgtctaacactgaccccatcttccagcagtccagaaatgataaatggcactaaggaggcccttggtgaaggctaactttatggatgtctcccctgaccccgtatcaagtcaattgcattcagcatttctgctgaccacagggaaatgcaaaatgggcattctatttgcacactaattttactgagcccttgcgtcttcataaaatgataacatggggctaataaaaatcaagcatctcgggtgctaatataagcaaatgttgatgcaggcaggtarcaaattgctttgtcatttagaaggccgtaaaagagcattataatcatctttaggcaaaatggatgggtcgcctttgcttagcttttagctttcatttgcaaaatcaatttaaggtaatgcagcagctctgaggtggtgactaccccaccccctcctgtcaccaaatctccagactctgtgcaaag

SEQ ID NO: 8948 - DNA, 575 bp, Homo sapiens
cagcattggtagcwtaataattagaggacgaacagataagcattgctgagtttcaagtgcatatcccctcctatggcctcctggaagatgccatctttaatctctaccctatgacatagagccatctctatttaggaggaaaaaaaaaagaaagaaaaagagagaaggaacacttttccccttgcaaaggcagcctttcttgtaatatccataatggatttcactttcattctaatttagtaaagatgaaagcaaatgtaagaagtccagtaaaatatgatcttccaggaattaaggcatgccaggggacgcattaacttaattggtctatattaatagaatgaaggaaaataacattgtgatcttcagggtggacgataaaagcatatttgttgtctagctgtaagagaaaataataaagtcgtgtgtgtgagggtgtgtgtgggggccgggggcctggaggggtttagacttgtattctcttctttaactttgcctgtaaagactgactttacagattctccaatttcaaagagtcctcagtgtgaataagatttaatgaatattctgaatgg

SEQ ID NO: 8949 - DNA, 646 bp, Homo sapiens
ttcacgactggtttaacaccattcctttggtgctgttcttgtgagagagttctcatgagatcttgtcgtttaagagtgtgcagcacawcccttctctctcttcctcctgctccagccatgtaacatgtaactgtttcccctccgccttccaccaggattgtaagtttcctgaagcttccccagaagcagaagccgctatgcttcctgtacagcctgcagcatcaggagccaattaaactccttttctttataaattgcccagtctgttatttctttatagcaatgtaagaatggattaatacaggggttatactggcctcataaattcaaaattgttttgttttctaatgtttgaaagaatctctgtagagtttaatattatctctaacctacacatttgatgtaattctccattggagcaatcaggagttggtgttttctttttggtaacatttatgtttaccaattcactttaataaatatggagcttttttcatattttgtatcctgcatcatttttgagaagtgtgtttcaaaaggcatttgtccatctaagttattcaattattggcataaagctgttcataacatgcaattatctttaatgttaatagactaatgtcctttctattctaaacattattaa

SEQ ID NO: 8950 - DNA, 451 bp, Homo sapiens
tacaagaaagacatttatctttgaatttggtttttaaaacaagataatcactttgattgtaggtctggctgtggcatctttcacagaaggacagagtgaaaaagcccaggctctcgtcactccaaagtccattgcagagagcaggacagagtgaaaaagcccaggctctcgtcgctccaaagtccattgcagagagcagtacagaatcctatccagactgctgacttcataaggttgtcactcaatgagaaagctgtctcagtggcctctagagcagggaagaggtgccaagattaaagacctgacttcatttgctgcagcagcagtgtgaatgctttatctctgtatggaaaaaaaaaaaaaaaaaccagatttgcacatttgaagaatggatagaaacagttccatagttttaaatgrtagtggaaagagtatctggtttgcccgagct

SEQ ID NO: 8951 - DNA, 816 bp, Homo sapiens
actggagctccctgcccagcgggccctgcccaggaggaagcggcccagggtggtgaggggccctggcaggcacccccgcctctcctgcctgaggcggtttggggaccaaggccctgcttgggtactgagcttttccctgatgtctgtgatcacagccctggccatacacaatcacgcacacacacacacgtaagcacacacatgaacacacgtacacgctcataaacatccacactcaagtgcacacacgcaaacacatgtacatgtacacgcagagacagtcatactcacacatgtacacagacgtgcactcacacgcrtttataagtcacacacaacccacagagacatgttcccacacacacgcaccctattttgcacatacggcacacacacaggcccaggagggtggcagaggcaccaaatgccctctcggaatgcagggaccttgaattttccatttgtttctcccttgccggcagcctagctgggagctgggctcagaccctgctgcttgaagcagggtgagcccctgttaggtccccaccgccaggctgggccttcctcagaagccccttctgctgccaagcagacccccgggtccctgggctcactgccctccctctgaccttgtaccccagctgggccgtgtcctctgcgaggctggaccccgcgtcccttaggagcccaccctagagggggattctctgctctcccgcagccccactgtgcggcgtgatcgcactgggtggtcgtgtcctcttctgcgcagggactcctcactaggctggagtctgagaaaggccccccaccccc

SEQ ID NO: 8952 - DNA, 774 bp, Homo sapiens
tcagtgtttgggttcactcccaggtgaggtgatgtcatagagttcttgagatgtcatctagagaaacagaccttggaaagtctaaacagaagttgtttaccttgtctttttgcttgttgtgcaaatgggcctcagctttggagagaaaacaagcacgtttcaagctcagtcaaagtcaaaattcaccattgccgtcagtcaaaccctgacaaaagaggagcttttgttcattcttgcagtgacctgacttctaccatgaactttgtaactaggatgcccatagcatcctccaaattgacctcaagctggttgggctcagcttcacagggcaatttgggcgaggcacyacttcctgttctttctcctgagggactggttcctctgagttctcccatttatccttctcccccacaaccatgccaaggaactcctggtcctcctgggaacagaaccattcaggcaaccacgctagtcacagtattgtatttcaggctgcattcagatgtggatttccaacctgtcctgaacctcatacatccttacactgccctagagccactactttcccaacatgccccactggcccatattgagtgagacctgttaagaaaagtcccaccagagtaactctctagacaatgcaatcaaaaaagactccttctccatataatgttcagcctccaataactggcttttgtcttcatggcacagagctttatgtactttctcaactgctcaactggaaatactctttctctctttcacttgccaaat

SEQ ID NO: 8953 - DNA, 866 bp, Homo sapiens
tatttaaacccaacctataaatgcagaacctcttcttttccctgaaaaatacgcatcctaatttggctagataaataagaaagtaatgaaagagtgctgtaaaaggaatttctaatatgacaaacctgaaagcttagaaaaagcagatctcttttacacctttaaactataaacataaaaagcatctggaaattgaattttcacagtaggggctggaaaggaaaagtaaaaacataacaatatagtacttaattatcataattcaccccaggtgttgaaatgctgagaaaagatatatttatgatgagtatcaaaacttgtattcacaagttggtaaagagtcttgattaaacatcatatgtattatacaagaaagataaaataaagcaaagttaatgttttccaagtactcatttcttttctgatattcacctaaaaataaactcttatatagttgcatggttatagtctgtttacaaattaggtaatacatttttcttaaaatcacacacacaggattgtttgttttyttcttactgatttgtttgagttcattgtagattctggatattagtcttttgtcagatgtacagattgtgaagattttctcccactctgtgggttgtctgtttactctgctgactgttccttttgctatgcaaaagctctttagtttaattaggtcccaactatttatctgtatttttattgcatttgcttttgggttcttggtcatgaagtccttgcctaaaccaatgactagaagggtttttccaatgttaacttctagaatttttatagtttcaggtcttagatttaagtccttaatccatctcgagttgatttttgtataaggtgagagttga

SEQ ID NO: 8954 - DNA, 743 bp, Homo sapiens
agtgaagttaaaccactcgctaagcccactcaactgtactagaactcaagctccagactcttcgccgatacccatttcccttcaaatgtggaataatgccaagccacaacgcyaactcagttacaagcataaataagcttctattggtaataattaacttttcaatgcaataaagaaaacatatcgtctgtttctcctcagacaactgttaatcagcaagaactttttcgttttgctcttttattctcttattagttctgtcaatctctgacaactagaacaaatgtaagacttattctttttttttaagcagcatcttaaagccatacatactatttcttaatttagaggaaaaaaaatgcattttcttaggtttggtttttgtcaatattactgtttggtataggtgctaggacaaaagaaaatgtttattttctctcaaaccaagaaaacctcaaatgtttttccagttcaaactaaatgattttgttttataggaaactgtattttaatttttcgctaaatgaacttcaaacaactgagaaaaggaagtcatattcttgtagtctggatcacttaatagttcagaccatggaatacagctcctcttcttgcctatacaaacacaccggctctggctgaggtcacctctctctacctacctacctacccagtttctgttactccttggtgtacctaattacagagaacatcagtatgaatgctctggttcccaaatccta

SEQ ID NO: 8955 - DNA, 596 bp, Homo sapiens
tcattatcaactctgaggtagacaaggcagcacatatcaccctcaatttgcaaatgaggaagtaaaggccaaatggagttaagcagctggccaaaggtgcaccagttcaattttcagccaagtgcagactggaagtcragtctgtctccattaactctgtgtgacctggcaaagaggatgccatctactggaaattgctactgacccttggtccacaaagtggacaatcagcttcttggccattgagagcagagcacagccccatgggccctcctgccaaggccctgtcccagagcagatggcaatgagcaggggagaagggctcagtgccactgaagggcctgacagcaggattttagctgtagatgggccattcctgtctgagccttgtcatgctgagcacagggcagggaggcaggactagccaaagtgccttccaccttcatctgcagtaagtaaatgagcccacagagggacagcaggtagtgtagagctgggtgtcatttacactttgcttttcttcttagctcttgcttaggcatccctgaaacccgaggcagctgataaatgcctgaatggctccccaactccagagc

SEQ ID NO: 8956 - DNA, 831 bp, Homo sapiens
catctatttcagggtgcctagaartttaatatcagacttacagtttcaaaaatggactttattaactatcataaacaaatataaattacagtccgattaaagacataaatgtcagcgtagagttccatatccagcaaaaaatatgtttcaaaaataaagactgtttgcagaaataaaaagctaaaagaattcatcaccagcaaacatggactaaaagaaacgttaaggaaacttctcagcagaaggaaattgagacccgcatggaaatctggatctatgcaaaggaataaagagtatcagaagttgttaactgcatgagtaactgtataaggttttattcttattaaaaaataataatgatgtaattgtgtcatttacaacatatgtagacataaaatgtatgacaacagcacaaaaagccaggagggggaaaatgggaataactatcatgagattgtaataccgtctataaagtgctataaatacactcaaagatcaactatgataagctaaggacgtatactatgaaggctaaagcaaccattcaaatgataaaacatagagtcacagcaaacagaccccagtcttcaggtcatctcatgcctgtgagcaaaaccacgctccaagcagtgtgaagcagatggaaggaatgagaacctggacagcaaggaacccgaggcctggggctcaggtttcccctcctggagagactcactttgaagctgcaggcctctcattacagttccatgtgcttctcagcctctcatattcttccctcttgaaataccccatttgtgctttttttcaaagaacaaggatcagaagagactt

SEQ ID NO: 8957 - DNA, 831 bp, Homo sapiens
catctatttcagggtgcctagaaatttaatatcagacttacagtttcaaaaatggactttattaactatcataaacaaatataaattacagtccgattaaagacataaatgtcagcstagagttccatatccagcaaaaaatatgtttcaaaaataaagactgtttgcagaaataaaaagctaaaagaattcatcaccagcaaacatggactaaaagaaacgttaaggaaacttctcagcagaaggaaattgagacccgcatggaaatctggatctatgcaaaggaataaagagtatcagaagttgttaactgcatgagtaactgtataaggttttattcttattaaaaaataataatgatgtaattgtgtcatttacaacatatgtagacataaaatgtatgacaacagcacaaaaagccaggagggggaaaatgggaataactatcatgagattgtaataccgtctataaagtgctataaatacactcaaagatcaactatgataagctaaggacgtatactatgaaggctaaagcaaccattcaaatgataaaacatagagtcacagcaaacagaccccagtcttcaggtcatctcatgcctgtgagcaaaaccacgctccaagcagtgtgaagcagatggaaggaatgagaacctggacagcaaggaacccgaggcctggggctcaggtttcccctcctggagagactcactttgaagctgcaggcctctcattacagttccatgtgcttctcagcctctcatattcttccctcttgaaataccccatttgtgctttttttcaaagaacaaggatcagaagagactt

SEQ ID NO: 8958 - DNA, 733 bp, Homo sapiens
tgtacaagatgaagggcagtgtcaggaaggacacagagagccagcaaaaaaggaggagagagagattctgtaaaaaagaaaaaacataggaaagctgagtatgctgctacggggagaattgaggaaaagaggaggccattagagatgtggtgacaatgttggttgtaagcacttcctcctccgtctcccccaagaacctcagtaaatatctgcattgcctcttcaagtcagatctggggcttggtgaaaaaagaacagctaggactatcctcaagggaggcctggggtgcccggtcacacttatgtcgagaaaggtggttgacattcactcaggatttcattggcttgttcatctcatcagtaaatgtttaataagcatgttctgtgtgccaggcactgttctaggtgcttaggtttcaccagtgaacagcacaaatgtccctacattgttgccagagaatgcaataaattataaagagaataaataactatacacagaatgttagaacatgatgagtagaatggaaaaacgaaaaagtagaggagacagtgattttaaacagggtagtcggggtacaatgcccccttggtaaagtgatacttgcgttaagccttgaaggaggtgagggagtgagctatagtttggatatttgccccgcctccaaacctcatgtcgaaatttgattccgatgctgaaggcagggcctggtrgaggtgttcgggtcttgggaga

SEQ ID NO: 8959 - DNA, 953 bp, Homo sapiens
ttaagcatccacaattgctgaaagttacctggggcatggtgggttttgatcttcttccccttcttttcttccccttcttcttttcttctttgatcttcttccccttcttttcttccccttccccttcttttcaatttctgcaataaattcagacatggacagacacattaagctgattcccctacacacataacaatccactgtctaatcctcacacagggacctcaggctcctcagcataagaataggacactgtgagagatatatttcaggaggcctgaaggctggtcgtgatagaaattcctcggtttttctcccagaaactctgggtaaaatgtccctattctagtagatcrttatcccaatatcatttgtcccaagtttgtgcaaacagttatgccttatttttccaatcaatttaaagcaaataccctcaaatgatttctaggagaaaaactgcaatatttagccctgtctcatcaaatactcagattgttcatggttgtgaggactccagacactgaaattagagtgaaaaaggaaatctacaaaccctcgagtcaaaatcatagttctctgaatttgtcacatctgcccaggtccaatgtcatgagagtagaatcagagtgccacaggcatggcctgagactaggaagagagccatgctcactgacccatcccatgtctgggcttccaggtagaactagagtttcattcaacctacatgtgcctataggtcctcactgcggcaatgacatctctcagctcagtaatggccacttggagcaggaatatgatctttatatggaagactcagtggatccttatcaccttcatagaaaggtactcacctcccacgtcaagagaaaagccaacatgtttttcctccaatgcataaaaggaacttccgtagggctggcaggagtcaggctgttcaagacaactggaaggag

SEQ ID NO: 8960 - DNA, 462 bp, Homo sapiens
tcttaaccactacctttcagtttttctatgaaagatatattaatcttaaagtagagatataagattagggtaataggttatgaataaaatataacctaaccaaaactgctggataatggcaactatgtgtagaaaagtatgaatcagctgattagagatactttaccacagtgaaaattttggccatgagatgatgagggggtcagtatctgcagtgccagtcaattgaactgagtacacaaaagcatggggaccagacaggagagtggtactggagggacatcagctgagagaattgcaaggaaggatgtgaattggcaaagctgaagaaaggatctctttttaaattttttttctttttttgtgtgtatttttattcagatagggtctcactctgtttcayaggctggagtacagtggtacaatcatagctcactgtaacctcaaacacctaggttcaag

SEQ ID NO: 8961 - DNA, 640 bp, Homo sapiens
aagaccccgacatgaatttccccacatcggacaagatcaaaacaaggtggtcctatgaaagaccatttgaggccagctcctgagtttcctgtttcccattatagagaaattttgggaaagccttttcacaggagatggaagttgaggcaggatttaaaatacatgtagaatttggataatcgaagggaaggaaatagcattccaggctgaggtttggaaaaaataattgaataattcaatgtgtaaacctaaaataaaatcctaagcccccaactgactgaacagacttcttctgggccatgggaaacctgaaaaattgaattcccatccatgacaagaagataggacagacataccttgatatgctctcctgccttttggagtttaggcacaatggatcataactaatattaaaakagagatcacaagactgataaagactttttgtgacaataagatacaaaatttcagtatgattctggtatagcatcacatgacagatagcaggctgtgaaggaaatcaaaattttttaccccaaaacatatttctttgacgtattttgaaatggtcctgcaaagccacctcttgtggggaaaatttgcatctgtagagcatctctccccatttataggtctttct

SEQ ID NO: 8962 - DNA, 615 bp, Homo sapiens
  misc_feature (1)...(615): n = A,T,C or G
cgggcatggtggcgcatgcctgtaattcaagctactagggaggctgaggcaggagaatagcttgaacccagaaggcggaggatgcagtgagccgatatcgcgccactgaactttagcctgggcaacaagagcgaaatcctgtctcaaaacaaaacaaaacaaaacctgcactagaataagtgctagttctttttttctttaaagacggacaagatgaaatgttttaattctcattttacctaataataaaggatgtaccgttaaaatcaagtaggaatttatccttgtcttattgtcatttttwaaaaattttgctattctgcacaggaccagtttctctagaatgttcccttgctgacttttcctctggtagtatcagttacactgaaaatcagttgtattcttttgctttatttcactgggcaccatcaaactaacaaaagaggagagtaacagagtaggagaagatggaggatgcaagggaataagacacctgtgtcctaacctcctctcgnnnnnnnnnnnnnnnnnnnnnnnnnnnnnnnnnnnnnnnnnnnnnnnnnnnnnnnnnnnnnnnnnnnnnnnnnnnnnnnnnnnnnnnnnnnnnnnnnnnng

SEQ ID NO: 8963 - DNA, 774 bp, Homo sapiens
gaatccaggcaggagacttcttcagtcactgcacgcagcccatctgatttacaagcctttgctaaaacccactaggtgtaaagtgctctgctcaatgcgatcgctacttattgatcaaagataatctctgaacgctacgacaattaagtgtaataaaaagcttcactgggcttctaaaacaggatctatatgtatatatacatacacaaactcatatatattcattcttatatattcatatatatgaatattgtatacattcatagatgtgtatatatagtcctatatatacacacaaacacacatatatattcattcgtatgtattcatayatatgaatattctacacattcatagatgtgtatatatatatatatattcctgtatatatgtgaatattctacacagccataaaaaagaatgaaacacgtcttttgtagtaacatggttggagctggaggccattatcctaagtgaactagctcagaaacaaaaaaaacaaatactgcatattctcacttattaagcgggagttaaacaattggtatatatgaacataaagatggaaataatggaccctggggactgcaaaaggagggagggtgggaagggggtgagggttgaaaaattacctatgggttatgatgttcactagttgaataatgggtgcactagaagcccagtccccaccagtaggcaatgtacccatgaaacaaacatgcacatgtaccccctgaatctaaaagaaaataaaataaaatttaagaaacattt

SEQ ID NO: 8964 - DNA, 2633 bp, Homo sapiens
catccctgtaatcccaacactttgagaggccaaggtgggaggattgcttgagtccaggagtttgagaccggcctgggaaacatagcaagaccccacctctacaaaaatcctttttttttgagacagagtcttgctctgtcacccaggctgcagtgcagtggcatgatcttggttcactgtaacctctgcctcctgggttcaagcgattacctctgcctcctgggttcaagcgattatctgctttagactcctgagtagctgggactacaggtgcccgccaccatgcccggctaatttttttgtattttttagtagagccagggtttcaccatgttggccaggctgaactcctgacctcaggtgatccgctcgccttggcctcccaaagtgctgagattacagacatgagccaccacrcccagccaaaaatattttttttaaaagtagctgggcgtggtagcatacccctatagtcctagctactcaagaggctgaggcaggaggatcacttgagcccaagaggtcaaggctgcagtaagccatgatcgcgccactgcactcccgcctggatgacaggtgagatcctgtctctaaaaaaaataaagaatactttaaaatacagtcttccaggagctcctagcctcctagggtcatgagataacaatgtgataaagagttttacagggagtcagaccgtagacaaatgcctggaagaactcggggaaagcatcacagaaggggtgagacaatttgggtcctgagggatccataggagtcttttggttggagaaggaaagtctgggccccttgggcagatgctcatgtaaaagcacaaggatggaaaagcacgctgtttgggggaccgggatgggtcggagaggcagctggggtgggagggtagaggcctaaccaggaaggctctgggccacgctaaagacctcttcctatgggacagggagaggagcagtatgcgcagtttctctgtccctcgtttctcagacaacaatgattcaagaaggaaaaacaaacaaaaaaaaaaatgtgagcccaaaagaagatgagtatgattcactggacttctggcaatggcttacgaaagaccattgcctgcagaccacgtgactcaggtagactccatggcccaggcctggccagtcagagtattgcttctcaactgatgcagttttagagatgaacacatggcccaatctaagtcacaggtagggagtgacacctttactgggtttcctagaaagggactctccctctccccctagagcctaacagattgtggctgtcctgccaggggtaggagcctgagaccagacatgacatggaggagacaggagcgtaaagaaggatggaaagaaacagcatccgtacggcttctgtcaaacccaaatcagccacacctgaactgctcccacctaagcaagtttggatctggttctccatcatctacttcagttaatctcatgactttatcccttgtccagcttagagtcagtttccctatcttcaactttgggccccttaaagtatgatcggcctcctcccaggctgatgacctgagctttgtatctatctcaaagacccttcttggataaccctgggaggctggcccgtaggcagagagggtcaaatgcccgacaagagaaggtgagagagacggcttcaaagattgtgggagcagggcaaggagggttcagagaggggcacaaacacccccttctccacaaagcatacaagtcacccaccgtttgttcagcccacgtattgaatggggccttccacggcggctgcattgcagcaggcgtatttaacatcacccttgtcaatctgtgacagccgtttctgcattctcctctcatcgccattaacatagaaatagctccataatgacaccaggccttcccgagcaccgctctctgcttatctcattatcaatgaaactatcttgttatgtgggtaaactggaaacaggaacgttctgtatcagatgtcacggggcaattctccctcattatttcatcacgccgagagaaactggagcagctgctgaaatctgctcctgtttttgagctttaggagcaacattttagaagagaagcagctcagatgtcagctgcagtgagtcctagggggtctgtgaggggcatatttcctgacaactccctggtattacttgtctttgcacaaagcaatgccccagaaagacacagggcagtaaaggctggggaggagtggagagggggaggggtccaggcctggccagaaatcccccccagtcaaccactgggttcagctttgcagcaagggaggcagagggggctgcagtagccaaagcccagctgtaacaccccgtgacctgcggagggctactaatgggtaaaagtagaggcggaggcttgccaatctgtctgttcgctccttttccagagttctaatcgggaatcttcatggaatacgacctgtccatcacaactcagcccactgttcgtataatggcttttcctggctggtggctaattgctttagaatacctgtgctgggcccgcaggtcaccatccactgtgttttatggctcttgcaaaggaaaccacttatcaggtgtgtaaactcgaggcaaatca

SEQ ID NO: 8965 - DNA, 772 bp, Homo sapiens
gggtgcctatacgctatacctattcttccctcttttttcttttcttttttcttttctttttttctttttttttcgatggagtctcactctgtcacccaggctggagtacagtggcgccatctcggctcactgcaacctccaccttctgggttcaagggattctcctgcctcagcctccagagtagctgggactacaggcgtgtgccaccacgcctggctaatttttgtattttttttttttttttagtggagacagggtttcatcatgttggccaggctggtcttgaactcctgaccttaagttatccacccgtcttggcctcctaaagtgttgggattacaggtgtgagccaccctgcctggtctcttcctcctttcttacygaaagaacccttttcttttcaatatcacccttgatacatttcagaggaggggagcactggttacacacgtgtgatcaatttgtggaattctattaaattgcatacatatagtaaatgcattttgtgcaagtatatcatatttcaatgttaaaagttttgaaaaagagaaatagaccccatgatatcttcaaattgctttcaactgggagagagaaagagaatgagagagaatgagagagaggagaggaagcaaacatggcaaatgttgaacaatgagtgaagagaagtgaatacaggtgctcattctaatatgcttccaaattttgtgtagcttagaaatttatcaaatcaaaaaggggggaagagatagaaggaagagttagaacctt

SEQ ID NO: 8966 - DNA, 772 bp, Homo sapiens
gggtgcctatacgctatacctattcttccctcttttttcttttcttttttcttttctttttttctttttttttcgatggagtctcactctgtcacccaggctggagtacagtggcgccatctcggctcactgcaacctccaccttctgggttcaagggattctcctgcctcagcctccagagtagctgggactacaggcgtgtgccaccacgcctggctaatttttgtattttttttttttttttagtggagacagggtttcatcatgttggccaggctggtcttgaactcctgaccttaagttatccacccgtcttggcctcctaaagtgttgggattacaggtgtgagccaccctgcctggtctcttcctcctttcttactgaaagaacccttttcttttcaatatcacccttgatacatttcagaggaggggagcactggttacacasgtgtgatcaatttgtggaattctattaaattgcatacatatagtaaatgcattttgtgcaagtatatcatatttcaatgttaaaagttttgaaaaagagaaatagaccccatgatatcttcaaattgctttcaactgggagagagaaagagaatgagagagaatgagagagaggagaggaagcaaacatggcaaatgttgaacaatgagtgaagagaagtgaatacaggtgctcattctaatatgcttccaaattttgtgtagcttagaaatttatcaaatcaaaaaggggggaagagatagaaggaagagttagaacctt

SEQ ID NO: 8967 - DNA, 542 bp, Homo sapiens
agctgcggggtcatggtcagtttctgggcatggaatgtgaaagcccaacatggactttagtactgaaattagcctgggtcatctgtgtagctaccggaagtgaaatttgaaaactgtaaccaaaagaaaccaagccatcaaaaagtgtaatatccaatggggactgatctaaggaagtgwgaggccagtaatccaaaaggaaaaggaggccaagagcgaagaacagcccaggaggcatgccgaacctcatctccagcatggtcctggccactgcgagactagctgggtttccacctttcctggcccagttgtggtcaggtggcccagcttcaggccaggaggggaagaaacagcagccaaggctgacaggaaacctgaaacctaaaaactccccatgccttccacatgacaaacacgacaggactcaagtgtccaacactagcatttcaactccgtctcaacttgataccaatccttgcactttcaggccaggagaaaatagattttgagctctaaataatgttaatgctcccatttttttt

SEQ ID NO: 8968 - DNA, 862 bp, Homo sapiens
cagggtagaggcgcagcaggcccacgtcctgctccatgctgctgtgcaccaccagcccagccttcccgtccaccttccgcaccagctccctgttgactgaggacagggaagggcctgtgtggtgccttcaggcctcctgccagccgagaccccagcccagtgcctggccctctgcacaggccgcctcctcccttgttttcagagccctgagccttcgcggctcagccccctcgccctgcctcctctcccgcaggcaaatcctcccgggcttccgcgcagtccggccygtgccaggctccgcagcgtgcacggggctgtgggaggaggcactcgttggccagcgagagaccgatggccgagcaatgggcaacacagtctcaagggtgaagcccagggaaactccgctggccaggcgaggggcaggagggtcctgcagagatggaggcccggctgtgtcttgcaggccgcatgggggcgtcaggcgagcgcagaggcgaggagggcaggcatgcccagctggggagccaccagcagtcactgcgctgggttacaggcatggggcagcatcgtcgaaccagccagcctcctctgccccttgccaggcacccactgtgcccactgcccaccgggtcagtggttgaatgagcgaacaaatggactttcggacccctcacctctggggagagaaggcctccatccagttcaccccaaaatcctaatgtgtgcccatcaccccctccccacacccagggtgggtgatggtggaggtgcaggccccaggtgaagtggggagggatggctatttggggtcagtgccccttgaacccgtccatgcagaggggctccccagaggacatgcttg

SEQ ID NO: 8969 - DNA, 590 bp, Homo sapiens
aaaaattagccacgcctgtaatcccagctactcaggaggctgaggcacaagaatctcttgaacccgggaggctgaggttgcagtgagcagagatcgcgccaccgcactccagcctgggcgacagagtgagactcgatctcaaaaaaaaaaaaaaagtaccaaggagactgcagcaccagcatgaactaagaatcctctatgagcttttgagaagccacagctgcagcaggaagaacaaagaatgagggtgggccctttgcttgggtaaaaggtgttgtgttaactgagaaccaaaaggaaacaaaattattcacctgctatttttgcttctggcttcaccatcagagaaactggtcagacaggaaagaacagacggaatgaacggtagaggggcctgctggcatragctctcacctccgaggctagaagactttgcagacttgaccgtggagccagcccctgtaagatctgagaaatcagagatgggagtggagggtgctggagaagggccaggcaactacggagcagttcgaggtcctcacatcacgactttctccagcttgactcataatgatagaatccattaacca

SEQ ID NO: 8970 - DNA, 785 bp, Homo sapiens
tggagcgtgggctctgtcctggtgccagaggaggctgggaggacagcgtcttgttcctccttccgcaccatccatcaagcccagcgctgatatctcaacaatctgtaacctcctcctcctcctctctaacctgctcaagtgcgcaccagccctgacccttcctgccctcacttgggcctcggctgctgcaggttgatggatggcttctcctcccgccgggtttgcctccccgcagctggggaaacaggcacaggtagaggtggggtcaagcccggggcagccacagtgacccygtcgctgagaccaagggaccctgtgttcccagctgcagcaggtgctacgagggaaatagaaatagaacagagaggaaacaagcagcgaattccaactatataaggaggaaaggggaaaaaaaagcaccccaaaccgaaaccaaaaaacctctctgcatcccgaggtcttccaagacttctgaaaatcttgaacatggtgcgatgtcttctgtgcacagttacaacgtagtctgctccaacccatctgtgttttctcacgcctgtgcgctttaagaaccgctgaaatgaaaaacaagttaaaaaatccgtagatgtatatatagtgaggctgagaaagagaggacagtaccctgcagcctgtacagcctgtatttgcttttttatttaaattttttttttttttgccagtgtttgttgcaagaaaaagtgtataaaaataatccttagacaactggagtaaatattcgcaacacatcagccgagtggaagtca

SEQ ID NO: 8971 - DNA, 437 bp, Homo sapiens
ggttttaccatgttggccagactggtctcaaaggctgtactggcatggatatatggtcaatagtttaaaaattatggaagccggccgggcgcggtggctcacgcctgtaatcccagcactttgggaggccgaggcgggcggatcacgaggtcaggagatcgagaccatcccggctaacacggtgaaaccccgtctctactaaaaatacaaaaaattagccgggcgtagtggcgggcgcctgtagtcccagctacgtgggaggctgaggcaggagaatggcgtgaacccgggaggcggagcttgcagtgagccgagatcccgccactgcactcsagcctgggcgacagagcgagactccgtctcaaaaaaaaaaaaaaaaaaaaaaaaaaattatggaagccactgcattttcaacctaacatgttagccttcccctg

SEQ ID NO: 8972 - DNA, 817 bp, Homo sapiens
caggagataatatcattattcccattttgcaggtgaggaaacagacttagctcaagggacagcccaaatcccagagagtctsactcaggaacgcaagcacttagctctcccagcacgcagcgaggtgggagggaaggagggagctgccaaggtttccttccttcttaggaccataggttagagttcagggcacagcacccaacttggatggcacagggtgctccttcctggcctcgggctgaaaagagggcggcactattataattgcttccggcttttgtctctaacatatggaaaaacagcgtgggtaagggagtctagaaggagacatcctgctgaagcccgttggaaggacgcctaaggttgcaaggaccatcgtccatgaaggaatagctggtgttacctggcgcctgaatgtaggcccttctcctctgtggagaatgtgggcctgaccccagggaagccacttcttcaccatttcccacccctggaggctgcagtcctctcatgccatcacttcccattagcttccaacaataaagatcccagactcagcctgctgagccagagagatgaggaggcattggcaggaagccactgcagagggggcagctgcctctcagaactgactttggggtggtggctggctctgtccctgctgtagccaactgggggcaaaaagtccaattgaaggacaagtttcaagggcgggttagggtgagcagaaaggatgagtccctggcagtggctgtcccagccctgggccaccgtgcctgggtctccagtgaaatcccgtccagtggtcatcatcagaaac

SEQ ID NO: 8973 - DNA, 817 bp, Homo sapiens
caggagataatatcattattcccattttgcaggtgaggaaacagacttagctcaagggacagcccaaatcccagagagtctgactcaggaacgcaagcacttagctctcccagcacgcagcgaggtgggagggaaggagggagctgccaaggtttccttccttcttaggaccataggttagagttcagggcacagcacccaacttggatggcacagggtgctccttcctggcctcgggctgaaaagagggcggcactattataattgcttccggcttttgtctctaacatatggaaaaacagcgtgggtaagggagtctagaaggagacatcctgctgaagcccgttggaaggacgcctaaggttgcaaggaccatcgtccatgaaggaatagctggtgttacctggcgcctgaatgtaggsccttctcctctgtggagaatgtgggcctgaccccagggaagccacttcttcaccatttcccacccctggaggctgcagtcctctcatgccatcacttcccattagcttccaacaataaagatcccagactcagcctgctgagccagagagatgaggaggcattggcaggaagccactgcagagggggcagctgcctctcagaactgactttggggtggtggctggctctgtccctgctgtagccaactgggggcaaaaagtccaattgaaggacaagtttcaagggcgggttagggtgagcagaaaggatgagtccctggcagtggctgtcccagccctgggccaccgtgcctgggtctccagtgaaatcccgtccagtggtcatcatcagaaac

SEQ ID NO: 8974 - DNA, 619 bp, Homo sapiens
tttttttttgagacagtgtctttctctgtcacccaggctggagtgcagtggcgcagtctcagctcactgcaacctccacttcccagattcaagcaactctggtgcctcagcatccagagtagttgggattacaggcacatgccaccacacctggctaatttttctattgttagtagagacagggttttaccatgttggccagactggtctcaaaggctgtactggcatggatatatggtcaatagtttaaaaattatggaagccggccgggcgcggtggctcacgcctgtaatcccagcactttgggaggccgaggcgggcggatcacgaggtcaggagatcgagaccatcccggctaacacggtgaaaccccgtctctactaaaaatacaaaaaattagccgggcgtagtggcgggcgcctgtagtcccagctacgtgggaggctgaggcaggagaatggcgtgaacccgggaggcggagcttgcagtgagccgagatcccgccactgcactcsagcctgggcgacagagcgagactccgtctcaaaaaaaaaaaaaaaaaaaaaaaaaaattatggaagccactgcattttcaacctaacatgttagccttcccctg

SEQ ID NO: 8975 - DNA, 764 bp, Homo sapiens
cccagcccttagaacagtgcttggtgcttaatagatggctcaagatctatttgttgaatgcatggatgtatgagtgaatgaatgaatgctcaggatctttcagtaaatccgtggctgactcatgcccagagttcaggtcttctatgttcctttcattgatagctgcattgccttccaggatttcccatctttcagatttccagaaattatgtatacatatatactgtgccctctcagctgatggcttccttttcctttcttcacagctctctggcatcaatttttccacttctcagaaacactttggcccacaaattcccaaaggaaccttgttcttcattctggaaaacacgatgccaacatatcagaataaaggacagataggagcttttgcttcaaagtgaatcacttcatggatgttaaagtgtcctgaaagattctaaacttcacaacttttgatagtaackgtactatatttgcaacatatttgcatatattaattgttatatctgaaaagcatgagattgctgttttataaaattaaatgaagtaagttaatattttattgctaggtataagaactgctgatgaggacatctatagaagtagaaaattctaaatgtcctaccatcaccaataagaaacttttgacagtcccgtagatacaatataatcacatggaaaactgtatacagtatattgtatgtgaagatcccacaaaaagaatagggactgtaggaaatataatcatctaagctacgggt

SEQ ID NO: 8976 - DNA, 578 bp, Homo sapiens
agtgcagtggcgcagtctcagctcactgcaacctccacttcccagattcaagcaactctggtgcctcagcatccagagtagttgggattacaggcacatgccaccacacctggctaatttttctattgttagtagagacagggttttaccatgttggccagactggtctcaaaggctgtactggcatggatatatggtcaatagtttaaaaattatggaagccggccgggcgcggtggctcacgcctgtaatcccagcactttgggaggccgaggcgggcggatcacgaggtcaggagatcgagaccatcccggctaacacggtgaaaccccgtctctactaaaaatacaaaaaattagccgggcgtagtggcgggcgcctgtagtcccagctacgtgggaggctgaggcaggagaatggcgtgaacccgggaggcggagcttgcagtgagccgagatcccgccactgcactcsagcctgggcgacagagcgagactccgtctcaaaaaaaaaaaaaaaaaaaaaaaaaaattatggaagccactgcattttcaacctaacatgttagccttcccctg

SEQ ID NO: 8977 - DNA, 882 bp, Homo sapiens
gatcaccaataacaccagcatatgcaagaccagaggagagtgtgtgatccaggtcctaggattgacaaatgaggactcagtccctacttgggttggtgttttattttgacttttttctgaaacagcagagaagcttaccaaataatcacaaggagataagaaagtgtttacatttgtttcagttgctcttcactgcctccttatgaccaacactcacaattctatggtcttagcagttgcactaagaagtcagaagaacctgctattgtgggttcataatcttttattacctttcactgagaaacaatttatactactaaacaagatatcagttatgatgctcaagattttaagtgccttttgaactaaaaacaaacaaaaaaattgtgacctgcatataatgtaaatggtttatcttcaagtcaaaagccacaggtttacctctgcagctttactctttcctaaacattgctttcgtgtattgcttatgcatgctttctgcgtcccaaaaagtatgtagagaataacagtttaagtcctccagakgagttactacctctactacatgtttcattctcattacatgttgcattgcttattaatatctgtgttttgtagtggacttcatgaggacaggtaatgttaccaactgaattgtgtacccccaaaattcacatgttgaaaccctaatccccaatgtgactgtatttgaagtagggcctacagcaggtaattaaggttaaatgaggtcataagtgtggggccctgaatcgatgagattagtgtccttataagaagaaacagcagagaccttgttctctccaccatatgaggacacagtgagaatgtagccatctgtgagcaggaagggaggcctcacca

SEQ ID NO: 8978 - DNA, 882 bp, Homo sapiens
gatcaccaataacaccagcatatgcaagaccagaggagagtgtgtgatccaggtcctaggattgacaaatgaggactcagtccctacttgggttggtgttttattttgacttttttctgaaacagcagagaagcttaccaaataatcacaaggagataagaaagtgtttacatttgtttcagttgctcttcactgcctccttatgaccaacactcacaattctatggtcttagcagttgcactaagaagtcagaagaacctgctattgtgggttcataatcttttattacctttcactgagaaacaatttatactactaaacaagatatcagttatgatgctcaagattttaagtgccttttgaactaaaaacaaacaaaaaaattgtgacctgcatataatgtaaatggtttatcttcaagtcaaaagccacaggtttacctctgcagctttactctttcctaaacattgctttcgtgtattgcttatgcatgctttctgcgtcccaaaaagtatgtagagaataacagtttaagtcctccagaggagttactacctctactacatgtttcattctcattacatgttgcattgcttattaatatctgtgttttgtagtggacttcatgaggacaggtaatgttaccaactgaattgtgtacccccaaaattcacatgttgaaaccctaatccccaatgtgactgtatttgaagtagggcctacagcaggtaattaaggttaaatgaggtcataagkgtggggccctgaatcgatgagattagtgtccttataagaagaaacagcagagaccttgttctctccaccatatgaggacacagtgagaatgtagccatctgtgagcaggaagggaggcctcacca

SEQ ID NO: 8979 - DNA, 743 bp, Homo sapiens
acggggtgttactttctcacccaggctggagcacagtgatgcacatggcttactgaagcctcaaactcctggcctcaagtgatcctcccgccttggcctcccaaagttctgggattacaggcataagtccctgcgcccagccagaagctttctgatgatatattataacttgggcctcttgtgagttactaaattgaagtggccaatcctgttcagctctcatgccagcttctatcgatttgctatgccttcctggaccacagggttgagaaggattctaaggcttaggggaaaagataaccattgttgattagtaatgcctgcagtgggcacacagcaggagcagcagtggccgtggctaactcctgcagcctcggcagcagctcgtgttaaaacggtggctcagctaagggttgggataagcatccccgttatcacatgtgttcatgggaatgattacaagggaatcatgcctggatagtctctggaggtgatgatcacccccttccatccagaaaaataaatccttccagaaagactccttcctttcttctccgttatcttgtgctcccaagaggggcagcaggtcaaagaaaagggcaatttcctcctctttcccygggaaggaaccaatgactggcaggagggggcctctttctccaaggctgttctggagctcttgctggctgagggcagctgcagccacacagctcgtttcttgacatggaaagctgaaacttctc

SEQ ID NO: 8980 - DNA, 743 bp, Homo sapiens
acggggtgttactttctcacccaggctggagcacagtgatgcacatggcttactgaagcctcaaactcctggcctcaagtgatcctcccgccttggcctcccaaagttctgggattacaggcataagtccctgcgcccagccagaagctttctgatgatatattataacttgggcctcttgtgagttactaaattgaagtggccaatcctgttcagctctcatgccagcttctatcgatttgctatgccttcctggaccacagggttgagaaggattctaaggcttaggggaaaagataaccattgttgattagtaatgcctgcagtgggcacacagcaggagcagcagtggccgtggctaactcctgcagcctcggcagcagctcgtgttaaaacggtggctcagctaagggttgggataagcatccccgttatcacatgtgttcatgggaatgattacaagggaatcatgcctggatagtctctggaggtgatgatcacccccttccatccagaaaaataaatccttccagaaagactccttcctttcttctccgttatcttgtgctcccaagaggggcagcaggtcaaagaaaagggcaatttcctcctctttccctgggaaggaaccaatgactggcrggagggggcctctttctccaaggctgttctggagctcttgctggctgagggcagctgcagccacacagctcgtttcttgacatggaaagctgaaacttctc

SEQ ID NO: 8981 - DNA, 602 bp, Homo sapiens
aacatctacctggcgaggatgagtgaacaaataggaaaatggcttaatatttcccaaaacaggcatgatgcaacaatattattattggctgaaacaggtttaaaaaaattatgccaaccaggcgtggtggctcacgcctgtaatcctaacactttgggaggccgagacaggtggatcatctgaggtcaggagttcaagaccagcctggccaacatggggaaaccccatctccactaaaatacaaaaattagccaggcrtggtggcaagtgtctgtaatcccagctactctgaaggctgaggcaggagaatcactggaactcgggaggcacaggttgcagtgagccgagatcacaccattgcactccagcttgggtgacagagactccatctcaacaacaacaacaacaaaaagaataaaaccatgggtagaaaaaatgggagtctttctaacgaaataagaatgaacttaatctcattgttaatgtcatgtgctgccagagatatagccaaaatgttcaaggtcctctctaagtctgtgtgtgtccttggaatctcagagtgaagtgtatgggaacacatggaaattctctggggtctgcta

SEQ ID NO: 8982 - DNA, 863 bp, Homo sapiens
aggactcctggcccaaagaccctggggatggcccagaagctcagagaagctaaagtgttccatacaaatgccacatacttttctttttttcttttttgagacagagtctccctctgtcacccaggctggagtgcagtggcacgatctcagctcactgcaacctctgcctcctgggttcatgccattttcctgcctcagcctcccaagtagctgggactacaggcgctcaccaccgcgcccggctaattttttgtattttcagtagagacagggtttcactgtgttagccaggatggtctcgatctcctgaccttgtgatccacccatctcggcctcccaaagtgctgggatwacaggcatgagccatcgcacccgggcaaatgccacatacttttcttgttgcacctgacagggcccaattcccctcaccagcatgttctgtcgtcacaagcttcccactgccttctcaactttctaggcccccaaggctttggagtggagctaccattgtccttcctatgactgagcaccttcagtgtgggagtgacaaggtgggcgatgtttggaaactcgggggcacagagaggacctggggccttcaggaaatggaagtcaagggcaacatcaagtctcatccccaaagtccctgcggagcagaccatgcccaaaggaaggaggccaaggcttggcaccaccagccacagagatgataaaagttccttggctccctgccccaggcagagagggcacaagcacacagagctatgggagcactcaccccataggaatcaggcaatctctggccttctccttctccatcaagcgcgaagtaatatttccagggttccctctgtcagccaggg

SEQ ID NO: 8983 - DNA, 759 bp, Homo sapiens
tttttagaaatgcaaacataacttccctaacattaaagccaaacattctttctcccagtgaaccatcttatttggataatctcctaacttcccctgaagttagccccagagttgcatctgagcatttggaagcragacagaaagtcattttggggtttggacctggctgatcttggaccgtgttctgaaagtgtgggcggcaagccacccaggtgccgaggcaagagactgaggacacgagctgttccagtataataaaatataaaacaagaatagttgtaccagatatagaacttagatatgattatatatgaatatcattaatcattagttggtagcaattactctttattccaatattataataatcctcactctataatcataacctaagaaaaaccaggctatacagcgataggagatgaggggacatagtgagttgtgaccagaagacaagagtgcgagccttctgttatgcccggacagggccaccagagggctccttggtctagcggtgacgccagcgtctgggaagacgcccgttgccaggcagaccatggtctagtggtagtgaaaagtgtcaaggaaaaacacccactacttagcacacttagagtttagagaagactctgctcctccacctcttgtggagggcctgacatcagtcaggcttgcccgcagctatccggaggcctaaccgtctccctgtgatgctgtgcttcagtggtcatgctcctagtctgccttcatgttccatcc

SEQ ID NO: 8984 - DNA, 759 bp, Homo sapiens
tttttagaaatgcaaacataacttccctaacattaaagccaaacattctttctcccagtgaaccatcttatttggataatctcctaacttcccctgaagttagccccagagttgcatctgagcatttggaagcaagacagaaagtcattttggggtttggacctggctgatcttggaccgtgttctgaaagtgtgggcggcaagccacccaggtgccgaggcaagagacygaggacacgagctgttccagtataataaaatataaaacaagaatagttgtaccagatatagaacttagatatgattatatatgaatatcattaatcattagttggtagcaattactctttattccaatattataataatcctcactctataatcataacctaagaaaaaccaggctatacagcgataggagatgaggggacatagtgagttgtgaccagaagacaagagtgcgagccttctgttatgcccggacagggccaccagagggctccttggtctagcggtgacgccagcgtctgggaagacgcccgttgccaggcagaccatggtctagtggtagtgaaaagtgtcaaggaaaaacacccactacttagcacacttagagtttagagaagactctgctcctccacctcttgtggagggcctgacatcagtcaggcttgcccgcagctatccggaggcctaaccgtctccctgtgatgctgtgcttcagtggtcatgctcctagtctgccttcatgttccatcc

SEQ ID NO: 8985 - DNA, 759 bp, Homo sapiens
tttttagaaatgcaaacataacttccctaacattaaagccaaacattctttctcccagtgaaccatcttatttggataatctcctaacttcccctgaagttagccccagagttgcatctgagcatttggaagcaagacagaaagtcattttggggtttggacctggctgatcttggaccgtgttctgaaagtgtgggcggcaagccacccaggtgccgaggcaagagactgaggacacgagctgttcyagtataataaaatataaaacaagaatagttgtaccagatatagaacttagatatgattatatatgaatatcattaatcattagttggtagcaattactctttattccaatattataataatcctcactctataatcataacctaagaaaaaccaggctatacagcgataggagatgaggggacatagtgagttgtgaccagaagacaagagtgcgagccttctgttatgcccggacagggccaccagagggctccttggtctagcggtgacgccagcgtctgggaagacgcccgttgccaggcagaccatggtctagtggtagtgaaaagtgtcaaggaaaaacacccactacttagcacacttagagtttagagaagactctgctcctccacctcttgtggagggcctgacatcagtcaggcttgcccgcagctatccggaggcctaaccgtctccctgtgatgctgtgcttcagtggtcatgctcctagtctgccttcatgttccatcc

SEQ ID NO: 8986 - DNA, 759 bp, Homo sapiens
tttttagaaatgcaaacataacttccctaacattaaagccaaacattctttctcccagtgaaccatcttatttggataatctcctaacttcccctgaagttagccccagagttgcatctgagcatttggaagcaagacagaaagtcattttggggtttggacctggctgatcttggaccgtgttctgaaagtgtgggcggcaagccacccaggtgccgaggcaagagactgaggacacgagctgttccagtataataaaatataaaacaagaatagttgtaccagatatagarcttagatatgattatatatgaatatcattaatcattagttggtagcaattactctttattccaatattataataatcctcactctataatcataacctaagaaaaaccaggctatacagcgataggagatgaggggacatagtgagttgtgaccagaagacaagagtgcgagccttctgttatgcccggacagggccaccagagggctccttggtctagcggtgacgccagcgtctgggaagacgcccgttgccaggcagaccatggtctagtggtagtgaaaagtgtcaaggaaaaacacccactacttagcacacttagagtttagagaagactctgctcctccacctcttgtggagggcctgacatcagtcaggcttgcccgcagctatccggaggcctaaccgtctccctgtgatgctgtgcttcagtggtcatgctcctagtctgccttcatgttccatcc

SEQ ID NO: 8987 - DNA, 684 bp, Homo sapiens
ggtagaacgtgaaggggaaccaggaaccttcttcataaggcggcaggagagagagaatggaaggggaaagagccccttatgaaaccgtcagctcttgtgagaactcactcactatcacaagaacagcacggaggaaaccgaccccatgagccaatcacctcccagctggtctttcctcaacacctgggaattacaatttgacatgagatttgcatagaaacacaaagccaaactattgtgggggggtatccttatttttaaaatatctaaatgtcattatttataattcaaaataataatttttattagtgatgattttgtttgaaaatagaatgatctgataaatttttttcacttttaacctattcagtcaaaatatataaaaagctagatttgccagcagaataytgtaactactttttaatgagataaaaatgtataacaacatcactattattgtacagagaaaaaagtgaacataaaaaggaatttaaaaagacaatatgacaatatgactatcatacacatacatgaactgacagactaaaatctcctactggagattatgttaggacttgagcaaaagcttctaaaaatacccaaaacaaacacaaaacaattatttttaagaaataaattatacagagaactcttctggttaagacgatgtatcaaaaaaaaatc

SEQ ID NO: 8988 - DNA, 684 bp, Homo sapiens
ggtagaacgtgaaggggaaccaggaaccttcttcataaggcggcaggagagagagaatggaaggggaaagagccccttatgaaaccgtcagctcttgtgagaactcactcactatcacaagaacagcacggaggaaaccgaccccatgagccaatcacctcccagctggtctttcctcaacacctgggaattacaatttgacatgagatttgcatagaaacacaaagccaaactattgtgggggggtatccttatttttaaaatatctaaatgtcattatttataattcaaaataataatttttattagtgatgattttgtttgaaaatagaatgatctgataaatttttttcacttttaacctattcagtcaaaatatataaaaagctagatttgccagcagaatactgtaactactttttaatgagataaaaatgtataacaacatcactattattgtacagagaaaaaagtgaacataaaaaggaatttaaaaagacaatatgacaatatgactatcatayacatacatgaactgacagactaaaatctcctactggagattatgttaggacttgagcaaaagcttctaaaaatacccaaaacaaacacaaaacaattatttttaagaaataaattatacagagaactcttctggttaagacgatgtatcaaaaaaaaatc

SEQ ID NO: 8989 - DNA, 684 bp, Homo sapiens
ggtagaacgtgaaggggaaccaggaaccttcttcataaggcggcaggagagagagaatggaaggggaaagagccccttatgaaaccgtcagctcttgtgagaactcactcactatcacaagaacagcacggaggaaaccgaccccatgagccaatcacctcccagctggtctttcctcaacacctgggaattacaatttgacatgagatttgcatagaaacacaaagccaaactattgtgggggggtatccttatttttaaaatatctaaatgtcattatttataattcaaaataataatttttattagtgatgattttgtttgaaaatagaatgatctgataaatttttttcacttttaacctattcagtcaaaatatataaaaagctagatttgccagcagaatactgtaactactttttaatgagataaaaatgtataacaacatcactattattgtacagagaaaaaagtgaacataaaaaggaatttaaaaagacaatatgacaatatgactatcatacacatacatgaactgacagactaaaatctcctactggagattatgttaggacttgagcaaaarcttctaaaaatacccaaaacaaacacaaaacaattatttttaagaaataaattatacagagaactcttctggttaagacgatgtatcaaaaaaaaatc

SEQ ID NO: 8990 - DNA, 824 bp, Homo sapiens
tcaggtttggaaatctgagagtcagagagacatccaggctttgccgcaagcctcaccagaacctcccggggtgtgaagagtcctgttcgggagcagggctgtgaggcggggcaggccagggctcgtccgggtcacaggtacagccttgtgtgttgcaaacgacaaggacctcccaagtgtgccaccatgtgcccacccactaccctgcccagagtccactgtggatggactggcagtggctatacagtgggcagacccagaggagctgtctgggggcccagggcaggcaggggtcattctggaaaaccaagcttctagtgctgcagggacagcctctgtgcccctccccggctcaggccccttcctcccctcttctggctcctcctgtgtggaatctctcaggttccagtggtaacctgagagataggagtctctgctcttctgtgtccctttgccccttcatcttgtgtccggtcagctttccagggtggctgtgttcagtggctgaggggtgagaaaccctacgsctcaaggacagaccccgcttttcccagaggccactagggagctcagtggagctgacaggtcctaccagtagcttgggcacacaagaccccatctgggtgatgtgtctccaaagagagtcatgttgacaggagtcagtctccctgagcccagagctggcacatagcagagccagggctgggtccccaaggttgtcagaggcaaagccttgagctccaaatcccgttcagattcagttcttcactgatgatgaggctccgggaggagagcctgatggccaggcaggcagcgtgcaggga

SEQ ID NO: 8991 - DNA, 824 bp, Homo sapiens
tcaggtttggaaatctgagagtcagagagacatccaggctttgccgcaagcctcaccagaacctcccggggtgtgaagagtcctgttcgggagcagggctgtgaggcggggcaggccagggctcgtccgggtcacaggtacagccttgtgtgttgcaaacgacaaggacctcccaagtgtgccaccatgtgcccacccactaccctgcccagagtccactgtggatggactggcagtggctatacagtgggcagacccagaggagctgtctgggggcccagggcaggcaggggtcattctggaaaaccaagcttctagtgctgcagggacagcctctgtgcccctccccggctcaggccccttcctcccctcttctggctcctcctgtgtggaatctctcaggttccagtggtaacctgagagataggagtctctgctcttctgtgtccctttgccccttcatcttgtgtccggtcagctttccagggtggctgtgttcagtggctgaggggtgagaaaccctacgcctcaaggacagaccccrcttttcccagaggccactagggagctcagtggagctgacaggtcctaccagtagcttgggcacacaagaccccatctgggtgatgtgtctccaaagagagtcatgttgacaggagtcagtctccctgagcccagagctggcacatagcagagccagggctgggtccccaaggttgtcagaggcaaagccttgagctccaaatcccgttcagattcagttcttcactgatgatgaggctccgggaggagagcctgatggccaggcaggcagcgtgcaggga

SEQ ID NO: 8992 - DNA, 824 bp, Homo sapiens
tcaggtttggaaatctgagagtcagagagacatccaggctttgccgcaagcctcaccagaacctcccggggtgtgaagagtcctgttcgggagcagggctgtgaggcggggcaggccagggctcgtccgggtcacaggtacagccttgtgtgttgcaaacgacaaggacctcccaagtgtgccaccatgtgcccacccactaccctgcccagagtccactgtggatggactggcagtggctatacagtgggcagacccagaggagctgtctgggggcccagggcaggcaggggtcattctggaaaaccaagcttctagtgctgcagggacagcctctgtgcccctccccggctcaggccccttcctcccctcttctggctcctcctgtgtggaatctctcaggttccagtggtaacctgagagataggagtctctgctcttctgtgtccctttgccccttcatcttgtgtccggtcagctttccagggtggctgtgttcagtggctgaggggtgagaaaccctacgcctcaaggacagaccccgcttttcccagaggccactagggagctcagtggagctgacaggtcctaccagtagcttgggcacacaagaccccatctgggtgatgtgkctccaaagagagtcatgttgacaggagtcagtctccctgagcccagagctggcacatagcagagccagggctgggtccccaaggttgtcagaggcaaagccttgagctccaaatcccgttcagattcagttcttcactgatgatgaggctccgggaggagagcctgatggccaggcaggcagcgtgcaggga

SEQ ID NO: 8993 - DNA, 526 bp, Homo sapiens
catagatagactcacaggtaattggacagatggacaaacaggtgggggctgaagacagacacgaagatggatcgacagacaggccagatagctagacaaagaggacagtaagagaaagatggtcagatagacaatgggacagagatgggcttacagatgggcggacagacagacaggtctgaacagcgggctgccagatggacagatgggtgaatggacagatggctggcagctgtggcgagctgctgccctcaccaagtgcacactacggagtggccaaactcatgcctcaacttctagttttcagctcctgcttgttcctggcaggaggccaggcagcaaagcgtctgaggggagttttcyttgcctagagaagtcagctgctgtgttaactccctcactgctggtaggtccaaaggccccacctactgcccgccagagcccatggtcacactgtcgcaatgtgcaggagaacttggtgcgtgctgcactgcggttgccaggtaggggcagggctccctggaac

SEQ ID NO: 8994 - DNA, 526 bp, Homo sapiens
catagatagactcacaggtaattggacagatggacaaacaggtgggggctgaagacagacacgaagatggatcgacagacaggccagatagctagacaaagaggacagtaagagaaagatggtcagatagacaatgggacagagatgggcttacagatgggcggacagacagacaggtctgaacagcgggctgccagatggacagatgggtgaatggacagatggctggcagctgtggcgagctgctgccctcaccaagtgcacactacggagtggccaaactcatgcctcaacttctagttttcagctcctgcttgttcctggcaggaggccaggcagcaaagcgtctgaggggagttttctttgcctagagaagtcagctgctgtgttaactccctcactgctggtaggtccaaaggccccacctactgcccgccagagcccakggtcacactgtcgcaatgtgcaggagaacttggtgcgtgctgcactgcggttgccaggtaggggcagggctccctggaac

SEQ ID NO: 8995 - DNA, 660 bp, Homo sapiens
ttcacctaaagttgtgctttatttgatgaataagtattgaacatctattatgtccaaggcactgcactaaatttaggggttacaaagaacaagacaaaaatccttccatgagagacaggattttccataatttaaagctgatggaaaaacatctccttaagtaatgagtaatttttctgttgtctctatttatgaaaggcaaaacgaaatttcacactcaaaagagaacatccctcaaaggaaacccaaattatttgctttcctattgtaagataattttccaaaagcactagaaataaagtaatattctatgtcagcaattccaaacttgcaatacatgcaacaagttttttctttgatttgtgtaacaatttcccatatttcttcccgaacccaaagggatgagtattatagaacagtgytctcaaaataaattaaaacaaacttagccctgataattttagaaattaactttatcctactctttaagttaatcagtcccaacattaggctcacaaactaaccaaaagtaaatacaaaactggaaaatgctgaattcaagccccaaaactactatcaaagacacgaaagcaggaacttttctcacctaacatccaaaggaatctgtgtgtgtgtgtgtgtgtgtgtgtggtgtgtgtg

SEQ ID NO: 8996 - DNA, 689 bp, Homo sapiens
tttcatgctgtctgttataaagagaatttagtgattatgtcacagtcgcactagttttttctatcttttgagagtatttacttactgtagggctttctttgcctcctgccttgtcttggctttctctagcttcccttctcatgtatttgttttcgtcccatcacgttagaggctttcatcaactgtctgcaaaccttttcctctcctttcataagtaggaatgaggtaatagaaacytcaccagaaactctatatgtgggtgagaaaaatgtgcttgctcactggtgggtttgctgtatggtgatcagatgaaagctcattttttcatgggaagatacctcaaatgtcagaagctagatgtcttttctttggggcttgtcagtttctcatgagaaatatcttataatctcttgcctgaggaggcattcacttggctgccagtgttctggaagtagttcaggggaagaggtctggatgagtaactgcttagggtgcaatctttcacactctttcctttccggcagttgccttattcctgcccttctttgtgcctgctggacaagcctctctcctctttctcatgctgactgcgaggagtgggacagggcacctgagactccagcaactccaagtgccaacattgacctggcctcttgcttttagctgctcacctctccctcacccttccg

SEQ ID NO: 8997 - DNA, 689 bp, Homo sapiens
tttcatgctgtctgttataaagagaatttagtgattatgtcacagtcgcactagttttttctatcttttgagagtatttacttactgtagggctttctttgcctcctgccttgtcttggctttctctagcttcccttctcatgtatttgttttcgtcccatcacgttagaggctttcatcaactgtctgcaaaccttttcctctcctttcataagtaggaatgaggtaatagaaacctcaccagaaactctatatgtgggtgagaaaaatgtgcttgctcactggtgggtttgctgtatggtgatcagaygaaagctcattttttcatgggaagatacctcaaatgtcagaagctagatgtcttttctttggggcttgtcagtttctcatgagaaatatcttataatctcttgcctgaggaggcattcacttggctgccagtgttctggaagtagttcaggggaagaggtctggatgagtaactgcttagggtgcaatctttcacactctttcctttccggcagttgccttattcctgcccttctttgtgcctgctggacaagcctctctcctctttctcatgctgactgcgaggagtgggacagggcacctgagactccagcaactccaagtgccaacattgacctggcctcttgcttttagctgctcacctctccctcacccttccg

SEQ ID NO: 8998 - DNA, 689 bp, Homo sapiens
tttcatgctgtctgttataaagagaatttagtgattatgtcacagtcgcactagttttttctatcttttgagagtatttacttactgtagggctttctttgcctcctgccttgtcttggctttctctagcttcccttctcatgtatttgttttcgtcccatcacgttagaggctttcatcaactgtctgcaaaccttttcctctcctttcataagtaggaatgaggtaatagaaacctcaccagaaactctatatgtgggtgagaaaaatgtgcttgctcactggtgggtttgctgtatggtgatcagatgaaagctcattttttcatgggaagatacctcaaatgtcagaagctagatgtcttttctttggggcttgtcagtttctcatgagaaatatcttataatctcttgcctgaggaggcattcacttggctgccagtgttctggaagtagttcaggggaagaggtctggatgagtaactgcttagggtgcaatctttcacactctttcctttcckgcagttgccttattcctgcccttctttgtgcctgctggacaagcctctctcctctttctcatgctgactgcgaggagtgggacagggcacctgagactccagcaactccaagtgccaacattgacctggcctcttgcttttagctgctcacctctccctcacccttccg

SEQ ID NO: 8999 - DNA, 648 bp, Homo sapiens
ccacaagtcctgagggccgcttgttacgtggcctggccccacccatccccacctccgtggtcagggagttgctggctgctgccgtagaggacgagtgattgcaggcacctgtgcgtctcacgtgtgatgccttcttaccaaactcgcaaaacctgcagagcctcgggttcccagcaagctgcctctgcccgccaaggaagagcattctggaaactgccgctgaggctgctgcgcttcctcgcccacactcagcacttccagcgtgaccacccctttgtccgggcggaccctccagtcagaggagccagggctcaacagaaacctgtcctgggcgtgcacccgaatgaaccgaaaacctgtattcacacaaaacccgggagtgaatgtggagagatgctggtgtgtaaccccctacgcgctggagagaactcaggtgcccatcaccggcgaggggataaaacagctgcggaccccccataccgcagaatcttgggggcaaaaggcacgcgctggcacttcacagcacaggcgagtcctaaacgcgcttttctaagtgaaggaagccagacaggcygcatcctgtgagacctcatttctgtaacattccggaaaaggcaaaactttggcgacagagcagagacgtaaatc

SEQ ID NO: 9000 - DNA, 829 bp, Homo sapiens
aaaattgagaaataaggctaataatgttcttactttaaagcttagggaaaagtcaaaaatttttaagtaaatggaaataaagagttgatcttgaaagcttaactctgaaagctgaactctattgaaactgtatgtatttggtagaaactgcattttgagtactcataaccatttcgtgtttctctttcaaaatagtattcaaagattacatgagatattcaacattttattataaataggctttggattagatgtttttgcccaccttgaggctaatgtaaagctgaactctgaattaatgtaaattttgtttgctagaaaggtataacatattagtataaataagatggaagttcttttttttgtatttgtacgatatttttatttaatattttaatgcatttgttctgtttcccrcttttatctacatgtctctcatttttaaataactttggtagtgtttggagaaaagtataaactttatcaatttaaaaaaaaacttgagacattttaaacctaaaaaatcttcacttgaattgtttgtatctaatatgtttatagaagaacaataaccttacttggtatcatctttttgcacttcaatattcaaaataatttgctgaaatattttaatcaaatgtctggcttttcaaaaaaaagtcataaactctttgtgggacaaattttaaaataatacttagcatatgaatacatagtttgtgatatatattaccctaaaattaaaatgtagttacactttaatatatggtttaattaattgattttactctatgctgtgtgaaagctaaaaaacacagaaatgtgttca

SEQ ID NO: 9001 - DNA, 817 bp, Homo sapiens
cactggctcagtggagcacacagccctggctgcgcctccccaactttagctggcatcatggcaacagttgctccagatargtcaccgctgccagcagaaggatacttcacctatgttattattctctaaaagtataattgtgagatttgtcctcagactaattttaagaaaataagcagtccacagatgaattttaagaaaacatcagagcaactcaaattgagaaacactttacagaatacctgaccagtactcctcaaaactgtgaagggtataaaaacaaaaaagactaagaaatagtcacagaccagataagattaagggggcatcacagtaaaatgaaatgtggcatcctgaactcagttctgggatagtgaaagaacattagtggaaaaacttgtgaaatcaaagaataggagttcagttaatggtaatgtactaatgatggtgtcaacctaaaagtgcctgagacaggtctcaatcaatttagaggtttatttttccaagattgaggatgtgaccagggaaaaagagacaaaatttacagtgggatctgtgggatgcactttttccaaaaagagttttaaggagctcaatatttaaatgggaaagagcagcaggaaggcaaagagggaagaaaaatggagagaagggtaggtagtgaggtcagcaaatacattcttgagaggctttgattaatgctcactgaatccacattttacatgtttctcaatttaagtttctctgatgtttttcttaaaattggtctgaagaattatgatttttgtaaaatttagtctggggactaattcttata

SEQ ID NO: 9002 - DNA, 817 bp, Homo sapiens
cactggctcagtggagcacacagccctggctgcgcctccccaactttagctggcatcatggcaacagttgctccagataggtcwccgctgccagcagaaggatacttcacctatgttattattctctaaaagtataattgtgagatttgtcctcagactaattttaagaaaataagcagtccacagatgaattttaagaaaacatcagagcaactcaaattgagaaacactttacagaatacctgaccagtactcctcaaaactgtgaagggtataaaaacaaaaaagactaagaaatagtcacagaccagataagattaagggggcatcacagtaaaatgaaatgtggcatcctgaactcagttctgggatagtgaaagaacattagtggaaaaacttgtgaaatcaaagaataggagttcagttaatggtaatgtactaatgatggtgtcaacctaaaagtgcctgagacaggtctcaatcaatttagaggtttatttttccaagattgaggatgtgaccagggaaaaagagacaaaatttacagtgggatctgtgggatgcactttttccaaaaagagttttaaggagctcaatatttaaatgggaaagagcagcaggaaggcaaagagggaagaaaaatggagagaagggtaggtagtgaggtcagcaaatacattcttgagaggctttgattaatgctcactgaatccacattttacatgtttctcaatttaagtttctctgatgtttttcttaaaattggtctgaagaattatgatttttgtaaaatttagtctggggactaattcttata

SEQ ID NO: 9003 - DNA, 725 bp, Homo sapiens
tgagtggcattactttctgaaatggtcaaacctgaaggaagcagtgttcagtcttccctgtctctaggtagtctctgtatttctggaacattgagtgtatgttaaaagtatagaaaaatgcattgtgtcaatccaaaactcagctgggctgggcttagagaattatgagcagcctttccacctgcatggaagtccttttgtgcaggacagttctttgtttccggggtggccctgctccctccaggaggtttaggagtgcccatgtcaccatgatgcctacgccacttctcatgttgctacctgttgctaccaccgggcatcgctgccgcctcctgctctgtgcacagtgtggtgtggccgcctgaccgactggtcaggaactaaagttctctcgaagccttgactgaaaggagaagtgaggaggggcatggagcccagtgccaagaggcagctgcgtctttaggggctggcacttttcagaggggctcttgggrccagaaggaaagagccgtcattcaaggcttacacagcgtggaggtgccctccctggggtgtcctgtgtgctgacctctgtcctggtgcctggcggtgtcctggcgcagagctccgcaagcctctgcggggctcttctctgtgtggaggttctcgagatgggcagtccgggtggatggtcaggccaatgagggccttcgaatgaagcacattattgtaaggatgctaattct

SEQ ID NO: 9004 - DNA, 611 bp, Homo sapiens
ccaagtaaagtgtttctctgagttctgtgagccattatagcaaattacggaacccgaggagtgtgtcatggaaaccccaatttgtagccaagtgggacaaaagtgtggtaacctggggacccactatttgcacctgacatctaaagtggaagggtggttttgtggggctgagcctttcacctgtgggatctgagctaactccaggtaatgccagaattgaattaaattgtaggacacccagttggtgtctgcagagaaacagaaaattgcttgccatagaaaatctacacatttggcgtcaggagtgttgtgagtagaggaacagatttttgtttagccactgacccacactgagaagagagaagtgctggagaaaggagttggggaggactccttaggagaaagctgtgctgtaattcccaaagccaccaagggagacgtgtcgggagcacgtcctcctcacgccaggcccagtgcttctgttcagtcccccgagagcccggtccaggtgccaggtgcagcctgcaccgtggcaggtgagcctgggggccggctccatggaccatgcatcagaacccacagtgggaacatsagcctaggtcttttaagag

SEQ ID NO: 9005 - DNA, 184 bp, Homo sapiens
cttgtgtggagttgaataaaaaagtacattatagatttcctttgctttaatttcattgagaactacattgtagactgcaataaaacaraggtcagattcagagaaaattgcattttactagtggtagcagcaaaaatatgaaccagaatttactacagttttatgagtttttattaatatcagt

SEQ ID NO: 9006 - DNA, 666 bp, Homo sapiens
gaaaacaaaatatgaagacaaaggagtgaaatacgctagaaaatctaggacaagaacttgagtgtcttgattcctagctcagacatatatataaatgtgatacataattacataccgtagacgtgtttcaaagatgttgaaatgctacatagctcaattagtatataatataaaataataatgtatttatatctcttttataaatatttttctgtgaatgtcatttgttaagcaaaattttattaataattatacaaaatattagaacaaagctaacaatgtaagttttcaaatgttctacagaatttttgcaacaatgagtggaatatcagtaacctgacattgcctgagtctttttaaattttctcatgagcttcataacttcgtcaaacccaaagagatcagtaaatatagggatcagaggaagatcaagaagacaatttgttatgtcccggtaaattatttaataagaataatraattgggtcaaggtttgaataaggtgatgcttaagaacaggcaaaggatgtgaatgacaggaaggcagacagagagtctgccaactgtctcctgtgtggagacgtcttttgtctcttcacccttttctgcctcctggaaatagactacctcttcttcagggaactgtccctttatcttgtctcattag

SEQ ID NO: 9007 - DNA, 530 bp, Homo sapiens
caagcaactctggtgcctcagcatccagagtagttgggattacaggcacatgccaccacacctggctaatttttctattgttagtagagacagggttttaccatgttggccagactggtctcaaaggctgtactggcatggatatatggtcaatagtttaaaaattatggaagccggccgggcgcggtggctcacgcctgtaatcccagcactttgggaggccgaggcgggcggatcacgaggtcaggagatcgagaccatcccggctaacacggtgaaaccccgtctctactaaaaatacaaaaaattagccgggcgtagtggcgggcgcctgtagtcccagctacgtgggaggctgaggcaggagaatggcgtgaacccgggaggcggagcttgcagtgagccgagatcccgccactgcactcsagcctgggcgacagagcgagactccgtctcaaaaaaaaaaaaaaaaaaaaaaaaaaattatggaagccactgcattttcaacctaacatgttagccttcccctg

SEQ ID NO: 9008 - DNA, 655 bp, Homo sapiens
cttgaggtctgaagttcgagaccagcctggccaacatggtgaaaccctgtctctactaaaaatacaaaaattagccacgcctgtaatcccagctactcaggaggctgaggcacaagaatctcttgaacccgggaggctgaggttgcagtgagcagagatcgcgccaccgcactccagcctgggcgacagagtgagactcgatctcaaaaaaaaaaaaaaagtaccaaggagactgcagcaccagcatgaactaagaatcctctatgagcttttgagaagccacagctgcagcaggaagaacaaagaatgagggtgggccctttgcttgggtaaaaggtgttgtgttaactgagaaccaaaaggaaacaaaattattcacctgctatttttgcttctggcttcaccatcagagaaactggtcagacaggaaagaacagacggaatgaacggtagaggggcctgctggcatragctctcacctccgaggctagaagactttgcagacttgaccgtggagccagcccctgtaagatctgagaaatcagagatgggagtggagggtgctggagaagggccaggcaactacggagcagttcgaggtcctcacatcacgactttctccagcttgactcataatgatagaatccattaacca

SEQ ID NO: 9009 - DNA, 778 bp, Homo sapiens
ctgccagggctttctggggagacgctgcagcttggttcttatttcctttgctctgcatccctctgggttgacttgagtctgatcatgggtttattccatttccattttgctagattccctccactccctcaagcttctacaaaactgtggggccaccactccccacaaaagattaaaaccaagatgtttcctagaggtggcattttgtcttcctgaagctgttctgtgcacaggtcctctccacactcatgccaaatgctcggtgaagcgtcttcctgaatgtccctaaggggcacgtgccactggcagagctgatgggcacacctcactcccacacatgctgtgccgagctcatgactcagctgtgcagggcccgcccaagagtgaggcaaacaccaacaccgcacagcgaccctttgtcaatggtggggacctcagtggcttctccatcggaacttagggctgacgggcctccagacctactgttacacactggcccacggaatgaccctcataaacccaagaacagtaaacagagcttaacattctaacgaaatcaagattgctgtgtgtgctttcacaaaatgaaactgcctggaacttctcataacgttttttatgataagcattaaaatgcaaagaggaagattaaagttcctgctacagaccagagcagtaatgagygtgggaggaggagctctgggtagggtctgggagagaggtttatgtactgcattacagttggatattattatataaaatgagtgtgttattaaaa

SEQ ID NO: 9010 - DNA, 824 bp, Homo sapiens
tgggcagataagggagtgagatgctcagccctcaactcaatcacagccatgagggaggccacagcgctcagaccagggaggcaggaggaggcttctggtgtttttgagagcacaggctgtgtgcagggcccttggagacggctgacrtcttcaccaaatggggcaggccacacacgcagaacccaggcgacccaaagaaggcactcaccacgtggcttcaggcaagtgcccctgactcaacaatcggtcaatcagtgcatacactgtgaacaccgggaagagtctgtgaccggcgagcacgccgcacatctgccttgtcttgacggtggcatcacccacacttagtcatgcacacacctcttaggcgtgagcagctgatgggttactgatgtcagcaaccagcacccagtcatctccagcccccagagccctggagcccctgcattgttgtccccatgcttctgacctcctcaccccccacgagtctcctctgctcttgaacctccccagtcggaacctggccaggtgtcctttgcatgcctggcctccttcactcttggtaacgtctgcggattcattcctgtctacgctgcagtgttcagtggcaactgcatgaattcactgaaaatatactgtaacgtttgggtttggctgtggcatctcttccacttttaacataccaacttcacagctcacattattttaatccctttaaaagataattgatttaaagcaaaaatcataacaatgtgttgtggggtttatgacacacgagaaggtgtgatggtgatggtgtagggtccaggtgagggtgggggcacccc

SEQ ID NO: 9011 - DNA, 642 bp, Homo sapiens
atccttggaaagtccacaccatagcttggatgtctatcctcccctctctccctcctcactgcccaggttcatgtagatttcaaagacaggacttkggagggatctgtctgctgtgattcctcacacataacatgtatctgttttagtttcttggttcagttctcaggctgtggtgactcaggagccctcactgactgtgtcctaaagagagagacttattctcatgtgtggcttcagcaccacagcactgaattcagcagaagcctggtcaagtcctcaggacattgatgtgtaacacagataacaaacacccctggatgcccacttgattctctggctccctcctgggggaaagctgccctgacccctcaaggggcccagcctgaggatgaggctgagtatactgtgggctacaccacagtggtccttagcacagtgagagacccagatggggaagcaggacatgaacgagcttttggctgatccggggtacaaacatgaacgtaggatatcaggatcacgtggccagacacctgagctctcaaggacacctaaattttaactatccgtagagagaaaggtgggtggagaggtgtaaattgattcctgtatctgtttgaattttaaagtggaaaatatttg

SEQ ID NO: 9012 - DNA, 642 bp, Homo sapiens
atccttggaaagtccacaccatagcttggatgtctatcctcccctctctccctcctcactgcccaggttcatgtagatttcaaagacaggactttggagggatctgtctgctgtgattcctcacacataacatgtatctgttttagtttcttggttcagttctcaggctgtggtgactcaggagccctcactgactgtgtcctaaagagagagacttattctcatgtgtggcttcagcaccacagcactgaattcagcagaagcctggtcaagtcctcaggacattgatgtgtaacacagataacaaacacccctggatgcccacttgattctctggctccctcctgggggaaagctgccctgacccctcaaggggcccagcctgaggatgaggctgagtatactgtgggctacaccacagtggtccttagcacagtgagagacccagatggggaarcaggacatgaacgagcttttggctgatccggggtacaaacatgaacgtaggatatcaggatcacgtggccagacacctgagctctcaaggacacctaaattttaactatccgtagagagaaaggtgggtggagaggtgtaaattgattcctgtatctgtttgaattttaaagtggaaaatatttg

SEQ ID NO: 9013 - DNA, 679 bp, Homo sapiens
ctcccctcaggtatatatggaaacattgccctttctatgaattttgggaggctagcctccagaactgtgagacaatacatttgtgttatcttaaccaaacttgtgtttaatacattctgacagcagttctaggaaaccaatacaccagacaataaattacacaatacttctgaaattgattgtacttctttcattttggcaaccartttttccatgaatatgattatatctgtgctcatatttctaactttataaatatgcttgtaatttaaggttaagataagaaatccttgtgtcttaaaaatccctaaatatatgagaactgaataataatattaacattatgagatctaatggaaaattgtagcttttacataattccacttgttcactagtatcaagatgtgaaggtgggaagatcaccttgttattaacaaaacactcctggtcatctctgtggatttgagagtgcagggggagacacctacatattgtttgggaagtcacaaatgcagcatgcccagagcatcatgtacaacagtgtgagtttgctggacatgtgggcaggaagcagaacagactggggcatgaggaaccacctatcaccaaacccaccagcgccttcctccctggatcagcccagagctgctcagacttgaatgtgcacatggatcatgtg

SEQ ID NO: 9014 - DNA, 679 bp, Homo sapiens
ctcccctcaggtatatatggaaacattgccctttctatgaattttgggaggctagcctccagaactgtgagacaatacatttgtgttatcttaaccaaacttgtgtttaatacattctgacagcagttctaggaaaccaatacaccagacaataaattacacaatacttctgaaattgattgtacttctttcattttggcaaccagtttttccatgaatatgattatatctgtgctcatatttctaactttataaatrtgcttgtaatttaaggttaagataagaaatccttgtgtcttaaaaatccctaaatatatgagaactgaataataatattaacattatgagatctaatggaaaattgtagcttttacataattccacttgttcactagtatcaagatgtgaaggtgggaagatcaccttgttattaacaaaacactcctggtcatctctgtggatttgagagtgcagggggagacacctacatattgtttgggaagtcacaaatgcagcatgcccagagcatcatgtacaacagtgtgagtttgctggacatgtgggcaggaagcagaacagactggggcatgaggaaccacctatcaccaaacccaccagcgccttcctccctggatcagcccagagctgctcagacttgaatgtgcacatggatcatgtg

SEQ ID NO: 9015 - DNA, 679 bp, Homo sapiens
ctcccctcaggtatatatggaaacattgccctttctatgaattttgggaggctagcctccagaactgtgagacaatacatttgtgttatcttaaccaaacttgtgtttaatacattctgacagcagttctaggaaaccaatacaccagacaataaattacacaatacttctgaaattgattgtacttctttcattttggcaaccagtttttccatgaatatgattatatctgtgctcatatttctaactttataaatatgcttgtaatttaaggttaakataagaaatccttgtgtcttaaaaatccctaaatatatgagaactgaataataatattaacattatgagatctaatggaaaattgtagcttttacataattccacttgttcactagtatcaagatgtgaaggtgggaagatcaccttgttattaacaaaacactcctggtcatctctgtggatttgagagtgcagggggagacacctacatattgtttgggaagtcacaaatgcagcatgcccagagcatcatgtacaacagtgtgagtttgctggacatgtgggcaggaagcagaacagactggggcatgaggaaccacctatcaccaaacccaccagcgccttcctccctggatcagcccagagctgctcagacttgaatgtgcacatggatcatgtg

SEQ ID NO: 9016 - DNA, 679 bp, Homo sapiens
ctcccctcaggtatatatggaaacattgccctttctatgaattttgggaggctagcctccagaactgtgagacaatacatttgtgttatcttaaccaaacttgtgtttaatacattctgacagcagttctaggaaaccaatacaccagacaataaattacacaatacttctgaaattgattgtacttctttcattttggcaaccagtttttccatgaatatgattatatctgtgctcatatttctaactttataaatatgcttgtaatttaaggttaagataagaaatccttgtgtcttaaaaatccctaaatatatgagaactgaataataatattaacattatgagatctaatggaaaattgtagcttttayataattccacttgttcactagtatcaagatgtgaaggtgggaagatcaccttgttattaacaaaacactcctggtcatctctgtggatttgagagtgcagggggagacacctacatattgtttgggaagtcacaaatgcagcatgcccagagcatcatgtacaacagtgtgagtttgctggacatgtgggcaggaagcagaacagactggggcatgaggaaccacctatcaccaaacccaccagcgccttcctccctggatcagcccagagctgctcagacttgaatgtgcacatggatcatgtg

SEQ ID NO: 9017 - DNA, 679 bp, Homo sapiens
ctcccctcaggtatatatggaaacattgccctttctatgaattttgggaggctagcctccagaactgtgagacaatacatttgtgttatcttaaccaaacttgtgtttaatacattctgacagcagttctaggaaaccaatacaccagacaataaattacacaatacttctgaaattgattgtacttctttcattttggcaaccagtttttccatgaatatgattatatctgtgctcatatttctaactttataaatatgcttgtaatttaaggttaagataagaaatccttgtgtcttaaaaatccctaaatatatgagaactgaataataatattaacattatgagatctaatggaaaattgtagcttttacataattccacttgttcactagtatcaagatgtgaaggtgggaagatcaccttgttattaacaaaacactcctggtcatctctgtggatttgagagtgcagggggagacacctacatattgtttgggaagtcacaaatgcagcatgcccagagcatcatgtacaacartgtgagtttgctggacatgtgggcaggaagcagaacagactggggcatgaggaaccacctatcaccaaacccaccagcgccttcctccctggatcagcccagagctgctcagacttgaatgtgcacatggatcatgtg

SEQ ID NO: 9018 - DNA, 730 bp, Homo sapiens
cagagagggagtagcctggcttgagagacgtcaattgagaagcatcccttgtgtgccaccttccgggatggagggagttgcatcctgcatcctccccgcagtgaggagggacttaaagagtttttgtttttgtttttgtttttgtttttgtttttgttttgagacggagtctggctatgtcgccaggctggagtgcagtggcgcgatctcggatcactgcaacctccgccttgcgggttcaagtgattctcctgcctcagcctcctgagtagctgggactacagcgtacgccaccacgcccagctaatttttgtatttttagtaaagacggggtttcaccatgttggccaggatggtctccatttcttgacctcgtgatctgcctgcctcggcctcccaaaatgctggggttacaggagtgagccaccgcgcctggcctgggacttaaagtctttacaagggattaacactgatrgcagcgcagatagcaacacaggtccctctctttccactttgtttgcctgtatggagccagctctcaactggttttcttcctctgctccaagcctctgaggagattgagtctgcttgggttcaaatcttagctggaccactgcctaactatagtcttgagcaagtcacataagatctccaagactcacttttcctatgtgcaaaatgggaataatggtcacacctacctcactcctagagtggcagtgagcgttat

SEQ ID NO: 9019 - DNA, 600 bp, Homo sapiens
agacggagtcttgcgctgtcggccaggctggagtgcagtggtgcaatctcggctcactgcaagctccgcctcccgggttcacgccattctcctgcctcagcctcctgagtagctgggactacaggcgcccgccaccatacccggctaatttttttgcatttttagtagagatggggtttcactgtgttagccaggatggtcttgatctcctgacctcatgatccgcccacctcagcctcccaaagtcctgggattacaggcgtgaccaccgcgcctggccaaccctgaaatgttaagaggtctaggacttcgttatttcatgacccaaatgacagttataggagagcacacatgaagcgtctataaaggtcccagccaggtgcgggcctcatgcctgtaactctagtgctttgagaggctgaggcaggaggatcacttgaggccaggagtttgagaccagcctgggcaatacagcaagaccttgtctctacaaawacttaacaatttagctggttgtggtagcgacacctctagtcctacctacttgggaggctaggtggaaggtagcttgacacaggagttcgaggtacacttagctat

SEQ ID NO: 9020 - DNA, 600 bp, Homo sapiens
agacggagtcttgcgctgtcggccaggctggagtgcagtggtgcaatctcggctcactgcaagctccgcctcccgggttcacgccattctcctgcctcagcctcctgagtagctgggactacaggcgcccgccaccatacccggctaatttttttgcatttttagtagagatggggtttcactgtgttagccaggatggtcttgatctcctgacctcatgatccgcccacctcagcctcccaaagtcctgggattacaggcgtgaccaccgcgcctggccaaccctgaaatgttaagaggtctaggacttcgttatttcatgacccaaatgacagttataggagagcacacatgaagcgtctataaaggtcccagccaggtgcgggcctcatgcctgtaactctagtgctttgagaggctgaggcaggaggatcacttgaggccaggagtttgagaccagcctgggcaatacagcaagaccttgtctctacaaatacttaamaatttagctggttgtggtagcgacacctctagtcctacctacttgggaggctaggtggaaggtagcttgacacaggagttcgaggtacacttagctat

SEQ ID NO: 9021 - DNA, 600 bp, Homo sapiens
agacggagtcttgcgctgtcggccaggctggagtgcagtggtgcaatctcggctcactgcaagctccgcctcccgggttcacgccattctcctgcctcagcctcctgagtagctgggactacaggcgcccgccaccatacccggctaatttttttgcatttttagtagagatggggtttcactgtgttagccaggatggtcttgatctcctgacctcatgatccgcccacctcagcctcccaaagtcctgggattacaggcgtgaccaccgcgcctggccaaccctgaaatgttaagaggtctaggacttcgttatttcatgacccaaatgacagttataggagagcacacatgaagcgtctataaaggtcccagccaggtgcgggcctcatgcctgtaactctagtgctttgagaggctgaggcaggaggatcacttgaggccaggagtttgagaccagcctgggcaatacagcaagaccttgtctctacaaatacttaacaatttagctggktgtggtagcgacacctctagtcctacctacttgggaggctaggtggaaggtagcttgacacaggagttcgaggtacacttagctat

SEQ ID NO: 9022 - DNA, 600 bp, Homo sapiens
agacggagtcttgcgctgtcggccaggctggagtgcagtggtgcaatctcggctcactgcaagctccgcctcccgggttcacgccattctcctgcctcagcctcctgagtagctgggactacaggcgcccgccaccatacccggctaatttttttgcatttttagtagagatggggtttcactgtgttagccaggatggtcttgatctcctgacctcatgatccgcccacctcagcctcccaaagtcctgggattacaggcgtgaccaccgcgcctggccaaccctgaaatgttaagaggtctaggacttcgttatttcatgacccaaatgacagttataggagagcacacatgaagcgtctataaaggtcccagccaggtgcgggcctcatgcctgtaactctagtgctttgagaggctgaggcaggaggatcacttgaggccaggagtttgagaccagcctgggcaatacagcaagaccttgtctctacaaatacttaacaatttagctggttgtggtagcgacacctctagtcctacctacttgggaggctaggtggaaggtagcttgacacaggagtkcgaggtacacttagctat

SEQ ID NO: 9023 - DNA, 600 bp, Homo sapiens
agacggagtcttgcgctgtcggccaggctggagtgcagtggtgcaatctcggctcactgcaagctccgcctcccgggttcacgccattctcctgcctcagcctcctgagtagctgggactacaggcgcccgccaccatacccggctaatttttttgcatttttagtagagatggggtttcactgtgttagccaggatggtcttgatctcctgacctcatgatccgcccacctcagcctcccaaagtcctgggattacaggcgtgaccaccgcgcctggccaaccctgaaatgttaagaggtctaggacttcgttatttcatgacccaaatgacagttataggagagcacacatgaagcgtctataaaggtcccagccaggtgcgggcctcatgcctgtaactctagtgctttgagaggctgaggcaggaggatcacttgaggccaggagtttgagaccagcctgggcaatacagcaagaccttgtctctacaaatacttaacaatttagctggttgtggtagcgacacctctagtcctacctacttgggaggctaggtggaaggtagcttgacacaggagttcgaggtacactkagctat

SEQ ID NO: 9024 - DNA, 801 bp, Homo sapiens
tgcacacagctttggaagcatactctaatgtagggtaaccaggaatattgacgttgtggccactgcttggaaaaaagaggactgtttctttcattttttaactcattttatatattttaagtaatggaactataaaaaattctcttataagtcaaaaccatacaagatacagtctgttcttgattatccatacccacaaagggtttcattaacatagacagttgaactctataaattaaccagcaagggtagaaccactgccgtgcagtctgatactgagcatcttgcctggagatggaatcaaggctcagtccaactgcacctccagtgacagattccattcctgatttgagagtttagatcttatttctgttgccttatctctggcctaagtaatgtagctggaagggaaactgtcactaggaacagcataccacattcattgttgaaataatcaaaggttaatcatgtttcgagctgggtgtgatggcgcgtacctgtagtccatgctactcaggaggctgaggcaggaggatcacatgagcttgggagttggaggccagcctgggcaacaamgcaagaccccagtctttaaaaaaacaaaaaagctgaccaggcatgttggctcacgctgtaatgccagcactttgggaggccaagatgggaagattgcttgaggccaggagtttgagaggagcctgggcaacaaaacaagaccctgtctctaaaacaaattttaaaaaattagccagtggctgtggcacacctgtaggctcatctactcaggaggctgaggtggga

SEQ ID NO: 9025 - DNA, 801 bp, Homo sapiens
tgcacacagctttggaagcatactctaatgtagggtaaccaggaatattgacgttgtggccactgcttggaaaaaagaggactgtttctttcattttttaactcattttatatattttaagtaatggaactataaaaaattctcttataagtcaaaaccatacaagatacagtctgttcttgattatccatacccacaaagggtttcattaacatagacagttgaactctataaattaaccagcaagggtagaaccactgccgtgcagtctgatactgagcatcttgcctggagatggaatcaaggctcagtccaactgcacctccagtgacagattccattcctgatttgagagtttagatcttatttctgttgccttatctctggcctaagtaatgtagctggaagggaaactgtcactaggaacagcataccacattcattgttgaaataatcaaaggttaatcatgtttcgagctgggtgtgatggcgcgtacctgtagtccatgctactcaggaggctgaggcaggaggatcacatgagcttgggagttggaggccagcctgggcaacaacgcaagaccccagtctttaaaaaaacaaaaaagctgaccaggcatgttggctcacgctgtaatgccagcactttgggaggccaagatgggaagattgcttgaggmcaggagtttgagaggagcctgggcaacaaaacaagaccctgtctctaaaacaaattttaaaaaattagccagtggctgtggcacacctgtaggctcatctactcaggaggctgaggtggga

SEQ ID NO: 9026 - DNA, 697 bp, Homo sapiens
aaatatgcgtatctaatttttgaatttttagcaaaatttaccatttattgaaaagtttatatttgctcacataacttgaatttttttacctgacacatatatgaaatgtccatgagcaattatctggcctctcttccatcttcagttaacttattcacttttctgtgctataatgttaaaaagtaagtttcacttcatatggacaatattttctacttcttcatttatttaataatatcttagttattcttgactaatgtgttatttaaaattttgaatcatcttattaacttccacaggcaagtaaatgttttagtctctcattgatcattgtaataagcctgcagatcaatgcagagagaactgaatctttgataatattgagatttccagtccatcgatcataatatgaatatcccactacttattaataaatcatctcttaataaatatatcattaattgcataaatttctccaygactgatcattttttttttgagacagagtctcgttctgtcacccagggtggagtgcagtggcacgaactcggctcactgcaacctccacctcccgggttcaagcagttctcctgcctcagcctccagagtagctgggactgctggcgcatgctgccatgcccagctaattttttgtattttagtagagacggggtttcactgtgttgcccaggctgtt

SEQ ID NO: 9027 - DNA, 697 bp, Homo sapiens
aaatatgcgtatctaatttttgaatttttagcaaaatttaccatttattgaaaagtttatatttgctcacataacttgaatttttttacctgacacatatatgaaatgtccatgagcaattatctggcctctcttccatcttcagttaacttattcacttttctgtgctataatgttaaaaagtaagtttcacttcatatggacaatattttctacttcttcatttatttaataatatcttagttattcttgactaatgtgttatttaaaattttgaatcatcttattaacttccacaggcaagtaaatgttttagtctctcattgatcattgtaataagcctgcagatcaatgcagagagaactgaatctttgataatattgagatttccagtccatcgatcataatatgaatatcccactacttattaataaatcatctcttaataaatatatcattaattgcataaatttctccackactgatcattttttttttgagacagagtctcgttctgtcacccagggtggagtgcagtggcacgaactcggctcactgcaacctccacctcccgggttcaagcagttctcctgcctcagcctccagagtagctgggactgctggcgcatgctgccatgcccagctaattttttgtattttagtagagacggggtttcactgtgttgcccaggctgtt

SEQ ID NO: 9028 - DNA, 782 bp, Homo sapiens
caggttgaaggtctctcatatatgtaacctgttcaggacgagacaattcaaccacttttcttaaattctgatctacatgcctttacattctttgctttaagggccacataaaaatactctgaaacaatttacacatcagaaaaatgctaacactttcctcctggcccagcacatctccaagttaaaaaaatctctaaattatcaacccatagtttaatcatggtaactcccttctacccccaacatagatttttatgtaactgatttgtaactacaaccttaaccgtacaatcacaattgtcattataaaatactaacaaacatgtgctattaacaatggatggttaaaatcacttagggattatgaatcatttcatttttgtgtttatttattatgtcagtttcaagctgatttccctttcccttgttccacacaccttgggttgttctttttcagcatcctgtgtatgttagctctaagcccagccaaggctcatgcccctccacttcagggacagagggtggctcatccctttcgtgctccctcagctccctccccggtgcctggttgctggttggcatcacagccatgcccttgaaagatgggcgctggtccacactgcatccgtggtcatgtagccaccctccctccacagaaccgagcaaaaagggctccaccgcgcttaggcattgasggaatggacattttgaatggtgctgtcttgtgtgatccctcagaggagaaggagatttcttgaatgggagtggtctgttgctgagag

SEQ ID NO: 9029 - DNA, 593 bp, Homo sapiens
gagggggagagggagagctccagtgagtggtctctggtttttcccctcagactcctcactttgggcaaaggacaagaggcagtgagggcccctccctggggtctgggccaagctgaccactcttctccagaatcttccctccctgtccccttcacactgtggctccagcttactatgcagaaaaatccttttctctctcaatgaggagcctagttttcaagatttttgtccaaaaatataatttgaaccatgaaccgggcatctggctcttggcagagtctccctctttccccaaggtggtagatgtgactgtcaggagtctgggcagctgacgacaaggctgagcaggtcagattgtgactgtyccctggactgtcatcctgttgcgggcaccagctgttccctagagaactaggacacctgccacgggttatttagacccgcgggtgaggatctggtgccataggttggtctccagggagcactgcagtgatggagggtgttgtgtgtgtgatgcatgggatggaggctcctggtcccaccaagggaacagcttccttttggaggcgggggcctcctgtggccccacagaa

SEQ ID NO: 9030 - DNA, 431 bp, Homo sapiens
gggagcagcctctggacaggagwggtcccatccaggaaacctcgggcatggctgggaagtggggtacttggtgccgggtctgtatgtgtgtgtgactggtgtgtgtgagagagaatgtgtgccctgagtgtcagtgtgagtctgtgtatgtgtgaatattgtctttgtgtgggtgattttctgcatgtgtaatcgtgtccctgcaagtgtgaacaagtggacaagtgtctgggagtggacaagagatctgtgcaccatcaggtgtgtgcatagcgtctgtgcatgtcaagagtgcaaggtgaagtgaagggaccaggcccatgatgccactcatcatcaggagctctaaggccccaggtaagtgccagtgacagataagggtgctgaaggtcactctggagtgggcaggtgggggtagggaaagggcaagg

SEQ ID NO: 9031 - DNA, 431 bp, Homo sapiens
gggagcagcctctggacaggagaggtcccatccaggaaacctcsggcatggctgggaagtggggtacttggtgccgggtctgtatgtgtgtgtgactggtgtgtgtgagagagaatgtgtgccctgagtgtcagtgtgagtctgtgtatgtgtgaatattgtctttgtgtgggtgattttctgcatgtgtaatcgtgtccctgcaagtgtgaacaagtggacaagtgtctgggagtggacaagagatctgtgcaccatcaggtgtgtgcatagcgtctgtgcatgtcaagagtgcaaggtgaagtgaagggaccaggcccatgatgccactcatcatcaggagctctaaggccccaggtaagtgccagtgacagataagggtgctgaaggtcactctggagtgggcaggtgggggtagggaaagggcaagg

SEQ ID NO: 9032 - DNA, 431 bp, Homo sapiens
gggagcagcctctggacaggagaggtcccatccaggaaacctcgggcatggctgggaagtggggtacttggtgccgggtctgtatgtgtgtgtgactggtgtgtgtgagagagaatgtgtgcyctgagtgtcagtgtgagtctgtgtatgtgtgaatattgtctttgtgtgggtgattttctgcatgtgtaatcgtgtccctgcaagtgtgaacaagtggacaagtgtctgggagtggacaagagatctgtgcaccatcaggtgtgtgcatagcgtctgtgcatgtcaagagtgcaaggtgaagtgaagggaccaggcccatgatgccactcatcatcaggagctctaaggccccaggtaagtgccagtgacagataagggtgctgaaggtcactctggagtgggcaggtgggggtagggaaagggcaagg

SEQ ID NO: 9033 - DNA, 431 bp, Homo sapiens
gggagcagcctctggacaggagaggtcccatccaggaaacctcgggcatggctgggaagtggggtacttggtgccgggtctgtatgtgtgtgtgactggtgtgtgtgagagagaatgtgtgccctragtgtcagtgtgagtctgtgtatgtgtgaatattgtctttgtgtgggtgattttctgcatgtgtaatcgtgtccctgcaagtgtgaacaagtggacaagtgtctgggagtggacaagagatctgtgcaccatcaggtgtgtgcatagcgtctgtgcatgtcaagagtgcaaggtgaagtgaagggaccaggcccatgatgccactcatcatcaggagctctaaggccccaggtaagtgccagtgacagataagggtgctgaaggtcactctggagtgggcaggtgggggtagggaaagggcaagg

SEQ ID NO: 9034 - DNA, 830 bp, Homo sapiens
agctgcaagccagcaactacatttcccagccccactggcatctagttagagccatgtgactagttgtgaccaattgaatgtgagtgggagttatgttgcaggcataccttttccatcttcttacttcccatttgctaaccttatggaaaagagtcccaaagacctaggagatgaaaaagcctaaaatggaaggactcagagtccctgaattactgggtagagaaaagctgtttgcagatgggaatgcccattttgtagtattctttcttttcttaagccactaaaattgtgggatctctttgttatagctactggcattaacctcttacgtatacatacagctatgtgctacaaagaggaatagatacattttttaatcgttgaaagrggagaaagaaacatatttaggaggaaaataatttagtctctacaattgtaaagtgttttatgaataatattttgttttggcagcatattaaatctcaggcagctgaactacattaattttcaattctctatatatgtttttgtcttcagggtttagtaacactgatatataacagtttctttcttttaatttccaaatttaaatgtctaagtttgccttctaggcagaaattaagtcccattgtggaatgagattggatcaacacttcaccaagatcattttagttctttgtaatcttaaatgaaataagctaataaagcattaaattagcatgttgtaaaacttcgtgaagttttaatatgcttctaagtggcagctcttagcttattatctctaaagctaaagtcaaaataaatgtctcagttgatgaaatggagatgag

SEQ ID NO: 9035 - DNA, 830 bp, Homo sapiens
agctgcaagccagcaactacatttcccagccccactggcatctagttagagccatgtgactagttgtgaccaattgaatgtgagtgggagttatgttgcaggcataccttttccatcttcttacttcccatttgctaaccttatggaaaagagtcccaaagacctaggagatgaaaaagcctaaaatggaaggactcagagtccctgaattactgggtagagaaaagctgtttgcagatgggaatgcccattttgtagtattctttcttttcttaagccactaaaattgtgggatctctttgttatagctactggcattaacctcttacgtatacatacagctatgtgctacaaagaggaatagatacattttttaatcgttgaaagaggagaaagaaacatatttaggaggaaaataatttagtctctacaattgwaaagtgttttatgaataatattttgttttggcagcatattaaatctcaggcagctgaactacattaattttcaattctctatatatgtttttgtcttcagggtttagtaacactgatatataacagtttctttcttttaatttccaaatttaaatgtctaagtttgccttctaggcagaaattaagtcccattgtggaatgagattggatcaacacttcaccaagatcattttagttctttgtaatcttaaatgaaataagctaataaagcattaaattagcatgttgtaaaacttcgtgaagttttaatatgcttctaagtggcagctcttagcttattatctctaaagctaaagtcaaaataaatgtctcagttgatgaaatggagatgag

SEQ ID NO: 9036 - DNA, 892 bp, Homo sapiens
gtaaactggtttggtggacaactgtcattatccctgttacctggagcccctgggtcttagggagacttcttgacttctcaaggtcatgaaggtgctaactctgaccgtgtttttattcctactgtgccacacttctcaggtaaaaatcatattgcagacactttaagagaagtacttaagaaaataaattcctccagagaattacatttaagttgtttcattaactgcagtgcataaagaaaggaaaagtgttcccaaacccatgtagtattttgctattgcttatggtaatattctgcacacctaatattgtcagcataattttccatgtaacaaaatgtcctaaatcagcaatgtccaatataactttgtgtgatgataaaaatgttctgtctctgtgctgtccaatacaacagccactagatacacatgactactgagcaatggtaatatggccagggacactaaggaactaaatttttatttaatattaaataacgtttaaatttcaaaagccgcatgcggctagtggttgtcatcagatactgcagttatagaaaattagaatttacctctttaaatactaaacctatttttaatagtaggatttttaaattaaaatagttctaagtgcttttaagtgatacgaagtcaaatgcaagatttctgttttaatagtactctcaacccagagacaatcttcatgcatccttatacatgtyctttgttgccttattttagttttattttaacattaaatgcctctgttctacttgatattgacttgcttcagagaacaccaagtatagtggaaagaaacacacacatgaggacttgaggctaccaaccaggttcaactaaatgcactctgatttaattgtagtattgggat

SEQ ID NO: 9037 - DNA, 892 bp, Homo sapiens
gtaaactggtttggtggacaactgtcattatccctgttacctggagcccctgggtcttagggagacttcttgacttctcaaggtcatgaaggtgctaactctgaccgtgtttttattcctactgtgccacacttctcaggtaaaaatcatattgcagacactttaagagaagtacttaagaaaataaattcctccagagaattacatttaagttgtttcattaactgcagtgcataaagaaaggaaaagtgttcccaaacccatgtagtattttgctattgcttatggtaatattctgcacacctaatattgtcagcataattttccatgtaacaaaatgtcctaaatcagcaatgtccaatataactttgtgtgatgataaaaatgttctgtctctgtgctgtccaatacaacagccactagatacacatgactactgagcaatggtaatatggccagggacactaaggaactaaatttttatttaatattaaataacgtttaaatttcaaaagccgcatgcggctagtggttgtcatcagatactgcagttatagaaaattagaatttacctctttaaatactaaacctatttttaatagtaggatttttaaattaaaatagttctaagtgcttttaagtgatacgaagtcaaatgcaagatttctgttttaatagtactctcaacccagagacaatcttcatgcatccttatacatgtcctttgttgccttattytagttttattttaacattaaatgcctctgttctacttgatattgacttgcttcagagaacaccaagtatagtggaaagaaacacacacatgaggacttgaggctaccaaccaggttcaactaaatgcactctgatttaattgtagtattgggat

SEQ ID NO: 9038 - DNA, 542 bp, Homo sapiens
cagctgtgaatgacagtagcagggccccctttgctctgactttaatttctgtgtccttctcaaataagccctatagatgctgagtggcctgggcccctgccatgtgcttgggctgaaagaaagacagcacgtggggaggtgagcaggagcgaagttgaagcaaatctagaattgacatggaaaggactttggacatcaaatccctaggcagtggtgagccactggtccwtctccaagtgaaacaacatgatgaaactgatattgtgttacagtaacattggtagtagtacgcttctgaaaggagatagatttttgggtggcatgaatgattaggagacttctaaatatcctccatgaaagattagaaagggtttatgtaaagcattgtggaagacataggcttgaggctctggattatgttatctcttggaaagagtgttgggttttattctggaagggttaaatgtaggacttgctaggttctatttgagcctttgcccttcctcttagggagccccagcctgtggtcatcattgctagtg

SEQ ID NO: 9039 - DNA, 542 bp, Homo sapiens
cagctgtgaatgacagtagcagggccccctttgctctgactttaatttctgtgtccttctcaaataagccctatagatgctgagtggcctgggcccctgccatgtgcttgggctgaaagaaagacagcacgtggggaggtgagcaggagcgaagttgaagcaaatctagaattgacatggaaaggactttggacatcaaatccctaggcagtggtgagccactggtccawctccaagtgaaacaacatgatgaaactgatattgtgttacagtaacattggtagtagtacgcttctgaaaggagatagatttttgggtggcatgaatgattaggagacttctaaatatcctccatgaaagattagaaagggtttatgtaaagcattgtggaagacataggcttgaggctctggattatgttatctcttggaaagagtgttgggttttattctggaagggttaaatgtaggacttgctaggttctatttgagcctttgcccttcctcttagggagccccagcctgtggtcatcattgctagtg

SEQ ID NO: 9040 - DNA, 542 bp, Homo sapiens
cagctgtgaatgacagtagcagggccccctttgctctgactttaatttctgtgtccttctcaaataagccctatagatgctgagtggcctgggcccctgccatgtgcttgggctgaaagaaagacagcacgtggggaggtgagcaggagcgaagttgaagcaaatctagaattgacatggaaaggactttggacatcaaatccctaggcagtggtgagccactggtccatctccaagtgaaacaacatgatgaaactgatattgtgttacagtaacattggtagtagtacgsttctgaaaggagatagatttttgggtggcatgaatgattaggagacttctaaatatcctccatgaaagattagaaagggtttatgtaaagcattgtggaagacataggcttgaggctctggattatgttatctcttggaaagagtgttgggttttattctggaagggttaaatgtaggacttgctaggttctatttgagcctttgcccttcctcttagggagccccagcctgtggtcatcattgctagtg

SEQ ID NO: 9041 - DNA, 542 bp, Homo sapiens
cagctgtgaatgacagtagcagggccccctttgctctgactttaatttctgtgtccttctcaaataagccctatagatgctgagtggcctgggcccctgccatgtgcttgggctgaaagaaagacagcacgtggggaggtgagcaggagcgaagttgaagcaaatctagaattgacatggaaaggactttggacatcaaatccctaggcagtggtgagccactggtccatctccaagtgaaacaacatgatgaaactgatattgtgttacagtaacattggtagtagtacgcwtctgaaaggagatagatttttgggtggcatgaatgattaggagacttctaaatatcctccatgaaagattagaaagggtttatgtaaagcattgtggaagacataggcttgaggctctggattatgttatctcttggaaagagtgttgggttttattctggaagggttaaatgtaggacttgctaggttctatttgagcctttgcccttcctcttagggagccccagcctgtggtcatcattgctagtg

SEQ ID NO: 9042 - DNA, 1591 bp, Homo sapiens
tgggttcgggccggtgtgacgcgtgcgccggccggccgccgaggggctgccgttctgcctccgaccggtcgtgtgtgggttgacttcggaggcgctctgcctcggaaggaaggaggtgggtggacgggggggcctggtggggttgcgcgcacgcgcgcaccggccgggcccccgccctgaacgcgaacgctcgaggtggccgcgcgcaggtgtttcctcgtaccgcagggccccctcccttccccaggcgtccctcggcgcctctgcgggcccgaggaggagcggctggcgggtggggggagtgtgacccaccctcggtgagaaaagccttctctagcgatctgagaggcgtgccttgggggtaccggatcccccgggccgccgcctctgtctctgcctccgttatggtagcgctgccgtagcgacccgctcgcagaggaccctcctccgcttccccctcgacggggttgggggggagaagcgagggttccgccggccaccgcggtggtggccgagtgcggctcgtcgcctactgtggcccgcgcctcccccttccgagtcgggggaggatcccgccgggccgggcccggcgctcccacccagcgggttgggacgcggcggccggcgggcggtgggtgtgcgcgcccggcgctctgtccggcgcgtgaccccctccgtccgcgagtcggctctccgcccgctcccgtgccgagtcgtgaccggtgccgacgaccgcgtttgcgtggcacggggtcgggcccgcctggccctgggaaagcgtcccacggtgggggcgcgccggtctcccggagcgggaccgggtcggaggatggacgagaatcacgagcgacggtggtggtggcgtgtcgggttcgtggctgcggtcgctccggggcccccggtggcggggccccggggctcgcgaggcggttctcggtgggggccgagggccgtccggcgtcccaggcggggcgccgcgggaccgccctcgtgtctgtggcggtgggatcccgcggccgtgttttcctggtggcccggccgtgcctgaggtttctccccgagccgccgcctctgcgggctcccgggtgcccttgccctcgcggtccccggccctcgcccgtctgtgccctcttccccgcccgccgcccgccgatcctcttcttccccccgagcggctcaccggcttcacgtccgttggtggccccgcctgggaccgaacccggcaccgcctcgtggggcgccgccgccggccactgatcggcccggcgtccgcgtcccccggcgcgcgccttggggaccgggtcggtggcgcsccgcgtggggcccggtgggcttcccggagggttccgggggtcggcctgcggcgcgtgcgggggaggagacggttccgggggaccggccgcggctgcggcggcggcggtggtggggggagccgcggggatcgccgagggccggtcggccgccccgggtgccccgcggtgccgccggcggcggtgaggccccgcgcgtgtgtcccggctgcggtcggccgcgctcgaggggtccccgtggcgtccccttccccgccggccgcctttctcgcgccttcccc

SEQ ID NO: 9043 - DNA, 2888 bp, Homo sapiens
  misc_feature (1)...(2888): n = A,T,C or G
tgaagtcagtccagagaaacgcaataaatgtcaacggtgaggatggtgttgaggcagaagtaggaccacactttttcctatcttattcagttgataacaatatgacctaggtagtaatttcctatgtgcctacttatacacgagtacaaaagagtaaaacagagagactgctaaattaaagggtacgtgaagttcttcatagtaactccgtaaactggaacactgtcaaaaagcagcagctagtgaattgtttccatgtatttttctattatccaataagtgaactatgctattcctttccagtctcccaagcacttcttgtccccatcaccacttcggtgctcgaagaaaaagtaagcaaatcaaggaacacaagctaaagaaacacacacacaaaccaaagacaactacagcgtctgcaaaagtttgctagaagactgaaactgttgagtataaggatctggtattctacgatcatgagttcacttcagagtttgttcaagacatacgtttcgtaaggaaacatcttagttagaagttattcagcagtaggtaccatccctaagtatttttcaccaaatccgtgacaataaagagctatctaaccagaaaaattagcgagtacgggcaccatccatagggctttgtctttacgcttcattagcacttaccatgccttacaatgtctaggattgaccctgatagcatttcgaaaacaagctaatgctttgtccagttcttcagtgaagacaactcacgccctaatgcgctataggcataagcatcatttggatccacttcgagagttctctggaagaattgaatcgcaatatcgtgttcccgtttgcagaccgaaacagtttccctgcagcacaccaggcctctggctggcgaatttttatccatgtctgtgaagtctttggacagaactgaaagagcaacctctttcggaggatgccaaagtgttgtagagtagatctccatgccttcgactctgtaattctcaatcctcctaacctctgagaattgtctttcagcttgcgtggactctgaaagtttacaataggccntttccgatttggcacagtacccaaccggtattgcagtggtgagaagctagatggctcaagatrctgatagcttctttgccgtggtaagaacacaaagctaaataacctttccccctttcacgaagaaggctcatcaagccttccgctgctgctttttgtagattaaaagcctgaatctgaggcgcgattgcggctattttcccttctgaaatgacggaagagtccaattttgtcacttccaggctatcacttatgttcggtggagttattgctcctttattagttttacttttggttcttctgtttgggattttaggtggaaacttcatttttaattttctcctaattctcctcggttgtggagctgtcactagtcaagagtcgtgaatttcttcgaggncggtgcatttgggggagatgccatagtggggctcaatacctgaggtgttgcccttgtcggcggaccagaactttgtgtttttgcaaggactggagttacctttcggctctttcccctctgcgagaagacagacggtgttccggtttggccgattctggcaacaggcttttctgaaggggctccggtggatggcacgtcagtgacagacggtgtctcataccagtgcagttttgtcaatagggtccgtctccgggacttggggtttctaatggcaaaatgccaacacttggggttaatggactaacagctgctggtcctcctaataaacttcgaccagtttttggtttatgttgaacctgtttagatcatatggaagttcctgttcccagtgggacagtatcaggtgaaaggacagctgaatcgatagaagacactggggagtctgtattcaaggagtactttgaattggaagattctaaattccatccgtttcattcgacggtgtcctggggtgtttccgtaagaacggtctcgggctgtctgtgacataaactaggacgaggtccaagtgttgtggcgcaacacttggacaggcagttgctaaagctctctagagaggtgaatcaaaatgtttggtcaggatctggcttttcccccctatttcacatcatgattcaaagggacaccagaggaaaggatttcaacgaaggctcttttggtcacattctgatcctttggtaagccgatctgtcttgcaatatacatgtcccgacgatggaaggggaaagcgagctgaatcaccaaactcaggaacgataatatcatcgtggcttttctgcttatgaaacactccacccgataagatttgatccccttctgcaagcttgctgagatcaacacaacatttcgcaagcaggcatttgcattgcggggtagtacaactgtgtcctttcaagagtctatatgttttataggcctttcctgagcggtaagaacaggtcgccagtaagaacaaggcttcttctgagtgtacttctgcataaaggcgttctgcgggggaaaccgcatctcggtaggcatagtggtttagtgcttgccatatagcagcctggacgggtccctgcagcaccgccatcctcgaggctcaggcccactttctgcagtgccacaggcacccccccccccccatagcggctccggcccggccagccccggctcatttaaaggcaccagccgccgttaccgggggatgggggagtccgagacagaatgacttctttatcctgctgactctggaaagcccggcgccttgtgatccattgcaaaccgagagtcacctcgtgtttagaacacggatccactcccaagttcagtggggggatgtgaggggtgtggcaggtaggacgaaggactctctt

SEQ ID NO: 9044 - DNA, 765 bp, Homo sapiens
ggatccttgcctgtccattttctagctctggtgcagtcatgctgctgctgctttagtagacactcacgtcatagtcttcagtgaggagatagtcttstgtgatgtgggggctgagcagtgtgtagcccactaggtagaaaaggcccagactcaggcgcttgagagcaggaatgatgctggaaaggaacgagtgaagttcctggtcacagagagcagagactattcccttcaccctctgaccttcagttatggagaggagtgtttaggggtgtggttgtctacctggaatgggatgagaagctctgctgcccaaagtgtttcctgtttcagggaaagatttctatggctggctatgaggaatggggactgcaaacctcttaagagttgtaggaaagtcagggcagcagacagtggaccagtcttgtgtttacccctcagggatgctactgatctcaaggtcttgccaggtctcacaatctccattgggactgaaaacccagtggaggtaagataataaaaataaccactttgaatctgctccttcatttcttggttgaattgatgctgaaacacaggatggacaagttctcagtgaaggaattcttctggcaattaaactttttttttttttttttttttaccattttaatttttattttctagagtcagggccttgctctgccactccggctagagtacagaggcatagtcattgctcgctgtggccttgaactcctgggctcaagcgatccccttgccttggcc

SEQ ID NO: 9045 - DNA, 851 bp, Homo sapiens
ggaaggaagtagtttcttctggggtctaagaaggtggaagccgtttctctccatggcagaaacagaggtggtgggcgagtgtgctcaggattggggccctgcagggaatcaccacggtgctgcttttcatgctcaggtcacgtaggggccttggggtgatctcagggatgagcccatcagctccctctttttcattgtaaccgcttttctaagaggcaagcagagctttggtcatgggctcatctctgccgtcaaatcgctctgactttgcgcagatctcttcggatcaaggtgcacgttaagttctggagtgtgggaaataaacgggctcgtttgtgcttagagccataagacaactaacagataagagatgtgggaagctgtagatacaaagagtctccggagcatgtgctcagggttactcccactttcactgaaatgccagaggaccactccatcatgaatgtgtaatttggaaccttattgctaaaaaaggccttaaccagcacttaacttccactaaatgctccaattggctctgaaacgatcactcagcccatggcatcgtgcagcctgttctagtcccttctgtgacggggagttcacctccttcccagtgcccttcgctggcccagtacttaagtcttctgggtgacagcctggctcctatttctctctctctctttgccccctggtttctgatcgaggcagtgcttatccctttgtatgggaagcccatcataacatgtcccccatctgtctcccatgtagctgcaccaagtgtcyggacacgattacgtcccaaccctgacatcctggaccactccctgcagaccccagggtggactgag

SEQ ID NO: 9046 - DNA, 635 bp, Homo sapiens
tatgctgaacgctggtytcccgggcccccttatttctttctctatactttgtctctgtttctttttctttcctaagtctctcattccaccttacgagaaacacccacaggtgtggaggggcaacccaccccttcacttaccagtttattacaaaggctattttaaaggatacaaacaaagagatgcatggggtaagacatgcaggaaggggtgcagaggttccatggcctctctgggtgctccatcctgtgtatccagattacaggcatgagccactgcacctggcctgggattacaggcatgagccactgcacctggcctgcgtattattttatacatttataggtcatttgggtttttccttctgtttattattgactcatgactgtaaaccaaaaagtatctgagacaggtctcactcaatttaaaagtttatttttgccaaagttaaggacatggacagagaaaaggatcataaaatccacaggaacaatctgtggtccatactgttttccaaaggtgattttgagagctcctaaatttaaagagggtaagtgggttggaggggaaagagggagggtatgatcacattactggatgcacatttttttttctgtttttgagacagtctcact

SEQ ID NO: 9047 - DNA, 635 bp, Homo sapiens
tatgctgaacgctggtcycccgggcccccttatttctttctctatactttgtctctgtttctttttctttcctaagtctctcattccaccttacgagaaacacccacaggtgtggaggggcaacccaccccttcacttaccagtttattacaaaggctattttaaaggatacaaacaaagagatgcatggggtaagacatgcaggaaggggtgcagaggttccatggcctctctgggtgctccatcctgtgtatccagattacaggcatgagccactgcacctggcctgggattacaggcatgagccactgcacctggcctgcgtattattttatacatttataggtcatttgggtttttccttctgtttattattgactcatgactgtaaaccaaaaagtatctgagacaggtctcactcaatttaaaagtttatttttgccaaagttaaggacatggacagagaaaaggatcataaaatccacaggaacaatctgtggtccatactgttttccaaaggtgattttgagagctcctaaatttaaagagggtaagtgggttggaggggaaagagggagggtatgatcacattactggatgcacatttttttttctgtttttgagacagtctcact

SEQ ID NO: 9048 - DNA, 669 bp, Homo sapiens
ccggaccctggggamcccgtcaaaaataaatgaaattaagattgccgaccagagagagaaccgtgacaaagcaaacggcgttcaaagcaaagagacgaactgaaagcccgttcccgtaggactggttatgaggtcaacacattcaaacacagcttgctctggattttgctgagcagaggaagatacagatgcatttgatccaaagtgtgttacatctttcattatatgtgtgtctatatatataaacatatataaatatataaacatacataaatgtatgtaaatatatataatctatatacatatataaatatataaacacatatataatatataaatctataaacatatataatatataaacataaatatataaacatatataatatataaatatattaacatatataaaatatgtataaatatatataaacatataaacatatataaatatataaacatataaatatataaacatatataaatatatacaaacatattgtatatatataaatatatataaaaacatatatatacatataaaaatatatataaacatatatacatataaagaaatatatataaacatatatacatataaatatacatatataaacatatatatacataaaatatatataaacatatatacatataaaaatatatata

SEQ ID NO: 9049 - DNA, 669 bp, Homo sapiens
ccggaccctggggaacccgtcaaaaataaatgaaattaagattgccgaccagagagagaaccgtgacaaagcaaacggcgttcaaagcaaagagacgaactgaaagcccgttcccgtaggactggttatgaggtcaacacattcaaacacagcttgctctsgattttgctgagcagaggaagatacagatgcatttgatccaaagtgtgttacatctttcattatatgtgtgtctatatatataaacatatataaatatataaacatacataaatgtatgtaaatatatataatctatatacatatataaatatataaacacatatataatatataaatctataaacatatataatatataaacataaatatataaacatatataatatataaatatattaacatatataaaatatgtataaatatatataaacatataaacatatataaatatataaacatataaatatataaacatatataaatatatacaaacatattgtatatatataaatatatataaaaacatatatatacatataaaaatatatataaacatatatacatataaagaaatatatataaacatatatacatataaatatacatatataaacatatatatacataaaatatatataaacatatatacatataaaaatatatata

SEQ ID NO: 9050 - DNA, 669 bp, Homo sapiens
ccggaccctggggaacccgtcaaaaataaatgaaattaagattgccgaccagagagagaaccgtgacaaagcaaacggcgttcaaagcaaagagacgaactgaaagcccgttcccgtaggactggttatgaggtcaacacattcaaacacagcttgctctggattttgctgagcagaggaagatacagatgcatttgatccaaagtgtgttacatctttcattatatgtgtgtctmtatatataaacatatataaatatataaacatacataaatgtatgtaaatatatataatctatatacatatataaatatataaacacatatataatatataaatctataaacatatataatatataaacataaatatataaacatatataatatataaatatattaacatatataaaatatgtataaatatatataaacatataaacatatataaatatataaacatataaatatataaacatatataaatatatacaaacatattgtatatatataaatatatataaaaacatatatatacatataaaaatatatataaacatatatacatataaagaaatatatataaacatatatacatataaatatacatatataaacatatatatacataaaatatatataaacatatatacatataaaaatatatata

SEQ ID NO: 9051 - DNA, 807 bp, Homo sapiens
tagtgcttgatcaggttctcttttcaggacttcttggagctgtggttaggcctccatgttagcaacagacacccactccagaccctcacctcttgwccctggcattactggcgctgcccctgcctcattctaaaatagatggaaagactgatgagccctgggaattctttcaggatttggtgacatttgatgatgtggcatggtacctcaccacaagggagtggtttaagctggaccctgaacagagggcactggaatattatgggaacgtgacctctgtgggtaaggatgtcccagcccttcctcaaattcaccaccttcttggagtggggcaggggacacatggctacccccacagaagctcaccttctccctgggttgtggggaaacacaatgggtctgccacacctgatatgtcagagtagtatgagctcccccaactcctcttggcatggaaagaacccctctcagtcttttactgggaaagaaattagaacactgccactgtaatgtagaatgcccttttcattttaatgcacaaattatgcaaattgcatggccatttggtttgagtttatttgtgagaaaggttgacgtgatcaagatcttgttcacccattaggggtctgcatgtgtgcagtggggaggaggttttaggaggagagacgttgggagtcagatttgggagctgtcgaagtccacgtgtctgggaagagcatgaagttaaatgtgtgagctctgagtgggtggacagagagaagacagggtgaagatcacctcctcagggtggccacttgatactccaca

SEQ ID NO: 9052 - DNA, 807 bp, Homo sapiens
tagtgcttgatcaggttctcttttcaggacttcttggagctgtggttaggcctccatgttagcaacagacacccactccagaccctcacctcttgaccctggcattactggcgctgcccctgcctcattctaaaatagatggaaagactgatsagccctgggaattctttcaggatttggtgacatttgatgatgtggcatggtacctcaccacaagggagtggtttaagctggaccctgaacagagggcactggaatattatgggaacgtgacctctgtgggtaaggatgtcccagcccttcctcaaattcaccaccttcttggagtggggcaggggacacatggctacccccacagaagctcaccttctccctgggttgtggggaaacacaatgggtctgccacacctgatatgtcagagtagtatgagctcccccaactcctcttggcatggaaagaacccctctcagtcttttactgggaaagaaattagaacactgccactgtaatgtagaatgcccttttcattttaatgcacaaattatgcaaattgcatggccatttggtttgagtttatttgtgagaaaggttgacgtgatcaagatcttgttcacccattaggggtctgcatgtgtgcagtggggaggaggttttaggaggagagacgttgggagtcagatttgggagctgtcgaagtccacgtgtctgggaagagcatgaagttaaatgtgtgagctctgagtgggtggacagagagaagacagggtgaagatcacctcctcagggtggccacttgatactccaca

SEQ ID NO: 9053 - DNA, 807 bp, Homo sapiens
tagtgcttgatcaggttctcttttcaggacttcttggagctgtggttaggcctccatgttagcaacagacacccactccagaccctcacctcttgaccctggcattactggcgctgcccctgcctcattctaaaatagatggaaagactgatgagccctgggaattctttcaggatttggtgacatttgatgatgtggcatggtacctcaccacaagggagtggtttaagctggaccctgaacagagggcactggaatattatgggaacgtgacctctgtgggtaaggatgtcccagcccttcctcaaattcaccaccttcttggagtggggcaggggrcacatggctacccccacagaagctcaccttctccctgggttgtggggaaacacaatgggtctgccacacctgatatgtcagagtagtatgagctcccccaactcctcttggcatggaaagaacccctctcagtcttttactgggaaagaaattagaacactgccactgtaatgtagaatgcccttttcattttaatgcacaaattatgcaaattgcatggccatttggtttgagtttatttgtgagaaaggttgacgtgatcaagatcttgttcacccattaggggtctgcatgtgtgcagtggggaggaggttttaggaggagagacgttgggagtcagatttgggagctgtcgaagtccacgtgtctgggaagagcatgaagttaaatgtgtgagctctgagtgggtggacagagagaagacagggtgaagatcacctcctcagggtggccacttgatactccaca

SEQ ID NO: 9054 - DNA, 757 bp, Homo sapiens
gttagggtttgggggccctgctgagctcttgggcttgaggttagggttgagagaaacagctgatctctcaggggtttgggttagggttgggggcccagctgagctcttggggttgaggttagggttgagaggatcagctggcctcttggaggttttgagttagagttggggggttccagctgagctcttgggttcgggttagggttgagggacccagctgagctcttggggttgaggttagggttagggggtccagctgaacttctgaggttgaggttacgagtagaggggcccatttgggctcctggggttgaggttaggattgagaggatcagctgggctctctgggcattcaggttaaagttaggaccccagctgagctcttggggttgaggttaagtttgggagccctgctgagttcttggggttgaagttagggttggggggcccagctgagctcttggagttgaagttaaggttgggagggctcagctgagcttttggggttctagttagtgtttggggccccagctgagctcttgacggtgaggttagggttgagaggatcagcagggccctttggagattcgggttatgtttggagatcccagctgagctcttggagttacagttagggttgggggtcccagctgagcttttggagttctagttagggtttggggccccagctgagytcttgatggtgaggttaggttgaggatcagcagggccctttggagattcaagttatgtttgg

SEQ ID NO: 9055 - DNA, 739 bp, Homo sapiens
atatcctaacggcagctttggcttccatgcaggctgtcatgaggatmcaaggagacaagaatgtactgggtactggtatgttctgtgactatgtggcagagacgtgtgtcccctccttaccaagtacaccacagaacagggacctcccacagctttaaagaactatttggaaccatgtagaaggcaaggcatttcaggaaaatttaacaccacatgtgagggtttggaattttcaaaagacacttggctcaggctaaagtgccaccttactggccaaagaaaataaagttgctctctcttttctgaaccagtcctgtgttccatgctaggtttggtgactgctgggttattagactatatccttcaagcattgtcaggtgaggccactgctggcagcatgaatagccatggagcaaggagagacagcgcattcagctactgtgagtggggctactgctctgctacaagggctcttgtagatagaaattggcttcccaaacagcaaggagattttagtcacaaattctccactactcttcagttttacaggatgctctgtctcacccagaaagcaaaccgaagcatcttggcgccccctgctccatttgtcagtgtgtggttctctccactccacctaaggaaatttagccaccaccaaatgggtggagattgacatgctagaaaagaaggggcaaaccagcttgtggaaattagaccggttacttccaaatcaggttgg

SEQ ID NO: 9056 - DNA, 721 bp, Homo sapiens
ataaatgaaatattaggattttttaaacccatagacaaacactaaaacagtcactgtttgaatgcaaaaaaagtgggagtctaaagcagctaaccccaaaacagccttaccaagcccaaggccaggccaggcagtctgaacactacaaggtcacgtgatggtcacagaggatgacagctcccatgagtattctcaggcactgtgttagcttctcactcacagagtctcagaatgcctcctcaccaataccctgtgagggaaggccccacctcactacagcacgagaggttcctgagctcttcccagaaaatggttatcaaagggtggagctgggggaagcccagacagaacaagtgagtccccagggtctccttaacctccctcagctcctccacatggggccctgagggaaagtgagcggcctcctaacccctttgatagggttccagtactgcaggtctggacctcctcattttctggaaccacaggaggcgacaatgcaaacccaggccccttatttgccrtccctcaatgccaggccaggcccagagccctgtgctgacacagcccaggggatgctcgaggcccacctcagcacagtcaccaatagcgtagtgagatgagcaaggaggtgcaagtaggcacaaatccccatggacatggcctcaggcatgttccacaggctcagggtctccctgatgagctcacagccctccttcag

SEQ ID NO: 9057 - DNA, 721 bp, Homo sapiens
ataaatgaaatattaggattttttaaacccatagacaaacactaaaacagtcactgtttgaatgcaaaaaaagtgggagtctaaagcagctaaccccaaaacagccttaccaagcccaaggccaggccaggcagtctgaacactacaaggtcacgtgatggtcacagaggatgacagctcccatgagtattctcaggcactgtgttagcttctcactcacagagtctcagaatgcctcctcaccaataccctgtgagggaaggccccacctcactacagcacgagaggttcctgagctcttcccagaaaatggttatcaaagggtggagctgggggaagcccagacagaacaagtgagtccccagggtctccttaacctccctcagctcctccacatggggccctgagggaaagtgagcggcctcctaacccctttgatagggttccagtactgcaggtctggacctcctcattttctggaaccacaggaggcgacaatgcaaacccaggccccttatttgccgtccctcaatgccaggccaggcccagagccctgtgctgacacagcccaggggatgctcraggcccacctcagcacagtcaccaatagcgtagtgagatgagcaaggaggtgcaagtaggcacaaatccccatggacatggcctcaggcatgttccacaggctcagggtctccctgatgagctcacagccctccttcag

SEQ ID NO: 9058 - DNA, 721 bp, Homo sapiens
ataaatgaaatattaggattttttaaacccatagacaaacactaaaacagtcactgtttgaatgcaaaaaaagtgggagtctaaagcagctaaccccaaaacagccttaccaagcccaaggccaggccaggcagtctgaacactacaaggtcacgtgatggtcacagaggatgacagctcccatgagtattctcaggcactgtgttagcttctcactcacagagtctcagaatgcctcctcaccaataccctgtgagggaaggccccacctcactacagcacgagaggttcctgagctcttcccagaaaatggttatcaaagggtggagctgggggaagcccagacagaacaagtgagtccccagggtctccttaacctccctcagctcctccacatggggccctgagggaaagtgagcggcctcctaacccctttgatagggttccagtactgcaggtctggacctcctcattttctggaaccacaggaggcgacaatgcaaacccaggccccttatttgccgtccctcaatgccaggccaggcccagagccctgtgctgacacagcccaggggatgctcgaggcccacctcagcacagtcaccaatagcgtagtgagatgagcaaggaggtgcaagtagrcacaaatccccatggacatggcctcaggcatgttccacaggctcagggtctccctgatgagctcacagccctccttcag

SEQ ID NO: 9059 - DNA, 721 bp, Homo sapiens
ataaatgaaatattaggattttttaaacccatagacaaacactaaaacagtcactgtttgaatgcaaaaaaagtgggagtctaaagcagctaaccccaaaacagccttaccaagcccaaggccaggccaggcagtctgaacactacaaggtcacgtgatggtcacagaggatgacagctcccatgagtattctcaggcactgtgttagcttctcactcacagagtctcagaatgcctcctcaccaataccctgtgagggaaggccccacctcactacagcacgagaggttcctgagctcttcccagaaaatggttatcaaagggtggagctgggggaagcccagacagaacaagtgagtccccagggtctccttaacctccctcagctcctccacatggggccctgagggaaagtgagcggcctcctaacccctttgatagggttccagtactgcaggtctggacctcctcattttctggaaccacaggaggcgacaatgcaaacccaggccccttatttgccgtccctcaatgccaggccaggcccagagccctgtgctgacacagcccaggggatgctcgaggcccacctcagcacagtcaccaatagcgtagtgagatgagcaaggaggtgcaagtaggcacaaatccccatggrcatggcctcaggcatgttccacaggctcagggtctccctgatgagctcacagccctccttcag

SEQ ID NO: 9060 - DNA, 721 bp, Homo sapiens
ataaatgaaatattaggattttttaaacccatagacaaacactaaaacagtcactgtttgaatgcaaaaaaagtgggagtctaaagcagctaaccccaaaacagccttaccaagcccaaggccaggccaggcagtctgaacactacaaggtcacgtgatggtcacagaggatgacagctcccatgagtattctcaggcactgtgttagcttctcactcacagagtctcagaatgcctcctcaccaataccctgtgagggaaggccccacctcactacagcacgagaggttcctgagctcttcccagaaaatggttatcaaagggtggagctgggggaagcccagacagaacaagtgagtccccagggtctccttaacctccctcagctcctccacatggggccctgagggaaagtgagcggcctcctaacccctttgatagggttccagtactgcaggtctggacctcctcattttctggaaccacaggaggcgacaatgcaaacccaggccccttatttgccgtccctcaatgccaggccaggcccagagccctgtgctgacacagcccaggggatgctcgaggcccacctcagcacagtcaccaatagcgtagtgagatgagcaaggaggtgcaagtaggcacaaatccccatggacwtggcctcaggcatgttccacaggctcagggtctccctgatgagctcacagccctccttcag

SEQ ID NO: 9061 - DNA, 814 bp, Homo sapiens
ggaaggttatgaatccagcctttctttgtgtttgcacaatcactgaagaatattcttcaagacccctatgactttatcactgcccaactctgccctttatcactgccctaataaaaagagaatatgaaaagaaaatagtgttgtaatgcttttttttgagtcattttctcaacacaaaaagagtttccccaagtttgaaaacaaggaacttaattctagcccgtttgggaaagagttgaggaaacgcatggagaaaagagayggattaaattaacactcggacaaaataacagaaagtcttaaagttccaaaattagtctgcagccttattttgaacatagctggtgtcaggcctgctttttccatccttttagactcacttgtatagagctgcacaattgtggaggaggctggctgtccttgagtgcaacggtccagcggatggagagatggtcttcagagattcagtctagcctactataaagggctcccacatctgtttcggaaagcctttataatttttttttaaggagtttggcccagcaaataagtgttcagaatctttgagaacgcctgtctttggggttcttggacaagtgtgacttctgtatatattcagtcatattttatatcagtttccatcagctgttgcttttttggattaaaagaaaaaaagacactgccaagagatttaaagaaaaattctaacctcgagggaaaccctactactctgaagtatgtccctaatgagatctttcctcaccaaatcctcattattttgttttgagagagagagctggaaatgtttccagta

SEQ ID NO: 9062 - DNA, 814 bp, Homo sapiens
ggaaggttatgaatccagcctttctttgtgtttgcacaatcactgaagaatattcttcaagacccctatgactttatcactgcccaactctgccctttatcactgccctaataaaaagagaatatgaaaagaaaatagtgttgtaatgcttttttttgagtcattttctcaacacaaaaagagtttccccaagtttgaaaacaaggaacttaattctagcccgtttgggaaagagttgaggaaacgcatggagaaaagagacggattaaattaacactcggacaaaataacagaaagtcttaaagttccaaaattagtctgcagccttattttgaacatagctggtgtcaggsctgctttttccatccttttagactcacttgtatagagctgcacaattgtggaggaggctggctgtccttgagtgcaacggtccagcggatggagagatggtcttcagagattcagtctagcctactataaagggctcccacatctgtttcggaaagcctttataatttttttttaaggagtttggcccagcaaataagtgttcagaatctttgagaacgcctgtctttggggttcttggacaagtgtgacttctgtatatattcagtcatattttatatcagtttccatcagctgttgcttttttggattaaaagaaaaaaagacactgccaagagatttaaagaaaaattctaacctcgagggaaaccctactactctgaagtatgtccctaatgagatctttcctcaccaaatcctcattattttgttttgagagagagagctggaaatgtttccagta

SEQ ID NO: 9063 - DNA, 814 bp, Homo sapiens
ggaaggttatgaatccagcctttctttgtgtttgcacaatcactgaagaatattcttcaagacccctatgactttatcactgcccaactctgccctttatcactgccctaataaaaagagaatatgaaaagaaaatagtgttgtaatgcttttttttgagtcattttctcaacacaaaaagagtttccccaagtttgaaaacaaggaacttaattctagcccgtttgggaaagagttgaggaaacgcatggagaaaagagacggattaaattaacactcggacaaaataacagaaagtcttaaagttccaaaattagtctgcagccttattttgaacatagctggtgtcaggcctgctttttccatccttttagactcacttgtatagagctgcacaattgtggaggaggctggctgtccttgagtgcaacggtccagcggatggagagatggtcttcagagattcagtctarcctactataaagggctcccacatctgtttcggaaagcctttataatttttttttaaggagtttggcccagcaaataagtgttcagaatctttgagaacgcctgtctttggggttcttggacaagtgtgacttctgtatatattcagtcatattttatatcagtttccatcagctgttgcttttttggattaaaagaaaaaaagacactgccaagagatttaaagaaaaattctaacctcgagggaaaccctactactctgaagtatgtccctaatgagatctttcctcaccaaatcctcattattttgttttgagagagagagctggaaatgtttccagta

SEQ ID NO: 9064 - DNA, 814 bp, Homo sapiens
ggaaggttatgaatccagcctttctttgtgtttgcacaatcactgaagaatattcttcaagacccctatgactttatcactgcccaactctgccctttatcactgccctaataaaaagagaatatgaaaagaaaatagtgttgtaatgcttttttttgagtcattttctcaacacaaaaagagtttccccaagtttgaaaacaaggaacttaattctagcccgtttgggaaagagttgaggaaacgcatggagaaaagagacggattaaattaacactcggacaaaataacagaaagtcttaaagttccaaaattagtctgcagccttattttgaacatagctggtgtcaggcctgctttttccatccttttagactcacttgtatagagctgcacaattgtggaggaggctggctgtccttgagtgcaacggtccagcggatggagagatggtcttcagagattcagtctagcctactataaagggctcccacatctgtttcggaaagcctttataatttttttttaaggagtttggcccagcaaataagtgttcagaatctttgagaacgcctgtctytggggttcttggacaagtgtgacttctgtatatattcagtcatattttatatcagtttccatcagctgttgcttttttggattaaaagaaaaaaagacactgccaagagatttaaagaaaaattctaacctcgagggaaaccctactactctgaagtatgtccctaatgagatctttcctcaccaaatcctcattattttgttttgagagagagagctggaaatgtttccagta

SEQ ID NO: 9065 - DNA, 649 bp, Homo sapiens
tgggaaaagtctggaatctctgtttgtgttgctatcaaatggagcagtgaagcaggagggacgattaatggcctcacttgataccaaagcccgtctcagcaccctccacatcacagctgccgtgcatgacctctctgccacctacttctgtgccgtggacacacagtgctcccctgacgccaccagtctgtacccaaacctgcagctggtgggcccactcctcctgcaggaactatgactgtgaggcttcgttcactgtctgtrcatttctttctgcaaggaaaattctgagatgggtgaaaaaagatgctgttttaccttcttaactgtggaatattttttaaaaggaaaatgtgttcaggctgagggaagattcctaaccatgtatttcctgagaatatgaggtctcattctttactgcctcacagtcagaatttgttagtcttccattatggaataattttacatgtagtgcaactgtcacaaataattcctatgaaatatggaatcattatttgttttatatgtgaatgtaacatatggcatttaccaatgaaagaaagaataaatgctttataaaagaatggtctatgtgaggttccttacctagtgtttcctgctaaaatattgactacagtagtcagataat

SEQ ID NO: 9066 - DNA, 649 bp, Homo sapiens
tgggaaaagtctggaatctctgtttgtgttgctatcaaatggagcagtgaagcaggagggacgattaatggcctcacttgataccaaagcccgtctcagcaccctccacatcacagctgccgtgcatgacctctctgccacctacttctgtgccgtggacacacagtgctcccctgacgccaccagtctgtacccaaacctgcagctggtgggcccactcctcctgcaggaactatgactgtgaggcttcgttcactgtctgtacatttctttctgcaaggaaaattctgagatgggtgaaaaaagatgctgttttaccttcttaactgtggaatattttttaaaaggaaaatgtgttcaggctgagggaagattcctaaccatgyatttcctgagaatatgaggtctcattctttactgcctcacagtcagaatttgttagtcttccattatggaataattttacatgtagtgcaactgtcacaaataattcctatgaaatatggaatcattatttgttttatatgtgaatgtaacatatggcatttaccaatgaaagaaagaataaatgctttataaaagaatggtctatgtgaggttccttacctagtgtttcctgctaaaatattgactacagtagtcagataat

SEQ ID NO: 9067 - DNA, 474 bp, Homo sapiens
aggatgaggggattttccggtgccaggcaatgaacaggaatggaaaggagaccaagtccaactaccgagtccgtgtctaccgtaagaattccagggtcttctccaaggcctccctcttacctaagaaaaagccttcaaccccagccttggcccatgagggcctctgacttccactggcctcatttccacayacagagtttgagaaccttcacaattacagcctctgactggatttttcctccttcagagattcctgggaagccagaaattgtagattctgcctctgaactcacggctggtgttcccaataaggtagtggaagaaagcaggagaagtagaaaacggccctgtgaacaggaggcgagtgtgtgtgggtgtgggtgtgtggcatctctcattttcaaaggattctgaggtcaccactctttccccaggtggggacatgtgtgtcagagggaagctaccctgcaggga

SEQ ID NO: 9068 - DNA, 789 bp, Homo sapiens
aatcagatcatgcctcccagcatcacctcattgcaagatccaatcagattatgcctcattaccctatgcttctaaaacctgacccagtgcccagctcaggaagacagattygaccatgtcctcctctctccttgccagtcaacttgcaggaaagcttttctctctctttctttctgtccactctgtgtccatgtgttctcatcatttagttcccacttataagagaatatgtggtatttgattttctgttcctgcattagtttgctaagaataattgactccagctccattcatgtccctgcaaaggacatgatctcattattttttatagctgcatgatattccatgtggtatatgtaccacattttctttatccagtctatcattgatgggcatttaggttgattccatgtttttgctattgtaaatccccaaaggaagcttttcttttccccaaagccattgccatggtattggcttcatgagcatccagccgtgagtgcattgattgttcagtaatacttctaaagtggtggtcctaatggccgccctgttctgtacatgaggaggaaagaaataaaaaatatcaacttatatctggcagggatggccaactgtcccctagtctctactctccccttcttaaataagagtggctctccatcagagacaattttgtctccaaggggacatttgacaaagtctggagatatttggttgtcacaacttgatggagggatgctgctggcatcttgtaggtgaaagtcagagatgctcctgaatatgctg

SEQ ID NO: 9069 - DNA, 789 bp, Homo sapiens
aatcagatcatgcctcccagcatcacctcattgcaagatccaatcagattatgcctcattaccctatgcttctaaaacctgacccagtgcccagctcaggaagacagatttgaccatgtcctcctctctccytgccagtcaacttgcaggaaagcttttctctctctttctttctgtccactctgtgtccatgtgttctcatcatttagttcccacttataagagaatatgtggtatttgattttctgttcctgcattagtttgctaagaataattgactccagctccattcatgtccctgcaaaggacatgatctcattattttttatagctgcatgatattccatgtggtatatgtaccacattttctttatccagtctatcattgatgggcatttaggttgattccatgtttttgctattgtaaatccccaaaggaagcttttcttttccccaaagccattgccatggtattggcttcatgagcatccagccgtgagtgcattgattgttcagtaatacttctaaagtggtggtcctaatggccgccctgttctgtacatgaggaggaaagaaataaaaaatatcaacttatatctggcagggatggccaactgtcccctagtctctactctccccttcttaaataagagtggctctccatcagagacaattttgtctccaaggggacatttgacaaagtctggagatatttggttgtcacaacttgatggagggatgctgctggcatcttgtaggtgaaagtcagagatgctcctgaatatgctg

SEQ ID NO: 9070 - DNA, 789 bp, Homo sapiens
aatcagatcatgcctcccagcatcacctcattgcaagatccaatcagattatgcctcattaccctatgcttctaaaacctgacccagtgcccagctcaggaagacagatttgaccatgtcctcctctctccttgccagtcaactwgcaggaaagcttttctctctctttctttctgtccactctgtgtccatgtgttctcatcatttagttcccacttataagagaatatgtggtatttgattttctgttcctgcattagtttgctaagaataattgactccagctccattcatgtccctgcaaaggacatgatctcattattttttatagctgcatgatattccatgtggtatatgtaccacattttctttatccagtctatcattgatgggcatttaggttgattccatgtttttgctattgtaaatccccaaaggaagcttttcttttccccaaagccattgccatggtattggcttcatgagcatccagccgtgagtgcattgattgttcagtaatacttctaaagtggtggtcctaatggccgccctgttctgtacatgaggaggaaagaaataaaaaatatcaacttatatctggcagggatggccaactgtcccctagtctctactctccccttcttaaataagagtggctctccatcagagacaattttgtctccaaggggacatttgacaaagtctggagatatttggttgtcacaacttgatggagggatgctgctggcatcttgtaggtgaaagtcagagatgctcctgaatatgctg

SEQ ID NO: 9071 - DNA, 789 bp, Homo sapiens
aatcagatcatgcctcccagcatcacctcattgcaagatccaatcagattatgcctcattaccctatgcttctaaaacctgacccagtgcccagctcaggaagacagatttgaccatgtcctcctctctccttgccagtcaacttgcargaaagcttttctctctctttctttctgtccactctgtgtccatgtgttctcatcatttagttcccacttataagagaatatgtggtatttgattttctgttcctgcattagtttgctaagaataattgactccagctccattcatgtccctgcaaaggacatgatctcattattttttatagctgcatgatattccatgtggtatatgtaccacattttctttatccagtctatcattgatgggcatttaggttgattccatgtttttgctattgtaaatccccaaaggaagcttttcttttccccaaagccattgccatggtattggcttcatgagcatccagccgtgagtgcattgattgttcagtaatacttctaaagtggtggtcctaatggccgccctgttctgtacatgaggaggaaagaaataaaaaatatcaacttatatctggcagggatggccaactgtcccctagtctctactctccccttcttaaataagagtggctctccatcagagacaattttgtctccaaggggacatttgacaaagtctggagatatttggttgtcacaacttgatggagggatgctgctggcatcttgtaggtgaaagtcagagatgctcctgaatatgctg

SEQ ID NO: 9072 - DNA, 789 bp, Homo sapiens
aatcagatcatgcctcccagcatcacctcattgcaagatccaatcagattatgcctcattaccctatgcttctaaaacctgacccagtgcccagctcaggaagacagatttgaccatgtcctcctctctccttgccagtcaacttgcaggaaagcttttctctctctttctttctgtccactctgtgtccatgtgttctcatcatttagttcccacttataagagaatatgtggtatttgattttctgttcctgcattagtttgctaagaataattgactccagctccattcatgtccctgcaaaggacatgatctcattattttttatagctgcatgatattccatgtggtatatgtaccacattttctttatccagtctatcattgatgggcatttaggttgattccatgtttttgctattgtaaatccccaaaggaagcttttcttttccccaaagccattgccatggtattggcttcatgagcatccagccgtgagtgcattgattgttcagtaatacttctaaagtggtggtcctaatgrccgccctgttctgtacatgaggaggaaagaaataaaaaatatcaacttatatctggcagggatggccaactgtcccctagtctctactctccccttcttaaataagagtggctctccatcagagacaattttgtctccaaggggacatttgacaaagtctggagatatttggttgtcacaacttgatggagggatgctgctggcatcttgtaggtgaaagtcagagatgctcctgaatatgctg

SEQ ID NO: 9073 - DNA, 807 bp, Homo sapiens
aaacaaactcttatctcgctaaatccattattatcatgagtcttgtttttagtggtcaaaacctgtgctaagacaacgtaaggatgtctccctctttcacctgcattcgagaacttgcagtctcataaaaataccctctggaaaagctttgttttggcagcagaccttgaaggataagaaagcactaactgcaatgtcgtcacaacgccagggcatttattctattcgtacttgcccacaaatcagtttyatttgagtgtgttagttcatcagattcccagattttgactcagccccattagtctttgcttacagggcctcaagtggtctctttatgcacaacgacaatctcctgaatacacaacaggtgcacacttctggaattttaatctgttatcctgaggagaatggaatgaagggggtaagtgcccagcttcacttgaagggcttgcagccatagctgagcatgccccggttcctttgttctctcaccaagtggcaactggaggctgtcgttgatcactcagatgccattatgatctccactgagtcatccacactgtttcttgcagtctggagaaatgcggcactctccaggtttggggcagagctgagtactttcagaggtgcagtggaagcaacgctgacctagatattaagacatcaggtttcttactccaaaatctgcctttaattagctgtaggattctttttgtttgcaagtgacaatatttcaattggatttagcaaaagagaaataatttattggctcacgtaactgacaacgtccaaaatcaaggtacggtt

SEQ ID NO: 9074 - DNA, 807 bp, Homo sapiens
aaacaaactcttatctcgctaaatccattattatcatgagtcttgtttttagtggtcaaaacctgtgctaagacaacgtaaggatgtctccctctttcacctgcattcgagaacttgcagtctcataaaaataccctctggaaaagctttgttttggcagcagaccttgaaggataagaaagcactaactgcaatgtcgtcacaacgccagggcatttattctattcgtacttgcccacaaatcagtttcatttgagtgtgttagttcatcagattcccagattttgactcagccccattagtctttgcttacagggcctcaagtggtctctttatgcacaacgacaatctcctgaatacacaacaggtgcacacttctggaattttaatctgttatcctgaggagaatggaatgaagggggtaagtgcccagcttcacttgaagggcttgcagccatagctgagcatgccccggttcctttgttctctcaccaagtggcaactggargctgtcgttgatcactcagatgccattatgatctccactgagtcatccacactgtttcttgcagtctggagaaatgcggcactctccaggtttggggcagagctgagtactttcagaggtgcagtggaagcaacgctgacctagatattaagacatcaggtttcttactccaaaatctgcctttaattagctgtaggattctttttgtttgcaagtgacaatatttcaattggatttagcaaaagagaaataatttattggctcacgtaactgacaacgtccaaaatcaaggtacggtt

SEQ ID NO: 9075 - DNA, 850 bp, Homo sapiens
tttttttttttttggagtttcgctcttgttgcccaggctggaatgcaatggtgtaatctcgactcactgcaacctccacctcccaggttcaagtgattctcctgcctcagcctcctgactagctgggattacaggtgcccatcaccactcccggctaattttttgtgtttttagtagagaagggrtttcactatgttggctgggctggtctcaaactcctgacctcaggtgatccacctgccttggcctcccaaagttctgggattacaggcgtgagccaccatgcccagccaatttccttccttaataggtagtctgatcacttcacctgatgactctggaataagagtcctttctactgataagtccacaccatgtggaaaaattacggcagccttttgttccctcctatgcccagtaaaatttttttttgactaatgtctcattgaaagatgggttaaaagatgagaaggatttcctcttagatgcaagctcttctcggtcattggcaggttcctaaggagttagattgagaaggtttctgcaaaagcttgtaggttctgcaggaaacagaacaaggattaattattgatgtctgtctccgagtagaattaggaagtgatgacacacatgataccaccttgcattctccatggcatttcaacagaatgtatcctttccctttcaggagttttcaagcctgtctcagcttgtgagaagtcaagtccagttttgccttggcaacaatcctaaccttctgtatctggccagatggagttggatgaaatatatttgttggctctgaaatgggaggcagatagtggaatccataatagatgctgttgtgtgg

SEQ ID NO: 9076 - DNA, 737 bp, Homo sapiens
aaggggccgccttgtcagttgtgaccacccagccctggaaatgtcagtaatgctgtaaggagtggggatcggatcagatgccatccagatgctgaagtttgaccttgtgtcatttttcactttcttttttggctcttctgcaatcaattcatttatttagcaaaaaagaaattatgtgtgccgagagcatgcagaagatatgtctccgttctctgcttccctccaaaaaagaatcccaaaactgctttctgtgaacgtgtgccagggtcccagcaggactcagggagagcaggaagcccagcccagaccccttgcacaacctaccgtggggaggccttaggctctggctactacagagctggttccagtctgcactgccacagcctggccagggacttggacacatctgctggccacttcctgtctcagtttccttatctgcaaaataagggaaaagcccccacaaaggtgcacgtgtagcaggagctcttttccctccctattttaggaaggcagttggtgggaagtccagcttgggtccctgagagctgtgagaaggagatgcggctgctgctggccctgttggggrtcctgctgagtgtgcctgggcctccagtcttgtccctggaggcctctgaggaagtggagcttggtatggcttctgaggtgggagagggtggcaggggtgggaagagtgggcaccaggagggggctgctgggctgagcaaagctggaaa

SEQ ID NO: 9077 - DNA, 550 bp, Homo sapiens
atccagctgtgctaggggtgagatttatctgtctctcctggccatagccaggaaatccccatttttcttaagctagcttgagttgggcttttctaacacacagctaaagaatctcttgataaaccttgggactctccatgaggccttatatggcagcaggtctgtggcttgcaatcccttcaagtaatctgccaaaaacaatgttatgacgaaggtccttccaacacaaaaggtgtagagccctagcaaactcctacagaagaaaaaggagaaataattcgtttgtagtcccagctacttgggaggccaaggtgggaggatcacttgaagtcaggagttcgagaccagcctaggcaacatagccagaccccatctctacagaaataaaaaaaattgccattgtggtaatgcacggcttgtagtcccagrtactcgagaggctgaggcaggaggatcgcttgagcccaggaggatcgcttgagcccaggagttccacgttgcagtgagctatgattgtgccactgtactccagcctgggtgccagagccag

SEQ ID NO: 9078 - DNA, 550 bp, Homo sapiens
atccagctgtgctaggggtgagatttatctgtctctcctggccatagccaggaaatccccatttttcttaagctagcttgagttgggcttttctaacacacagctaaagaatctcttgataaaccttgggactctccatgaggccttatatggcagcaggtctgtggcttgcaatcccttcaagtaatctgccaaaaacaatgttatgacgaaggtccttccaacacaaaaggtgtagagccctagcaaactcctacagaagaaaaaggagaaataattcgtttgtagtcccagctacttgggaggccaaggtgggaggatcacttgaagtcaggagttcgagaccagcctaggcaacatagccagaccccatctctacagaaataaaaaaaattgccattgtggtaatgcacggcttgtagtcccagatactcgagaggctgaggcaggaggatcgcttgagcccaggaggatcgcttgagcccaggagttccacgttgcagtgagctatgattgtgccactgtactccagcctgggtgmcagagccag

SEQ ID NO: 9079 - DNA, 789 bp, Homo sapiens
agggtgcttgtccaagtcccggcactaccccgatagtgtagaaggggagccaagggaaggtcaggcagagaaggtccatccccaggtccgagtgctctctgcagcaggcatggcctcggtggtcacacgacccttcccgagtgccccccctgcatctccgcccacgtctgtctccgtttctgccatggtctcccgctcacccttgcctctgctcatggtctgttcttgggtcagtcaggtgccaagcagccagcacttccccaccacttttggtccacggatgcccttggccatctgggaagcctgtggaccccatctcaggagaatttttgcaaacgcataaaatgagacccataggattacaaaggcagcaaattatactgaaatacagttatcaaagtattaaacattcatcagtaacatagtctttagttaaaagcatttactggccaggctcatacctgtaatcccagcactttgggaggctgaggtgggaggactgcttgcctccaagagtttgagaccagcctgggcaacatagtgagacctcttctctacaacaaataaaaacagctgggcgtggtggcacaccagtagtcccagctactcaggaggctcaggcgggaggatcgcttgagctctggaggtcaaggctgcagtgagctatgatggcaccactgcactcagcctgggcaacagagtgagattctgtctcaaaaagtaaataaaaataaaagcatgtgttaaacgtattagtgacaccactcagtattaaggtattaartaaca

SEQ ID NO: 9080 - DNA, 2189 bp, Homo sapiens
tttggttcaaattaatggttttatttccatctktaacactagcagaggagtccaaagcagactgatatccatggatatagtttaaatgtaacaaagaaagagttgaactatgtacattgaaaaaaggaaagacattttttcataccaacctttccctagttcgcagtttctgaatagtagaaacaaaacacatttttaaatctttctatcaatttaatttaggacgaagtaacacaacttttataattaaccactgaagttgtctttaaggacaaaacttaaattttaaaatgggtgttaccatattttatgagtggactgactccaaggttgccttgctccaagtctgggcatcgtgacactgccgtgatgcccagaagaaagttaatggcaatgatgtccagtcagagggcagacatgctacacatcacaatgatgagagctgcggattctgccctcttcaactccaagtagaaaattattattttcattcaaactaactggaagtgagccaaacagttaaaaagtcagaatgaagaataaaacaattttcttttcacatagaggagggacactccttcagccccgtctaaagtgaattctgtgctgagtccctgctccttcagaagggtaaactgaaggtcagttattgctaacaaagccagaagtggcccctttcccgccctgaagatgtttcacacgaaaaggccgtttgtttggcgtgaggccctctgaggaaggacgacagtggaagaggaggcatgccggcactgtaaggcctctctcgttagccacccccaggccctgtgctgtcaggggcagcttgggccactttgctgcccctgagagaacctgaggctcccgcgtacctgtggagcgaaggagaggttgtcatctgggcccctgtttcaccagtcaaaacctatggagcagtcagaagcccgaagcatccaagcccagtggccaggaagcttctgaaataaacggcactgggttgggaaggatgagaaagccaagacaggtgggccaggttctccgaacatggggcaacagtgacctgggcaaaagcctggaactgagcggctgataaggccacaattactgccaccacctctcagtatctacacgggggcagacgttaggcagtgggaactgaggactggagggcgtgtggcaaacacgggatggattttatcagaaaagagaggacacccaaacacgtgcctgccctatttatcttgcatgtcctgtgccaggtgaaggacgctggagcatgggtaaggttcctgagaacaactggtgggcagaaacgggctgggatgggcactgctccacaggcaacattaagcctctgagggggacactaatagtgctacatcttgtgggctgctgaaaagtaggtaacgaatggcctttattgcactttttcgttcttaggaaacaggggagtgccctgcagagtttctcttgatttgcagaaatcactgcagatcaatgataaggtgcaggcagaatcacgggtgacctctgactctcaagggaagaagtccagtgattggtctttccagggcctcaaggggccactcttcaacctgggatcctcgagctgggtgaaccgggtctggcttggtcaatgtgtggcaggcagattggtcgaccggcagacacttgggacaaaaggtggtgtgcccgggaaagctggggcaaactttccaaacagggaaaatttcttggcaaatgtgcagattctgcaaccagactggaaccacgattcccaatgcgcctgactccctttctcccactctagaactggaccaccccagaggaacagagatggcctgggagggccctgggtccagcgccatagcatcaaactggagataacaaaaggaaggggttggaaacaaaagagcagtttacatatcagatgttggtttcgaaacagtctttttgatctcaggaaaatggaggcagataccactggagaacctggctgtctgtctgtccatccgtctctcctggggggctctgaatacttcatatataaatggggtggtaccgtttgtggttgatctttttcctacaagttgggcaagtattagcattcttcagggaatcacggaggcactggctacagaagacatggccgcattctgtggaaacgatgagacgtccattctgcacgatct

SEQ ID NO: 9081 - DNA, 2189 bp, Homo sapiens
tttggttcaaattaatggttttatttccatctgtaacactagcagaggagtccaaagcagactgatatccatggatatagtttaaatgtaacaaagaaagagttgaactatgtacattgaaaaaaggaaagacattttttcataccaacctttccctagttygcagtttctgaatagtagaaacaaaacacatttttaaatctttctatcaatttaatttaggacgaagtaacacaacttttataattaaccactgaagttgtctttaaggacaaaacttaaattttaaaatgggtgttaccatattttatgagtggactgactccaaggttgccttgctccaagtctgggcatcgtgacactgccgtgatgcccagaagaaagttaatggcaatgatgtccagtcagagggcagacatgctacacatcacaatgatgagagctgcggattctgccctcttcaactccaagtagaaaattattattttcattcaaactaactggaagtgagccaaacagttaaaaagtcagaatgaagaataaaacaattttcttttcacatagaggagggacactccttcagccccgtctaaagtgaattctgtgctgagtccctgctccttcagaagggtaaactgaaggtcagttattgctaacaaagccagaagtggcccctttcccgccctgaagatgtttcacacgaaaaggccgtttgtttggcgtgaggccctctgaggaaggacgacagtggaagaggaggcatgccggcactgtaaggcctctctcgttagccacccccaggccctgtgctgtcaggggcagcttgggccactttgctgcccctgagagaacctgaggctcccgcgtacctgtggagcgaaggagaggttgtcatctgggcccctgtttcaccagtcaaaacctatggagcagtcagaagcccgaagcatccaagcccagtggccaggaagcttctgaaataaacggcactgggttgggaaggatgagaaagccaagacaggtgggccaggttctccgaacatggggcaacagtgacctgggcaaaagcctggaactgagcggctgataaggccacaattactgccaccacctctcagtatctacacgggggcagacgttaggcagtgggaactgaggactggagggcgtgtggcaaacacgggatggattttatcagaaaagagaggacacccaaacacgtgcctgccctatttatcttgcatgtcctgtgccaggtgaaggacgctggagcatgggtaaggttcctgagaacaactggtgggcagaaacgggctgggatgggcactgctccacaggcaacattaagcctctgagggggacactaatagtgctacatcttgtgggctgctgaaaagtaggtaacgaatggcctttattgcactttttcgttcttaggaaacaggggagtgccctgcagagtttctcttgatttgcagaaatcactgcagatcaatgataaggtgcaggcagaatcacgggtgacctctgactctcaagggaagaagtccagtgattggtctttccagggcctcaaggggccactcttcaacctgggatcctcgagctgggtgaaccgggtctggcttggtcaatgtgtggcaggcagattggtcgaccggcagacacttgggacaaaaggtggtgtgcccgggaaagctggggcaaactttccaaacagggaaaatttcttggcaaatgtgcagattctgcaaccagactggaaccacgattcccaatgcgcctgactccctttctcccactctagaactggaccaccccagaggaacagagatggcctgggagggccctgggtccagcgccatagcatcaaactggagataacaaaaggaaggggttggaaacaaaagagcagtttacatatcagatgttggtttcgaaacagtctttttgatctcaggaaaatggaggcagataccactggagaacctggctgtctgtctgtccatccgtctctcctggggggctctgaatacttcatatataaatggggtggtaccgtttgtggttgatctttttcctacaagttgggcaagtattagcattcttcagggaatcacggaggcactggctacagaagacatggccgcattctgtggaaacgatgagacgtccattctgcacgatct

SEQ ID NO: 9082 - DNA, 844 bp, Homo sapiens
gatcccttcatacttctgccctatgatcygcacatcctctcttctgtatccacagaactgaccctcctccatcccctagcaggtgcctcagggaccccacaacatcataaggacccattaggcattagatgccgagtccatggttcttttgcctgttttctcactgggctggagtctccaggcttgcccagctgctgcccctcctctgccaccccaggcccccagccagtctttgggagggtagagtgggctgtggacaagccctccaggctcagtgttcctcatggggcagattctttcacttacaaccttcgtaaaggcagctgcaggctttcctcctgtaactgatctccaggcaattataagagtaaaaagtgtggttttaccttattaggttacttctattttcagcatgtacccaaaaatgcaccacggcactgtcaggcgtgggttgtccctgacaaggagcctgtggggaccatgaaccttggcagaatctgcccccaccccctgacgcccacaggcacgcccggtaagctgagaaggccgccttcccttcctgcctccctcctgcctcctttctgttgctcacctgagtggcttccctgggattctgcagccctggctggtccctgagtcttgctgggtttcctgcagcccctcaggggccagcgttgcatgcggcggggcctgggagtcagctatctaggtctgctctatccaacttagtagcccttgaccaggtgggactggttaccttcagattaacagcaactaaacaaagttaacaattcagttctcccagtcaaagtttaggatgatggctcctttactgggcagtgtg

SEQ ID NO: 9083 - DNA, 844 bp, Homo sapiens
gatcccttcatacttctgccctatgatccgcacatcctctcttctgtatccacagaactgaccctmctccatcccctagcaggtgcctcagggaccccacaacatcataaggacccattaggcattagatgccgagtccatggttcttttgcctgttttctcactgggctggagtctccaggcttgcccagctgctgcccctcctctgccaccccaggcccccagccagtctttgggagggtagagtgggctgtggacaagccctccaggctcagtgttcctcatggggcagattctttcacttacaaccttcgtaaaggcagctgcaggctttcctcctgtaactgatctccaggcaattataagagtaaaaagtgtggttttaccttattaggttacttctattttcagcatgtacccaaaaatgcaccacggcactgtcaggcgtgggttgtccctgacaaggagcctgtggggaccatgaaccttggcagaatctgcccccaccccctgacgcccacaggcacgcccggtaagctgagaaggccgccttcccttcctgcctccctcctgcctcctttctgttgctcacctgagtggcttccctgggattctgcagccctggctggtccctgagtcttgctgggtttcctgcagcccctcaggggccagcgttgcatgcggcggggcctgggagtcagctatctaggtctgctctatccaacttagtagcccttgaccaggtgggactggttaccttcagattaacagcaactaaacaaagttaacaattcagttctcccagtcaaagtttaggatgatggctcctttactgggcagtgtg

SEQ ID NO: 9084 - DNA, 844 bp, Homo sapiens
gatcccttcatacttctgccctatgatccgcacatcctctcttctgtatccacagaactgaccctcctccatcccctagcaggtgcctcagggaccccacaacatcataaggacccattaggcattasatgccgagtccatggttcttttgcctgttttctcactgggctggagtctccaggcttgcccagctgctgcccctcctctgccaccccaggcccccagccagtctttgggagggtagagtgggctgtggacaagccctccaggctcagtgttcctcatggggcagattctttcacttacaaccttcgtaaaggcagctgcaggctttcctcctgtaactgatctccaggcaattataagagtaaaaagtgtggttttaccttattaggttacttctattttcagcatgtacccaaaaatgcaccacggcactgtcaggcgtgggttgtccctgacaaggagcctgtggggaccatgaaccttggcagaatctgcccccaccccctgacgcccacaggcacgcccggtaagctgagaaggccgccttcccttcctgcctccctcctgcctcctttctgttgctcacctgagtggcttccctgggattctgcagccctggctggtccctgagtcttgctgggtttcctgcagcccctcaggggccagcgttgcatgcggcggggcctgggagtcagctatctaggtctgctctatccaacttagtagcccttgaccaggtgggactggttaccttcagattaacagcaactaaacaaagttaacaattcagttctcccagtcaaagtttaggatgatggctcctttactgggcagtgtg

SEQ ID NO: 9085 - DNA, 844 bp, Homo sapiens
gatcccttcatacttctgccctatgatccgcacatcctctcttctgtatccacagaactgaccctcctccatcccctagcaggtgcctcagggaccccacaacatcataaggacccattaggcattagatgccgagtccatggttcttttgcctgttttctcactgggctggagtctccaggcttgcccagctgctgcccctcctctgccaccccaggcccccagccagtctttgggagggtagagtgggctgtggacaagccctccaggctcagtgttcctcatggggcagattctttcacttacaaccttcgtaaaggcagctgcaggctttcctcctgtaactgatctccaggcaattataagagtaaaaagtgtggttttaccttattaggttacttctattttcagcatgtacccaaaaatgcaccacggcactgtcaggcgtgggttgtccctgacaaggagcctgtggggaccatgaaccttggcagaatctgcccccaccccctgacgcccacakgcacgcccggtaagctgagaaggccgccttcccttcctgcctccctcctgcctcctttctgttgctcacctgagtggcttccctgggattctgcagccctggctggtccctgagtcttgctgggtttcctgcagcccctcaggggccagcgttgcatgcggcggggcctgggagtcagctatctaggtctgctctatccaacttagtagcccttgaccaggtgggactggttaccttcagattaacagcaactaaacaaagttaacaattcagttctcccagtcaaagtttaggatgatggctcctttactgggcagtgtg

SEQ ID NO: 9086 - DNA, 801 bp, Homo sapiens
gagaccatgaraacgtttgaaggtttctcaagcgtctgtgactgccccacgtctgtcgttgggtggaaaggactttgtaattgaacggagtcagttgtaatgtgaatgtcatgtggagctgcttttccttggcaagtccttgctgtgtgagccattgtttccagatctgtagaaccctccctaccctgtccccctttccgggctattgggaggctgagcgagctcatcatgaggcccctgaaagatagtttctgtgccctgtggagctgagtccccgagtctctgtccccacctcacaggccccctctcaccaccctattgggttggtaaatttcaagttgggcatcagataggacaagggaaggggactggagaaggaagagccgacagtttgccctcaggacttcagagtcactcttttttgtttggttggttttttgagatggagtcttgccctgttgcccaggctggagtgcagtggcgtgatctcatctcaccgcaacctccatctcccgggttcaagcgattctcctgccttagcctcccgagtagctgggattacaagtgcatgccatcatgcctagctaatttttgtatttttaatggagacgggggcttcaccatgttggccagacttgtctcgaactcctgacctcaagtcatccacccaccttggcctcccaaagttgctgggattacaggtgtgaaccatcgcgcctggcccagagtcaccctttctttttgtgccttattagacatcttcctgctacaggatagcccagaagaaaggaacaagtttcc

SEQ ID NO: 9087 - DNA, 801 bp, Homo sapiens
gagaccatgaaaacgtttgaaggtttctcaagcgtctgtgactgccccacgtctgtcgttgggtggaaaggactttgtaattgaacggagtcagttgtaatgtgaatgtcatgtggagctgcttttccttggcaagtccttgctgtgtgagccattgtttccagatctgtagaaccctccctaccctgtccccctttccgggctattgggaggctgagcgagctcatcatgaggcccctgaaagatagtttctgtgccctgtggagctgagtccccgagtctctgtccccacctcacaggccccctctcaccaccctwttgggttggtaaatttcaagttgggcatcagataggacaagggaaggggactggagaaggaagagccgacagtttgccctcaggacttcagagtcactcttttttgtttggttggttttttgagatggagtcttgccctgttgcccaggctggagtgcagtggcgtgatctcatctcaccgcaacctccatctcccgggttcaagcgattctcctgccttagcctcccgagtagctgggattacaagtgcatgccatcatgcctagctaatttttgtatttttaatggagacgggggcttcaccatgttggccagacttgtctcgaactcctgacctcaagtcatccacccaccttggcctcccaaagttgctgggattacaggtgtgaaccatcgcgcctggcccagagtcaccctttctttttgtgccttattagacatcttcctgctacaggatagcccagaagaaaggaacaagtttcc

SEQ ID NO: 9088 - DNA, 810 bp, Homo sapiens
caggagttccagaccagccgagcaacaaagtaagacccggtttctagcaaaaatacaataattaggtgggcgtggtggtgcgtgcatgtagtttcagctacttgggaggctgaagcaggaggatcacctgagcctgaaaggccaacgctgcagtgagctgtgattgtgccactccactccagcctgggcgacagtgagaccccgtctcaataaaggaaaaaaacaaaagaatcacacatttgccacccttctcatggtccgcagcagaagtcagaggccataaggkaacgagtcccacccacggggagatggggaccatgtccaggaaccggaaatccagccccagagccccacatcagcacaaaaggcagcattcacagataagcaagtttcagagcagggaccacctgctcacctcatcggaagaaaatgctgaagaaagggcaagaagcactgtctcctccccacagaggcacagaatccagttcatttctcgcctgtctttcccgaagcacacacaaagtcacgtgcatatataaagccaggtgcccccttttcacaaatgaaaaacaacagtgacatattacatacaatatgctgtgctttgctctttttacttaacattcaacacaaagacatttatatagcagtgtatgaaaagctttctagctatgttctacagctgtgtggagttcagtagcttgaaagcaccataatttatataatcagtcccctattggtggacatttgggttgtttctagtaattaacttttactaatcatgctgcagtgaacatccttttttctatg

SEQ ID NO: 9089 - DNA, 810 bp, Homo sapiens
caggagttccagaccagccgagcaacaaagtaagacccggtttctagcaaaaatacaataattaggtgggcgtggtggtgcgtgcatgtagtttcagctacttgggaggctgaagcaggaggatcacctgagcctgaaaggccaacgctgcagtgagctgtgattgtgccactccactccagcctgggcgacagtgagaccccgtctcaataaaggaaaaaaacaaaagaatcacacatttgccacccttctcatggtccgcagcagaagtcagaggccataaggtaacgagtcccacccrcggggagatggggaccatgtccaggaaccggaaatccagccccagagccccacatcagcacaaaaggcagcattcacagataagcaagtttcagagcagggaccacctgctcacctcatcggaagaaaatgctgaagaaagggcaagaagcactgtctcctccccacagaggcacagaatccagttcatttctcgcctgtctttcccgaagcacacacaaagtcacgtgcatatataaagccaggtgcccccttttcacaaatgaaaaacaacagtgacatattacatacaatatgctgtgctttgctctttttacttaacattcaacacaaagacatttatatagcagtgtatgaaaagctttctagctatgttctacagctgtgtggagttcagtagcttgaaagcaccataatttatataatcagtcccctattggtggacatttgggttgtttctagtaattaacttttactaatcatgctgcagtgaacatccttttttctatg

SEQ ID NO: 9090 - DNA, 810 bp, Homo sapiens
caggagttccagaccagccgagcaacaaagtaagacccggtttctagcaaaaatacaataattaggtgggcgtggtggtgcgtgcatgtagtttcagctacttgggaggctgaagcaggaggatcacctgagcctgaaaggccaacgctgcagtgagctgtgattgtgccactccactccagcctgggcgacagtgagaccccgtctcaataaaggaaaaaaacaaaagaatcacacatttgccacccttctcatggtccgcagcagaagtcagaggccataaggtaacgagtcccacccacggggagayggggaccatgtccaggaaccggaaatccagccccagagccccacatcagcacaaaaggcagcattcacagataagcaagtttcagagcagggaccacctgctcacctcatcggaagaaaatgctgaagaaagggcaagaagcactgtctcctccccacagaggcacagaatccagttcatttctcgcctgtctttcccgaagcacacacaaagtcacgtgcatatataaagccaggtgcccccttttcacaaatgaaaaacaacagtgacatattacatacaatatgctgtgctttgctctttttacttaacattcaacacaaagacatttatatagcagtgtatgaaaagctttctagctatgttctacagctgtgtggagttcagtagcttgaaagcaccataatttatataatcagtcccctattggtggacatttgggttgtttctagtaattaacttttactaatcatgctgcagtgaacatccttttttctatg

SEQ ID NO: 9091 - DNA, 834 bp, Homo sapiens
atcccagaatcttaggagtctcagggcagtgttttgggggctaccttcctaaggtgggtggggcgatgggacagtctcagaacagcctcaacccagaacagccacatttttagctgttytatatattgggtttctacttaagatttctttcgaacaaagcctcccttactgaaaactcactgccccagagggtctctgtaaaccttctagtagtgacactgtagcttcaagccaaattgtttttcaatcaatacccctgcagtgtagggcatagaaataaaatggtaaataaaccagggtcactgctcctcggaggctggctgtcactgtgaggataaactgagataataggtgggaaagcctgtttagggaaacgattgttgttaagatgataacaattattattacgttggggtagggtattcaagatatacccacaggaaaatgcagattacaattcagtctgcaattagggaccagatagcagccaactctcaggtgatccatgcagggattctgagcattcgtcggcgcctccccaggggctgctgcgccccctgcttcccgcgcgcccaccacgcacgctgctctgggagcagggccggcggcgccgccgcctcgcagcgattggttgaaccggaggttgttgctaggctaccagtgcgccctgagcctggggccccgcagtcccatcctctgtggcagatccatccctcactgcagacctaattccggtaccctgtgaacggcatcctcagcagcttaaattatcagccccaactgcccgcctttctatgatttttcatttcgcaagaggccatgtggagttgggga

SEQ ID NO: 9092 - DNA, 834 bp, Homo sapiens
atcccagaatcttaggagtctcagggcagtgttttgggggctaccttcctaaggtgggtggggcgatgggacagtctcagaacagcctcaacccagaacagccacatttttagctgttttatatattgggtttctacttaagatttctttcgaacaaagcctcccttactgaaaactcactgccccagagggtctctgtaaaccttctagtagtgacactgtagcttcaagccaaattgtttttcaatcaatacccctgcagtgtagggcatagaaataaaatggtaaataaaccagggtcactgctcctcggaggctggctgtcactgtgaggataaactgagataataggtgggaaagcctgtttagggaaacgattgttgttaagatgataacaattattattacgytggggtagggtattcaagatatacccacaggaaaatgcagattacaattcagtctgcaattagggaccagatagcagccaactctcaggtgatccatgcagggattctgagcattcgtcggcgcctccccaggggctgctgcgccccctgcttcccgcgcgcccaccacgcacgctgctctgggagcagggccggcggcgccgccgcctcgcagcgattggttgaaccggaggttgttgctaggctaccagtgcgccctgagcctggggccccgcagtcccatcctctgtggcagatccatccctcactgcagacctaattccggtaccctgtgaacggcatcctcagcagcttaaattatcagccccaactgcccgcctttctatgatttttcatttcgcaagaggccatgtggagttgggga

SEQ ID NO: 9093 - DNA, 834 bp, Homo sapiens
atcccagaatcttaggagtctcagggcagtgttttgggggctaccttcctaaggtgggtggggcgatgggacagtctcagaacagcctcaacccagaacagccacatttttagctgttttatatattgggtttctacttaagatttctttcgaacaaagcctcccttactgaaaactcactgccccagagggtctctgtaaaccttctagtagtgacactgtagcttcaagccaaattgtttttcaatcaatacccctgcagtgtagggcatagaaataaaatggtaaataaaccagggtcactgctcctcggaggctggctgtcactgtgaggataaactgagataataggtgggaaagcctgtttagggaaacgattgttgttaagatgataacaattattattacgttggggtagggtattcaagatatacccacaggaaaatgcagattacaattcagtctgcamttagggaccagatagcagccaactctcaggtgatccatgcagggattctgagcattcgtcggcgcctccccaggggctgctgcgccccctgcttcccgcgcgcccaccacgcacgctgctctgggagcagggccggcggcgccgccgcctcgcagcgattggttgaaccggaggttgttgctaggctaccagtgcgccctgagcctggggccccgcagtcccatcctctgtggcagatccatccctcactgcagacctaattccggtaccctgtgaacggcatcctcagcagcttaaattatcagccccaactgcccgcctttctatgatttttcatttcgcaagaggccatgtggagttgggga

SEQ ID NO: 9094 - DNA, 834 bp, Homo sapiens
atcccagaatcttaggagtctcagggcagtgttttgggggctaccttcctaaggtgggtggggcgatgggacagtctcagaacagcctcaacccagaacagccacatttttagctgttttatatattgggtttctacttaagatttctttcgaacaaagcctcccttactgaaaactcactgccccagagggtctctgtaaaccttctagtagtgacactgtagcttcaagccaaattgtttttcaatcaatacccctgcagtgtagggcatagaaataaaatggtaaataaaccagggtcactgctcctcggaggctggctgtcactgtgaggataaactgagataataggtgggaaagcctgtttagggaaacgattgttgttaagatgataacaattattattacgttggggtagggtattcaagatatacccacaggaaaatgcagattacaattcagtctgcaattagggaccagatagcagccaactctcaggtgatccatgcagggattctgagcattcgtcggcgcctccccaggggctgctgcgccccctgcttyccgcgcgcccaccacgcacgctgctctgggagcagggccggcggcgccgccgcctcgcagcgattggttgaaccggaggttgttgctaggctaccagtgcgccctgagcctggggccccgcagtcccatcctctgtggcagatccatccctcactgcagacctaattccggtaccctgtgaacggcatcctcagcagcttaaattatcagccccaactgcccgcctttctatgatttttcatttcgcaagaggccatgtggagttgggga

SEQ ID NO: 9095 - DNA, 834 bp, Homo sapiens
atcccagaatcttaggagtctcagggcagtgttttgggggctaccttcctaaggtgggtggggcgatgggacagtctcagaacagcctcaacccagaacagccacatttttagctgttttatatattgggtttctacttaagatttctttcgaacaaagcctcccttactgaaaactcactgccccagagggtctctgtaaaccttctagtagtgacactgtagcttcaagccaaattgtttttcaatcaatacccctgcagtgtagggcatagaaataaaatggtaaataaaccagggtcactgctcctcggaggctggctgtcactgtgaggataaactgagataataggtgggaaagcctgtttagggaaacgattgttgttaagatgataacaattattattacgttggggtagggtattcaagatatacccacaggaaaatgcagattacaattcagtctgcaattagggaccagatagcagccaactctcaggtgatccatgcagggattctgagcattcgtcggcgcctccccaggggctgctgcgccccctgcttcccgcgcgcccaccacgcacgctgctctgggagcagggccggcggcgccgccgcctcgcagcgattggttgaaccggaggttgttgctaggctaccagtgcgccctgagcctggggccccgcagtcccatcctctgtggcagatccatccctcactgcagacctaattccggyaccctgtgaacggcatcctcagcagcttaaattatcagccccaactgcccgcctttctatgatttttcatttcgcaagaggccatgtggagttgggga

SEQ ID NO: 9096 - DNA, 587 bp, Homo sapiens
ctcacagcctgcagaggggatttgctttgctaaaggaktcaccacagagcacccgagagtaacaggttcatggcgtgtcaaggcaggttgaacactcacattccatttacatacagcttggcgcactctaagggtccaggcactagcaagaagcagatcccagaggaagtgggcattctccccatacctggctcaggctccctggtgggggcattggagggagctggggctctgccctgctggccaacgttcctactgcaggatagccctgatagggtataaggaaggacttccccattgcactcagctttggcttgcttgtggaggcagtgagttcctgaggtagcccccttctcaaagttggaaaaggctgtatacgaggggcggctcttacctgcaacctacttcctatttggccattggagtcccccttgaggttaaggaggcctgacagcctaggggacagggccatggctgagttgactgggttcagattgtggttcagcagtgtggtctcgggcaagttgcaccatttccacaggcctcagagtgctcatccgtgaagtgggcatgaactggcctgcgcc

SEQ ID NO: 9097 - DNA, 797 bp, Homo sapiens
aggcttggtaaagtgtggtgagaactgtggctttgagaagagggtaggggaaacctaggaaagcttcctggcagaggtgacttggccaggtagaggaaggacaagcccagagaacaaagctggccctgatgggttgagttctgtcttcgcttggcctctcctctgtacatggatgtcctcggggggcctgtgagcttccacagaggattttgctctgagggggaccttgagggggtctctgtcttcttcaaggcaggaggccatgttgaggactcatacagaggacagctatttgtggcttagcgaggatttgactcatgctggggggtggggaggatgtgcaggaggggagatggggatgtgtgaatcacagaatctgaccagaatggttggtgacacatggacagggtctgtcctgccacctctagtccagcttcagctcctggtgtggggcaggaacagaaggctgtagctcctgggttcctccctgacccayttggtgacctccacaggtgtcccaaccctactgtgctctctgaggtgaggcctgggcgtggctcccccatttcagcactggctgggcacacagggactgcagcagtgttcacctcctgagggctgatcatgctgagcctcagcttacccgtttgtgaaatgggcccgggcaggacttctgttcccatcgtgcctgactacctggggaatgtgctggggagaggaggtgtcgcagaccccaaaatgcccatagtctgtgtcagtggccggggtgggtggttccaggcttcctggagaaccct

SEQ ID NO: 9098 - DNA, 797 bp, Homo sapiens
aggcttggtaaagtgtggtgagaactgtggctttgagaagagggtaggggaaacctaggaaagcttcctggcagaggtgacttggccaggtagaggaaggacaagcccagagaacaaagctggccctgatgggttgagttctgtcttcgcttggcctctcctctgtacatggatgtcctcggggggcctgtgagcttccacagaggattttgctctgagggggaccttgagggggtctctgtcttcttcaaggcaggaggccatgttgaggactcatacagaggacagctatttgtggcttagcgaggatttgactcatgctggggggtggggaggatgtgcaggaggggagatggggatgtgtgaatcacagaatctgaccagaatggttggtgacacatggacagggtctgtcctgccacctctagtccagcttcagctcctggtgtggggcaggaacagaaggctgtagctcctgggttcctccctgacccatttggtgacctccacaggtgtcccaaccctactgtgctctctgaggtgaggcctgggcgtggctcccccatttcagcactggctgggcacacagggactgcagcagtgttcacctcctgagggctgatcatgctgagcctcagcttacccgtttgtgaaatgggcccgggmaggacttctgttcccatcgtgcctgactacctggggaatgtgctggggagaggaggtgtcgcagaccccaaaatgcccatagtctgtgtcagtggccggggtgggtggttccaggcttcctggagaaccct

SEQ ID NO: 9099 - DNA, 797 bp, Homo sapiens
aggcttggtaaagtgtggtgagaactgtggctttgagaagagggtaggggaaacctaggaaagcttcctggcagaggtgacttggccaggtagaggaaggacaagcccagagaacaaagctggccctgatgggttgagttctgtcttcgcttggcctctcctctgtacatggatgtcctcggggggcctgtgagcttccacagaggattttgctctgagggggaccttgagggggtctctgtcttcttcaaggcaggaggccatgttgaggactcatacagaggacagctatttgtggcttagcgaggatttgactcatgctggggggtggggaggatgtgcaggaggggagatggggatgtgtgaatcacagaatctgaccagaatggttggtgacacatggacagggtctgtcctgccacctctagtccagcttcagctcctggtgtggggcaggaacagaaggctgtagctcctgggttcctccctgacccatttggtgacctccacaggtgtcccaaccctactgtgctctctgaggtgaggcctgggcgtggctcccccatttcagcactggctgggcacacagggactgcagcagtgttcacctcctgagggctgatcatgctgagcctcagcttacccgtttgtgaaatgggcccgggcaggmcttctgttcccatcgtgcctgactacctggggaatgtgctggggagaggaggtgtcgcagaccccaaaatgcccatagtctgtgtcagtggccggggtgggtggttccaggcttcctggagaaccct

SEQ ID NO: 9100 - DNA, 849 bp, Homo sapiens
tgttacttaaactgggtgaacaaatagacctgatttaacataggaatacttaaaatgtttaaagtgttaataaaacttttatcattgtctgtagaacatgtttctctatcatgagcgttaaactttggctacctcctgaccactgttatttttattttgtggtttttgttctaaaccacaggtctcctggcattgtggggtgattaagtggtagaaagtaggaaagattaaggaattgaaggtgtttttgtatatagatttagattttgatgtttactgtagagcaacattaaacctaaagtccctggctcactgtggcacaagtagagtatacatgttggctgactttattattcagaatttagttaaattttagatattttagtaatatagattagagtamaaaggaaaataaccattctctaacatcctctcgacttaaactttttattaggttttcataagtttcctttttgatattaaagtaactgtagaatatctctgcataggccataatgccttaagctttaccaacccaaaagttgtttgtatctctgcatcttttaattaaatgaaacataaaatttaagggctttgggatttccaaagagcgctcagtacagccttccaaacctcagagtcctacgcctgacattgggttaactctgcctactttgaatgagcatttaaactgttaatagtttttcactttctagaactcagcaaaaagaaactacatagaataagcttcaaaagatttaaggcattgtggcctttgcataagattccaaaagaatgaaaatctgatgcccagtgtacatagagacgcatgacatgttaaagctgagg

SEQ ID NO: 9101 - DNA, 874 bp, Homo sapiens
cccatccagactgacaccaattcctgggacccataatgacccagagtgccactgtggtgttccagtcagagggggggttacagggaacaagtaatgaatgaatatctgatttcagtttacttttcaataagtctatcacctggttattattttttaaattcctgggtggataactggaatgcatattcttggaagcttcagattgttcacgtagacccacggatgatgactatttcagtgacagacgccggtggaagccgttggttttacatacctgcctaaatattttaatcagagtcaacagcaaattcatggaggagttagagagattgctgccatcatcaaggtttaaagggagcagaagcagtgattcctgtgactcacctgttcacctcttcaatgcagccagtcgtcagcagggaaacaactgtttgtcttccaacagcagaacaaagcaggaagctcatcagtrgaagctgccattcctaaggtgttcttgttaatgaagcaaataaacacagcctgcagctctcagtctctatcaatcaggcttcttggtcaagcagaggtaccatctctggtttttaagggcagaaaacaacatgaaattcactggaatcatatcagaagagccccacctgcagaggaggctggagtttggcttggaagataaaaagaagccaagacagtgacacggtatcaaggctgcgagcacaagagccctgctttgtgaggagtgacacggccacagcgctgccccgccacctgcggacatcatctctgcaggtgcaggactcggtcgccctcttctctattctcctcctgggcagtcctgctgctctcactgagaatgggttctaagcaccctgggctt

SEQ ID NO: 9102 - DNA, 1791 bp, Homo sapiens
cagaatcccatgtggaagcagccaattagccagcctagctcttggacaggagccctggatgccagagtgggggtagggagtgggagaatctacttgccttagaatcacagagggaaatgggcccagcctctctctatgactacacatgctggcaaacgcccaaagtaggaagaggaaaatagatgcggaagagttccctgctgtgaaacaagtttgttccatctcttggttctaaatattgacatctttgattgtacaaggcagacccctaactctaatttgygaaaactaaatagagatacataactcacagaccatgagggctgaatgcaggtgcttacactgagttatgagtactcaacatctctcaaattctgctgtgctttcctcctggcccacctgctcccaccaggcctggcctgctgtggaacacctctcagggatggttcctgaagagcagtggagcacacctcacagtccaggctgcctggaaggagaggtgtcctcgggaaggatctgccttgtttgctgggtaacagttgaggatttggctgtaagttcagcattttagaaggaatacgtctggaggcttggtgacaaagatatttagggaagaggtatacagataaagattttagaatgagcccagagcaaaaaaaagaaagagaaaaaaactacccctgtcccatgtgaatactgactagaaagtctccactctcaagagactcatatacagggaagaagtcacttttgtggctgcaagtctcctctgttcccagggcggcccggtattttcagaatgggctccataaccaggtgcgtgatgtggagctcggtgtaaccacgcaacacggatccctcctcaaggctgagcacttggcatcgtccagtgaatctcaaccccggaagtcacagccttagagagcatggaaatggcccgaaggggactcagttccatgtcagaggctgggaactgcctttaggatgtgctatgttttgaattcatacccaaaatttacctcatttcctgtgatagccagaatttatggagctggacagtaagaggttaagatgagggtgatagctctatggttacaaacaataagtcactttcaaaaatcttgtttacaatacccctaactcagagacttttaagtctagaagtttcagtatctaaggtgggaatgcctcctgcaaggctgacaaaagtggtttcagaggtgcccatagctggcttctcatgctccctgatgtagggatagcaatgacgtcactgggttagatataatcatggatcatgatcatccagggaagctcatgttgttactacacagcaggacatgaggaatcgagggatcccctaggattgctccttgtaatactctaacaagttgtaaaggtgaataggaaatttcaccaccttactgaggccagaccatcaaggagcttagaccccacaagaatgacttcgcccataagtaagaggaacattgagtggaacagtcaaagacttgtgacggtggcagcaatggtcagtggtggttgtagccttgaccgcacctctctgtttcctacaaatatacacacagaaaatgctgagataggagctgccaatggaccaagagaaaaattgacagtgtgccgaggccttcctcctgtgacataacttcagcatgcagaagagggcgatggtgtgtgtggctctctttggagaagaagcaagtgcatttgtctttgtcgttcggatggctggattcataacaggtaaagagagttttttgtttgtttttc

SEQ ID NO: 9103 - DNA, 1791 bp, Homo sapiens
cagaatcccatgtggaagcagccaattagccagcctagctcttggacaggagccctggatgccagagtgggggtagggagtgggagaatctacttgccttagaatcacagagggaaatgggcccagcctctctctatgactacacatgctggcaaacgcccaaagtaggaagaggaaaatagatgcggaagagttccctgctgtgaaacaagtttgttccatctcttggttctaaatattgacatctttgattgtacaaggcagacccctaactctaatttgtgaaaactaaatagagatacataactcacagaccatgagggctgaatgcaggtgcttacactgagttatgagtactcaacrtctctcaaattctgctgtgctttcctcctggcccacctgctcccaccaggcctggcctgctgtggaacacctctcagggatggttcctgaagagcagtggagcacacctcacagtccaggctgcctggaaggagaggtgtcctcgggaaggatctgccttgtttgctgggtaacagttgaggatttggctgtaagttcagcattttagaaggaatacgtctggaggcttggtgacaaagatatttagggaagaggtatacagataaagattttagaatgagcccagagcaaaaaaaagaaagagaaaaaaactacccctgtcccatgtgaatactgactagaaagtctccactctcaagagactcatatacagggaagaagtcacttttgtggctgcaagtctcctctgttcccagggcggcccggtattttcagaatgggctccataaccaggtgcgtgatgtggagctcggtgtaaccacgcaacacggatccctcctcaaggctgagcacttggcatcgtccagtgaatctcaaccccggaagtcacagccttagagagcatggaaatggcccgaaggggactcagttccatgtcagaggctgggaactgcctttaggatgtgctatgttttgaattcatacccaaaatttacctcatttcctgtgatagccagaatttatggagctggacagtaagaggttaagatgagggtgatagctctatggttacaaacaataagtcactttcaaaaatcttgtttacaatacccctaactcagagacttttaagtctagaagtttcagtatctaaggtgggaatgcctcctgcaaggctgacaaaagtggtttcagaggtgcccatagctggcttctcatgctccctgatgtagggatagcaatgacgtcactgggttagatataatcatggatcatgatcatccagggaagctcatgttgttactacacagcaggacatgaggaatcgagggatcccctaggattgctccttgtaatactctaacaagttgtaaaggtgaataggaaatttcaccaccttactgaggccagaccatcaaggagcttagaccccacaagaatgacttcgcccataagtaagaggaacattgagtggaacagtcaaagacttgtgacggtggcagcaatggtcagtggtggttgtagccttgaccgcacctctctgtttcctacaaatatacacacagaaaatgctgagataggagctgccaatggaccaagagaaaaattgacagtgtgccgaggccttcctcctgtgacataacttcagcatgcagaagagggcgatggtgtgtgtggctctctttggagaagaagcaagtgcatttgtctttgtcgttcggatggctggattcataacaggtaaagagagttttttgtttgtttttc

SEQ ID NO: 9104 - DNA, 595 bp, Homo sapiens
ccatgaaataagacgtaataggccgggcgcgatggctcacgccygtaatcccagcactttgggaggccgaggcaggcagactgtctgaactcaggagttcgagaccagcctgggcaacatggtgaaacctgtctctactaaaaatgcaaaaaattcgccgggcgtggcagagtgcatctgtagtcccagctactcaggaggctgaggcgggacagttgcttgaactcgggaggtagtggttgcagtgagccgagatcacaccactgcactccagcctgagccacagaatgagactccgccttcaaaaaaaaaaaaaaagaaagaaaaagaaataagacgtaccctgcccatgtacccttactgtttccattttggttcacggtgacctgattccaattgccagtacctgcatttctttccctgaggtattcccccctccttgtcctcttgtcatctatgccaattagtgtggcatgcctaaagtgatgaggaattagcaccctctatcctggaagcagcccctccaccaattaccagtgggatctggtataaataccccagttccctgaccccttgggcggaacgactctgagac

SEQ ID NO: 9105 - DNA, 595 bp, Homo sapiens
ccatgaaataagacgtaataggccgggcgcgatggctcacgcccgtaatcccagcactttgggaggccgaggcaggcagactgyctgaactcaggagttcgagaccagcctgggcaacatggtgaaacctgtctctactaaaaatgcaaaaaattcgccgggcgtggcagagtgcatctgtagtcccagctactcaggaggctgaggcgggacagttgcttgaactcgggaggtagtggttgcagtgagccgagatcacaccactgcactccagcctgagccacagaatgagactccgccttcaaaaaaaaaaaaaaagaaagaaaaagaaataagacgtaccctgcccatgtacccttactgtttccattttggttcacggtgacctgattccaattgccagtacctgcatttctttccctgaggtattcccccctccttgtcctcttgtcatctatgccaattagtgtggcatgcctaaagtgatgaggaattagcaccctctatcctggaagcagcccctccaccaattaccagtgggatctggtataaataccccagttccctgaccccttgggcggaacgactctgagac

SEQ ID NO: 9106 - DNA, 595 bp, Homo sapiens
ccatgaaataagacgtaataggccgggcgcgatggctcacgcccgtaatcccagcactttgggaggccgaggcaggcagactgtctgaactcaggagttcgagaccagcctgggcaacatggtgaaacctgtctctactaaaaatgcaaaaaattcgccgggcgtggcagagtgcatctgtagtcccagctactcaggaggctgaggcgggacagttgcttgaactcgggaggtagtggttgcagtgagccgagatcacaccactgcactccagcctgagycacagaatgagactccgccttcaaaaaaaaaaaaaaagaaagaaaaagaaataagacgtaccctgcccatgtacccttactgtttccattttggttcacggtgacctgattccaattgccagtacctgcatttctttccctgaggtattcccccctccttgtcctcttgtcatctatgccaattagtgtggcatgcctaaagtgatgaggaattagcaccctctatcctggaagcagcccctccaccaattaccagtgggatctggtataaataccccagttccctgaccccttgggcggaacgactctgagac

SEQ ID NO: 9107 - DNA, 589 bp, Homo sapiens
atttttagtagggacggggtttcactatgttggccaggatggtctccatctcttgaccttgtgatccgtccgcctaggcctcccaaagtgctgggattataggcatgagtcaccacacccagcctgctcttgctgttaactgtactgcctttctgaggcatcacgtctcacctctggtcaaccagtaaaagcccagggatagaaaatgagtaggacatatttagaggacagcatggagaagagcagagaagaactggagaattaggattggagctgatgaaagttatgaacaccaaaggtaagagaaagtcttcaaggtttttgaaggtaaaaagcagatcacctacaaaaaatgaattttcatagggccaaaaattgcattagctacactgaatgctaaaaaacaatgaaaaaaatcttttatttgttaggaaaatatttggaacgtaaaattctatgcctcaccaaaaatcatttatgaggggggaaratgaagacatttctagacatgtgagggcctagatccagagtccctttcaatcaaaaagaaaagtgaattcaagagcaaggcttctagtacaaaaagcag

SEQ ID NO: 9108 - DNA, 625 bp, Homo sapiens
acacagctgccagcagatggctccctgctgcacttgggatgaaacctgagcacctaaaaatggctgtcatggctgtcttgtggaccacccacccctctgaatgcacttccttcccctctgctttgtgtaccgccctcccaccgcaagggcttcctttatggtttcttaaccaccaagctcagagcctctcagtgtcctctggcttgtcagctcacccttctgccaagtctcaactgaaatgtttcctttcccaaaaggtttccctgaccagcctatttataaaagtaggtcaacaccacctcccaacccccagccttattttctgtctaggcagctcctggcaccttctgccatttcaactgccacttccacaccacagctgcttgtttactctctgtccacccyagccctctcatcatggtgcacctagccttcagcccagtacctggcatacggtacatgtacaataaacatctgaggactaacagaatgaagggataaatgaacagccattagaaatggacaggacaccatccacccatgtctcctgacttccagttacctcttcagcttcttcctctgagtcaaccacagggaagtcttgcatggactgagtggtgcgctc

SEQ ID NO: 9109 - DNA, 793 bp, Homo sapiens
ctcatggcttggtgctatcttcatgatagtgagttctcatggtatctggcatttaaaagtgtgcgtcacccactccccctactctctctccctcttgttcctgcttttgccatgtggcatgtaggctcctgcctggccttccgccatgactgtaagcttccagaggcctcccaagaagcagatgctggtgctattgcttcctatacagcctgtagagccacgcaccaattaaacctttttgctttataaattacctagtctcaagtattcgtttataacaatgcaagagcagcctaatgcaagctcctagggcccttatgcagatgacacctaaatagggcctgaatgactgccatgattaacgggacaccctatgcagaggagccagtcctagagtgcagccaagtagttttatggtctgcaatgatgttctgaggggcaagatggaaaacatactggaacctgcctggtagtgagaaactgtcccgtgagcctctcagggagagagggaggtgagtggaagatgcctggggtacctcatgttcctggaggatactaagacattctgccaagaatccaatgagccrtggttcaagccttgcctgcatggcttatgttgatatgtgcaagaccataagggtgccatggcagatttgttcccctgcattattttgaaaagaagggtaatatgtgttgggaggttaaaataaaattttgccactataataaccagtccaaaacaactccagggcttcagtcatctgggaaaatggtcggtagctggccagtggga

SEQ ID NO: 9110 - DNA, 838 bp, Homo sapiens
aaccctgcttaccactgcctgtcattctgctcaggggtccattctgctaattccctacactctgagctcattcccaccctagggtcttcgcaaatgcctcctccaccttccacctggctggcttctgcttatcctttgggccgccctgtaagtgccacctcttccaggaatccttctctgacgtcctctgtaggatcatccctttgttctgggtcacagtcctcttttgctccacggagcacctactacaccttttaagtgtccacttgctgcttggttaccttgtgtttttccctctagtttgagaccaagtttcccattttgttcccattgccatgcccagtggttggctcatagttacacacatgggcaagagtgaatgaataaatggccaattttgctggactttctcagaatcagtaatcaagaccttctcactgggatrccaggagacctggattcttattctgactcaaacactcagcaggtgtgactctgggaaatctcttcacctctctgatcttcagtgtcttcctctgtaaaatggtggtaatcagtgtatccaccagagtgttgtcttgaggacaaaatgagattaaaaaatgactgaacttggctgggcgcggtggctcatgcctgtaatcccagcactttgagaggccgaggcaggcggatcacctgaagtcaggagttcgagatcagcctggccaacacggtgaaaccccgtcttttctaaaaatacaaaaattagccgggtgtggtggcaggtgcctgtaatcccagctgcttgggaggtggaggcaggagaatctcctgaacctgggagctggaggttgca

SEQ ID NO: 9111 - DNA, 838 bp, Homo sapiens
aaccctgcttaccactgcctgtcattctgctcaggggtccattctgctaattccctacactctgagctcattcccaccctagggtcttcgcaaatgcctcctccaccttccacctggctggcttctgcttatcctttgggccgccctgtaagtgccacctcttccaggaatccttctctgacgtcctctgtaggatcatccctttgttctgggtcacagtcctcttttgctccacggagcacctactacaccttttaagtgtccacttgctgcttggttaccttgtgtttttccctctagtttgagaccaagtttcccattttgttcccattgccatgcccagtggttggctcatagttacacacatgggcaagagtgaatgaataaatggccaattttgctggactttctcagaatcagtaatcaagaccttctcactgggataccaggagacctggattcttattctgactcaaacactcagcaggtgtgactctgggaaatctcttcacctctctgatcttcagtgtcttcctctgtaaaatggtggtaatcagtgtayccaccagagtgttgtcttgaggacaaaatgagattaaaaaatgactgaacttggctgggcgcggtggctcatgcctgtaatcccagcactttgagaggccgaggcaggcggatcacctgaagtcaggagttcgagatcagcctggccaacacggtgaaaccccgtcttttctaaaaatacaaaaattagccgggtgtggtggcaggtgcctgtaatcccagctgcttgggaggtggaggcaggagaatctcctgaacctgggagctggaggttgca

SEQ ID NO: 9112 - DNA, 773 bp, Homo sapiens
aaaaaaactgaattcaaagtccaatgcttggagcttctcagtgttaggctgtttaatattatttttattattattagtgtttccaaatagcagaatatgctgccttgggtgggtaagggcagaaatggaaaggggcaggtgtggcaggagggcttcacctaactagctggggtgagagatgagaccaggccttcaagtgcagtctggtcctgcctatcagaggctggtcccgggctataaagaaggaatcagccccatggagttctgatttaattagcttggtgatattgccctatcgatcactcatttcaagtctgccaaccaggggaagtgtggtttgcccatcaccctctcacttacagaagccgacatcgacttgtttattcaagcccagctggggagcccttcagagcccctccctcccccagcacatatttgagtttggataaatctctctcttctgcagactgctcagccagcccttcttcctgcttcctgggcttctaaggccctctccccatctcttcttttccaattgaattagctttaatatttttttgatggaaagagtatttgctttatctctgctgctaaatgtcctaattgtttccttcatcttgggtaatacctcgttaatttygcggctgcctgcctgcctcttccagaacagccatagccttcagggtttcttttttccttttctttttttttcttttttctttctttctttctttcttttttttttcctgcagctgatgatgctgagttggagg

SEQ ID NO: 9113 - DNA, 773 bp, Homo sapiens
aaaaaaactgaattcaaagtccaatgcttggagcttctcagtgttaggctgtttaatattatttttattattattagtgtttccaaatagcagaatatgctgccttgggtgggtaagggcagaaatggaaaggggcaggtgtggcaggagggcttcacctaactagctggggtgagagatgagaccaggccttcaagtgcagtctggtcctgcctatcagaggctggtcccgggctataaagaaggaatcagccccatggagttctgatttaattagcttggtgatattgccctatcgatcactcatttcaagtctgccaaccaggggaagtgtggtttgcccatcaccctctcacttacagaagccgacatcgacttgtttattcaagcccagctggggagcccttcagagcccctccctcccccagcacatatttgagtttggataaatctctctcttctgcagactgctcagccagcccttcttcctgcttcctgggcttctaaggccctctccccatctcttcttttccaattgaattagctttaatatttttttgatggaaagagtatttgctttatctctgctgctaaatgtcctaattgtttccttcatcttgggtaatacctcgttaatttcgyggctgcctgcctgcctcttccagaacagccatagccttcagggtttcttttttccttttctttttttttcttttttctttctttctttctttcttttttttttcctgcagctgatgatgctgagttggagg

SEQ ID NO: 9114 - DNA, 773 bp, Homo sapiens
aaaaaaactgaattcaaagtccaatgcttggagcttctcagtgttaggctgtttaatattatttttattattattagtgtttccaaatagcagaatatgctgccttgggtgggtaagggcagaaatggaaaggggcaggtgtggcaggagggcttcacctaactagctggggtgagagatgagaccaggccttcaagtgcagtctggtcctgcctatcagaggctggtcccgggctataaagaaggaatcagccccatggagttctgatttaattagcttggtgatattgccctatcgatcactcatttcaagtctgccaaccaggggaagtgtggtttgcccatcaccctctcacttacagaagccgacatcgacttgtttattcaagcccagctggggagcccttcagagcccctccctcccccagcacatatttgagtttggataaatctctctcttctgcagactgctcagccagcccttcttcctgcttcctgggcttctaaggccctctccccatctcttcttttccaattgaattagctttaatatttttttgatggaaagagtatttgctttatctctgctgctaaatgtcctaattgtttccttcatcttgggtaatacctcgttaatttcgcggctgcctgcctgcytcttccagaacagccatagccttcagggtttcttttttccttttctttttttttcttttttctttctttctttctttcttttttttttcctgcagctgatgatgctgagttggagg

SEQ ID NO: 9115 - DNA, 773 bp, Homo sapiens
aaaaaaactgaattcaaagtccaatgcttggagcttctcagtgttaggctgtttaatattatttttattattattagtgtttccaaatagcagaatatgctgccttgggtgggtaagggcagaaatggaaaggggcaggtgtggcaggagggcttcacctaactagctggggtgagagatgagaccaggccttcaagtgcagtctggtcctgcctatcagaggctggtcccgggctataaagaaggaatcagccccatggagttctgatttaattagcttggtgatattgccctatcgatcactcatttcaagtctgccaaccaggggaagtgtggtttgcccatcaccctctcacttacagaagccgacatcgacttgtttattcaagcccagctggggagcccttcagagcccctccctcccccagcacatatttgagtttggataaatctctctcttctgcagactgctcagccagcccttcttcctgcttcctgggcttctaaggccctctccccatctcttcttttccaattgaattagctttaatatttttttgatggaaagagtatttgctttatctctgctgctaaatgtcctaattgtttccttcatcttgggtaatacctcgttaatttcgcggctgcctgcctgcctcttccagaacagccatagccttcagggtttcttttttccttttctttytttttcttttttctttctttctttctttcttttttttttcctgcagctgatgatgctgagttggagg

SEQ ID NO: 9116 - DNA, 431 bp, Homo sapiens
ccttcaggtctctggttgtcatgccccaccccccaccccccaccccaccaaaggcttcctagatgcacttgcttttgccttgctacttggatgtgaagatgaaggctggggctctcacactagtccacccttgccttagagcccagattccatggctcttcgtgattcctctgtcaacatgagccatgaggagatcccatctcttactgaggataccaagtgttcaccctggagctggggaaataaccagtaagtggactcaggattgagcacacagaggggctaaaagatctcaccaagtcaccacacccccacttgactccatttcaactaggggaccatgsggatgtgtgagcccagagccagtgcccaagagtccacattgcaggtacttccccttcctctgtgcgcagtaaagctatgaacagcat

SEQ ID NO: 9117 - DNA, 783 bp, Homo sapiens
acccactttctatccagtcccagtgagatgaactgaatacctcagttggaaatgcagaaatcacccgccttctgcattggtctttctggcagctgcggactgaatctgttcctatttggccatcttacaagctctccagaacctttgaatctggtcatttcttaataaagttttagaatatgtcattcattggtgaatggacagctttcagtctctttctgcctctaaatattttaggaccagtctttttttaatccatcctgccatctcagtttcttttaatctaggcagcttgtacttttgccaatagagctctctcaaaaatgatttatgtgttctatgcattcatttctaattaaatttatttgcctgaaactatacccacaatttctttctggatttgtatttctctttagatttacttactagtaatttgagggcatttgattttgtcaaaccccacatcaactttgtagaagctccttggtctagctgaagggactactagagtcaggttarttctttcagaggtctaaaaggaatgttacagacacattttgatttcatctttgacttagaaacagttcagtttttcaactctataaactctaggctgtctctatttcctctgaactctacttgacaacaggtcagttccttttggagtgttctcttgtagtgtcttagctaatatacttactggcaacttttcacactttgaaaatactgcctcaaaactttctagcttaatgcagccaattcagtacatagatattttctttt

SEQ ID NO: 9118 - DNA, 815 bp, Homo sapiens
ttgcaaggcagaataccagaacccaagaatgcctgcccaaaggcatatgcatgttttaaacttcgtcatgttcactgacatcccattacaccaaaaagtcacaaggccaattccaacctcaagtggacggggagaattttttttccctttggagaccaaggtatggagggagggagtgaatatttgctaagcaataatgtaatctactatgcaaaggaaattataagaagaacacagtattttaaatcttgtcatgaaggtgaataaatgtgggcttcttgttctctctgtgtatatagaagtccgtaggagatctatgatctgtgaattttcaacctaaaaatatactgtttaacaatcttagaaaaacagaaggtagttggattctggtgtttaaatgggaggagaggaaggactaactggcagctcagaataaaagggagctgaataccagaaaaggaaggttgggaagggacagaatttaagtttgctttcccctcccctcaactctttcctatttgcctttatgtgaagaggaaaatacacagcattaattatcacagtagtccagagggctaatgccaagatggtgtaaacacaaaattaactatatcccktaggaggggcaaccactaaataatactatgcagtggtcaaagccataaaataaaggggtgtgtgggtgtgtgtgtgtatttttcaaagacatatttaaatgcaggaatatattccaagcatattataggaaattgagaagattgagactggggattacatagaaaagaaatagataaaagaagaccctggcagaaatg

SEQ ID NO: 9119 - DNA, 764 bp, Homo sapiens
tcctgtaccaggtgtccaagggcccctgtaccttgacttgagaaagttccttctggggagcagtgagcttcttgctaatcctgcccttggccttcaactcttccacggtcttgtaagagtatttgggcttcttcttgcttccacttgggtctttcctccactggctcagctccttctgaaactcctgaaccagaagaatacagtcagatgcagcaaggaacaaccactttttaccacaggtgaggtagctgagaccattagcagatgtcaccattcactgtcttagatttatttacaagctctatatgaaggaaggaaaggatgcacctgcaagacaccaaaactatctaatgatactccttgaccccattcgccctcttacaaataatgaggttcagaaggcaggtrcaccagatgggagggagaaacaaaaataaagataaacgaaacaacatttattgagcatctactatgggcaggcactatactacttttaaatgtacctcatgtaaaacttagaaatgcaatgtaaaggattttttaagcacacaaaaccttgtttctaactttaaaatgaagataaataagcaggccctaactctcaaagcaaaggtgtctcttacaatcagggtctgcaaaacctttctagaggaggagctaaggcaagcttgtccaacccgcagcccaggacggctctgaatacggcctgtttacgaacacaaatttgtaaactttcttagtgtgacggtagtaaagtccagccc

SEQ ID NO: 9120 - DNA, 635 bp, Homo sapiens
cacctaatgacgaatattatttaatcacaaagataatggaaggtagggtgggacagtgcaggaagttagagaagtaatgcttgttttaaattaagccttttttttttctccctaaacaaaggataacacagcattcaacattcaatttccaaccaggaatggaactaaaatgaatagaatacctactaagcactctcaaacagtttacataactatcacacgcaggactatcacaatggtaatggcaaagtctaattaccaaccccaatgaagcacaaagaacttaagtaattttgtctaaatccacaaagagagtgaagctgagaatcaaagccaggtttctctttttgtcaagtcaaactttcttaaccagagaaccttctatttttcatgttctattgcacgtcatcagtcatttgctcatttcagaattggagttgctaaaggctgtatctctgcaatgttccrctggctcttcagaaacctgtttggtattagacttttcagacaagtggtcagaaggcccatgcaatcagttgcaaaataaatgcagaaaatgatgaatgagtatattttctcacatagacactggctggcttgatttgagtactgttgcagtggtcctcaacatgcac

SEQ ID NO: 9121 - DNA, 635 bp, Homo sapiens
cacctaatgacgaatattatttaatcacaaagataatggaaggtagggtgggacagtgcaggaagttagagaagtaatgcttgttttaaattaagccttttttttttctccctaaacaaaggataacacagcattcaacattcaatttccaaccaggaatggaactaaaatgaatagaatacctactaagcactctcaaacagtttacataactatcacacgcaggactatcacaatggtaatggcaaagtctaattaccaaccccaatgaagcacaaagaacttaagtaattttgtctaaatccacaaagagagtgaagctgagaatcaaagccaggtttctctttttgtcaagtcaaactttcttaaccagagaaccttctatttttcatgttctattgcacgtcatcagtcatttgctcatttcagaattggagttgctaaaggctgtatctctgcaatgttccgctggctcttcagaaacctgtttgrtattagacttttcagacaagtggtcagaaggcccatgcaatcagttgcaaaataaatgcagaaaatgatgaatgagtatattttctcacatagacactggctggcttgatttgagtactgttgcagtggtcctcaacatgcac

SEQ ID NO: 9122 - DNA, 546 bp, Homo sapiens
aaaataatttctccctagcgcagtctcctctttgtatctttcaaagcacttatcacagtgtggtatcctcttgctattgatttatccacgtgtgtattgtctggacttttccaccagaaaaaaaaaatgcccctgaaagccaggctcttactcatctcggtgtacttggcgggcaagaacaataatagcaatatttatataacctttatgatgagccagatactgtttttagtactttacgtatattaattcactgaatcctttggggtggaattattggtctcaccatcttccagatatgaagccaaagtgcagagaggttcggcaactttcccaaagtcacacagctatcaggacaagagctgggaacctaaagaagctgtctccagagtggaaacttgacctgctctgctctctgcttctatgtgttgggggaggaygggagacttcctggaaggagacacagagaggctgtgggggcctcacatcagcctgcctgcacccagtcctcctctttcgtgcctccctctgtgccctctgttctga

SEQ ID NO: 9123 - DNA, 804 bp, Homo sapiens
atgcttataattcaggcattttttccaatagctatgggatttcctccattttccctggaacaaagaaagtagaattggtggcagcaggcaactgatgtccaacttaatgttaggcacctaattttatcaagtaggttttcgccaactcccgagccccaactctggctagtgaacaggattccaaaaggatcaacaagactcatttagtccagcaccaggcactgctgctatgcctgagagatagaacagtgtaataagactacattctctcctcaaggagctccaagtcactctaacmcttccaatctcttagaaaatatcaatcctagatatgggaacataaaatatctaagcaaagtgaaactgggaagaaaatattactgacctttaatttctcctgcccgggcttttttgtagagtcctttgacatccctctgttcacaaacatgcagaggagcatcaacaaatacttcaaaaaacggtaaacttgcaccttcatgaatttgccttgcattgttgcgatccttaaaaaaaaataaaataaaaagtgatcacacaaatcacaaacgtactatattaatattaaagatgagtaaaaagtgcttctcatccaatttagtgggaaatagacaaaatttatgtttttaaatataaactgaaaaaaaaatccaagaaattattaggttaattcctattattcatgacaattttaaaaggcatactgttctactaacccaggatattggggaggtacagaaggaaaacaatgaatgtaccacaaactttttcactcaaattctacgt

SEQ ID NO: 9124 - DNA, 804 bp, Homo sapiens
atgcttataattcaggcattttttccaatagctatgggatttcctccattttccctggaacaaagaaagtagaattggtggcagcaggcaactgatgtccaacttaatgttaggcacctaattttatcaagtaggttttcgccaactcccgagccccaactctggctagtgaacaggattccaaaaggatcaacaagactcatttagtccagcaccaggcactgctgctatgcctgagagatagaacagtgtaataagactacattctctcctcaaggagctccaagtcactctaacamttccaatctcttagaaaatatcaatcctagatatgggaacataaaatatctaagcaaagtgaaactgggaagaaaatattactgacctttaatttctcctgcccgggcttttttgtagagtcctttgacatccctctgttcacaaacatgcagaggagcatcaacaaatacttcaaaaaacggtaaacttgcaccttcatgaatttgccttgcattgttgcgatccttaaaaaaaaataaaataaaaagtgatcacacaaatcacaaacgtactatattaatattaaagatgagtaaaaagtgcttctcatccaatttagtgggaaatagacaaaatttatgtttttaaatataaactgaaaaaaaaatccaagaaattattaggttaattcctattattcatgacaattttaaaaggcatactgttctactaacccaggatattggggaggtacagaaggaaaacaatgaatgtaccacaaactttttcactcaaattctacgt

SEQ ID NO: 9125 - DNA, 804 bp, Homo sapiens
atgcttataattcaggcattttttccaatagctatgggatttcctccattttccctggaacaaagaaagtagaattggtggcagcaggcaactgatgtccaacttaatgttaggcacctaattttatcaagtaggttttcgccaactcccgagccccaactctggctagtgaacaggattccaaaaggatcaacaagactcatttagtccagcaccaggcactgctgctatgcctgagagatagaacagtgtaataagactacattctctcctcaaggagctccaagtcactctaacacytccaatctcttagaaaatatcaatcctagatatgggaacataaaatatctaagcaaagtgaaactgggaagaaaatattactgacctttaatttctcctgcccgggcttttttgtagagtcctttgacatccctctgttcacaaacatgcagaggagcatcaacaaatacttcaaaaaacggtaaacttgcaccttcatgaatttgccttgcattgttgcgatccttaaaaaaaaataaaataaaaagtgatcacacaaatcacaaacgtactatattaatattaaagatgagtaaaaagtgcttctcatccaatttagtgggaaatagacaaaatttatgtttttaaatataaactgaaaaaaaaatccaagaaattattaggttaattcctattattcatgacaattttaaaaggcatactgttctactaacccaggatattggggaggtacagaaggaaaacaatgaatgtaccacaaactttttcactcaaattctacgt

SEQ ID NO: 9126 - DNA, 1730 bp, Homo sapiens
aatttaacattgtactgacattcggatccctttaaaaaatttagcatgcaagtttgatatgtctatgatgtacatgtcacagaaaacaaatggtatatatattcacttaggcattatatatttttttcctggggattttgcattattcaatttttatacttataaaattagttaaggttgaggactattgaagtcctgtttcttctaaggtgagcagagtggttgaaattggaaagttcatttctgctaagtatgtaagctcatgagctaattctgaattgcctgggaaaattctgttcaggaacagaatgacagcattggtacagaaataaaaccttaaaaaggataagagtgcttcagaattagagtttggaaagtgacagaatagcgtacctggaaggagttaatgaagacatttagttattagggctcttggaagaatgtttcctgctaaatggcccacaaaatctaacatcaaccactgccaaagtgtttttttattggaatgaactttactattatatcttaagtcagcctatgcaggccagttaactgtcatgtctaagagtctaccatgtgtccaatggagattaaagatgggtgtcatttacctttcaatatcataagtaacactcattaaacatttactatgctaaagctttatagaaatcagattttctaataatcctgatagctctctaaggtatatattatcatgatccttattttacagttaagacattaaggcacagagaggttaggtgacttgcccaggtcatgcagttgataaaggctgatgttagtacttgaaatcagggaactctgaagcctgtgttctgaatcactgcttttactttgggagtagtgcttgaagagctcaccttctaataaaggcgaatgggtacatacaattttaatatagtaggataaatataatcaaacaactatatgcaacgtgcaggaatcctatagaaaaggaactattaatattatttgtgggaataatcttggtatgggaagaaaggcagcttacagagtcagtgacaccttggtaaagcactgaggataaagagagcccttccaggtgggcaaagtggggatggtcattcacagctgagggaagagtctagcaaatataagagatttgctactacaacatgaattcatagagctgcagatactagttatgataaatttttaaatggggtgggagtgggtgaagtgttcaagagatgagaatagagactgacaacaacaaagasagttgggtcttttcagccagagtacgatgttttggccattaaagggtaaagtttatttagctagattgcttagttggacatgcatggtggacagacgtggtggctgggagaccacttcgggtccagtgctagaatctaaccaaagataatgggggtgggcaagtgggtggatggtagagcacctgtgttagggaatacaagagtaaaagcaggcttggggaagatagtgagtttgaataaaggttgtacaattacttgatgagtcattcagtgatattttgtactttctttatgtctagaattttctttaatgtacatttgtatggggacagatactcagaggaaccagttttaaaaatcaaacagcctctatttgctcattcagtcatcagagttgtctaaagaattagaagactgagtaaatgcctccagctctgcttatgtagtcaggtccaggatgtaaaagga

SEQ ID NO: 9127 - DNA, 818 bp, Homo sapiens
cttgagcccaagaaattaaggctgaagtgagccaagattgtaccactgcactccagcctgggtgacagagtgaaacyccatctcaaaacaacaacaaaaaagacagcaggacctacagagatttagcagatgcattttctcggaaaagtgttttcttcaggtgggcatagggtggggtgagtaggtaagaggagctgtcagggaacgtggatggcggtgtgggaaggagtcactctataaaacttgtagtcatggagaccatatcccagagatcggagccttcctattcctgtaggctacaaagtagagggcacaggggagtcagctgagagaaatgggtgaattgcagagacaatgaatgcttcttgctatgacctgctatgacaaggtgggcttcttgctatgactggaggtatggtgggcctgcgggagcctttaccaaggattgccaagcaacagattttgagggaatgttcccaaagggagcttcttgtgagtcaggtgttagcctgggttttcccaaaagccgaccttgagacaaaggttcaagctccagggtgtttatttggaggtgatctgaggaggaggcaaagggaagttagatgggaagagaaagcaaccaatcaacagtgtgtatctgcacaggttatcacggcgcaccagcgagcccccgtcccactggagaactcttggagaacatgaagaacaggtgttggaggaatggtggagccggggttatttatccaccaacttccagcagtcattgtttgaagactggcgggagggaggggggctgagaaaaggttaattaggttccc

SEQ ID NO: 9128 - DNA, 818 bp, Homo sapiens
cttgagcccaagaaattaaggctgaagtgagccaagattgtaccactgcactccagcctgggtgacagagtgaaaccccatctcaaaacaacaacaaaaaagacagcaggacctacagagatttagcagatgcattttmtcggaaaagtgttttcttcaggtgggcatagggtggggtgagtaggtaagaggagctgtcagggaacgtggatggcggtgtgggaaggagtcactctataaaacttgtagtcatggagaccatatcccagagatcggagccttcctattcctgtaggctacaaagtagagggcacaggggagtcagctgagagaaatgggtgaattgcagagacaatgaatgcttcttgctatgacctgctatgacaaggtgggcttcttgctatgactggaggtatggtgggcctgcgggagcctttaccaaggattgccaagcaacagattttgagggaatgttcccaaagggagcttcttgtgagtcaggtgttagcctgggttttcccaaaagccgaccttgagacaaaggttcaagctccagggtgtttatttggaggtgatctgaggaggaggcaaagggaagttagatgggaagagaaagcaaccaatcaacagtgtgtatctgcacaggttatcacggcgcaccagcgagcccccgtcccactggagaactcttggagaacatgaagaacaggtgttggaggaatggtggagccggggttatttatccaccaacttccagcagtcattgtttgaagactggcgggagggaggggggctgagaaaaggttaattaggttccc

SEQ ID NO: 9129 - DNA, 818 bp, Homo sapiens
cttgagcccaagaaattaaggctgaagtgagccaagattgtaccactgcactccagcctgggtgacagagtgaaaccccatctcaaaacaacaacaaaaaagacagcaggacctacagagatttagcagatgcattttctcggraaagtgttttcttcaggtgggcatagggtggggtgagtaggtaagaggagctgtcagggaacgtggatggcggtgtgggaaggagtcactctataaaacttgtagtcatggagaccatatcccagagatcggagccttcctattcctgtaggctacaaagtagagggcacaggggagtcagctgagagaaatgggtgaattgcagagacaatgaatgcttcttgctatgacctgctatgacaaggtgggcttcttgctatgactggaggtatggtgggcctgcgggagcctttaccaaggattgccaagcaacagattttgagggaatgttcccaaagggagcttcttgtgagtcaggtgttagcctgggttttcccaaaagccgaccttgagacaaaggttcaagctccagggtgtttatttggaggtgatctgaggaggaggcaaagggaagttagatgggaagagaaagcaaccaatcaacagtgtgtatctgcacaggttatcacggcgcaccagcgagcccccgtcccactggagaactcttggagaacatgaagaacaggtgttggaggaatggtggagccggggttatttatccaccaacttccagcagtcattgtttgaagactggcgggagggaggggggctgagaaaaggttaattaggttccc

SEQ ID NO: 9130 - DNA, 818 bp, Homo sapiens
cttgagcccaagaaattaaggctgaagtgagccaagattgtaccactgcactccagcctgggtgacagagtgaaaccccatctcaaaacaacaacaaaaaagacagcaggacctacagagatttagcagatgcattttctcggaaaagtgttttcttcaggtgggcatagggtggggtgagtaggtaagaggagctgtcagggaacgtggatggcggtgtgggaaggagtcactctataaaacttgtagtcatggagaccatatcccagagatcggagccttcctattcctgtaggctacaaagwagagggcacaggggagtcagctgagagaaatgggtgaattgcagagacaatgaatgcttcttgctatgacctgctatgacaaggtgggcttcttgctatgactggaggtatggtgggcctgcgggagcctttaccaaggattgccaagcaacagattttgagggaatgttcccaaagggagcttcttgtgagtcaggtgttagcctgggttttcccaaaagccgaccttgagacaaaggttcaagctccagggtgtttatttggaggtgatctgaggaggaggcaaagggaagttagatgggaagagaaagcaaccaatcaacagtgtgtatctgcacaggttatcacggcgcaccagcgagcccccgtcccactggagaactcttggagaacatgaagaacaggtgttggaggaatggtggagccggggttatttatccaccaacttccagcagtcattgtttgaagactggcgggagggaggggggctgagaaaaggttaattaggttccc

SEQ ID NO: 9131 - DNA, 818 bp, Homo sapiens
cttgagcccaagaaattaaggctgaagtgagccaagattgtaccactgcactccagcctgggtgacagagtgaaaccccatctcaaaacaacaacaaaaaagacagcaggacctacagagatttagcagatgcattttctcggaaaagtgttttcttcaggtgggcatagggtggggtgagtaggtaagaggagctgtcagggaacgtggatggcggtgtgggaaggagtcactctataaaacttgtagtcatggagaccatatcccagagatcggagccttcctattcctgtaggctacaaagtagagggcacaggggagtcagctgagagaaatgggtgaatygcagagacaatgaatgcttcttgctatgacctgctatgacaaggtgggcttcttgctatgactggaggtatggtgggcctgcgggagcctttaccaaggattgccaagcaacagattttgagggaatgttcccaaagggagcttcttgtgagtcaggtgttagcctgggttttcccaaaagccgaccttgagacaaaggttcaagctccagggtgtttatttggaggtgatctgaggaggaggcaaagggaagttagatgggaagagaaagcaaccaatcaacagtgtgtatctgcacaggttatcacggcgcaccagcgagcccccgtcccactggagaactcttggagaacatgaagaacaggtgttggaggaatggtggagccggggttatttatccaccaacttccagcagtcattgtttgaagactggcgggagggaggggggctgagaaaaggttaattaggttccc

SEQ ID NO: 9132 - DNA, 453 bp, Homo sapiens
agtgaaattatcagaaaaagacaatgaagatgaaatattactgatacactgtaactaaaaaaagaaaaaaagcaaagaaacttctattatatatgacacmaagtcagaggtacttttacattatttcatttaatttttcaaataaatttctaagtatttctatgtctactttagaagatgagacactgagtttcagagaatttaaatcatttacaactataaatatagttttcactattaatttagtatgcaaatttaggtagaaatcaaagatggaatgtttaacatattacaagaaagaatatgtgtaatgtaataactgttactactagcaactggtagccatgtcagtataaaactgtgttccttatgttgtttctataggatcatgcttgaatttaatataactaaaagtttgagtaatttggtctgttgttgttaatttaaaaatat

SEQ ID NO: 9133 - DNA, 844 bp, Homo sapiens
aggatcctgtcctgagcagagcaatgaaaaaattcagaatatagttctgggagcccaggggggtgcaggagaccgtgatgaccttcaggggacacaataggatgtaacagagtctccaaacagccggcctggggctggggtactgggattatgaacagaggactagagagagagcagacatgaagcacccagtacacgtcgcggatcactcaaaaacgtttgcacgctttctcccagtcctgagactatgggtctggactgatgctcatcttatttatttatttgttattttatttttttgagatagagtcttgctctgtcacccaggctggagtgcagtggcgcaacctccacctcccaggttcaagcgattctcgtgcctcagcctccccagtaastgggattatagacatgtgccaccacacccagctaattttgtgcgtttgtatttttagtagagacagggtttcaccatgttggccaggctggtcacgaactcctgacctcaagtgatccaccagccttggcttcccaaagtggtgtgattataggcatgagccactgcgcctggccccatcttatatatgtttgagacagagtcttgctctgtcatccaggctggaatgcagtggcacaatcacggccactgcagcctggacctcctgggctcaagcaatcctcctgcttcagtctcccaagtagctgggactacaaggcacacaccaccacacccggctaatttttgttttgttgttttgttttgtttttagagacagggtcttgctatgttgtccaggctgctgtccggcttctgggcacaagcagtcctccctcctcagcctcc

SEQ ID NO: 9134 - DNA, 844 bp, Homo sapiens
aggatcctgtcctgagcagagcaatgaaaaaattcagaatatagttctgggagcccaggggggtgcaggagaccgtgatgaccttcaggggacacaataggatgtaacagagtctccaaacagccggcctggggctggggtactgggattatgaacagaggactagagagagagcagacatgaagcacccagtacacgtcgcggatcactcaaaaacgtttgcacgctttctcccagtcctgagactatgggtctggactgatgctcatcttatttatttatttgttattttatttttttgagatagagtcttgctctgtcacccaggctggagtgcagtggcgcaacctccacctcccaggttcaagcgattctcgtgcctcagcctccccagtaagtgggattatagacatgtgccaccacacccagctaattttgtgcgtttgtatttttagtagagacagggtttcaccatgttggccaggctggtcwcgaactcctgacctcaagtgatccaccagccttggcttcccaaagtggtgtgattataggcatgagccactgcgcctggccccatcttatatatgtttgagacagagtcttgctctgtcatccaggctggaatgcagtggcacaatcacggccactgcagcctggacctcctgggctcaagcaatcctcctgcttcagtctcccaagtagctgggactacaaggcacacaccaccacacccggctaatttttgttttgttgttttgttttgtttttagagacagggtcttgctatgttgtccaggctgctgtccggcttctgggcacaagcagtcctccctcctcagcctcc

SEQ ID NO: 9135 - DNA, 844 bp, Homo sapiens
aggatcctgtcctgagcagagcaatgaaaaaattcagaatatagttctgggagcccaggggggtgcaggagaccgtgatgaccttcaggggacacaataggatgtaacagagtctccaaacagccggcctggggctggggtactgggattatgaacagaggactagagagagagcagacatgaagcacccagtacacgtcgcggatcactcaaaaacgtttgcacgctttctcccagtcctgagactatgggtctggactgatgctcatcttatttatttatttgttattttatttttttgagatagagtcttgctctgtcacccaggctggagtgcagtggcgcaacctccacctcccaggttcaagcgattctcgtgcctcagcctccccagtaagtgggattatagacatgtgccaccacacccagctaattttgtgcgtttgtatttttagtagagacagggtttcaccatgttggccaggctggtcacgaactcctgacctcaagtgatccaccagccttggcttcccaaagtggtgtgattataggcatgagccactgcgcctggccccatsttatatatgtttgagacagagtcttgctctgtcatccaggctggaatgcagtggcacaatcacggccactgcagcctggacctcctgggctcaagcaatcctcctgcttcagtctcccaagtagctgggactacaaggcacacaccaccacacccggctaatttttgttttgttgttttgttttgtttttagagacagggtcttgctatgttgtccaggctgctgtccggcttctgggcacaagcagtcctccctcctcagcctcc

SEQ ID NO: 9136 - DNA, 781 bp, Homo sapiens
cttcctcattctccttttccccctggatttcccccaggcggccaagagaaaaacctcagattctcagtcctccgcagcccgctcccccaggcctagcagctgcctgccctgctctctcctcacctctgaagccccctgctaacacctggccgggacccttatgcctctcactttaccccctccctgccgggcgcagtggctcacgcctgtaatcccagcactttgggaggcctcggtgggtgcatcacctgaggtcaggagttcgacaccagcctggccaacagagggaaaccccgtctctactaaaaatacaaaaattagccaggcatggtggcaggtgcttgtagtcctagctacttgggaagctgaggcaggagaatcacttgaacccgggaggtggaggttgcagtgagccaggatggcgccactgcactccagcctgggtaacagagcgagactccatctcaaaaaaacaaaacaaaacaaaaaaacaaataagtgctccctcccaaacagcttctccaactctgctttctaaccctcttgtacatctcagatgggggggcagaaaagattaagcttcctgaactaacgttctgatcytgtcttttacacacctcccctggatctctagaatgaaattcaaattccttaggctgacagtcaaagccgatcacaataccgcccttccctcgctatcaacaatatttgccggtgcccttcccttccatcccctcatctatacctccctctccacaattcccttccagagtgtaaatga

SEQ ID NO: 9137 - DNA, 667 bp, Homo sapiens
tcttgcccaggctggagtgcagtggcatgaccccggctcactgcagcctctgcctcccagattcaagcgattgtcctgcctcagcctccagagtagctggaattacagggttgtgccaccatgccgagctaatttttgtagttttagtagagatggggttttaccatgttggccaggctagtctcaaactcctggcctcaagtgatccgcctgccttggccccccagagtgctgggattacaggcatgagccactgcgccccgctccctttcttttctcgttttctgaaattgtacatgagactcaagagtcttgggcagatgtttatccaaggctgggccttcggttccctaattgccccaggagataaaaggctaagaacaagaagaggcctgggccaggctgcctgggcttgctgcaggtcctggtcccagcccatcctgggcccaaacctgagtctagaggcttaagcaagaaactgagttcaaaataaaaagtaggaaaaaactggccaggtgtgttattttccacgtggccactgcatttcagcctgggcaatagaacaagactgtgtcaatatatatatattttgagtatacatatacaygtgtgtgtgtgttgttagctaggcctgtactcttcagctgctcagaaggctgaggtggaa

SEQ ID NO: 9138 - DNA, 590 bp, Homo sapiens
cctttcaaggtgtaaagtccctgggagtttcaagtgactccagggacatcacaccagggcacctgctggaaatagaagaatcccaaattcctcactgtggccgttgcctgatggccctggtgaccttgcctacttgcttcacccttgaccatgaccttcggccacacttgcctccttcttgtccctcaacacacctgctcgctcctagcacacagcttctgcacgacgcaccccgtggcctgaaatgccagttcctgcttttgatatgacttgctctttcttgccctgtggctcctgataccacctcttcagaggtctttcctgagcaccccatctgaagaygctacctggcgacccccatcaccacacccagacgctgatacaatggcctggaccataattccagttgtccccttccccagggagagtggttctcaactgggggcgatttggcccctcaggggacactggacaatgtctggagacatgtgtggctgtcacaactcgggggtgaccctggcatggagtgggtggagcccagagatgctgcttagcaccccacagtgcccaggataacccacctcagagaa

SEQ ID NO: 9139 - DNA, 590 bp, Homo sapiens
cctttcaaggtgtaaagtccctgggagtttcaagtgactccagggacatcacaccagggcacctgctggaaatagaagaatcccaaattcctcactgtggccgttgcctgatggccctggtgaccttgcctacttgcttcacccttgaccatgaccttcggccacacttgcctccttcttgtccctcaacacacctgctcgctcctagcacacagcttctgcacgacgcaccccgtggcctgaaatgccagttcctgcttttgatatgacttgctctttcttgccctgtggctcctgataccacctcttcagaggtctttcctgagcaccccatctgaagatgctacctgrcgacccccatcaccacacccagacgctgatacaatggcctggaccataattccagttgtccccttccccagggagagtggttctcaactgggggcgatttggcccctcaggggacactggacaatgtctggagacatgtgtggctgtcacaactcgggggtgaccctggcatggagtgggtggagcccagagatgctgcttagcaccccacagtgcccaggataacccacctcagagaa

SEQ ID NO: 9140 - DNA, 590 bp, Homo sapiens
cctttcaaggtgtaaagtccctgggagtttcaagtgactccagggacatcacaccagggcacctgctggaaatagaagaatcccaaattcctcactgtggccgttgcctgatggccctggtgaccttgcctacttgcttcacccttgaccatgaccttcggccacacttgcctccttcttgtccctcaacacacctgctcgctcctagcacacagcttctgcacgacgcaccccgtggcctgaaatgccagttcctgcttttgatatgacttgctctttcttgccctgtggctcctgataccacctcttcagaggtctttcctgagcaccccatctgaagatgctacctggckacccccatcaccacacccagacgctgatacaatggcctggaccataattccagttgtccccttccccagggagagtggttctcaactgggggcgatttggcccctcaggggacactggacaatgtctggagacatgtgtggctgtcacaactcgggggtgaccctggcatggagtgggtggagcccagagatgctgcttagcaccccacagtgcccaggataacccacctcagagaa

SEQ ID NO: 9141 - DNA, 606 bp, Homo sapiens
gaaagaaccagaaggacgacaacaaagcaagtcaagaaaatgctaaggagccaaagacactgtgctccccaaagttgtcatcccagaccttcttcacattgaagataattatgcttcccttaattgccacttcccctcagacagtcatgatatttacaaatcacgaattatctagtagatgcttatctttgcgacattttaggaaaatcataagctatacttaacccaaagagagaatggctrtatcacgttgctcagacatggataatatatattttatatattatgagggattttagtatagtatacagggtagcagtgttgaacacactaatatttttggacttgaagacagtgcctccattctgatggattacagtatatatagcatacatagaaggctagatattttagtatcctcatattgcatcaacaggtacctggaattttacttatgttcagcttctccatcatctcgccattgcttttttactttttttcttgtcatgcagacattatattattacaatagtagacacaatcgccacttatctcacaatcctcatgtcctcttttaacttcagaatgtgtcaaagtatatatgcc

SEQ ID NO: 9142 - DNA, 606 bp, Homo sapiens
gaaagaaccagaaggacgacaacaaagcaagtcaagaaaatgctaaggagccaaagacactgtgctccccaaagttgtcatcccagaccttcttcacattgaagataattatgcttcccttaattgccacttcccctcagacagtcatgatatttacaaatcacgaattatctagtagatgcttatctttgcgacattttaggaaaatcataagctatacttaacccaaagagagaatggctgtatcacgttgctcagacatggataatatatattttatatattatgagggattttartatagtatacagggtagcagtgttgaacacactaatatttttggacttgaagacagtgcctccattctgatggattacagtatatatagcatacatagaaggctagatattttagtatcctcatattgcatcaacaggtacctggaattttacttatgttcagcttctccatcatctcgccattgcttttttactttttttcttgtcatgcagacattatattattacaatagtagacacaatcgccacttatctcacaatcctcatgtcctcttttaacttcagaatgtgtcaaagtatatatgcc

SEQ ID NO: 9143 - DNA, 606 bp, Homo sapiens
gaaagaaccagaaggacgacaacaaagcaagtcaagaaaatgctaaggagccaaagacactgtgctccccaaagttgtcatcccagaccttcttcacattgaagataattatgcttcccttaattgccacttcccctcagacagtcatgatatttacaaatcacgaattatctagtagatgcttatctttgcgacattttaggaaaatcataagctatacttaacccaaagagagaatggctgtatcacgttgctcagacatggataatatatattttatatattatgagggattttagtakagtatacagggtagcagtgttgaacacactaatatttttggacttgaagacagtgcctccattctgatggattacagtatatatagcatacatagaaggctagatattttagtatcctcatattgcatcaacaggtacctggaattttacttatgttcagcttctccatcatctcgccattgcttttttactttttttcttgtcatgcagacattatattattacaatagtagacacaatcgccacttatctcacaatcctcatgtcctcttttaacttcagaatgtgtcaaagtatatatgcc

SEQ ID NO: 9144 - DNA, 785 bp, Homo sapiens
tgccaaacagcatttatatttagcatgcaccatatgcacatgtgcgttacagagtacaaagacatgtggcagtcccgccagattgaagtcagcaggatagagagcaggagatataatatacaagtgcgagactctcagtagcataaatggaggcatttctgagaacaaaatggctctttgtgtcttgacttcacaagattcttcagtagccacttcagaatattctaggggagcctaatctttagatgcaaggccatgagtgaaaggagggcttggtgggcaaaaggtctttgaagtggagtgcagttacttagggcccctgcaggttcttgctaatccactttactacatcctccactacagagctccatttggaayaggaggttttctcctcagagtcaaggagggagaaaatattttgagggaaagatggtgtctaccagcatcaaagtcacgcttaggaaaaccgagcacttcgtgattacgaagggagcatgagaatgaactgctcaggccctgaagggggaactgaatctaggacactgcaaataaggtaggaaaagcaagcatgtgaatacacaactgtgtgtgggagggtattattgccatcccatcagctttaaaccagcgggtgagtgagagaaggaaaggccactgcccactcctgggtgccacaaggaagggttttccctgaacatgtgaatggctgttcatggccctttactcacaccacccctagtgagttggggtgatttatcaggttgctgtatttgggaggaaaactg

SEQ ID NO: 9145 - DNA, 825 bp, Homo sapiens
actgtttttcttcatgtggaatgttcatagtcttcctctgggcaatgagtctaggatcaactgtttttcttcatttggaatttttttttttcagtttttctataatgaacatgtattacatttataatagaaaataacaagataaattatttctgaaagcagtgcccagcatccagaatttggcaaaaacaggagaagaaagcataaaacaagcagggaaaaaggttttcagttaaattagatgtccaatgaagagatcagcttggctgcaaaatctctttttgacagacaattagttctgrgcaagtcaaatgtttcaacagtgcgttcttctggggcaattaaagtaattcatacttgatgtgcggaaatgtggtaattgggaaagttccccaaatggcagttgaaactgggctggttgtgtttggagaagttaagtcatgcccttgacaagccatctatctgagtctactgaagagggcttgggctgggtgattttaagatggaattttccactgggcgtaggaagtgatgttgggaatggactagaagggtcaacagtgacaacattaacagcatttattgtaatataaatacagttggcccttgaacaacatggatttgaaccgcatgggtccacttatacatggatttttttctgtttttgccacctctgagacggcgaaaccaattcctcctcttcctcctcttcctcagtctcctcaatgtgaagacaatgaggatgaagacatttatgatgatccacttccacttaatgaataataaatacattttctcttccttatgattttcttaatcatatat

SEQ ID NO: 9146 - DNA, 825 bp, Homo sapiens
actgtttttcttcatgtggaatgttcatagtcttcctctgggcaatgagtctaggatcaactgtttttcttcatttggaatttttttttttcagtttttctataatgaacatgtattacatttataatagaaaataacaagataaattatttctgaaagcagtgcccagcatccagaatttggcaaaaacaggagaagaaagcataaaacaagcagggaaaaaggttttcagttaaattagatgtccaatgaagagatcagcttggctgcaaaatctctttttgacagacaattagttctgggcaagtcaaatgtttcaacagtgcgttcttctggggcaattaaagtaattcatacttgaygtgcggaaatgtggtaattgggaaagttccccaaatggcagttgaaactgggctggttgtgtttggagaagttaagtcatgcccttgacaagccatctatctgagtctactgaagagggcttgggctgggtgattttaagatggaattttccactgggcgtaggaagtgatgttgggaatggactagaagggtcaacagtgacaacattaacagcatttattgtaatataaatacagttggcccttgaacaacatggatttgaaccgcatgggtccacttatacatggatttttttctgtttttgccacctctgagacggcgaaaccaattcctcctcttcctcctcttcctcagtctcctcaatgtgaagacaatgaggatgaagacatttatgatgatccacttccacttaatgaataataaatacattttctcttccttatgattttcttaatcatatat

SEQ ID NO: 9147 - DNA, 809 bp, Homo sapiens
  misc_feature (1)...(809): n = A,T,C or G
ttatctaacaccatacatgaaaatcaactaaaaaaggaytaaagacttacaagtaaaacccgaaactgtaaaactcctagaagaaaacataggggaaacacttcatgatgttggtcttgccaatgatttcgtgaatatgacaccaaaagcacagacaacaacaacaaaaataaatgatgagaactatgtaaaacgaaaaagtgtctgcacagcaaatgaaacaatcgagttaaaagacaacccacaaaatgggaaaaattatttgtagaccatctatataataaggagttaatttctaaaatatataaggaatttctacaactcaatagcaaaaaaaaaactctaacaatctgattaaaaagtgggctaaggactttaatagatgtttctctaaagaagatattaagtaggtttctaaaatcgtgatgtgtttttcatttgatgtgtgcatttaattgacgctcattactccatcaaaagcatcctgaaatcaaggaaacagtacttattagacagaatgtttcagtgatcgatttctgcctattaaaccaccccaaaacttaatgcattaagactaatttattatatgctggtgaattcctggggaaccaaaaacattaaacttaaanctttttttatttnncccctttcaaggtgtattttctgcagaacccccatctcagtaaatgccactatcatccactcccttggctcagctccttaaacttggagtcatccttgacatttttctttctctcatgcccctcatctagtttatccacaaattaccaagaaacacccacaagcct

SEQ ID NO: 9148 - DNA, 809 bp, Homo sapiens
  misc_feature (1)...(809): n = A,T,C or G
ttatctaacaccatacatgaaaatcaactaaaaaaggactaaagacttacaagtaaaaccygaaactgtaaaactcctagaagaaaacataggggaaacacttcatgatgttggtcttgccaatgatttcgtgaatatgacaccaaaagcacagacaacaacaacaaaaataaatgatgagaactatgtaaaacgaaaaagtgtctgcacagcaaatgaaacaatcgagttaaaagacaacccacaaaatgggaaaaattatttgtagaccatctatataataaggagttaatttctaaaatatataaggaatttctacaactcaatagcaaaaaaaaaactctaacaatctgattaaaaagtgggctaaggactttaatagatgtttctctaaagaagatattaagtaggtttctaaaatcgtgatgtgtttttcatttgatgtgtgcatttaattgacgctcattactccatcaaaagcatcctgaaatcaaggaaacagtacttattagacagaatgtttcagtgatcgatttctgcctattaaaccaccccaaaacttaatgcattaagactaatttattatatgctggtgaattcctggggaaccaaaaacattaaacttaaanctttttttatttnncccctttcaaggtgtattttctgcagaacccccatctcagtaaatgccactatcatccactcccttggctcagctccttaaacttggagtcatccttgacatttttctttctctcatgcccctcatctagtttatccacaaattaccaagaaacacccacaagcct

SEQ ID NO: 9149 - DNA, 809 bp, Homo sapiens
  misc_feature (1)...(809): n = A,T,C or G
ttatctaacaccatacatgaaaatcaactaaaaaaggactaaagacttacaagtaaaacccgaaactgtaaaactcctagaagaaaacataggggaaacacttcatgatgttggtcttgccartgatttcgtgaatatgacaccaaaagcacagacaacaacaacaaaaataaatgatgagaactatgtaaaacgaaaaagtgtctgcacagcaaatgaaacaatcgagttaaaagacaacccacaaaatgggaaaaattatttgtagaccatctatataataaggagttaatttctaaaatatataaggaatttctacaactcaatagcaaaaaaaaaactctaacaatctgattaaaaagtgggctaaggactttaatagatgtttctctaaagaagatattaagtaggtttctaaaatcgtgatgtgtttttcatttgatgtgtgcatttaattgacgctcattactccatcaaaagcatcctgaaatcaaggaaacagtacttattagacagaatgtttcagtgatcgatttctgcctattaaaccaccccaaaacttaatgcattaagactaatttattatatgctggtgaattcctggggaaccaaaaacattaaacttaaanctttttttatttnncccctttcaaggtgtattttctgcagaacccccatctcagtaaatgccactatcatccactcccttggctcagctccttaaacttggagtcatccttgacatttttctttctctcatgcccctcatctagtttatccacaaattaccaagaaacacccacaagcct

SEQ ID NO: 9150 - DNA, 809 bp, Homo sapiens
  misc_feature (1)...(809): n = A,T,C or G
ttatctaacaccatacatgaaaatcaactaaaaaaggactaaagacttacaagtaaaacccgaaactgtaaaactcctagaagaaaacataggggaaacacttcatgatgttggtcttgccaatgatttcrtgaatatgacaccaaaagcacagacaacaacaacaaaaataaatgatgagaactatgtaaaacgaaaaagtgtctgcacagcaaatgaaacaatcgagttaaaagacaacccacaaaatgggaaaaattatttgtagaccatctatataataaggagttaatttctaaaatatataaggaatttctacaactcaatagcaaaaaaaaaactctaacaatctgattaaaaagtgggctaaggactttaatagatgtttctctaaagaagatattaagtaggtttctaaaatcgtgatgtgtttttcatttgatgtgtgcatttaattgacgctcattactccatcaaaagcatcctgaaatcaaggaaacagtacttattagacagaatgtttcagtgatcgatttctgcctattaaaccaccccaaaacttaatgcattaagactaatttattatatgctggtgaattcctggggaaccaaaaacattaaacttaaanctttttttatttnncccctttcaaggtgtattttctgcagaacccccatctcagtaaatgccactatcatccactcccttggctcagctccttaaacttggagtcatccttgacatttttctttctctcatgcccctcatctagtttatccacaaattaccaagaaacacccacaagcct

SEQ ID NO: 9151 - DNA, 809 bp, Homo sapiens
  misc_feature (1)...(809): n = A,T,C or G
ttatctaacaccatacatgaaaatcaactaaaaaaggactaaagacttacaagtaaaacccgaaactgtaaaactcctagaagaaaacataggggaaacacttcatgatgttggtcttgccaatgatttcgtgaatatgacaccaaaagcacagacaacaacaacaaaaataaatgatgagaactatgtaaaacgaaaaagtgtctgcacagcaaatgaaacaatcgagttaaaagacaacccacaaaatgggaraaattatttgtagaccatctatataataaggagttaatttctaaaatatataaggaatttctacaactcaatagcaaaaaaaaaactctaacaatctgattaaaaagtgggctaaggactttaatagatgtttctctaaagaagatattaagtaggtttctaaaatcgtgatgtgtttttcatttgatgtgtgcatttaattgacgctcattactccatcaaaagcatcctgaaatcaaggaaacagtacttattagacagaatgtttcagtgatcgatttctgcctattaaaccaccccaaaacttaatgcattaagactaatttattatatgctggtgaattcctggggaaccaaaaacattaaacttaaanctttttttatttnncccctttcaaggtgtattttctgcagaacccccatctcagtaaatgccactatcatccactcccttggctcagctccttaaacttggagtcatccttgacatttttctttctctcatgcccctcatctagtttatccacaaattaccaagaaacacccacaagcct

SEQ ID NO: 9152 - DNA, 1703 bp, Homo sapiens
attcattcccatggcttcaattatgatctatatggtgataatttgataatttatgactctatcccttaaccagatccctctcataagctccgaaccacctcctagacatcttgtttggacatatcacacccaattcaaacttacctacttctcttcctgcctaaacttgctcctttactgtgtcacatctcaggggatagcacccccatccatcccctagttacccaaggcagacacctaagcatcatctttgacttttactagtttcctccacgccctcagctctcattcacaaagtcctcggaatatttaccttcttaataactctgtgatgagctacttaaaaaagatgggaaacttgatgaactattaatatttaaaraacaaacaaataaataaatataaaactatctctcagatctaccccctcttttccactcaccatgctggatcaccgcagcaccttcccgatccacatcccagcctcatcttctcctggccattctccaagcagcccctagaccttttcaaaatgcacatctccctaaaaaccttcattagctttagaataaaattatattctcagcctagaataccaagctcttcaggacccagccctggtcaatcactctaacccctcagtgtctgagattcagcattctagttaatctcctctttacttactgagaagacccatggaacttcactgagatcttttcttccccaagaagaagggagaaggccagcactgtgttcccctggaatctttcactactctagcttcgaagtatttagaattccattcattcctttagggttctgtgccctaaaaccaccccttaaaaatgacaaaacaaatatattgagcattttctcatatgagtcaggccttttatcacatttaaccctcacaattctgaagaacacattttaatttcacaaatgagaaaactgagacccagaacaattaaatattaaataacctaatcaaagtcatacaattagtaagagagagaaaggggattcaaactcagattacccaagaaattatctcctgtttattcatggtcaaaccaatttctggtaatccaagaagaataatgtgaaaacagactaacatttggtaagtgcttaatatttataaagtactttacataaggaatctcatttatcccttatgacattttcaaataaacagactgcaaatccaaggaggtagtttaggcaaggtcacacagctagtaagtagctttgaatttccctacctccacccttaaaaaaaatttctttttttttagagacaggtcttgctctgtcactcaggctactagaatgcagtggtgtgattgatcatagttcactgcagcctcaaactcctgggctcaagcaaccctcccaccccaacctcctgagtagctgggactacaggcatgcgccactgcactgagttattttttttttttttaatttttagtacaggcagagtctcactatgtagcccaagctggtctcaaatccctggcctccagcaatcctcctgccttggcctgtcaaactgctgagattacatgtgtgagccactacacccagccccacctccagccttattagctgctacctaacaccaataaacagcattttacaactgaaaaaacagctccagcccaggatcacacatctaatcagaggcaaagtcaggatta

SEQ ID NO: 9153 - DNA, 1703 bp, Homo sapiens
attcattcccatggcttcaattatgatctatatggtgataatttgataatttatgactctatcccttaaccagatccctctcataagctccgaaccacctcctagacatcttgtttggacatatcacacccaattcaaacttacctacttctcttcctgcctaaacttgctcctttactgtgtcacatctcaggggatagcacccccatccatcccctagttacccaaggcagacacctaagcatcatctttgacttttactagtttcctccacgccctcagctctcattcacaaagtcctcggaatatttaccttcttaataactctgtgatgagctacttaaaaaagatgggaaacttgatgaactattaatatttaaagaacaaacaaataaataaatataaaactatctctcagatctaccccctcttttccactcaccatgctggatcaccgcagcaccttcccgatccacatcccagcctcatcttctcctggccattctccaagcagcccctagaccttttcaaaatgcacatctccctaaaaaccttcattagctttagaataaaattatattctcagcctagaataccaagctcttcaggacccagccctggtcaatcactctaacccctcagtgtctgagattcagcattctagttaatctcctctttacttactgagaagacccatggaacttcactgagatcttttcttccccaagaagaagggagaaggccagcactgtgttcccctggaatctttcactactctagcttcgaagtatttagaattccattcattcctttagggttctgtgccctaaaaccaccccttaaaaatgacaaaacaaatatattgagcattttctcatatgagtcaggccttttatcacatttaaccctcacaattctgaagaacacattttaatttcacaaatgagaaaactgagacccagaacaattaaatattaaataacctaatcaaagtcatacaattagtaagagagagaaaggggattcaaactcagattacccaagaaattatctcctgtttattcatggtcaaaccaatttctggtaatccaagaagaataatgtgaaaacagactaacatttggtaagtgcttaatatttataaagtactttacataaggaatctcatttatcccttatgacattttcaaataaacagactgcaaatccaaggaggtagtttaggcaaggtcacacagctagtaagtagctttgaatttccctacctccacccttaaaaaaaatttctttttttttagagacaggtcttgctctgtcactcaggctactagaatgcagtggtgtgattgatcatagttcactgcagcctcaaactcctgggctcaagcaaccctcccaccccaacctcctgagtagctgggactacaggcatgcgccactgcactgagttattttttttttttttaatttttagtacaggcagagtctcactatgtagcccaagctggtctcaaatccctggcctccagcaatcctcctgccttggcctgtcaaactgctgagattacatgtgtgagccactacacccagccccacctccagccttattagctgctacctaacaccaataaacagcattttacaactgaaaaaacagctccagcccaggrtcacacatctaatcagaggcaaagtcaggatta

SEQ ID NO: 9154 - DNA, 725 bp, Homo sapiens
tttctgtgtcggctactctaatagaagcctgtgatctgtctggtctgaactgggctctgtcatgagcgtcacagagttattaggagccccaaagccttcctgacctccgccatcccataacgtagggtgggaactctgccagccgggctcccagggctggagccatgctacatccacggggctctggcagggaagcagagtcatagcctctgccaaatgaggttaatgagaatctgctccaggctccaggggttttgaggcttaattaatacttgcaaggcccttggtgattgtgaaatcaaaggttctgtraatgtgtacaacgctggccttattaacaccagtgcattacgcaggagaaagatgctagccttcttatcactcacttagctccctggaggggctggtcccacggagtccaggccagactgccactggctcttgtggcccttgtcttgctttccaggccactcctagggtcgggagctccagggcagccaccctgagtggcaggggtggccggactcttagtggacagcgagtagaagacctccactttggggatctggagaggcaacagggcagaccccctgcagcagtcttggtgattgtgcctccagacctaaagaaggactcccagtgaggatgcctgtcaccttcccagatggccggtccttcctatattagatgtgcctccttggactaagcaccaccaggctctctgg

SEQ ID NO: 9155 - DNA, 606 bp, Homo sapiens
cctccccgcatccctccaggctgccttctcctggaggagaaaaggcctggccctctcgggtgggggccttcgggccgtgtctcaggcatcagtggcagcagcttcaggagaagtggaaaggtggctggtgccctccccgtgctctggaaagccctgtgtgttactcatgtctgcctacccatcagtgtctcctttgaggacgaggattcttacagccacatttggtacattgtcaggtggcctcagaggactgcccagtgcatctgaatccaaagccctatctatccagactctcctgtgagctggaccctcccctgccaaggaccagagcccaggactcctcccctcgagagccatggcttccygccagtagaggatgggggctcctctgcccaggcccctggttcatccctccctggccaggcttcctccacagggcagtgtctcagcctagcactgagatatcgcctgctcggggagctcctgtctggttaaagatgcggaaggaggagtgagctgcataactgtcccaggttgtgcagttcaaggtacagagttggggctgggccatccggctgtgctgtccgtgggccgaggctggttggt

SEQ ID NO: 9156 - DNA, 784 bp, Homo sapiens
tcatgcaggaagcaggcacttcctgagcagcattcttgcagatgaggcagggcccaagacagcagaggcagaggcagcagtttgcctgggcccagggagacagaaatgggccctttactcttgcagtcagtcttcttgtccccagagggagagaggatgagaacccaggagactggctttgttgtcaaggtttccatggagactggcaatgtcctagggggacctgtggtgtaaattacaacctggtgaagtaggctgctctaggatgtccaggaatgcactttggtgagggaggcagtgcccccaaatgaagattgggcctttgataagaaggggagacaaagaaggaattatgagtgtcagcagaatggagcccaggaggaagagctgagggggatkgctggcattcaggatctaggctagatcagggagaaggcgggtaacacggaggccagacactgtttcaaagtcagtgtgaagcaaggaggtggcaaacccaggaagggacagaaggtcagcaaaaaagggtgggtgtgtgtttggcgcccaggaggaactagatgagctggtgagtacagatgcagaaatgaagtgtggcatgtgagcacatgttgcaacaggcagcaggctgctgggagaagcaccagaagcataaagcagaaactcagacatgggccagctggaaaaaggagccttggttctgtgatatgttgggagccacgcagcagccggacctgggtgtgaatcttggagacagaagcttcccagggcacctccaggatcc

SEQ ID NO: 9157 - DNA, 811 bp, Homo sapiens
ttttgaaataacattggagttgagaatgcaacttagaagttgaggcgttgagaaaagaggcctggtcaaagcagagggttttattgagatgtgggaaacaatgttggataaacactgcaggcagttgtcagttttggatttttgttttttttgttttttgttttttgtttttgtttttgtttttgttttgagacgaagtttcactctgttgcccaggctggagtgcagtggtgcgatctcagctcactgcaacctctgcctcccaggtagctgggattacatgcacacaccaccacacccagctaatttttgtatattcactagagacaggttttgccatgttgcccaggctggtctcaaactcgtgagctcaaagtgatcagcctgccttggcctcccaaagtgctgggaatacaggcatgagccaccacgcttggcctggaggcagttttattaaaagtgcctttagctattmaaatgaatttttcctttgctttgtttccttcctgattgctcaattttggtttatcctaagaagaatcacgactaaagaaatcagattttgtttttgatgacttcatttgagtagattaaaaacagcaaacagaagagaactaagccagcaaattcatttccagcttcaacatttctctttatgttttaacttaaatagatcttttcaaagctctggaaaatttgcagaatcattcatctttcgcttcatttaaaaatttgtttaaaatgtcatgatttatttgaaattcctttgttgaggaattcctgcatttctccaattagaattgtgttttct

SEQ ID NO: 9158 - DNA, 1214 bp, Homo sapiens
agacatcagaccatcgaagtgcaaagcagtgaaaaggggaaatctgattgcttaaaaaaaatctgtaccaaaaacattccattttaaccaaataagtttatttgatcatacagagagtactactgaatttaaaggaagttaatatgaaagttcatgtgtttccttctaagctaaaagctggtgttagtaccaaacagacagtggctgtgaaggggaamaaagccatggcagatttacctatttggtaaatctttttttttgtgtgtgtgtggcaggatctcctctgtcactcaggctggagtgcagtgatgcgatatcggctcactgcaacctctgcctcccaggttcatgtgattctcctgccccagccttccaagtagctgtataacaggtgcctgccatcacgcccagctaatttttgtatttttagtagagacagggtttcaccatgttggccaggctggtctcgaactcctgatctcaagtgatccacccacctcagcctcccaaagtgctgggattacaggcatgagccaccacacccagcctggtaaatctttttaaaagttcaacttttaaatccatcctctcaaaccattcttaaaaaaccccattcttgtcaccttgagaaaaagctaaagaaaaagcattgcttttgctactcattcaatactatttgagtgaatcagagccacgggcttgaaggccatgcctgtggaggcctatctgctctatcactcaccttctggagcctgcaccctgctgtccactgtcccagccaaggtgtgatgagttggtgctatctccctctacttctacaggcatctcttttattctgaccagaaagtccttctttgtagagagcagaaatctgactccctgtaatgaccctgcagagtgcatggaaaacaaatctctttgaaatggcaccttcatctgtccagttgccccaaaattcactctcacccttccttctctgtccttcacatccaactggacattgacctgggtaatgctgcctcatagcagcccataaactctgtctgtctcagagtcccactgccattgtcctgttgagatttcgaactcttactaggacatcccattagtcttgtcactggtccctttgcctcctccccctgtctgtcaaccttcatggtggtctgagcagaactttggcataaggtagtagaaagagcatgggttttggaatc

SEQ ID NO: 9159 - DNA, 590 bp, Homo sapiens
ggatctttctttctgatttatcgtgtgggagctcagcaataacttttagtcagtgtaagttggcaaattaatactctgcatttttttaaatgrttttaaaaaaacgaagtccccctcctctctcccaatataagcatactttactataaagcagcagcttacctagggctactgattaataaatttccctcaaacaaggtatttatagagttgtctctcatagaaggtaatacctactccgtcaaccccaggaactttaccagagtgatttagtaacagaaattgctcatgtaacacagagacatatgctcttgctagaaagggaaaatcgagatttaggaacctgctctatcaaacacaggaaaagctacccataaattaaataaaagtaactatttttaaggtttcttttattctagtttataataaaatcaagaagaaattagagaaaaatataatcctccagaaacttccaaacatttcaaaatgcattgggaatactcccaacttaaatctaacgtgataatcatctttcttctaaagtcaagcagagctcccccaaagatcaattccagctatgtgccagaact

SEQ ID NO: 9160 - DNA, 868 bp, Homo sapiens
tttcattttatacattaccagacacatatttaattttaagatctttatctcctcttccttttacctagaatggcccttcaccagaacgttctccattaagattagtttcaatattcctttgtcaatgaagtcttccccactttccttatctaatcaagaacatccttgtcttactcctgcctatggagtaattctatatcctttatctggtctatattttcacagcacttaccactatcaaaaatcctcctgtctatatgttcattgtagatgttacagttaggatattagcttggaaagaccaaaggcctgatctgtcttgatcacagctttctcatcaggaccttaaacagtgcccaacataaactagatgcagaataaatacctgttgtatgagtgggtaaattgatgaataatttactctttatgttccccttcttctttaaagaaaaattaagaaacagaagtaacaggatttttaaggattatgtcttgaactgtgtcctccccccaaaatagattcaaattctaatccctggtacttgtgaatgtaaggcaacctgagaaatgtttaccttatttgaaagtagggattttgcagctatagtcaagttaacatgaggttatattggagtagactgggtgcttaatcccttatgactggtgttcttaggagaaaagaagagacataatgataggaagaacactatgcgacaatataggtagaaattgtagtgatgtatctacaagtcaaagaagaccaaggattgccagcagcactggaagctgagagagaggtatggaactrattttacactagagtctttagagactaacaccctgtttacagcttaatttagtacttcta

SEQ ID NO: 9161 - DNA, 545 bp, Homo sapiens
tccatctcaaaaaaaaaaaaaaaagtaaaaagaaactggtaaaatccctttagtagcatattaaatatatgtaaaatattgacatttcaacatgtaatcaacagaaaacaaattaggagtgagtttcttgtttttgttctaaattttagcaatctggcatatatcttaaacttatgggccatctcaaattggagtagctgcatgttcctagtggctgcagtactggacwgtgcaattcaccaaattttttaggtcagagtacatctaggaaatgaccatacttgtatggtgtcccagggtaaatagtcgagcctgttaggggccagaggcaacaggccagatgccccaagttcccatcgccccactttcttcactgttccaaaagaaaccccccttaagggctggacattcagaggctttatgcatattaggaaaaggcatcctgtctggggatttcagtcccactgctcttgaagctgaagctggatgccctcgttttgtgcacagcgtgtacaactaccttcaggcgtctgctgagggatgag

SEQ ID NO: 9162 - DNA, 545 bp, Homo sapiens
tccatctcaaaaaaaaaaaaaaaagtaaaaagaaactggtaaaatccctttagtagcatattaaatatatgtaaaatattgacatttcaacatgtaatcaacagaaaacaaattaggagtgagtttcttgtttttgttctaaattttagcaatctggcatatatcttaaacttatgggccatctcaaattggagtagctgcatgttcctagtggctgcagtactggacagtgcaattcaccaaattttttaggtcagagtacatctaggaaatgaccatacttgtatggtgtcccagggtaaatagtcgagcctgttaggggccagaggcaacaggccagatgccccaagttcccatcgccccactttcttcactgttccaaaagaaaccccccttaagggctggacattcagaggctttatgcatattaggaaaaggcatcctgtctggggatttcagtcccactrctcttgaagctgaagctggatgccctcgttttgtgcacagcgtgtacaactaccttcaggcgtctgctgagggatgag

SEQ ID NO: 9163 - DNA, 545 bp, Homo sapiens
tccatctcaaaaaaaaaaaaaaaagtaaaaagaaactggtaaaatccctttagtagcatattaaatatatgtaaaatattgacatttcaacatgtaatcaacagaaaacaaattaggagtgagtttcttgtttttgttctaaattttagcaatctggcatatatcttaaacttatgggccatctcaaattggagtagctgcatgttcctagtggctgcagtactggacagtgcaattcaccaaattttttaggtcagagtacatctaggaaatgaccatacttgtatggtgtcccagggtaaatagtcgagcctgttaggggccagaggcaacaggccagatgccccaagttcccatcgccccactttcttcactgttccaaaagaaaccccccttaagggctggacattcagaggctttatgcatattaggaaaaggcatcctgtctggggatttcagtcccactgctcttgaagctgaagctggatgccctcgttttgtgcacagcrtgtacaactaccttcaggcgtctgctgagggatgag

SEQ ID NO: 9164 - DNA, 739 bp, Homo sapiens
tgactccttcctggacttcagactaaaccaaccctctcctcctccccaacccttttttttttccagacacggtttcgctctgtcacccaggcacccagcctggagtgcaatggtgcaatcagggctcacagcaacctcgacctcccggcctcaggcgatccttccgagtagctgygaccacaggggtgtgccaccatgcctggctaattttttttaaaaaaaatagttatatagatggttagaagtaattttgtccaggttggtctcaaactcctgggctcaaacaattttcctacctcagcctcccaaagtgtggagattacaggcttgagccactccatctgaacctcaacctctatttctttgggtgtccgtcctgtcaacttggcaaatggcaccattagagggcttggagttgccctggttacccacatcccctcagatacccagtcttgccagccctaccctccaatctgggaatttatcccctgcacgtcccatccatcttcccagtgcaagcttcaggttgccttgccggtatggctgtcccaggctcctcactaataccctatctccagcccatcctctaccctggcccaggaagaaaacactttctaaacacaaagcctgccatatcaccacatgcttaaaacttctcccatgagtctacatttcctgaagataaaatccaaatgcctcagcctgacatccaagacgtcttgttacctgattcctaccc

SEQ ID NO: 9165 - DNA, 739 bp, Homo sapiens
tgactccttcctggacttcagactaaaccaaccctctcctcctccccaacccttttttttttccagacacggtttcgctctgtcacccaggcacccagcctggagtgcaatggtgcaatcagggctcacagcaacctcgacctcccggcctcaggcgatccttccgagtagctgcgaccacaggggtgtgccaccatgcctggctaatttttwttaaaaaaaatagttatatagatggttagaagtaattttgtccaggttggtctcaaactcctgggctcaaacaattttcctacctcagcctcccaaagtgtggagattacaggcttgagccactccatctgaacctcaacctctatttctttgggtgtccgtcctgtcaacttggcaaatggcaccattagagggcttggagttgccctggttacccacatcccctcagatacccagtcttgccagccctaccctccaatctgggaatttatcccctgcacgtcccatccatcttcccagtgcaagcttcaggttgccttgccggtatggctgtcccaggctcctcactaataccctatctccagcccatcctctaccctggcccaggaagaaaacactttctaaacacaaagcctgccatatcaccacatgcttaaaacttctcccatgagtctacatttcctgaagataaaatccaaatgcctcagcctgacatccaagacgtcttgttacctgattcctaccc

SEQ ID NO: 9166 - DNA, 739 bp, Homo sapiens
tgactccttcctggacttcagactaaaccaaccctctcctcctccccaacccttttttttttccagacacggtttcgctctgtcacccaggcacccagcctggagtgcaatggtgcaatcagggctcacagcaacctcgacctcccggcctcaggcgatccttccgagtagctgcgaccacaggggtgtgccaccatgcctggctaattttttwtaaaaaaaatagttatatagatggttagaagtaattttgtccaggttggtctcaaactcctgggctcaaacaattttcctacctcagcctcccaaagtgtggagattacaggcttgagccactccatctgaacctcaacctctatttctttgggtgtccgtcctgtcaacttggcaaatggcaccattagagggcttggagttgccctggttacccacatcccctcagatacccagtcttgccagccctaccctccaatctgggaatttatcccctgcacgtcccatccatcttcccagtgcaagcttcaggttgccttgccggtatggctgtcccaggctcctcactaataccctatctccagcccatcctctaccctggcccaggaagaaaacactttctaaacacaaagcctgccatatcaccacatgcttaaaacttctcccatgagtctacatttcctgaagataaaatccaaatgcctcagcctgacatccaagacgtcttgttacctgattcctaccc

SEQ ID NO: 9167 - DNA, 739 bp, Homo sapiens
tgactccttcctggacttcagactaaaccaaccctctcctcctccccaacccttttttttttccagacacggtttcgctctgtcacccaggcacccagcctggagtgcaatggtgcaatcagggctcacagcaacctcgacctcccggcctcaggcgatccttccgagtagctgcgaccacaggggtgtgccaccatgcctggctaatttttttwaaaaaaaatagttatatagatggttagaagtaattttgtccaggttggtctcaaactcctgggctcaaacaattttcctacctcagcctcccaaagtgtggagattacaggcttgagccactccatctgaacctcaacctctatttctttgggtgtccgtcctgtcaacttggcaaatggcaccattagagggcttggagttgccctggttacccacatcccctcagatacccagtcttgccagccctaccctccaatctgggaatttatcccctgcacgtcccatccatcttcccagtgcaagcttcaggttgccttgccggtatggctgtcccaggctcctcactaataccctatctccagcccatcctctaccctggcccaggaagaaaacactttctaaacacaaagcctgccatatcaccacatgcttaaaacttctcccatgagtctacatttcctgaagataaaatccaaatgcctcagcctgacatccaagacgtcttgttacctgattcctaccc

SEQ ID NO: 9168 - DNA, 804 bp, Homo sapiens
tctgaaaattgcacacacccatgtttaaatgtacacacagaactcttgccacaggcaagcggagatttgtcatctgctgtccctgcctcatcttcttcctgaaatccactccatgccaggaataaactgcrtgctctccaccagcccaaactgacctgccttcccgccagccatcccgggcagggtgacctggcttagtacatcgggttcagagatctttccagtttactcgttgaataaaaagtgagggctgatcgagaaagtaatggcagtcagggaaggcgaaggaggtaaagaagagattttacaaatgaagtaattcaacagagtgctgacattggtaaactggcaaacagatttcagggtggttggttgagagtagagtagaaaaggattaaataaagcaaacttgtggtgtactgaatcttaggaattccatgtatccaataagtatagtcatttatgaattaataaattcggcctaagaagccttcttatcgcttaaatcaagactaagtaacaatatatcagttttaaaaagtcattatatcagaaaatcatttaaatgatacacatagatttccaagattttactttaaccgaaactatataaatgtgaatttgttcacccatcttttgacacagggctcaggtcttctcttggtgtctggatcagccagttgaaatttcttgtctgttttgcctatgccacattaataatgcactgtctgggtcctccgatttcagtttggattttgggtttacattgtggagtcatctgaatgcagaatccttcagggattt

SEQ ID NO: 9169 - DNA, 804 bp, Homo sapiens
tctgaaaattgcacacacccatgtttaaatgtacacacagaactcttgccacaggcaagcggagatttgtcatctgctgtccctgcctcatcttcttcctgaaatccactccatgccaggaataaactgcatgctctccaccagcccaaactgacctgccttcccgccagccatcccgggcagggtgacctggcttagtacatcgggttcagagatctttccagtttactcgttgaataaaaagtgagggctgatcgagaaagtaatggcagtcagggaaggcgaaggaggtaaagaagagattttacaaatgaagtaattcaacagagtgctgacattggtaaactggcaaacagatttcagggtggttggttgagagtagagtagaaaaggattaaataaagcaaacttgtggtgtactgaatcttaggaattccatgtatccaataagtatagtcatktatgaattaataaattcggcctaagaagccttcttatcgcttaaatcaagactaagtaacaatatatcagttttaaaaagtcattatatcagaaaatcatttaaatgatacacatagatttccaagattttactttaaccgaaactatataaatgtgaatttgttcacccatcttttgacacagggctcaggtcttctcttggtgtctggatcagccagttgaaatttcttgtctgttttgcctatgccacattaataatgcactgtctgggtcctccgatttcagtttggattttgggtttacattgtggagtcatctgaatgcagaatccttcagggattt

SEQ ID NO: 9170 - DNA, 684 bp, Homo sapiens
taaaaggtgggcattctccccgcccatcttctgtctgtctgccaggactagcacagcactttgaagtcattcacatagaatcccaacttaagagggtaaaatcctcctcaacagactgaaaataagtttaaattccctttgctatattaactcccctgaggaaagagtcttagatcaatgtccaacactaaaaacagttttaaatcagcaagtgagaattaaatctgaagcaattgataataatgtttcattcattcctctcctttggccccgtccaccctactgctaaatccaggcatcaaagagaagagggacataattatctctagtcccagctgctggttttccttccagcctatggcccagttttctgttttactgagaaggctggtgatgttatcttgggatctaagtctgcagtttcmccacaaaaagtccagggatgcactttcatgcttgtgtcctcctccctgggatagcaaggatattagaagacccctggctctgtaattgcttgtcatgtgctctacagacgccacagaatgccaagaacgaagtgctgggaaggacaaattcatggaaccgtgggacggtgctcctcccccagcgtaaaggacagctcctcctcctgaattggagccagcgttctaaatcatgtgtcaacagagttgtcctggatcggat

SEQ ID NO: 9171 - DNA, 684 bp, Homo sapiens
taaaaggtgggcattctccccgcccatcttctgtctgtctgccaggactagcacagcactttgaagtcattcacatagaatcccaacttaagagggtaaaatcctcctcaacagactgaaaataagtttaaattccctttgctatattaactcccctgaggaaagagtcttagatcaatgtccaacactaaaaacagttttaaatcagcaagtgagaattaaatctgaagcaattgataataatgtttcattcattcctctcctttggccccgtccaccctactgctaaatccaggcatcaaagagaagagggacataattatctctagtcccagctgctggttttccttccagcctatggcccagttttctgttttactgagaaggctggtgatgttatcttgggatctaagtctgcagtttcaccacaaaaagtccagggatgcactttcatgcttgtgtcctcctccctgggatagcaaggatattagaagacccctggctctgtaattgcttgtcatgtgctctacagacgccacagaatgccaagaacgaagtgctgggaaggacaaattcatggaaccgtgggacggtgctcctcccccagcgtaaaggacagctcctcctcctgaattgkagccagcgttctaaatcatgtgtcaacagagttgtcctggatcggat

SEQ ID NO: 9172 - DNA, 700 bp, Homo sapiens
ttatggaaacaataatgagttgttccctgtttcaattccaaaattcatatccaatccgttttgcatgccattgccaaattcytcccagagcaaccccgtcacctgccctggccctctccaagtgtggtcctgccatgggcatcgcctgctaagccaagctggcctcgagctgcctgcccgggtccccacaccttggctcacctccctgcccagtcccgcctcctgccagcctgccctgtggctccttcatagatgccgtgctctttctgccccttgctcacccatggcagccttgcccctctctccctgccccaccccctatttaaattgacctgaccttcctcagtgtccatcttccccgaagctttccccagccttggcactcaaggtccagaggctacgcgtttcctctcacctgtggcagcgccgtgctccccagtgcctcacagtttccttcttgcccccgcttcctgtgtaggactcatctgcccacaggttgcacgtcctgtgagggcaaggactgtgtcttatgtgactttccttctccagtcacagagctgggcacatagatagctcaaaaccctctttattaacacagttggatgttgagaaatcaaacaggccaatgtcaaatgagctctccttatttaaatcaagtcagttctccacctcctagcactcagttccagtactctatata

SEQ ID NO: 9173 - DNA, 839 bp, Homo sapiens
tttaattaaaagtggggcggtttccctgagcaaggcagacaaagtcagccctctactgttaagaaaaagggtcacagtgagaggggaggtgaggagactgagtctgtattttctagtctgttgggctacactacctgatcccccttcctcaaaaatccactttactttccccatgtctacaccaatgtggttcacactctgggaccaggaaaagggggagtgatggggaacagagaagggaggagctcacacagctgaggctggggttatgcatatcgaattacttagaatttgcaacctcacagggtactttcatggcgttgaaatacacttcccacagccaccctccctctaactaaaagcaagagtcatttctcagttctggtcttgcctcccacgttctcctccacatttaaraaaatccaccagctacaaagtgaagataccatatgtgatatcccaccctagtttctgttttatcagggtttggagcaggtggagcaggcagagggatcatttcagcctataaattgtattaagggtgagtactgagtcattcttcaagaaaagttttagaagcatccaaaactgaagggtggagccacctggagacagtatcatcagtcctggccccgagcatggcctgcataggcccccatggatcccagcgggagctgcagagtgcgggcaccttggcacacagccctgagtgcaaaattaggagctgggcagagggcatctctctgtcgccattgggcagcccagggcacactggtcatagccttagaccacgaacaccctgtgcccgggggacagatgcaaccagtgtgccctgggct

SEQ ID NO: 9174 - DNA, 839 bp, Homo sapiens
tttaattaaaagtggggcggtttccctgagcaaggcagacaaagtcagccctctactgttaagaaaaagggtcacagtgagaggggaggtgaggagactgagtctgtattttctagtctgttgggctacactacctgatcccccttcctcaaaaatccactttactttccccatgtctacaccaatgtggttcacactctgggaccaggaaaagggggagtgatggggaacagagaagggaggagctcacacagctgaggctggggttatgcatatcgaattacttagaatttgcaacctcacagggtactttcatggcgttgaaatacacttcccacagccaccctccctctaactaaaagcaagagtcatttctcagttctggtcttgcctcccacgttctcctccacatttaagaaaatccaccagctacaaagtgaagataccatatgtgatatcccaccctagtttctgttttatcagggtttggagcaggtggagcaggcagagggatcatttcagcctataaattgtattaagggtgagtactgagtcattcttcaagaaaagttttagaagcatccaaaactgaagggtggagccacctggagacagtatcatcagtcctggcccygagcatggcctgcataggcccccatggatcccagcgggagctgcagagtgcgggcaccttggcacacagccctgagtgcaaaattaggagctgggcagagggcatctctctgtcgccattgggcagcccagggcacactggtcatagccttagaccacgaacaccctgtgcccgggggacagatgcaaccagtgtgccctgggct

SEQ ID NO: 9175 - DNA, 1946 bp, Homo sapiens
aactgctgggcccaggaaggatagcagcagcatgaggggttccattagccacaaactcacggcatggaaccttcacccacctcgcccctcatctgctgtttagcacctggcacgccgtgtatacttactgattattacattttaatggcaaattatagtggcaaaygtatgcatctttgcacaattgttgtacagcatgatgaacaagtcattaatagtaaagaataaatgtgaaagtgagaaaaatctgactgccaaagtttttactccttccttccctccccagacttttaaatgaaagtttagggataatcccttagttgtcctgctagtaggacttgcaattaaaagaattgggccaagaacacttctacgcttctccttttaggtttgggtgtaaattcggggtatttctcactgatgaaagcctggtgcagggcagaccgtgggaagctttcatttccggaatggaccatcaacatcccttggagaagaattctcttctccagacccagacctggtgtcctggcacccattgggcaagtgggtcctagaagacaaacctggtcagagcctggaggctgcttagcattccccacgcacattagcagctcggagagctcaggaagccgcagcccctccttgcctcaccagcctggatcaggacagcatcccctggaagacacacagggcctggcctctgattacccagcctggagggaaagctcaatcgagcatcatgtcacccggtgcccccatgcagggtggcactggtgagacccccaagccaatgataccacctcacaggagtgcaggcccattgtggccagatcatcttgacttttcaagataaatcagaaatcgtatttccatgagatatccctatttgcaagtgatggtgactaaattagaagtttttgaatattgtaacatgttcgtaggctgtttgtctggtttaaactctatctggaggaattcaagctagacttcaggaataacttcttgaggcaaggattttgagaccttagggaaagaaggacgtcttgggggtattctgactgttgtcctcctggaagggaagaacagagaactagaagactgcccttagcgaagttcaaagcacctaagcccgggaccctcagcaagtgttcttgagtcacagattctccctgaggcgcctctttctggctccatagaatggctgattctgtaactcggtgagtttgctttttttttttcctccatcacccaggctggagtgcagtgaagctggagtgccgtggagcgatcactgcaacctctgtctcccaggttcaagcaattctccttcctcagcctcccaagtagctgggattacaagcatgcagcaccacacctggctaatttttgtgtttttaatagagacggcccgaagtgctaggattacaggcatgagccaccgcggccagccataactctgtgactcttgttacaaaggccttatattttgctctttgagggtggttttggtttgatgcctgttggttgccatcttttaactagggatgttttatcaaaatgcccagccaaagtgtccaaacaaattataccttaaagtttgaaaatgtctggcacttctaattcaatgcctgttgtgccaggcactgggctgctgaggaactgagtcccgtccctgcaggctagctagagaacacacacacacacacacacacacacacacacagagtggtcttacaagtcagttttatattctacctatatgcaataaaggtattattatgttgaggtgccttgatataaaaatttttcttaaaggagaggatgcctaaaacaggcattacctgaaacctcctctctccagcattggttgtcttctgtcatgactcagggttttcactgagaatgggatggaaatgtggtctaaagatagggccaatgttgggact

SEQ ID NO: 9176 - DNA, 1946 bp, Homo sapiens
aactgctgggcccaggaaggatagcagcagcatgaggggttccattagccacaaactcacggcatggaaccttcacccacctcgcccctcatctgctgtttagcacctggcacgccgtgtatacttactgattattacattttaatggcaaattatagtggcaaacgtatgcatctttgcacaattgttgtacagcatgatgaacaagtcattaatagtaaagaataaatgtgaaagtgagaaaaatctgactgccaaagtttttactccttccttccctccccagacttttaaatgaaagtttagggataatcccttagttgtcctgctagtaggacttgcaattaaaagaattgggccaagaacacttctacgcttctccttttaggtttgggtgtaaattcggggtatktctcactgatgaaagcctggtgcagggcagaccgtgggaagctttcatttccggaatggaccatcaacatcccttggagaagaattctcttctccagacccagacctggtgtcctggcacccattgggcaagtgggtcctagaagacaaacctggtcagagcctggaggctgcttagcattccccacgcacattagcagctcggagagctcaggaagccgcagcccctccttgcctcaccagcctggatcaggacagcatcccctggaagacacacagggcctggcctctgattacccagcctggagggaaagctcaatcgagcatcatgtcacccggtgcccccatgcagggtggcactggtgagacccccaagccaatgataccacctcacaggagtgcaggcccattgtggccagatcatcttgacttttcaagataaatcagaaatcgtatttccatgagatatccctatttgcaagtgatggtgactaaattagaagtttttgaatattgtaacatgttcgtaggctgtttgtctggtttaaactctatctggaggaattcaagctagacttcaggaataacttcttgaggcaaggattttgagaccttagggaaagaaggacgtcttgggggtattctgactgttgtcctcctggaagggaagaacagagaactagaagactgcccttagcgaagttcaaagcacctaagcccgggaccctcagcaagtgttcttgagtcacagattctccctgaggcgcctctttctggctccatagaatggctgattctgtaactcggtgagtttgctttttttttttcctccatcacccaggctggagtgcagtgaagctggagtgccgtggagcgatcactgcaacctctgtctcccaggttcaagcaattctccttcctcagcctcccaagtagctgggattacaagcatgcagcaccacacctggctaatttttgtgtttttaatagagacggcccgaagtgctaggattacaggcatgagccaccgcggccagccataactctgtgactcttgttacaaaggccttatattttgctctttgagggtggttttggtttgatgcctgttggttgccatcttttaactagggatgttttatcaaaatgcccagccaaagtgtccaaacaaattataccttaaagtttgaaaatgtctggcacttctaattcaatgcctgttgtgccaggcactgggctgctgaggaactgagtcccgtccctgcaggctagctagagaacacacacacacacacacacacacacacacacagagtggtcttacaagtcagttttatattctacctatatgcaataaaggtattattatgttgaggtgccttgatataaaaatttttcttaaaggagaggatgcctaaaacaggcattacctgaaacctcctctctccagcattggttgtcttctgtcatgactcagggttttcactgagaatgggatggaaatgtggtctaaagatagggccaatgttgggact

SEQ ID NO: 9177 - DNA, 884 bp, Homo sapiens
tgcattatcagtaatcacaagtaaaaccatgaaacaaaattggattagaaaatgagtaaatgataaggagtagttcttctcatggtgcatggaactgttacttgaacagcataatttaaccaaccaagaaagctgtttgcaaagataataaaatactctttggaaggaagcccaagagagtcctgagctctttgctttttaaataaacagtacgccaatttacaataaaaaattattgataaaatgatcttcatttctcttaggcaagcattgagtattattttcttcatgttgatacctcccattgttaatagtgctaaggagaaatttattagaaggaaaatacacagtaatatatttgttttatgtttttgtttggttttctttaggtggaatttcactcttgttgcccaggctgaagtgcaatggcagtatctcaggtcactgcaacctctgcttcccaggtttaagtgactctcctgccccagccttccaagtagctggtattacagggaygtgccactacacccagctaatatttgtatttttagtagagatgggtttcatcatgttggccaggctggtcttgaactcctgacctcaggtgatttccctgtgttagactcccaaagtgctgagattacagacataagccaaaaatacatagtaatatattttaatagaagataacacaagtaaactcctgtgatacttgtttttacattaatgcaaaagagctcctctgccttactgatgtgcaaattaccatgcgattgtgacactagctgtacacttttagtttgaagtttagcacagtagtgagcatcagtggtgatctgtcagaccccactgtaaactggtggtggtggccatcataagaggat

SEQ ID NO: 9178 - DNA, 754 bp, Homo sapiens
gtttaagtgtttacttagaaaatcaagggtcatggccgggcgcagtggctcatgcctgtaatcccagcattttgggaggccgaggcgggtagatcacgacgtcagatcaagaccatcctggtcaacatggtgaaaccccatctctacttaaaaaaaaaaatacaaaaattagctgggcatggtggcatgtgcctgtaatcccagctactggggaggctgaagcaggagaattgcttgaacccgggaggcagaggttgcagtgagccgaaactgcgccactgtactccagcctgggcgacagagcaagactccgtctcaaaaaaaaaaaaaataawaataataataaaaacaaaaagagagagaaagaaagaaaataaataaattaattaagggtcctatcaccttgtcaaggagtggctatgaataccgaaagatctagagggtggaactgcaggggacagcacacagagaaggccatggtgacccggccccagcactggccactctgaaaggaaagctggtggcctccgggttggtgccagaagaaccagtctgagtatttcttcagttaaagggccaaggctgaaggacaggttcctgggtccacagcccatgggaaaggtaccagcaaattctgatacgtttaagaacgcaagagcatgtcccggtcaggaaatccatgtaacaggctactgaatgttcaacccagatgacagctcccagtggaaaactatgtgggtccgtgtgaggcctt

SEQ ID NO: 9179 - DNA, 1711 bp, Homo sapiens
cttgtgtaaactcacaacaggggttcaccacaaggaaaagggggccccaggggcattccggttcagagggccactgcggatgggagacagaggagagggcagaacggccactttctcttcgtgctctcctgtcttcatgcagggaagtggctggacaactctacggggcgtggcgccggcaggagccagctctgaattccgccaaccacatcggttygactgaaaacccacgaaacatctcccctcctctacgagagaggagttatcccataacctcgtggtcccccattttctgtgacgaggaaagtcagtctatagttcagcgagcagcccctcatttatctggaaaagtcagctgttcagaaccaagcgttttcttgggattatggacagcagccacgttcaagatgaacaatatctcctagggaattaattgggacagtcccgaagtcaacaaaaatgacttcttaaaaactggagtcctggttaatatgtatcaaaaaccttaaaatgcgtacaacttttgatcccaaaattttaccctttagaacttatcataagaaaacaaagccacaggaagccaggcttggtggcatgctcctgtggtcccagctattcggtaggctgaagcaggaggatcacttgagtcctggaattcggggctgcagtgaaccatgactccacctgtgaataggtggcgtgttccagcctgggcaatatagtgagacccctgtctcaaaaaaaaaaaacaacaacaaccatgaaacactacagagcaatgcttattacaccactaagaaaccttaaatatccaaaaaagattggtaaaataaagcatggcatatccacatacaaaatcacaaaatcatgatgaatgacaatttgttgacatgcaaatatacttacccactacctaagtttaagcaggttaaaactacattatgatcacattgagttctttagaaaggtacggatgcagataaaaaggtgttatttacgcatgtttcatagagtctttctgctcctataggacctaaactttacttttttttttttttgagatggggtcttactgtgtcacccaggctggagtgcagtggctcagtcacggctcactgcaacctccaccttctgggctcaggcaatcctcccacctcagtctcccaagaagctaggactacaggtatatggcaccatacctagctgattttttgagatgggatctcactatgctgcacaggctggtcttgaactcctgggcttaagtgatcctccctcctcagcctcccaaattgctgggattacaagtgtgagccaccttgcctggccaaatttacttttaattaaaacaaacaaacaataagttacctctaaaaacagattttctggttccctgtccaacatcacacaagtctgggtaagtgatatgacattcaggagtgttttaagatgacttactgaatctcagatggcctagaccttccaacagaggtttgcgatgcgagcagctcctgaagctcagtagggagagcaagtctgaaaagctgactgcactgaggtgctagtgggtccagctatttggtacggaaacactacagaagccttccccaatctggcaacagcatgaaagtggcaggtccataaccccacccaggaaaacagcaggttcctcccaaatgttcttggaacctaggtgctactcattcctcca

SEQ ID NO: 9180 - DNA, 1756 bp, Homo sapiens
gatccttaaagtttagattggcatctgtttcatgtgggtgctagttttcaaatcctagcaaaaatattgttttttttctccctcttcactgaactaaaagagtttaagaattttaagtgttttaagctgtacttcttttttcagtagacagaaatctattccataaaagaaacacttacggttctgcaaattttgaaaaagtcaataaattttgaacctaacttacacgtgaaattctgtagctttgcctaataaagtcatattcattcatttgatatatattgagcacctgctttgtgcaaggcgtcatgagaggcggggagttacaagctcaatcaaaggtcatgtctttatggagataatgggtatgagaatcaacataatatgagggcaaaagggctaagggacttaaagatttaaaacaacaacaaaattaaaatctaaaagagttgtggaaactcagagtaaaccattccttcccaggtggggaatctgacacagcttcatgggagagttgtggaaactcagagtgaaccatttcttcccaggtggggaatctgacacagcttcatgggagaggtgacattttggccttttacaacaggcagaaaaatgtaaatgtgaaagtgggtggaggtgcactctgggggaggaaagttgaagaattaaagaggtaggagaagaacaggcataggatgagcaagccagagaatctgaagagggcatgagggtaaaaggtgagttgagaacaacgtccaggcaagtacacatatcctcgggaaaactttgttctaacaatagggagccaggcaaaggagtaaccacgaaaacaaacaaaaggcagttcaaagtttgaagaaatctcaaaaggtcatagaatggcatagcctctcttacttggccaccacagaacagatttgctcagattaaagaattctctccattctcccaacaaaacatcctggctgatgccagagcacatgagcaggggagggacaaagtgggtgggcattagtgccactctctctggcttcccttaggtgagtttcatgcttacggagatttggctgtgcttgttcccacaccatttacatcacttagacttgttattggaattacagaatttggtgaaatattaatgacaagtgatcagaaaaataattgttactgtaagaactaagttgaatgttttgcaaataattggtaacaaggagtcacttaaaaattgctattgaatctggtgtggcaagtcaactacaaaataaagtaaaaaatggtagaaatctggaagaattcttaaaggaaagaaaaagatctggaagaggttagtttgggttgctttaatatgtgccttagtatttgctccactttcagaaactgaaactggaaattgtccaaatgcattaggtgtgatttatgataaaaaaaaaacagtattaacaccaataagggaactatactctaaaaatgcctcagcccttaatcaaaagtttgtggaatgaatatatatttacatacataaaatatatatatttagatacatatatatgtatgtaatatatatktagatacatatatgtaatatatatttacatacataaaataaaatgttaaaggtacatatttaaaatgttgcaattaattttatttttcaattagccagttttaaattactgtctgtgaaaatgctggcaatctgttcacatcaaccattctatttcccagcctcatttctccctgaggagaaggtggatcc

SEQ ID NO: 9181 - DNA, 1277 bp, Homo sapiens
aaaaaaaaaaaaaagaaaaaagaaagaaagtgatgtacagaaaataaaagtgaggtacataagcagctggattaattatagtctggcatttgccttatttgaaccaagtwtgaaaagtaggctgtctttgattggccaaaactcagtgactggtacaagagtaggctacagcctttttacacatccactttagttacagtttactacgtatggtgaaacctttaggcccaactaaaatatttaagggggcagctttaagctaagcttaatttaacgtaacaaaagtgccttcccaagcccccctgaccagccaactgattttcaagcctcctgggagccaaccatcctctaaagtaggaaggctttgttcctcagtgggtattctctagaaacgtaagaacccagtcagggaatgagccaccttcgtgtttaagggaaggaagaattgaaagccaggcatggtggctcatacctgtaatcccagtgctttggaacttgaggccaggagttcaaggccagcccaggcaacatagtgagaccccatctctacaaagcatttaagaattaactgagcatggtggcatgcacctgtagtcctagctactcgggaggctgaagcaagaggatcctttaagcccagagttcaaagttatagtgagctatgattgtgccactgcattccagcctagacaacagagcaagaccctatctctaaaataaaaaataaaagaggtagagggaacaagcaaagaagtatttctactattatctaagagtcttcccaaattctgaaagaagttttgcctgaatcataaagatgaataatgataatggaaaaagtatcaaagtcatgggaaacagaaatatgtcacatggacagagaaccaagtactgttttaagggctgtatatgtacaaactattttgaccctcacaaaacccctatatggtaggtactttcaccattctcaattgctaatgagaaattggagcacagagaagttaagtgacctgcccctggtcaaacagctaagaagtggcagagctgagatttgaacctagactgtccggctggagtggggcctctgagcttctaggcaccgctgcctcatgcagtttgatcctatcaataataacagcaaagacataaagagcatgttcccattaacaaagtgctctcattcacttactcaaaacaacatttttggtgtagcacccccaccaggcgcaggcccagagatagagtggtgagcaagtaatacacaggtcctgccctca

SEQ ID NO: 9182 - DNA, 1277 bp, Homo sapiens
aaaaaaaaaaaaaagaaaaaagaaagaaagtgatgtacagaaaataaaagtgaggtacataagcagctggattaattatagtctggcatttgccttatttgaaccaagtatgaaaagtaggctgtctttgattggccaaaactcagtgactggtacaagagtaggctacagcctttttacacatccactttagttacagtttactamgtatggtgaaacctttaggcccaactaaaatatttaagggggcagctttaagctaagcttaatttaacgtaacaaaagtgccttcccaagcccccctgaccagccaactgattttcaagcctcctgggagccaaccatcctctaaagtaggaaggctttgttcctcagtgggtattctctagaaacgtaagaacccagtcagggaatgagccaccttcgtgtttaagggaaggaagaattgaaagccaggcatggtggctcatacctgtaatcccagtgctttggaacttgaggccaggagttcaaggccagcccaggcaacatagtgagaccccatctctacaaagcatttaagaattaactgagcatggtggcatgcacctgtagtcctagctactcgggaggctgaagcaagaggatcctttaagcccagagttcaaagttatagtgagctatgattgtgccactgcattccagcctagacaacagagcaagaccctatctctaaaataaaaaataaaagaggtagagggaacaagcaaagaagtatttctactattatctaagagtcttcccaaattctgaaagaagttttgcctgaatcataaagatgaataatgataatggaaaaagtatcaaagtcatgggaaacagaaatatgtcacatggacagagaaccaagtactgttttaagggctgtatatgtacaaactattttgaccctcacaaaacccctatatggtaggtactttcaccattctcaattgctaatgagaaattggagcacagagaagttaagtgacctgcccctggtcaaacagctaagaagtggcagagctgagatttgaacctagactgtccggctggagtggggcctctgagcttctaggcaccgctgcctcatgcagtttgatcctatcaataataacagcaaagacataaagagcatgttcccattaacaaagtgctctcattcacttactcaaaacaacatttttggtgtagcacccccaccaggcgcaggcccagagatagagtggtgagcaagtaatacacaggtcctgccctca

SEQ ID NO: 9183 - DNA, 1277 bp, Homo sapiens
aaaaaaaaaaaaaagaaaaaagaaagaaagtgatgtacagaaaataaaagtgaggtacataagcagctggattaattatagtctggcatttgccttatttgaaccaagtatgaaaagtaggctgtctttgattggccaaaactcagtgactggtacaagagtaggctacagcctttttacacatccactttagttacagtttactacgtatggtgaaacctttaggcccaactaaaatatttaagggggcagctttaagctaagcttaatttaacgtaacaaaagtgccttcccaagcccccctgaccagccaactgattttcaagcctcctgggagccaaccatcctctaaagtaggaaggctttgttcctcagtgggtattctctagaaacrtaagaacccagtcagggaatgagccaccttcgtgtttaagggaaggaagaattgaaagccaggcatggtggctcatacctgtaatcccagtgctttggaacttgaggccaggagttcaaggccagcccaggcaacatagtgagaccccatctctacaaagcatttaagaattaactgagcatggtggcatgcacctgtagtcctagctactcgggaggctgaagcaagaggatcctttaagcccagagttcaaagttatagtgagctatgattgtgccactgcattccagcctagacaacagagcaagaccctatctctaaaataaaaaataaaagaggtagagggaacaagcaaagaagtatttctactattatctaagagtcttcccaaattctgaaagaagttttgcctgaatcataaagatgaataatgataatggaaaaagtatcaaagtcatgggaaacagaaatatgtcacatggacagagaaccaagtactgttttaagggctgtatatgtacaaactattttgaccctcacaaaacccctatatggtaggtactttcaccattctcaattgctaatgagaaattggagcacagagaagttaagtgacctgcccctggtcaaacagctaagaagtggcagagctgagatttgaacctagactgtccggctggagtggggcctctgagcttctaggcaccgctgcctcatgcagtttgatcctatcaataataacagcaaagacataaagagcatgttcccattaacaaagtgctctcattcacttactcaaaacaacatttttggtgtagcacccccaccaggcgcaggcccagagatagagtggtgagcaagtaatacacaggtcctgccctca

SEQ ID NO: 9184 - DNA, 1277 bp, Homo sapiens
aaaaaaaaaaaaaagaaaaaagaaagaaagtgatgtacagaaaataaaagtgaggtacataagcagctggattaattatagtctggcatttgccttatttgaaccaagtatgaaaagtaggctgtctttgattggccaaaactcagtgactggtacaagagtaggctacagcctttttacacatccactttagttacagtttactacgtatggtgaaacctttaggcccaactaaaatatttaagggggcagctttaagctaagcttaatttaacgtaacaaaagtgccttcccaagcccccctgaccagccaactgattttcaagcctcctgggagccaaccatcctctaaagtaggaaggctttgttcctcagtgggtattctctagaaacgtaagaacccagtcagggaatgagccaccttcgtgtttaagggaaggaagaattgaaagccaggcatggtggctcatasctgtaatcccagtgctttggaacttgaggccaggagttcaaggccagcccaggcaacatagtgagaccccatctctacaaagcatttaagaattaactgagcatggtggcatgcacctgtagtcctagctactcgggaggctgaagcaagaggatcctttaagcccagagttcaaagttatagtgagctatgattgtgccactgcattccagcctagacaacagagcaagaccctatctctaaaataaaaaataaaagaggtagagggaacaagcaaagaagtatttctactattatctaagagtcttcccaaattctgaaagaagttttgcctgaatcataaagatgaataatgataatggaaaaagtatcaaagtcatgggaaacagaaatatgtcacatggacagagaaccaagtactgttttaagggctgtatatgtacaaactattttgaccctcacaaaacccctatatggtaggtactttcaccattctcaattgctaatgagaaattggagcacagagaagttaagtgacctgcccctggtcaaacagctaagaagtggcagagctgagatttgaacctagactgtccggctggagtggggcctctgagcttctaggcaccgctgcctcatgcagtttgatcctatcaataataacagcaaagacataaagagcatgttcccattaacaaagtgctctcattcacttactcaaaacaacatttttggtgtagcacccccaccaggcgcaggcccagagatagagtggtgagcaagtaatacacaggtcctgccctca

SEQ ID NO: 9185 - DNA, 1277 bp, Homo sapiens
aaaaaaaaaaaaaagaaaaaagaaagaaagtgatgtacagaaaataaaagtgaggtacataagcagctggattaattatagtctggcatttgccttatttgaaccaagtatgaaaagtaggctgtctttgattggccaaaactcagtgactggtacaagagtaggctacagcctttttacacatccactttagttacagtttactacgtatggtgaaacctttaggcccaactaaaatatttaagggggcagctttaagctaagcttaatttaacgtaacaaaagtgccttcccaagcccccctgaccagccaactgattttcaagcctcctgggagccaaccatcctctaaagtaggaaggctttgttcctcagtgggtattctctagaaacgtaagaacccagtcagggaatgagccaccttcgtgtttaagggaaggaagaattgaaagccaggcatggtggctcatacctgtaatcccagtgctttggaacttgaggccaggagttcaaggccagcccaggcaacatagtgagacyccatctctacaaagcatttaagaattaactgagcatggtggcatgcacctgtagtcctagctactcgggaggctgaagcaagaggatcctttaagcccagagttcaaagttatagtgagctatgattgtgccactgcattccagcctagacaacagagcaagaccctatctctaaaataaaaaataaaagaggtagagggaacaagcaaagaagtatttctactattatctaagagtcttcccaaattctgaaagaagttttgcctgaatcataaagatgaataatgataatggaaaaagtatcaaagtcatgggaaacagaaatatgtcacatggacagagaaccaagtactgttttaagggctgtatatgtacaaactattttgaccctcacaaaacccctatatggtaggtactttcaccattctcaattgctaatgagaaattggagcacagagaagttaagtgacctgcccctggtcaaacagctaagaagtggcagagctgagatttgaacctagactgtccggctggagtggggcctctgagcttctaggcaccgctgcctcatgcagtttgatcctatcaataataacagcaaagacataaagagcatgttcccattaacaaagtgctctcattcacttactcaaaacaacatttttggtgtagcacccccaccaggcgcaggcccagagatagagtggtgagcaagtaatacacaggtcctgccctca

SEQ ID NO: 9186 - DNA, 1275 bp, Homo sapiens
ggggaaagcttctgcagggcacacagaaagagtctcattaaacttccagccatagctgtctcctaatcacagagggctcctggtgccaaaagaccagcaggcaagaaagggagttacctccagtgataacaaaccttgatcatcagaaggagatagcactgttgttcatgaggaaacagaactatttttgttatcacagtttcctttagtagatactatctatggtcatttattgctgcttctctgccctactttgtaattaaatggaatatatatatakatagatagatagatagatatagcaatagctatagcctgagacgggcctggggatcaaggacacaggcccttcatagatgacactctgggacactccaccagataagccacctgggcagaggaggtgctgctaagaagtggcaataaatctaaaatgagcagtaatgttgagtaccagttgtggccgtaagaacattgactgttagacgcactctattttgccccctgaacttctttttctactgtgggatcagatggagtgagattatcaaagcaagaggatcccagcagcacaggagggactgtggtggatgtcaaggggccctatccagatttcctctcaaaagtctggggagctcattttcctgacaggtgggggtgctgccctctgagggctcacagcttgaatctctccccaaaactgaaagaaagcttccttgctcaagcttatgcccctcattgggggcagcttgcatcatttcagcatcactttgaagggctatctcattccaacgctccttgagggttcagcttgaagcctttatgcaactgcgtcacagttcaactgcccagtgcaactgccgctgcctcctcccaggtgctgctgctgagcacagccttctgtcaactttctgcatgcctgttgccatcagagaccctgctttctgaggaacctaagaaaggcatacactcacttgcaggggagtggttaagataacaacatggaaaacaaaacaaaacaaaaatccatggatcaaattgagtttaagaagaaggaggagaggcctccaaaccttatttcagtcatggcttctatataaaatatcatccaaattaggaagcttctttcctactgtcacattttttcaaggttttcttgggtcttggggcttgagttaccccaggagttaaatttagacccagccttccatgggtttgagtgtgctaacatcctttcttactctgagaaacaggggaagtgtgtgtgtgtgtgtg

SEQ ID NO: 9187 - DNA, 798 bp, Homo sapiens
caaagaacttttgtttatatgggttatatctgtcaatakttagcatattcaaaataaaaatgaaggaattttaaactatgtatttattaacttgcataatgataagtctatttcatgttctcctgaaaaacatatttttattaaaaataactttttttaagacaaaaaagttaatgagaagaatggcatcattttacacttttgcaaatctctttaatatatgtctggcttattagaagacagctggctggctttgcatatcacacattatgcagcctttggaaaaccccactatacactcaagagagagaatgagagtgaagtggcagacaatgtcttattattgggaaaatacttttgacccaatggactgcattaaatggtctcggggatctccagaggtccccagaccatacactgaggaccagcgatgcaaagtaatatttaacaagagaaaactatttatatgatacactgttacgtgaagaaatgcaatatgcgattaatcacattaaaaatatctaccccctgtaatcccagcactttgggaggccgaggcgggctgatcacccgaggtcaggagttcaagaccagcctgaccaacatggagaaaccccgtctctactaaaaatacaaaattagcggggcatgatggcaggtgcctgtaatcccagctactcaggaagctgaggcaggagaattggaggcggaggttgcggtgagctgagatcgcgccactgctctccagcctgggcaacaagagcgaaactctgtctaaaaaaaaaaaaaaaaaaaaaa

SEQ ID NO: 9188 - DNA, 798 bp, Homo sapiens
caaagaacttttgtttatatgggttatatctgtcaatagttagcatattcaaaataaaaatgaaggaattttaaactatgtatttattaacttgcataatgataagtctatttcatgttctcctgaaaaacatatttttattaaaaataactttttttaagacaaaaaagttaatgagaagaatggcatcattttacacttttgcaaatctctttaatatatgtctggcttattagaagacagctggctggctttgcatatcacacattatgcagcctttggaaaaccccactatacactcaagagagagaatgagagtgaagtggcagacaatgtcttattattgggaaaatacttttgacccaatggactgcattaaatggtctcggggatctccagaggtccccagaccatacactgaggaccagcgatgcaaagtaatatttaacaagagaaaactatttatatgatacactgttacgtgaagaaatgcaatatrcgattaatcacattaaaaatatctaccccctgtaatcccagcactttgggaggccgaggcgggctgatcacccgaggtcaggagttcaagaccagcctgaccaacatggagaaaccccgtctctactaaaaatacaaaattagcggggcatgatggcaggtgcctgtaatcccagctactcaggaagctgaggcaggagaattggaggcggaggttgcggtgagctgagatcgcgccactgctctccagcctgggcaacaagagcgaaactctgtctaaaaaaaaaaaaaaaaaaaaaa

SEQ ID NO: 9189 - DNA, 739 bp, Homo sapiens
tctccggacaggagagatgacagtagggcactccaagcttcctcctcccccgggcgcaccaaaggccgggtttgtgggcttctcagtccggcgcgggtaagcacaggaagcggctccaatcagggcactggagtttgagccggtcctaccctgggccacagcccagactcctcggcccactgtggcacctcgctgctagcgctgccccccggccttcatcgcaggccgcggcccctgcgggccaccgctcccgccccgccgcgctgcgcccgcagacccaggtggctcctggagcactccgagccgcctgggtcgggacctcagatccactcccagccccgcgaggctgccctgccgcttcgcccagaaggtctcttcgatctgtccgcttcccggaatcgctctcttaggaccgggtcctgtgtggcccaagtcctctcctcctaaagaaacactttcagggggaagcagcaaaaattcggggcycgcctgccatggctcagatcaactactttcatcgcctacctaaacgctttttcacacgcggagctgcaggacccctcgtgctaccctccccaaattccaatagcttccaccacaagaaaaagctgtgatcctgttactgaatcctaaaaacgccacccgttcctccagcccccaactccgacctccagccctctgctctggccggcgtgtaaactacttatcggcccctcgatcccgattccgtaaacagtct

SEQ ID NO: 9190 - DNA, 739 bp, Homo sapiens
tctccggacaggagagatgacagtagggcactccaagcttcctcctcccccgggcgcaccaaaggccgggtttgtgggcttctcagtccggcgcgggtaagcacaggaagcggctccaatcagggcactggagtttgagccggtcctaccctgggccacagcccagactcctcggcccactgtggcacctcgctgctagcgctgccccccggccttcatcgcaggccgcggcccctgcgggccaccgctcccgccccgccgcgctgcgcccgcagacccaggtggctcctggagcactccgagccgcctgggtcgggacctcagatccactcccagccccgcgaggctgccctgccgcttcgcccagaaggtctcttcgatctgtccgcttcccggaatcgctctcttaggaccgggtcctgtgtggcccaagtcctctcctcctaaagaaacactttcagggggaagcagcaaaaattcggggctcgcctgccatggctcagatcaactactttcatcgcctacctaaacgctttttcacacgcggagctgcaggacccctcgtgckaccctccccaaattccaatagcttccaccacaagaaaaagctgtgatcctgttactgaatcctaaaaacgccacccgttcctccagcccccaactccgacctccagccctctgctctggccggcgtgtaaactacttatcggcccctcgatcccgattccgtaaacagtct

SEQ ID NO: 9191 - DNA, 736 bp, Homo sapiens
atgctggtcaggcctgcagcagagcccccatgggaaatgctgcccagacacatcatgtgcccttctcggaggtcctgctgcctctcgccctgcccttcttgggttgcccaaacccgtctgttggtgagtagcaagtcccaaaagaccctatggagctgtcagctgagtatyggtgtcccaaggcaagagctgccgaaataccatgctgtgagatggggaggatcacccatggagagggcagagagaggggctcacatgcccatgtcctggggtagtcagggcacaccatggggacagcaggaggagctggagaagccctgtgaggagtggccagcggatgaaccagctgtggcctcttgtgccctccacccatcttaacatcaagaagagctgttgttttctgcccctacccctgagcttggctggggcagggcaggggtctaagggcctccctctcctggagactcacagtgtctgagcatcaaccaggtcccggtgctccacagatttgcaagtgtctgggggagggagcctggccctcccacacgccctgcccacacctgctggctgtccccacaggcaggtcctctcagttccgttggaggaccaggctttgggagcttagcagccaaaaagagaccccctgtcctctcctctcctctgtcctggcagggacgagattcaggcaggagcgccaggaacgacaagagggaggggatgaagggagctacaggga

SEQ ID NO: 9192 - DNA, 809 bp, Homo sapiens
tatagttggtcagacctgcttcaaatcccatcaggacttaattagtacctaattagtacttaatgatcacttaagcacacttatcatcagctaacaaatcagtaaaaattagactaatatctaagtcattaagtctgctatgaagatgaagtgtgaaaatttgctaacttgtctttctccttgctattctctaagctaattgaggcaagaagctgtcttcaccactctctttctctcaaattgattgttattacattgaaatatatacatgtgtgtatctataacacaatgagaacaatgaaatgaacatctgtgctaccaactctaagcaatagagtatttaccaatacatcagtatgatcaatgcgtagaacatacccttccccatatcaccttcttcctccacttcaggggaagtcactttctgaattttatgtttatcattcccttgcttttcttcacagtgactataartgtatgcattccacttttagccacatatatcagtttcctgaaatcaaatgcttaactggaattatatgttgcaagttctgtgactctctctgtcttaaatgcttaactggaatacatattgcaagttctgtgactctctgtctctctcccccttgcttgtattatgtttttgggagtcatctacatttaggcatgatgctctggtctactcatttttattgctgtatagttttccattgcaggaatgcaccatgatttttccatcctcttcttgatggatctttgggtcatttttctttttacccttatataaaatgctgctgcgaaaactcttg

SEQ ID NO: 9193 - DNA, 1002 bp, Homo sapiens
acaaagttaaggctatgctttgaagccttagctacgtgaggttttttgttttttgtgtgtccctgatatggtttggatgttttgtcctttccaaatctcatgttaaaatgaaacccccaatattggagacagggcctggcaggaggtatttggatcatgggagcggatccctcgtgaatggctttgtgccaccctcaaggcgatgagggagcttttgctcagttagtttacacgagatctggttatttaaaaagcatggtactttcccttccccttttgtgcctgccrttaccatgtaatacactgggtcctgtcaccttctgccataattgtaagttccctagggccttcaccagaatcagatggcagcaccaagattcctgtatagcctgcagaatcacgagccaaaataaacctcttttctttataaattacccagcctcaggtatttctttatagcaacacaatagcagattcacatagtccctaaatttcactgaagcccagaggaggcaggatcagggttaaggagagggtgtgagggtggctgagcgtactccttccctacctccccaagtagtttggttgttaacttctgattctcaactttagatgcataactcagaagccccctagaggctcagttccctcctctatgaggaggatggagctaatgagactgacctgtgttttaggattgtgctgaggattgagtgaactaatggatggaaagaactctttcaaagtactgcacacgtacaagatattatatttaagtgcctaatgactaattttacatgaaaataacaatgttatttcatactttcatggaattttccagatttttgttagacaagttaatcttctattctgttatctactctgtcatccgaaagagagactcttaacctcctcaggaaatttagtgaacaataaaacaagacataaaggcacaatctggatatctatggtccaaagacttgtctaaagtatgaacttctt

SEQ ID NO: 9194 - DNA, 1002 bp, Homo sapiens
acaaagttaaggctatgctttgaagccttagctacgtgaggttttttgttttttgtgtgtccctgatatggtttggatgttttgtcctttccaaatctcatgttaaaatgaaacccccaatattggagacagggcctggcaggaggtatttggatcatgggagcggatccctcgtgaatggctttgtgccaccctcaaggcgatgagggagcttttgctcagttagtttacacgagatctggttatttaaaaagcatggtactttcccttccccttttgtgcctgccattaccatgtaatacactgggtcctgtcaccttctgccataattgtaagttccctagggccttcaccagaatcagatggcagcaccaagattcctgtatagcctgcagaatcacgagccaaaataaacctcttttctttataaattacccagcctcaggtatttctttatagcaacacaatagcagattcacatagtccctaaatttcactgaagcccagrggaggcaggatcagggttaaggagagggtgtgagggtggctgagcgtactccttccctacctccccaagtagtttggttgttaacttctgattctcaactttagatgcataactcagaagccccctagaggctcagttccctcctctatgaggaggatggagctaatgagactgacctgtgttttaggattgtgctgaggattgagtgaactaatggatggaaagaactctttcaaagtactgcacacgtacaagatattatatttaagtgcctaatgactaattttacatgaaaataacaatgttatttcatactttcatggaattttccagatttttgttagacaagttaatcttctattctgttatctactctgtcatccgaaagagagactcttaacctcctcaggaaatttagtgaacaataaaacaagacataaaggcacaatctggatatctatggtccaaagacttgtctaaagtatgaacttctt

SEQ ID NO: 9195 - DNA, 826 bp, Homo sapiens
agtgcatacccaatagcaaaatattttcctctttactctcattttttttttaactaatgtctccaacagattagggaggccaattttaaaatcatttttgcatacaayggtcaaacaaacagatcccatgaccccacagcccaaaccctgccagggacaacaagttgcagcccaaggcagagggggtttcttctgtttaaagttctgtgtaaattcccacttcaaggccaagaacaggccccttttaagagccaagagtgttgaggaaaataaaggctttattgagccaaaaggtctttttcttgaatgctcccttttaaaaggcaattatttcttacaatgggaatttacagcttacttatattagcactcttcgataagataagaacgaccagggcatgggtgaccggcccaacacttatcaagtgaatgtccatgggagggggagatgcagagtcccacctgggccaagaggccgcatcaccatctgctggtggctcctgcttttacagtcatgagccctacaccatctcccatctcctctgtagcaggcagcccattagaattcctgctttattacattaacattctcacagcttagtttggctgctcaaggacaacccttgttctttcccaccagatcttctttccaaccttcattctttcccacagactcgtaatcaggccactaacgacagcggggagcgtaaaagttctcttccctacccacctcgcgtgatgcggtgacacagaatgaaattcacaacacacatggagaaaaggaaaacaaccaatccttccccagaacggaacagctaagagccaa

SEQ ID NO: 9196 - DNA, 814 bp, Homo sapiens
tcttgcctcagccacccaaagtgctgggattacaggcatgagccacagcacccagacattttgggtttttttaataggatagcractcagggaaagacttgtttatgggtgattagtctcaccttgttgtgcctatattccactggtaggaggaggtattgaatataaagttactctacaagtacaaattccacatagcattcctagaaacaggatttggcacacaataagatgatttactgtttgtatctttaaaaaaatcacagtctgtaccttaatatttaatgtacatgattgtttcatgtggatttgtcacatgaaatatttcttgagtgaataaatgagccgttttaaagctgagagtctcaaatcttctaatagtttgtttgtaacatcagctaaaagtatccaagcaggtccaagaataatagaaagcttcctgcaagcaggaaattccttagacagttcatgtctaataccaaaagtgcatacccatttcttctaggagtgtttaaaataatcaattaaaaaaaaactaacattgcattgctttctagttaaatgaacactttaccttttaaatcttcaaataaaatttcttcctctgaaagctatgctgtgttaactctgctcttcttcttcacccactatcctcctccttgccagcaccctgcaaagagcttgtgctgcttgtgaagaaatagaatcaaagtctttcaaagctatcttaggcccaaggaaaacatgagccccgcgggttacccaagcctccactaacttttgtctgctttcctgctgcaacatctgtctccat

SEQ ID NO: 9197 - DNA, 814 bp, Homo sapiens
tcttgcctcagccacccaaagtgctgggattacaggcatgagccacagcacccagacattttgggtttttttaataggatagcaactcagggaaagacttgtttatgggtgattagtctcaccttgttgtgcctatattccactggtaggaggaggtattgaatataaagttactctacaagtacaaattccacatagcattcctagaaacaggatttggcacacaataagatgatttactgtttgtatctttaaaaaaatcacagtctgtaccttaatatttaatgtacatgattgtttcatgtggatttgtcacatgaaatatttcttgagtgaataaatgagccgttttaaagctgagagtctcaaatcttctaatagtttgtttgtaacatcagctaaaagtatccaagcaggtccaagaataatagaaagcttcctgcaagcaggaaattccttagacagttcatgtctaatmccaaaagtgcatacccatttcttctaggagtgtttaaaataatcaattaaaaaaaaactaacattgcattgctttctagttaaatgaacactttaccttttaaatcttcaaataaaatttcttcctctgaaagctatgctgtgttaactctgctcttcttcttcacccactatcctcctccttgccagcaccctgcaaagagcttgtgctgcttgtgaagaaatagaatcaaagtctttcaaagctatcttaggcccaaggaaaacatgagccccgcgggttacccaagcctccactaacttttgtctgctttcctgctgcaacatctgtctccat

SEQ ID NO: 9198 - DNA, 634 bp, Homo sapiens
gtggtcttcctccaccctgatctctgctgctggaaagattagggctaagtctggtcaaggtctcctaaccccaagaagaccaatatacccatccttgaatgctgttgaactgcgggaagtggagagactaggatgtttatagctatgttgaatacaggcatccaaaaaataaaagatatggtgggtagagaggtggaggaatataggatgggactgggagggatgtaaaggggtccatggaagagtctgtgggcccaggtattctctagacacttggaagtacacagatgaggaggcataaagaacagagtctcagtggctgctccagaaaccccagccacccattccctcacctcctgctgagagacaaccagacctctggaaactgtggttgtaaccccagaaatgctgaatgtaacctatagkgtttgagcgatggcctttcagccatttgccatggtagatggtcgagtctaccttatccatctcaccttcttggaccatgagtactggaaacagaacaagtctgtaactgatgaggatctttgttgatctgagtctttggacaaagtgggcagcgtgcaaaagcaggcagtctccaggtggaggaacttcattggagttctggacttag

SEQ ID NO: 9199 - DNA, 634 bp, Homo sapiens
gtggtcttcctccaccctgatctctgctgctggaaagattagggctaagtctggtcaaggtctcctaaccccaagaagaccaatatacccatccttgaatgctgttgaactgcgggaagtggagagactaggatgtttatagctatgttgaatacaggcatccaaaaaataaaagatatggtgggtagagaggtggaggaatataggatgggactgggagggatgtaaaggggtccatggaagagtctgtgggcccaggtattctctagacacttggaagtacacagatgaggaggcataaagaacagagtctcagtggctgctccagaaaccccagccacccattccctcacctcctgctgagagacaaccagacctctggaaactgtggttgtaaccccagaaatgctgaatgtaacctatagggtttgagcgatggcctttcagccatttgccatggtagatggtcgagtctaccttatccatctcaccttcttggaccatgagtactggaaacagaacaagtctgtaactgatgaggatctttgttgatctgagtctttgracaaagtgggcagcgtgcaaaagcaggcagtctccaggtggaggaacttcattggagttctggacttag

SEQ ID NO: 9200 - DNA, 822 bp, Homo sapiens
gttcatgtcctttgtagggacatggatgaaactggaaaccatcattctcagcaaactatcgcaaggaaaaaaaaccaaacaccgcatgttctcactcataggtgggaattgaacaatgagaacacatggacacaggaaggggaacaccacacaccggggactgttgtgggttgtggggaggggggaggagatatacctaatgctaaatgaggagttaatgggtgcagcacaccacatggcacatgtatacatatgtaactaacctgcacattgtgcacatgtaccctaaaacttcaagtataataataattttaaaaaacataaataaataaaaataaaaataactaaaaaaaaaagcggggggtgttggctaggcgtggtggctcacgcctgtaatctcagcactttgggaggccgaggcaggcagatcgcttgaggccagcagtttgagaccagcctggccaacatggtgaaacgccacctctactaaaaatacaaaaaagtagccaggcatagtggtgcaggcctgtagtcccagttactgaggaggctgaggcaggagaatcacttgaaccctggaggtggaggttgcagtgagccgagatcactccattgctctccagcctgggtgacaagagcaaaactctgtctcaaagataaatagataaataaataaataaaacgagtttaaagaaaaacaacaaaagaggatttgtagttgcattttccatctcycatccctttgggttttgttgacataggctaagttccttgttcagagtgaccccgagtgacccttcctccgtgaccacagctctcaca

SEQ ID NO: 9201 - DNA, 694 bp, Homo sapiens
aatttgggaggaaaaacacatgaaaattcaaaaaggtgttgaaagtaatttattgcatggggtcttgacttacttttatgcaggtttcttaattttcactcagaattgtcatttttttttaatttttaaataatctttatgaactgaaaaccattgtgttttatttctaatttctagagagaaataattaatgttactaccagaattctcttatttattgttctttgaggcccaagcagaggcaaaaccccttaagggcctgcaacagctagtaattactgtgaaagaaaaaaagcaagaacaaaaatttaaaaacttagggtctgtgatgttgagtttctagtatgtcaactgagctaaggttgaactatgtctcctcctgctcaagaggtggagaggaggtgaagcctggttctttctgtgttctgaagcttgtgcagagcctgtggtgccrtaacagcactcccatttcgttgcttatctcctggcccacccttggtggtacagcagtaggactgcagctcctgcagctcacactctatctcctcctccagctcacactctatctcctcccccagctttcctgattctgcgccagataagtgatccacacacccaggccatccaagttggaggcttagagaagtaagcaaccgaggcaagttccagttggtcctcatggctcaccttcaca

SEQ ID NO: 9202 - DNA, 694 bp, Homo sapiens
aatttgggaggaaaaacacatgaaaattcaaaaaggtgttgaaagtaatttattgcatggggtcttgacttacttttatgcaggtttcttaattttcactcagaattgtcatttttttttaatttttaaataatctttatgaactgaaaaccattgtgttttatttctaatttctagagagaaataattaatgttactaccagaattctcttatttattgttctttgaggcccaagcagaggcaaaaccccttaagggcctgcaacagctagtaattactgtgaaagaaaaaaagcaagaacaaaaatttaaaaacttagggtctgtgatgttgagtttctagtatgtcaactgagctaaggttgaactatgtctcctcctgctcaagaggtggagaggaggtgaagcctggttctttctgtgttctgaagcttgtgcagagcctgtggtgccataacagcactcccatttcgttgcttatctcctggcccacccttggtggtacagcagtaggactgcagctcctgcagctcacactctatctcctcctccagctcacactctatctcctcccccagctttcctgattctgcgccagataagtgatccacacacccaggccatccaagttggaggcttagagaagtaagcaaccgaggcaagttccagttggtcctcayggctcaccttcaca

SEQ ID NO: 9203 - DNA, 489 bp, Homo sapiens
tgacattcataactgtctgtagatggaatagcagacctgaagattggctatttctttgtgactgaagttctgaattttttgtgctgttatagagtaaatttatgtattgttgagtgtggttctggaaggtgatgatttttcagcttgattctctaagtatactgtgtgggtttttggctttaaaaaggttaagaacttccctttacataatgaaaacccaacaagtaaatattatttgttagtactttaagatgtagattaatcatttaaaaagtcattatgttaaatattctgaggaccatactgttatttctttccttctccctctagtgggcagaaaatattcttaaaatatagcatggaataatttattgctattgggtataccataatatacagtctcagtctcagcttttttgaawactaaaaatgttaacatttcagaatcattaaagcaaacgctttactcctttctaggcataatagtgg

SEQ ID NO: 9204 - DNA, 858 bp, Homo sapiens
actcaaacagaaatgtgaaaagagcatgcatgtggagcactgatgaagtcacaaaggctagacagtgggtgctagatgagaatggcaaaattcgaggagggaactcagaagcattgcaatggaatcaaacttaacaaagtgattatggccaaaagtcaaaaagcaaggcaaaaaagtctcaaaaagtttcatcgcccttgaaaatcttttatgaatgtgccatgttggtaccatgtgccatctctcaataaattcttcccaggcaggcttttctcccacctttgtggagaaggctgttccttcagttgagtaccagatgaaaagaattggcttccactttgaattcatggtgtactaggagtacatctgttgaaacactggcattccattcagtgtggtgagatgtccaccccatgaaaggcctgaaaraactgtcaagtaaggtgacagagatggaaaggagagatttagagaaaaaatgtaggtgataaaattgacagccctcttaagcctttgtgacaatatccaacgctatgtcctctatccctcccttatatacctcctccaagctacaactcaccattctaaatcactaatctgataatggtaaacgcctttaaacacttatggccaaacaataatcttcacactttcagctttgattttctaaaagtcaaatattaatgcctgacagaagaatcaagagtaacaaaattgcaatttttttattttattttacttttattattattattattattattttgagtgggggacagggtcttgtgctctgttacccaggctggagtgcagtgacacaatgatagctcactgtaacctggaactcctgggctcaag

SEQ ID NO: 9205 - DNA, 858 bp, Homo sapiens
actcaaacagaaatgtgaaaagagcatgcatgtggagcactgatgaagtcacaaaggctagacagtgggtgctagatgagaatggcaaaattcgaggagggaactcagaagcattgcaatggaatcaaacttaacaaagtgattatggccaaaagtcaaaaagcaaggcaaaaaagtctcaaaaagtttcatcgcccttgaaaatcttttatgaatgtgccatgttggtaccatgtgccatctctcaataaattcttcccaggcaggcttttctcccacctttgtggagaaggctgttccttcagttgagtaccagatgaaaagaattggcttccactttgaattcatggtgtactaggagtacatctgttgaaacactggcattccattcagtgtggtgagatgtccaccccatgaaaggcctgaaaaaactgtcaagtaaggtgacagagatggaaaggagagatttagagaaaaaatgtaggtgataaaattgacagccctcttaagcctttgtgacaatatccaacgctatgtcctctatccctcccttatatacctcctccaagctacaactcaccattctaaatcastaatctgataatggtaaacgcctttaaacacttatggccaaacaataatcttcacactttcagctttgattttctaaaagtcaaatattaatgcctgacagaagaatcaagagtaacaaaattgcaatttttttattttattttacttttattattattattattattattttgagtgggggacagggtcttgtgctctgttacccaggctggagtgcagtgacacaatgatagctcactgtaacctggaactcctgggctcaag

SEQ ID NO: 9206 - DNA, 831 bp, Homo sapiens
agtatcaatgttatcctaatctctttgaaaaaaargaaaactatctcttaattacactacaatcaaatcgagtcttcaattcttatatattcattcagaattttaaaatctctctcacgggaggaaatgtaaaaggaaagttttcaagacctttttgtaccttaatatccttttcaatttctaatgtaaaatgtattcgtcctgataacgatgctgtgaaataaagaccaattcaggaatgtaatgaagtttaaaagtagctcctctttttctgcattgagaacaattttgttgattcaaattagaaacttctagttgggggcaggagaaaaaggaggaagaagaaagaagcaagcaatctgtgacctagcgctgattattggctgacttctaataaaggaagaagattcggatttgtggtgccaaaacaaaagtaataaagtggaaaatgaatttttgcaatccccacacatcattgaatttatgtattgtcttctagacaaagtaatcctacaaaaggaagttctatttcaaggattttcactccttttccatctctgaactgaaaagaaacgaggtgcagtttgcagcttcaaaatatgtaaataatctataattcatatcagtgttccgattaaaaatttcctaatctgttctttgctccttgcaagtttcattgaagcagtgccccctaacaggcaaagaaggtacgtggtaaaattcagctcctggtagagtgtccatcaaccagctctggtgggattgctgtgaggaatggagcgccccctggaggccagtcatccagccagtctgtacccaccgattagagca

SEQ ID NO: 9207 - DNA, 1548 bp, Homo sapiens
actttacaaaaagtcttgtctgcaaactggtagtgcagctaagtttataaactatcccataagattactgcccttggacatgagctcactgatttaagatgtgaggcaggtacctggattggaagtaatatttttttggaatgcttccttggcaatgaaaaggccaccctttaattaaacaatggtcaggtagctggctagttcccttagggtatcacgtttgaccaccatttctggcaaattggacattcagtagtagcagcagttaactaagctcatgtataatgatcattcttgttaccataacaactttgtttataaacctgaagtcccgggccaactgtggaaggagtatgactcatattcacattcagcttatacatctggattaagcctcctcttatgtggagtagagtgtattctggttagaatccacatgggatacaaatatttttatgatttggacttttttcaagtattccatccacatactcctttccaagcttacttgtctctaattcttcttcttcttcttcttttttttccaattctcaatctccctctttcctaatttatactaacaattgcccaactacccaaaataagagttaattcttacatttcagtgggtggacaagaaaattgttctgctcaatgctttgtccactaggaatattacaagagttatactatgtaataacaactcaaaagctttcagtaatgtctctctcacttaatactgagaatatgtaaacatgtgggtatgtctttgtatgtgtctatgtgtattaacatgcaccattaggatccaaatagaacattatataacctaaggaaaaaaatcatcaaaagaaataaactgaactttgaaatcagagaatttacgtgattgtgtttctagcaatagtcaagtaatttacatatacaagcagatgacagaaaatccacaattaagatacgaaaaagcgaaaagtgatcttcttttacagccacaaaacaagcatattggatattagcttaccagtctgtcactcaagatttttgacagcttaaagtcaatgcatccgaaggcaatctaasccctaagagctatggaacaaattctttgaattaaattttacttttattctagttcttactttcccggctcacaacttattttaatcttattatattttttaagctctagactcattgattactcttaaattatgtaaatgcttcaaataatcttaacatatcacttctcttagggagatttttttcaggccaatatgttctaatattttaagatatcttatttagagtggatgaatcacaactgccaatgcccagaaaaggtaaagaattcccaggcagaagggcaataacagtggtgtctccacatcttagttgttcttttctctcccttgagccattctacagtaattccattctgtgctggtagagagtccctgctcagaaacactgtccaaatcaagaaagaataagaaaagtaagatcctgtagtgaatagttttttggtaacatctttactgagatatataa

SEQ ID NO: 9208 - DNA, 819 bp, Homo sapiens
ggggatcctcctgcctcagcctcccaaactgcagggattatagacgtgaaccacatttaacctgtcaccattttcaattttgaagagagaacatgaaaatggacactctcctacaatctgatgaaatctggcacacactttttggttatctggcagtttgtctcaaagacaaagtacatgtgggagcatctacatctatatacatacatagcaaaattacacctccagaaattcatcctaaggatcatcgtgakagtgcacatttgagaactggaaaccactggaatgtccagccacaggagagtggataacgacttcaacttccacacagtggacagggcagacactctcctaactccactacctgaatggccaaattaactgacattctccactctcctataaaacaccggtggctgacaggaattttggataatctgtatatctgtgctctgaaaaattcaacagcatgctgcctaagactcagccacgctcattctcaatacccatttatgccagttgtatttgtcattaaaagcctggaggccgggaacagtggctcacctctaatcccagcacattgggaggccgaggtgggtgtattattacctaaggccaggagtttcagaccaccctagccaacatggtgaaactccgtctctactaaaaataaaaaaatcatccgggcatgctggtacactcccagcactttgggaggcgaggcaggtggatcactaggtcaagagatagggaccatcctggccaacatggtgaaaccccatctctgctaaaaaaacaaaaattggccgggtgcggcgg

SEQ ID NO: 9209 - DNA, 760 bp, Homo sapiens
  misc_feature (1)...(760): n = A,T,C or G
aannnnnnnnnnnnnnnnnnnnnnnnnnnnnnnnnnnnnnnnnnnnnnnnnnnnnnnnnnnnnnnnnnnnnnnnnnnnnnnnnnnnnnnnnnnnnnnnnnnnccatgtctactaaaaatacaaaaagtacccaggggtggtggcatgtgcctgtagtcccagctactcgggaggctgaggcaggagaatggcttgaacccgggaagtggaggttgcagtcaactgagatcgcgccattgcactccaacctgggcaacagagygagactctgtctcaaaaaaaaaaaaaaaaaagaaggtccagcagcttaatttccacctcctgcaggaacgctttgtgactgccaatcccatttgtagtcagcgtatcatggttaataatcctaattattactattaattaatattccaggtaccatatgctaggtagtgtgctcagtacttaacatgcttattttatttaatctacactgtgaagtaaatattattatttccatttaacagttgatgaagcaattttttttgagacaaaaaaaatatatatatatttctctgccaaccagtttagagtgcagtggcacaatcatagctcactgcaggcacaaactcctgggctccagcagtcctccttcctctccttgttggacagctgggactgcaggcacatgtcaccatgcctgactaattttataatttttatttttagtagagacagagtctcactattttgcccaggctggtcttaaacgcctggcctcaag

SEQ ID NO: 9210 - DNA, 674 bp, Homo sapiens
attacaggattagtcttggttctaatttatattattaaaaagcaaatcacttgccaggtttaaaacttaaactaatttcataacaaatcctgacatcaaggtgaggctaccgcatggtgtagtcaactgtacctacaattctcatttgtggagaaaccccaaggaacctacaggaatggaggctaggcatgcagtaccacgtcccacaccctcacaggcctggctgacccaggctggtcttaccagaacagacttttggttagcctggagcctggagatggcattttcattcaacttgagtttccgctccaagtctaactgggtgcactggagttcagcctaaaagtggaaagcagagaattaaggaggaaggagcccaatgcacacagaaggacacgggcactctccagccctgacatccccgcccttcttccctggaaagaagtttaacttctgtggctgatctcagaaaccagccgggaggcacgaagggttggcggtgagcccgtgccctcctggggctgcagtcagcatgagtcagcgaaaatacagtgagcacggatgccgtgctgctcaccatttcaagcattttgtggattaccccacaccatccttgccatacccatactagctgtaaaccagaaataaaatcctaarcccccaacaatctgaat

SEQ ID NO: 9211 - DNA, 696 bp, Homo sapiens
cacacatatacatgtacacgcacacacacaagggcacaaacacacacaggcacacacacaggcacacattgctccagagctcacccctcagcgccctgaccccctggctgcctggggtgctgtttggccatgcaggctgctgaccgccaaggcctgctggcccacggacagtgtccagcctggggtccccaggcagccctgtgacaagaactgcatgctgccaagaagcctcccaggtggctttcccagaggctctcgctgctgtgacagtgtcattgagaaaggacatctggaggagcctctgaragcaagtggttcccagatcccagcatgcgcacccagacagatacatcctccccttcagactccacgtggaaaggaaacacacacaaaacaatggcaggtcaggacagggggaccctgcaggggacgcggaagtgtgtgcgtcctcctggaacagggtatgagcccggcctcaagcagaacagtaatgcagcagacatttgtctctgggactggaggcctcgctccacaaagccagctcaggcagcagcctgtgcccagagaaggctctggccgtattctcagagggggctccgtcctccactttggggttttctggtggtgggccctgggcaggtgtgtagctttcccagcctgtctcctcttcctggccttcttgcctgtttggggatc

SEQ ID NO: 9212 - DNA, 696 bp, Homo sapiens
cacacatatacatgtacacgcacacacacaagggcacaaacacacacaggcacacacacaggcacacattgctccagagctcacccctcagcgccctgaccccctggctgcctggggtgctgtttggccatgcaggctgctgaccgccaaggcctgctggcccacggacagtgtccagcctggggtccccaggcagccctgtgacaagaactgcatgctgccaagaagcctcccaggtggctttcccagaggctctcgctgctgtgacagtgtcattgagaaaggacatctggaggagcctctgagagcaagtggttcccagatcccagcatgcrcacccagacagatacatcctccccttcagactccacgtggaaaggaaacacacacaaaacaatggcaggtcaggacagggggaccctgcaggggacgcggaagtgtgtgcgtcctcctggaacagggtatgagcccggcctcaagcagaacagtaatgcagcagacatttgtctctgggactggaggcctcgctccacaaagccagctcaggcagcagcctgtgcccagagaaggctctggccgtattctcagagggggctccgtcctccactttggggttttctggtggtgggccctgggcaggtgtgtagctttcccagcctgtctcctcttcctggccttcttgcctgtttggggatc

SEQ ID NO: 9213 - DNA, 788 bp, Homo sapiens
ttccaatatttttattamatttatttagtattttgaatagtttgtctgtgtttgctgtgtattaccccaaaaagtagcagtggtttaaaataataatcatttatttcacttatgatttggtggactgcagctcttctggtctaggccaccctggctgattgctgggttttctcagatgtccgtagttagtggttggttggcagctaggtgatttcagatagcttcattcatacgtctaacagtaggcaggctgttgtctagaatcataggaggcagctagtctcttatcatccagaaggctagcctaggtttattcacatagtggcagatttccaagagcagactgaggtctagccctaatccacaaacacttttcaagcttctggttgtgtcatctttgctaatgtttcatgaccaaagtgaatgatatggccaatccagaattgaggagtgaagaaaacagaccttacttcttgatgataggatctacaacattacattacgagggcacagatgtcagattaggaagaaattgtggccctgtgttcaatctaccacaaggagatgatacaatcacatagttttagatagatacaatgttagaaatcaataaccatcatatatacaaacaacaaccagctaggagagaaaataaaatattttactttcttttttttaatttaatttaatttaatttaatttattattattatactttaagttttagggtacatgtgcacaatgtgcaggttagttacatatgtatacatgtgccatgctggtgcgct

SEQ ID NO: 9214 - DNA, 815 bp, Homo sapiens
ccattataatcttacagagccactgtagtatataccattcatccttgactaaaacatcgttatgcagtccgtgactatactaacataaaataattacaagtgaaactttacaaaatgccattcataagtgcattcaaaaaaccaaagtacctaagaataaatctaattaacagtatgcaagacttttcacataaaactaccaaactacctggagggaaattaaggaaaatctaaaataaaatgaaggaatctaagaagttcatggattacaaggtattaacttcccaaatctctccaaattgattgaaagacttaataattccaatcaaaatgcaagccagtttactgkgtggggagaaggaagaacccgacacattgattttaaaacttctatgggaatgcaaagtgccaacaatagtcaagaaaattttgatgaccatttttttaaaaaaatatcacttaccctccagaaattatgactttttataaggctgaaagtattgaagacatttcagtattgtggacaaggataaaagaccattgaggcagagcagagaatctaaaatgaacacaaacccttgatttatgtacaacaaaggtaacacagaagcaaggcagaaattgatggtcatttcaataactggtataacacatctatatgaaaaaaagtgaagcaattaaagatagcaacatgaaaggaaaaacaataaaagcatcaagaaggtaagagaaaatatacctaacagtagatttgaccaagatttcttaagctagctacaaaaatcaccagccacgaagaaaaagactgatgaact

SEQ ID NO: 9215 - DNA, 815 bp, Homo sapiens
ccattataatcttacagagccactgtagtatataccattcatccttgactaaaacatcgttatgcagtccgtgactatactaacataaaataattacaagtgaaactttacaaaatgccattcataagtgcattcaaaaaaccaaagtacctaagaataaatctaattaacagtatgcaagacttttcacataaaactaccaaactacctggagggaaattaaggaaaatctaaaataaaatgaaggaatctaagaagttcatggattacaaggtattaacttcccaaatctctccaaattgattgaaagacttaataattccaatcaaaatgcaagccagtttactgggtggggagaaggaagaacccgacacattgattttaaaacttctatgggaatgcaaagtgccaacaatagtcaagaaaattttgatgaccatttttttaaaaaaatatcacttaccctccagaaattatgactttttataaggctgaaagtattgaagacatttcagtattgtggacaaggataaaagaccattgaggcagagcagagaatctaaaatgaacacaaacccttgatttatgtacaacaaaggtaacacagaagcaaggcagaaattgatggtcatttcaataactggtataacacatctatatgaaaaaaagtgaagcaattaaagatagcaacatgaaaggaaaaacaataaaagcatcaagaaggtaagagaaaatatacctaacagtagatttgaccaagatttcttaagctagctacaaaaatcaccagccacgaagraaaagactgatgaact

SEQ ID NO: 9216 - DNA, 547 bp, Homo sapiens
aggctttttgttagtagaaatgaattggagagatattcccaaatatgatatatgctgcttccaaaatgtaaaaaagtattgctccaagtgctgtgagtggggatagttgcaaggtgcaccaaatcgcccataccttagagatctacagattactgttaccagaagggggtcctgatccagaccccaagataggattcttggatctcacacaagaaagaatttgggtgaatccgtaaartgaaagcaagttttattaagaaagtaaaggggccgggcgcagtggctcatgcctgtaatccctgcactttgggaggccgaggcgggcagatcacgaggtcaggagatcgagaccaacctggctaacacatgaaaccctgtctctactaaaaatacaaaaaattagccgggcgtggtggtgggcgcctgtagttcccgccactcaggaagctgaggcaggagaatggcatgaacccgggaggtggaggttgcagtgagccaagatcgcgccactgcactccagcctgggtgactgagcgaaactctgtct

SEQ ID NO: 9217 - DNA, 419 bp, Homo sapiens
gggtagtgataagccctggcatatagtaacatagcagctactaagattcttacatatggaaaggaatgaggtacagatggaaacagaagtattgagtcgtttggtagccatggcactttaaaagtacgtaataataattatatagctttggagatggctagcttttgttaacttgtttagatgccttggcaaaataaaaatgacaagctcaagtcagcctgtcaattcaaggcacaatatgaataccccaagacctccatggcaccatttawagagacccctatattctccagccacaaaggcaatattgaaaatcaggcctagatccaactgtaagaatatcagagctgcaaaggagactgaatagagtttgacaagtgtcctatgtcaaagccaatcccctaacaggaaaagagtgg

SEQ ID NO: 9218 - DNA, 822 bp, Homo sapiens
acagtcacaccttgctgaaaggaatgctgagaaggtagagaacagaattgttgtaagtggcttttaacagtcatgatccattccctgggctcatggccactccccctcccaccctaaaaaagaaacaacataggattctactgacaagaaagaataggcaaaaaagaagctatatggaaaatatrtctgccatacgaaccaaagtaagcaggttaaaatgttaaaaatatagttgaaactggaactcacatacgttgcttgtggaaatacaaaatgatacagacactttgaaaaacagtttggcagtttcttatgaaggtaaaaatacactctctggatgacttacctactccactcctggacagtttcctagataaaataaaaatatatgtttacctcaaaacctgtattgcagatgttttatagctaccttatttttaatctccacaattggaagcaacctaaagatttatcaatggatgaactgataaacaaaccatggtacatttacccaatgcactatacaactcagcaatataaaggaacaaactactaatatgcaacaacttggatgaatctcaaatgcattatgctaagtgaaagaaacccaattaaaaatcatatattcatgggccagggacagtggctcacacctgtaaatcagcactttgggaggtggaggtgggtggatcacttgaggttaggagtttgagaccagcatggccaacatggtgaaaccccgtctctactaaagatataaaaattagccgagtgtggtggcacacacctgtagttccagatacttgggaggatgaggcagga

SEQ ID NO: 9219 - DNA, 822 bp, Homo sapiens
acagtcacaccttgctgaaaggaatgctgagaaggtagagaacagaattgttgtaagtggcttttaacagtcatgatccattccctgggctcatggccactccccctcccaccctaaaaaagaaacaacataggattctactgacaagaaagaataggcaaaaaagaagctatatggaaaatatgtctgccatackaaccaaagtaagcaggttaaaatgttaaaaatatagttgaaactggaactcacatacgttgcttgtggaaatacaaaatgatacagacactttgaaaaacagtttggcagtttcttatgaaggtaaaaatacactctctggatgacttacctactccactcctggacagtttcctagataaaataaaaatatatgtttacctcaaaacctgtattgcagatgttttatagctaccttatttttaatctccacaattggaagcaacctaaagatttatcaatggatgaactgataaacaaaccatggtacatttacccaatgcactatacaactcagcaatataaaggaacaaactactaatatgcaacaacttggatgaatctcaaatgcattatgctaagtgaaagaaacccaattaaaaatcatatattcatgggccagggacagtggctcacacctgtaaatcagcactttgggaggtggaggtgggtggatcacttgaggttaggagtttgagaccagcatggccaacatggtgaaaccccgtctctactaaagatataaaaattagccgagtgtggtggcacacacctgtagttccagatacttgggaggatgaggcagga

SEQ ID NO: 9220 - DNA, 842 bp, Homo sapiens
aatgtgcattgaaattccactggacaatagaagatgctgctacataaatataggatattatctgaatgcctcaaatccaggcaccacagttatcatggccacagcctcgactagaataatatgaaccctgtgaagagttgagaaaacccaacttatcactgacagcttgagcaactgcaatggtattcatccccctagccacatggagtctggctcctgttgtatccctggctaacaaaaagtaattcctgcagagccaacaatgcttgttatttccagtccctggatggaggagacagaactcaaacttatctcttgtattaaagtcatagacaatataggaaagatttgtggttaaatcttgagcagcccttgtagacacttgccaaataatgctgcctgtgaataggggcctaaagtctgccygtaatgaagcacagcttgaatttcacaaatatttgggcccactggtggaagaagccagagagcaagggcaggcccctttccaggtcagcgggagacctgaggtcagcacttaaaacctgttactgaattgctgattatactctttggacctggtaccaagtccctgtctatggggataactgtgtagagagaaaagtacattcctggggacaaacaacctaatctaggacatcctgacacagtgggatatttgtacatgtcaaagctgtcttttaaaagagatcctgtcttgtcaactgacacactcttaggattccagtctacttttgtactcagtttgaggaatataaattgagtactctgtttttaggcattaaaaaaacatcctaagaaaataattcatccatgcttacaaa

SEQ ID NO: 9221 - DNA, 1107 bp, Homo sapiens
tccccatttcaagatccttactttaatcacatctggaaagtcccttttgccatgtaaggagacatatttacacatttacacattccaggatgaggacctaaacatctttaggagctattattctgtctaccatagcaggcattaaattagtgatgtagggccattacgtctgatccaaactttatttggggtgagctacctctaggtatagattggaggtgggaatgtagatgrtgagtggcagggagcacagataagccctcaccataagctctctccctcataatagctttatcaatgataaagatgatatagattatttacttagctcctgtgtctatttctcaaataggtctgaaatcattcagggaaaagtggggtatgttattggcctccctataacttcaacagtgtgcatatgtaagagtttcttttttgctttcttttttatcttttaaatttcttttttactttctggaagttattggtagagaacatgagagtgtctttagggtcaacatctaattgaataattgctacctggggcacattgtaattcccattcccactagaaaattatgtattcttcaattgttgaatcagggaggcatcattatttcttgagaaagacataggagtcagagtgatgctgaaaaaaattcattccttatatatgatatacttttgaagttaaaagatatgtatcatatcttttatgatatgataaacctaaacctacagatgcaggtttagtaagtattgaatggagcttaggctttaggatccttgcttggacaagttccttccaaggccttccaaaggccccaagcgatatcttcacatactcacaggtttctacaaatgtattctttctctttcctttttttctttctttctctattcttctttctttctcttaaagaagctctataaaattagctctgccttgcacctccttattcttaaggctgattagagaatatggtctgtgaacttgctagaattcactctgaattggttagacccacagttcactccttgacctatatttgtttaatctagagcagtgttctcaaacttagcatgcctcagaatcacccagaagac

SEQ ID NO: 9222 - DNA, 1107 bp, Homo sapiens
tccccatttcaagatccttactttaatcacatctggaaagtcccttttgccatgtaaggagacatatttacacatttacacattccaggatgaggacctaaacatctttaggagctattattctgtctaccatagcaggcattaaattagtgatgtagggccattacgtctgatccaaactttatttggggtgagctacctctaggtatagattggaggtgggaatgtagatgatgagtggcarggagcacagataagccctcaccataagctctctccctcataatagctttatcaatgataaagatgatatagattatttacttagctcctgtgtctatttctcaaataggtctgaaatcattcagggaaaagtggggtatgttattggcctccctataacttcaacagtgtgcatatgtaagagtttcttttttgctttcttttttatcttttaaatttcttttttactttctggaagttattggtagagaacatgagagtgtctttagggtcaacatctaattgaataattgctacctggggcacattgtaattcccattcccactagaaaattatgtattcttcaattgttgaatcagggaggcatcattatttcttgagaaagacataggagtcagagtgatgctgaaaaaaattcattccttatatatgatatacttttgaagttaaaagatatgtatcatatcttttatgatatgataaacctaaacctacagatgcaggtttagtaagtattgaatggagcttaggctttaggatccttgcttggacaagttccttccaaggccttccaaaggccccaagcgatatcttcacatactcacaggtttctacaaatgtattctttctctttcctttttttctttctttctctattcttctttctttctcttaaagaagctctataaaattagctctgccttgcacctccttattcttaaggctgattagagaatatggtctgtgaacttgctagaattcactctgaattggttagacccacagttcactccttgacctatatttgtttaatctagagcagtgttctcaaacttagcatgcctcagaatcacccagaagac

SEQ ID NO: 9223 - DNA, 589 bp, Homo sapiens
acacacacacacacacacacacacactctctctctctctcactcactttgtctaggttctgtcacccactccctgttgtaacctttctctgtcctctctttccagaataagtttaggagagagacaagaactgcatgagtgcagactataggtctgaaatttataactttgtccttgtcacttctccttccaaasgtctcacctccaaaactcagatggagccagctgcttcaagatgcagacaacatcatctttttttttaaactatagtgcaggcaatcatggtttacaaactagtttgaagtatacaaactcaccttactcagctagatcggataagttacaactctacagactcagcatattaagttaaaaattgcttaaagcactgtgccaactcttcaatgtctttcttatttcactttctaggcagggcagcagatttcttctcagtcattttgaattgctctattttcttgtcattataatcttaattcttctatttcagtatcaagccatctatttcaaattattcttaataatgagaatctctggttctgcggaagaacactgggaaactgacagtcag

SEQ ID NO: 9224 - DNA, 1868 bp, Homo sapiens
gtggcgaggagtggtttaagttacacagcaaatttgtgaatatagtctggtgacaaataaccaggaaaaaaacccagtgttgctgtactttctaaaacagaattcatcagataaagcctgtcacaatttattgcaaatcacaggtagtatacataggtagaatgttgataattgatccattttatttccttctgagattgattacatcattagtttgcatcttctttctcctaaatctagtaggtaagtctgactttccaaatatctaatgggccttactcttcttggaaaattacagcatggaaggacaactcccactccttctctttaattctcccacccgaactcttcggaattgtctttcattcctgagtaccaagaccacggatccacagcgcccatttttttcggtatcaacagactgctcagtagcaacttcacatgctgaaaaagtttaagactagacatgctttataccaagtttaaaaatgtggttcttttcacctgaaccacagtgggaataaaagccttcctcaaattttacaaaggactccctgggttatggcctgaggtaggagcccctcaagggttctcatggtcccctctacacctcctacctcagcagttatgcatatataagcagtgtgctacagagatggggaacaaaagtgtcaggatcaaaactacctgattttaaacattaacctgggcaaattacttaatttttcaaattctcagtttctcattcatagttgaagacactaatatctccatagaacctttgtgtgaaataaataagcaaatactgtgcaaaatgtttagcacagtaattggcacatgggaacactttacaataagtgaagagaaaactgcaatccaatgtwcttcttctcacaagcctgtagaatgcctcgaggcagagactatgttttaatatctgtgcagaacataggaggcacttggttaatttggaagaaatgaatgcaagaatgcgtgcatttgtaaacaaaccatgaaactggatctcagataattaaataacttgttcaaagttagccattgttagaaaagctagaatttgagtccagatatatgttattttatgttgccagtcactcttctataacgtgaatgtgtcttcagtttctttagtttgtggatggttagcttttgcgttttcaagcatgattccttgagctctacaggcttggtgatgaaaacgccataaatccttgagacttgatattaaagtgttttggctcaattacctgcatgaatttacctgtttggtgaaggtgggggctcgtaccagaacagccaccagcagtgagaattaatctcccgagtcttaattaaaacagcctttggagaatacaactgcctcagaatgtgccagaaattcatttgaaagcttcccgattgtgatatttccaatgtcaagaaacttgggtgtttggaataagcttagaataagaacagcctcactttaagtgcttatcttaaccactaaaccatctgttcttcttccatcatggttctgaacagtacataagaacaggcattcctcttcctgttccattttgcatctgaacacgatctatttccaaagtagtttatttctctcctttccccatcaagtaaagcagaaactagctgtgaatatttcaacagaactgcaagaatttccacccctttttaatactacctttccaacacttcttccttaatctcctgttttaaactcataattatttcagtgaagatgttgattttttttcactattcacatctaattcattactgtgcctgctagttttttttcctaaacagtttttttgtgtctcccacttcctattcacttcatgcat

SEQ ID NO: 9225 - DNA, 1868 bp, Homo sapiens
gtggcgaggagtggtttaagttacacagcaaatttgtgaatatagtctggtgacaaataaccaggaaaaaaacccagtgttgctgtactttctaaaacagaattcatcagataaagcctgtcacaatttattgcaaatcacaggtagtatacataggtagaatgttgataattgatccattttatttccttctgagattgattacatcattagtttgcatcttctttctcctaaatctagtaggtaagtctgactttccaaatatctaatgggccttactcttcttggaaaattacagcatggaaggacaactcccactccttctctttaattctcccacccgaactcttcggaattgtctttcattcctgagtaccaagaccacggatccacagcgcccatttttttcggtatcaacagactgctcagtagcaacttcacatgctgaaaaagtttaagactagacatgctttataccaagtttaaaaatgtggttcttttcacctgaaccacagtgggaataaaagccttcctcaaattttacaaaggactccctgggttatggcctgaggtaggagcccctcaagggttctcatggtcccctctacacctcctacctcagcagttatgcatatataagcagtgtgctacagagatggggaacaaaagtgtcaggatcaaaactacctgattttaaacattaacctgggcaaattacttaatttttcaaattctcagtttctcattcatagttgaagacactaatatctccatagaacctttgtgtgaaataaataagcaaatactgtgcaaaatgtttagcacagtaattggcacatgggaacactttacaataagtgaagagaaaactgcaatccaatgtacttcttctcacaagcctgtaraatgcctcgaggcagagactatgttttaatatctgtgcagaacataggaggcacttggttaatttggaagaaatgaatgcaagaatgcgtgcatttgtaaacaaaccatgaaactggatctcagataattaaataacttgttcaaagttagccattgttagaaaagctagaatttgagtccagatatatgttattttatgttgccagtcactcttctataacgtgaatgtgtcttcagtttctttagtttgtggatggttagcttttgcgttttcaagcatgattccttgagctctacaggcttggtgatgaaaacgccataaatccttgagacttgatattaaagtgttttggctcaattacctgcatgaatttacctgtttggtgaaggtgggggctcgtaccagaacagccaccagcagtgagaattaatctcccgagtcttaattaaaacagcctttggagaatacaactgcctcagaatgtgccagaaattcatttgaaagcttcccgattgtgatatttccaatgtcaagaaacttgggtgtttggaataagcttagaataagaacagcctcactttaagtgcttatcttaaccactaaaccatctgttcttcttccatcatggttctgaacagtacataagaacaggcattcctcttcctgttccattttgcatctgaacacgatctatttccaaagtagtttatttctctcctttccccatcaagtaaagcagaaactagctgtgaatatttcaacagaactgcaagaatttccacccctttttaatactacctttccaacacttcttccttaatctcctgttttaaactcataattatttcagtgaagatgttgattttttttcactattcacatctaattcattactgtgcctgctagttttttttcctaaacagtttttttgtgtctcccacttcctattcacttcatgcat

SEQ ID NO: 9226 - DNA, 454 bp, Homo sapiens
catgcttgtccctcgttccttggcctgtagacggccgtcttctccctgtgtcctcacatactcgtccctctgtatctgtgtgtctgggtcccagtctcctcttcttagaaggtcaccagtcatactgaactagggcccaccataaagacctcattttaatgtaatgacctctttaaagaccctatctccaaatacagttacattctcaagtacyaggggttaggacttcaacatggaatttgtgggtttaagggcaaaaatcagcccataacaccatcattgtggggttgtctgtggtttgcctctatctacatagctatttaccatattatatcaacagaaggatcttagatgctgttggtctaggtgctgtttggtctatccaaatggatatccacacacagtgcagtttgctgccatccacacagctatttgccacattagatcagcagta

SEQ ID NO: 9227 - DNA, 781 bp, Homo sapiens
ctcaactttccagctctttttcagagcacttcctcacctaacccagctrgagcagtcatgctctagtgactccagatggttggaaggagccttgggcagctgggtggggaacgtaccttccatccgattgcactcaccatgggtggacaggtgccctctgtcaggatggctgtaaccagaagccaaatgggtggctcactgaggtaaaggcagccaacaaaaattgctgtggttccaattccaacattgaccctaaacttagatgatattatggcattgaccttgaaataactggccccttcctatgcaggtcatttcccttatcattgcataagggcttggcctcttcctcagacacaattctcctcaattccatatccagcttgagaaataagccatcaagaactacaatgtcttgtccagtaggttatctggagggctaccaaattccccttaggtggtagagttttctaatgccacagggaattacaggtaaacaaaggaggtggataggccaacttcctctaactcaggagtgctcctagaggggctgaccaagctttttccaagctagagctttccctgatgtatctgaccctttttaccatgtttcaagctgccagcatttctctctggatattgcagaagcctcttacttggtttacagcttctgccttcgtatgtctttgtatgtccctcatgacaaagtgattttgttgtttttgttgttgtaactagaagtcagctcaggtcactcactgcacagaatcctccaatggct

SEQ ID NO: 9228 - DNA, 735 bp, Homo sapiens
atcttgactcactgcaagctccgcctcccaggttcaagcgattctcctgcctcagcctcccgagtaactgggactacaggcacctgccaccatgcctggctaatttttttgtattttaagtagagacagggtttcactatgttggccaggatggtcttgatctcttgcccttgtgatccacccaccttggcctcccaaagtgctgggattacaggtatgagccactgcgcctggctgcttcatctgtatttacagccactccccatcgctcgaattatggcctgagctctgcctcctgtcagataaccagtggcattagattctcataggagctcaaaccctattgtgaactgtgcatgcgagggatctaggttgcaacctccttatgaaaatctaatgcctgatgatctgtcactgtctcccatcacccccagacgggactgtctagttgcaggaaaacaagctcagtgctcccactgattctacatgatggtgagttgtagaattatttcattacctattacartgtaataataattgaaataaagtgcacaataaatggaatgggcttgaatcattctgaaaccatctcttgccccatctgtggaaaaattgtctttcactaagccagtccctggtgccaaaaaggttggggatcactggtataggggacacagttaaacccattatggaacctgaaggaaaaagcatagggcaagatgcacacacaaatta

SEQ ID NO: 9229 - DNA, 808 bp, Homo sapiens
gatatattagttcctgttgttgctataacaaaccacacaaactcagtggcttaaaacaatacaatttcattctcctacagctctgggagccagaagtataaaagcaaggtgttgccaggcctgctaggctcaaayggggaatttgttcttggaggctttaggggagaatctgattccttgccttcagcttccagcggtacctgcattccttgacttatggccccttcgtccatcttcagagatagcaacggaatctcttcagaagtcagatctccctttgcctcccaagtgtagggacacctgtaattacaacggaccacccagaaaatccaggacactctcctcgtcttagcatcttggccaggtttcaggaattcagacatcaatgtctttgcaggggcaaagacaaccattggttatgcagcctaccagctcctattcactcagtctcccactctttctatttatcttttaattttatttatttatttatttattttttgagatggagtctcgctctgtcacccaggctggagtgcagtggtgcgatctcggctcactgcaagctctgcctcccgggttcaagcgattctcctgcctcagcctcccgagtagctgggattataggtgacaccaccacgcccagctaatttttgtatttttggtagagaaggggtttcgccatgttggccaggctggtcttaaactcctgacaggtgatgcacccacctcagcctcccagagtgttgggattacaggtgtgagccactgcgcctggcctattttatcttttaaataaaaggattaa

SEQ ID NO: 9230 - DNA, 1327 bp, Homo sapiens
ttactcagagtttgctatagcaagagagtcagccaccaatacttgcatttggcaggtattcaaatacagtcaggacagaggaaaagctttagagtggaaaaaagagaacccttgggtgtgccctgattaaagtttgttggccttgggaagctattggagagctaactagaagcagggcatcctttctgattagtttggggagcacatttggttttctcaggttgctcctgagttggaagcagagagcagggggttagaaaatagagaaggtatcagttgaccacactgtgactactctgggctgattgctgcagaggctaaggtttggcttcctgggtttcctttgtcagtctgagttttattatcagatatgacctggccagtgtttgtatattcactcactttctggaaataaaaagttcagtataaggaggaatagaatggtcaaaagaggaatagaatggtgagagatgagcaaggtaagcagaagccaaattatgcacaatcatgtgttttctctctgtctgggtaagtgggtatttttgacaccatctcatttattttgcaaactggaatgtactgtgaatcatgcataacaactccatatttggaagacacacttctgtgctatttctcacttggtagcagaataactcatcctcyccccagagatgtccgttctctaatccgtgaaacgggtgaacatgttaccttccatggcaaaagggacttggcagatgcaattaaggtatggaccttgaattgggaagagttccctagagtgtccaggtggatccaatataactacatgagtttttagaagtggaagagtaagacagaagagtgggtcagagagatgcaacaacggaagaagaggaggagaagtggcagcttgagagaaactcaacccactactgctggctttaaaaatggaggaagagggccaggcgcggtggctcatgcttgtaatcccagcactttgggaggcaaagttgtgcggatcacgaggtcaggagtttgagacaagcctgatcaacatggtgaaaccccatctctaaaaaaatacaaaaattagctgggtgtagtggtgcgcgcctatagtcccagctgctcaggagtctgaggcaggggaatggcgtgaacccgggaagcggagcttgcagtgagccgagatcgcaccactgcactccagcccgggcaacagagtgagactccatctcaaaagaaaaaaaaaagaaagaaaatggaggaaggagacccaccatgagccaaggaatgcagatggcttctcaaagctgagaacagtccttagctgatagccagagca

SEQ ID NO: 9231 - DNA, 1327 bp, Homo sapiens
ttactcagagtttgctatagcaagagagtcagccaccaatacttgcatttggcaggtattcaaatacagtcaggacagaggaaaagctttagagtggaaaaaagagaacccttgggtgtgccctgattaaagtttgttggccttgggaagctattggagagctaactagaagcagggcatcctttctgattagtttggggagcacatttggttttctcaggttgctcctgagttggaagcagagagcagggggttagaaaatagagaaggtatcagttgaccacactgtgactactctgggctgattgctgcagaggctaaggtttggcttcctgggtttcctttgtcagtctgagttttattatcagatatgacctggccagtgtttgtatattcactcactttctggaaataaaaagttcagtataaggaggaatagaatggtcaaaagaggaatagaatggtgagagatgagcaaggtaagcagaagccaaattatgcacaatcatgtgttttctctctgtctgggtaagtgggtatttttgacaccatctcatttattttgcaaactggaatgtactgtgaatcatgcataacaactccatatttggaagacacacttctgtgctatttctcacttggtagcagaataactcatcctctccccagagatgtccgttstctaatccgtgaaacgggtgaacatgttaccttccatggcaaaagggacttggcagatgcaattaaggtatggaccttgaattgggaagagttccctagagtgtccaggtggatccaatataactacatgagtttttagaagtggaagagtaagacagaagagtgggtcagagagatgcaacaacggaagaagaggaggagaagtggcagcttgagagaaactcaacccactactgctggctttaaaaatggaggaagagggccaggcgcggtggctcatgcttgtaatcccagcactttgggaggcaaagttgtgcggatcacgaggtcaggagtttgagacaagcctgatcaacatggtgaaaccccatctctaaaaaaatacaaaaattagctgggtgtagtggtgcgcgcctatagtcccagctgctcaggagtctgaggcaggggaatggcgtgaacccgggaagcggagcttgcagtgagccgagatcgcaccactgcactccagcccgggcaacagagtgagactccatctcaaaagaaaaaaaaaagaaagaaaatggaggaaggagacccaccatgagccaaggaatgcagatggcttctcaaagctgagaacagtccttagctgatagccagagca

SEQ ID NO: 9232 - DNA, 892 bp, Homo sapiens
aatattcatgatcaaggacaggaccctgagccgagctccatcagggcagtctggagccttgttcttagggaactcactgtctggcaggggacacagtacaagtcccccaaaatcagaggagaaaggtggcaccaccagtgaggggaggacatgcctctcagagcatctagagagggaaatggccactttctgagcaggtggggaaaaagggctctgagcagggtggtgtggagaggctgggtggagggggtcccgggcgggtagcagtctgtgtgtgtgtgtgtgtacagaggcccacggcaggcggttcagtggggctggagtgcagagctgtaaggcggggagcaggagaayatcagagagatgcactcactggggtcctgatgtctggttagggagccagggtgtcattctgagagcaatagggagccatggatggtgtgtgagcggagagcagagctttgccctcagaagaacaactgggtagcagtaaagaagaaagagagaaagcaagaggctggggcccagaaataagttaaaaggtcacactgtaaagtccaaggaagagatgacaagaggatcaaggatggagaagactggattatttcgagggcagccgtcttacaggtgggtccttgctcatgatggaccctaggaaggaagccaggaccaggggaacagcagggcaggggcaggggcagggggaggggaaaatctcatgcaattaccttgtctccttggaatccgggatctcctgacacacctggaaccccttgttcaccctaagtacacaccagcaaagaaggttacaatggaggccacgtgggttctggaagcctcccccacagaccccctggcgaggtacagctgtgccgaggctgtttcccaagtc

SEQ ID NO: 9233 - DNA, 892 bp, Homo sapiens
aatattcatgatcaaggacaggaccctgagccgagctccatcagggcagtctggagccttgttcttagggaactcactgtctggcaggggacacagtacaagtcccccaaaatcagaggagaaaggtggcaccaccagtgaggggaggacatgcctctcagagcatctagagagggaaatggccactttctgagcaggtggggaaaaagggctctgagcagggtggtgtggagaggctgggtggagggggtcccgggcgggtagcagtctgtgtgtgtgtgtgtgtacagaggcccacggcaggcggttcagtggggctggagtgcagagctgtaaggcggggagcaggagaacatcagagagatgcactcactggggtcctgatgtctggttagggagccagggtgtcattctgagagcaatagggagccatggayggtgtgtgagcggagagcagagctttgccctcagaagaacaactgggtagcagtaaagaagaaagagagaaagcaagaggctggggcccagaaataagttaaaaggtcacactgtaaagtccaaggaagagatgacaagaggatcaaggatggagaagactggattatttcgagggcagccgtcttacaggtgggtccttgctcatgatggaccctaggaaggaagccaggaccaggggaacagcagggcaggggcaggggcagggggaggggaaaatctcatgcaattaccttgtctccttggaatccgggatctcctgacacacctggaaccccttgttcaccctaagtacacaccagcaaagaaggttacaatggaggccacgtgggttctggaagcctcccccacagaccccctggcgaggtacagctgtgccgaggctgtttcccaagtc

SEQ ID NO: 9234 - DNA, 600 bp, Homo sapiens
aaaattcaaacccacggctcacaggtgccaaagcctgctggcccaacttgaccctgctgctccctgagagacwcctgtcagccacaaatgtcaggactctgaagagacaccttagctcacctgaattgcaggtgggcaggcgggcacctccctctgactctccagacccatctccaggccagtccctggcctccgtcttgggccccgctctgaccccacaggtgggctttccccgaggctggccggtcaccctgtgcaagtcagctccccagcccaggttcctaagggccatgccctctcgcccacctactctccaggtgacctcagagaagcagaccccttctctgaacctcagtttccccatccacaggcttccgcccaccctcgttaccccctccccacagtctcccagggtgccttggcgaccggcccctgctgactcctcacattttcttgcaagagcgagagcaccccctgtctgtcatctgcctgactcctctcccccaaccctgctgcatccaagcgtacagccgagtcccaagacccggagcatttgacagctgctccacaccctttgccagtgcctgctacactgggtgg

SEQ ID NO: 9235 - DNA, 600 bp, Homo sapiens
aaaattcaaacccacggctcacaggtgccaaagcctgctggcccaacttgaccctgctgctccctgagagacacctgtcagccacaaatgtcaggactctgaagagacaccttagctcacctgaattgcaggtgggcaggcgggcacctccctctgactctccagacccatctccaggccagtccctggcctccgtcttgggccccgctctgaccccacaggtgggctttccccgaggctggccggtcaccctgygcaagtcagctccccagcccaggttcctaagggccatgccctctcgcccacctactctccaggtgacctcagagaagcagaccccttctctgaacctcagtttccccatccacaggcttccgcccaccctcgttaccccctccccacagtctcccagggtgccttggcgaccggcccctgctgactcctcacattttcttgcaagagcgagagcaccccctgtctgtcatctgcctgactcctctcccccaaccctgctgcatccaagcgtacagccgagtcccaagacccggagcatttgacagctgctccacaccctttgccagtgcctgctacactgggtgg

SEQ ID NO: 9236 - DNA, 600 bp, Homo sapiens
aaaattcaaacccacggctcacaggtgccaaagcctgctggcccaacttgaccctgctgctccctgagagacacctgtcagccacaaatgtcaggactctgaagagacaccttagctcacctgaattgcaggtgggcaggcgggcacctccctctgactctccagacccatctccaggccagtccctggcctccgtcttgggccccgctctgaccccacaggtgggctttccccgaggctggccggtcaccctgtgcaagtcagctccccagcccaggttcctaagggccatgccctctcgcccacctactctccaggtgacctcrgagaagcagaccccttctctgaacctcagtttccccatccacaggcttccgcccaccctcgttaccccctccccacagtctcccagggtgccttggcgaccggcccctgctgactcctcacattttcttgcaagagcgagagcaccccctgtctgtcatctgcctgactcctctcccccaaccctgctgcatccaagcgtacagccgagtcccaagacccggagcatttgacagctgctccacaccctttgccagtgcctgctacactgggtgg

SEQ ID NO: 9237 - DNA, 766 bp, Homo sapiens
ccagagatatatccacgatgtgatttccttccatgctgtccaatgtgtctcagctagtttgaagtatgctcccctagcaccctggccccacctgccttcctcacattgtatttaatagttgtttgtgcctctgtctcactgaggtgaacaccttgagaaaagaaattaaatcctttacatctttagatctttcctcatgcctagcactgtgattaggacaccaaaatgccttagtaaatttggcaaatgggagaatattatcttaaaaaatgacaaatataagaaactgaggatgataaagacaaaccacaatgcttcccactatgcaaagttatcctatcaggtttctgtcaaattgccagtcagaatgttttatgcaatttgacagatcttttcagtgactctatgaatctatgagctgttctagatttgtgtggacacagtcagaggaccagccataaagtgagcctgacaaagaaggaatttttacttttatgatgtgggaaatacatgctgggaataaaaggccctatttccactrgagtatatggaaaatatcctttgggttgccaggagtctcacttctacagtgagatatttccatttttttctcccttatatatttgcctctcatagttttccagtataaacaatatcaaacacacatgcacgtttcatcgcagctctgtattcagataggagatttaccaaatgtatgttaatcaaagaaacacagaaaaagccaaagaaaggaaataaatgaccc

SEQ ID NO: 9238 - DNA, 766 bp, Homo sapiens
ccagagatatatccacgatgtgatttccttccatgctgtccaatgtgtctcagctagtttgaagtatgctcccctagcaccctggccccacctgccttcctcacattgtatttaatagttgtttgtgcctctgtctcactgaggtgaacaccttgagaaaagaaattaaatcctttacatctttagatctttcctcatgcctagcactgtgattaggacaccaaaatgccttagtaaatttggcaaatgggagaatattatcttaaaaaatgacaaatataagaaactgaggatgataaagacaaaccacaatgcttcccactatgcaaagttatcctatcaggtttctgtcaaattgccagtcagaatgttttatgcaatttgacagatcttttcagtgactctatgaatctatgagctgttctagatttgtgtggacacagtcagaggaccagccataaagtgagcctgacaaagaaggaatttttacttttatgatgtgggaaatacatgctgggaataaaaggccctatttccactagagtatatggaaaatatcctttgggtygccaggagtctcacttctacagtgagatatttccatttttttctcccttatatatttgcctctcatagttttccagtataaacaatatcaaacacacatgcacgtttcatcgcagctctgtattcagataggagatttaccaaatgtatgttaatcaaagaaacacagaaaaagccaaagaaaggaaataaatgaccc

SEQ ID NO: 9239 - DNA, 766 bp, Homo sapiens
ccagagatatatccacgatgtgatttccttccatgctgtccaatgtgtctcagctagtttgaagtatgctcccctagcaccctggccccacctgccttcctcacattgtatttaatagttgtttgtgcctctgtctcactgaggtgaacaccttgagaaaagaaattaaatcctttacatctttagatctttcctcatgcctagcactgtgattaggacaccaaaatgccttagtaaatttggcaaatgggagaatattatcttaaaaaatgacaaatataagaaactgaggatgataaagacaaaccacaatgcttcccactatgcaaagttatcctatcaggtttctgtcaaattgccagtcagaatgttttatgcaatttgacagatcttttcagtgactctatgaatctatgagctgttctagatttgtgtggacacagtcagaggaccagccataaagtgagcctgacaaagaaggaatttttacttttatgatgtgggaaatacatgctgggaataaaaggccctatttccactagagtatatggaaaatatcctttgggttgccaggagtctcacttctacagtgagatatttccatttttttctcccttatatatttgcctctcatagktttccagtataaacaatatcaaacacacatgcacgtttcatcgcagctctgtattcagataggagatttaccaaatgtatgttaatcaaagaaacacagaaaaagccaaagaaaggaaataaatgaccc

SEQ ID NO: 9240 - DNA, 848 bp, Homo sapiens
ggaatgacagaaattcattatcctgtaaaaagcatttatcttggtgtcaggtacctaggggaggaaaaagaacagttgcatggaaacgagaggctcaggttcagggtgacttgtgcacgtctcacgggcttgtgacttatgaatatatgcaaaatgcctccataatttgttagatatatatgtagctggaaaaattaaatactgccacagagtgttatttaaggagtgattgaatccgttctgatagagttagaattgatatgtgcacttcgcagaattttaaacaaatcttgaatcaggcatttcaatcttctcatgacacagttcaagcccatcccaaagctgtccttccaggcctgcacgcagaggtcgagacctgacttctctyatcatttccaaaatcctggcctcaggctcagaatcctgttatcagaaatgatttcttcggaccaagaaaagaaggtgcagtcataagcacatcacaatgacattatagtgttgaaagtgacatgaaagataagttagttcaacctcctatctgaactaaaaacctttctatattgttacttccaagtagccaagcaatttctgtgctgctggatcaccggagctctcagttgaacaagtagcccattcaatctcttaataggggccatttttttttctaacatgtaagtatgacataaaaatccactccacagattgtaatgtttggagaaatcactttccaaggatgttataacaacaagaacattagtatttatttattgctttcaaagtgcctggctaaatgcttcatattttacatacatccttgaataactgtcaaaaatgccatgaacagaagt

SEQ ID NO: 9241 - DNA, 665 bp, Homo sapiens
tgtgcatctatatgtacctatattctaaattatttaccagccctgggcaatattacaatatttgtaataagtaagtttgaattttaaaactatttatttttaatagcaaaattcagaagcattatttaatttttttaaaaagcaatttttctttttcatgggactagagtctttgaggcaaaaaaaaaaaaaaaaaaaaaaagcctgctgtcgaccagcctgaccaacatggtgaaaccctgtctctactaaaaatacaaaaattagctgggcgtcgtggtgggcacctgtaatccctgctactcaggaggctgaggcaggagaattgcctgaacccagaaggcagagattgcagtgagccaagattgtgccattgcactccagcctgggtgacacagcgagactccrtctcaaaaaaaaaaaaaagcctgctgtctcagaaaaggtgacattaatttttataagaattacataacagttttcagccaagaaagttggcttaaattacatatttacatttacaataacgaaattggcacgagcactgtgcaggtaaacccaaagcagcaaagtctgctagaaaccctcactttgaaagtctgctacaaaccttcaacaaaattttatgaaatgccatgtttcaaaaagacccaggatacccaatg

SEQ ID NO: 9242 - DNA, 665 bp, Homo sapiens
tgtgcatctatatgtacctatattctaaattatttaccagccctgggcaatattacaatatttgtaataagtaagtttgaattttaaaactatttatttttaatagcaaaattcagaagcattatttaatttttttaaaaagcaatttttctttttcatgggactagagtctttgaggcaaaaaaaaaaaaaaaaaaaaaaagcctgctgtcgaccagcctgaccaacatggtgaaaccctgtctctactaaaaatacaaaaattagctgggcgtcgtggtgggcacctgtaatccctgctactcaggaggctgaggcaggagaattgcctgaacccagaaggcagagattgcagtgagccaagattgtgccattgcactccagcctgggtgacacagcgagactccgtctcaaaaaaaaaaaaaagcctrctgtctcagaaaaggtgacattaatttttataagaattacataacagttttcagccaagaaagttggcttaaattacatatttacatttacaataacgaaattggcacgagcactgtgcaggtaaacccaaagcagcaaagtctgctagaaaccctcactttgaaagtctgctacaaaccttcaacaaaattttatgaaatgccatgtttcaaaaagacccaggatacccaatg

SEQ ID NO: 9243 - DNA, 665 bp, Homo sapiens
tgtgcatctatatgtacctatattctaaattatttaccagccctgggcaatattacaatatttgtaataagtaagtttgaattttaaaactatttatttttaatagcaaaattcagaagcattatttaatttttttaaaaagcaatttttctttttcatgggactagagtctttgaggcaaaaaaaaaaaaaaaaaaaaaaagcctgctgtcgaccagcctgaccaacatggtgaaaccctgtctctactaaaaatacaaaaattagctgggcgtcgtggtgggcacctgtaatccctgctactcaggaggctgaggcaggagaattgcctgaacccagaaggcagagattgcagtgagccaagattgtgccattgcactccagcctgggtgacacagcgagactccgtctcaaaaaaaaaaaaaagcctgctgtctcagaaaaggtgacattaatttttataagaattacataacagttttcagccaagaaagttggcttaaattacatatttacatttacaataaygaaattggcacgagcactgtgcaggtaaacccaaagcagcaaagtctgctagaaaccctcactttgaaagtctgctacaaaccttcaacaaaattttatgaaatgccatgtttcaaaaagacccaggatacccaatg

SEQ ID NO: 9244 - DNA, 1741 bp, Homo sapiens
catttgctggtggaagtatgttcaggactcctaacctgtcctctacatctttgacactggcagccccctgatgtgccccaacacttttacaggtatatcattgcttaggaaaaggttgggaaactttgctctgtgctgttatggtctagctttttctcataacacggttccagacagtagttagtaatcaagccaaaccagctaatcccacattgtggcaggctgcgtggttaggtggattctaacgcttcccaggtgtggctctgctggccttcaaaatacccacttgcctatatccccagggyaaagaagaatttgtactgattggtgagagaatgatattctgtttaccttaacacagtgggtcctaaaccaggttgatcatcataatcacttcagatattccttaattatgtagattctaaagcccactccaagaattggtcaatttaaaagctccagggctaatttggaagctcatccaggttacaaaccccagtgcagtgaatatgcccatgggtgctgggagcagaagacttgggtttaaattctcatctgccacagtgtgatcttgggcaaattaatctctttgagcaaccactttctcctaggcagaggaaggttataaaatacttatttattagtgtgtagggaaaggatgaaatcagagaacttaggtgaaaaatcttcataaattatttttatgtagcattaacatacctcaataatgacttgaaattaaaatggacatgcagtccaattttagattcattttttggcatttagggcatctcaatatattcatccttaaattcaacaattccagattcataacaaatataaccatagctatcccttataaaaacaaacataagtactacagttatatttaaagagaagccaagaagcttgggaagccttttttgtcctcaagctattaatttttctttcttttgggaaagggtgttttggatttcttgttatcaattcttcgcttaatataaaacttaatgaattccagctgttagccacataatttctctcaacatttgatttctgggcttttcccttgtctctaaattcttcccatatgttagtccgggaggcccaggcctgggggtgcagaggacacagaggctcagagcttccccctgtccaagggctaaagtgataggcgggaccacgtgacggcccgagagcgcctgattaggaggcactctttgcctttataccaggctttctgccctgcaggctgcggcagctacctgctccttattttcctgaactattcctcaattcaccatgttaaaaaaaaaaaaaaagtatacttttttcagctgaaacctctcctagactgtctgcattctggcttttgtttacaaaggctctgcggtgttcttgccaagggaagaagaggaataaaataccatacttcatcttcaatttaaccttttgcaatcaaggtatcttttagtatgtgagtaaaatataaaacagtcattcatatgggaaagatatgattcctaagagatgtgacaatggcttaaattgctcaaatacacatgtatgtaaaaggttgcaatttctaagctaggaatatttgtttaaactaaaacacattgaatgcagcctccaacataaggagcatctagtggtttcatagctgacttgtcaggaatcctcaggctgttaaatgttgctggtaattcaggttgtgcctcagtctgggcacagtggatcc

SEQ ID NO: 9245 - DNA, 1741 bp, Homo sapiens
catttgctggtggaagtatgttcaggactcctaacctgtcctctacatctttgacactggcagccccctgatgtgccccaacacttttacaggtatatcattgcttaggaaaaggttgggaaactttgctctgtgctgttatggtctagctttttctcataacacggttccagacagtagttagtaatcaagccaaaccagctaatcccacattgtggcaggctgcgtggttaggtggattctaacgcttcccaggtgtggctctgctggccttcaaaatacccacttgcctatatccccagggtaaagaagaatttgtactgattggtgagagaatgatattctgtttaccttaacacagtgggtcctaaaccaggttgatcatcataatcacttcagatattccttaattatgtagattctaaagcccactccaagaattggtcaatttaaaagctccagggctaatttggaagctcatccaggttacaaaccccagtgcastgaatatgcccatgggtgctgggagcagaagacttgggtttaaattctcatctgccacagtgtgatcttgggcaaattaatctctttgagcaaccactttctcctaggcagaggaaggttataaaatacttatttattagtgtgtagggaaaggatgaaatcagagaacttaggtgaaaaatcttcataaattatttttatgtagcattaacatacctcaataatgacttgaaattaaaatggacatgcagtccaattttagattcattttttggcatttagggcatctcaatatattcatccttaaattcaacaattccagattcataacaaatataaccatagctatcccttataaaaacaaacataagtactacagttatatttaaagagaagccaagaagcttgggaagccttttttgtcctcaagctattaatttttctttcttttgggaaagggtgttttggatttcttgttatcaattcttcgcttaatataaaacttaatgaattccagctgttagccacataatttctctcaacatttgatttctgggcttttcccttgtctctaaattcttcccatatgttagtccgggaggcccaggcctgggggtgcagaggacacagaggctcagagcttccccctgtccaagggctaaagtgataggcgggaccacgtgacggcccgagagcgcctgattaggaggcactctttgcctttataccaggctttctgccctgcaggctgcggcagctacctgctccttattttcctgaactattcctcaattcaccatgttaaaaaaaaaaaaaaagtatacttttttcagctgaaacctctcctagactgtctgcattctggcttttgtttacaaaggctctgcggtgttcttgccaagggaagaagaggaataaaataccatacttcatcttcaatttaaccttttgcaatcaaggtatcttttagtatgtgagtaaaatataaaacagtcattcatatgggaaagatatgattcctaagagatgtgacaatggcttaaattgctcaaatacacatgtatgtaaaaggttgcaatttctaagctaggaatatttgtttaaactaaaacacattgaatgcagcctccaacataaggagcatctagtggtttcatagctgacttgtcaggaatcctcaggctgttaaatgttgctggtaattcaggttgtgcctcagtctgggcacagtggatcc

SEQ ID NO: 9246 - DNA, 1741 bp, Homo sapiens
catttgctggtggaagtatgttcaggactcctaacctgtcctctacatctttgacactggcagccccctgatgtgccccaacacttttacaggtatatcattgcttaggaaaaggttgggaaactttgctctgtgctgttatggtctagctttttctcataacacggttccagacagtagttagtaatcaagccaaaccagctaatcccacattgtggcaggctgcgtggttaggtggattctaacgcttcccaggtgtggctctgctggccttcaaaatacccacttgcctatatccccagggtaaagaagaatttgtactgattggtgagagaatgatattctgtttaccttaacacagtgggtcctaaaccaggttgatcatcataatcacttcagatattccttaattatgtagattctaaagcccactccaagaattggtcaatttaaaagctccagggctaatttggaagctcatccaggttacaaaccccagtgcagtgaatatgcccatgggtgctgggagcagaagacttgggtttaaattctcatctgccacagtgtgatcttgggcaaattaatctctttgagcaaccactttctcctaggcagaggaaggttataaaatacttatttattagtgygtagggaaaggatgaaatcagagaacttaggtgaaaaatcttcataaattatttttatgtagcattaacatacctcaataatgacttgaaattaaaatggacatgcagtccaattttagattcattttttggcatttagggcatctcaatatattcatccttaaattcaacaattccagattcataacaaatataaccatagctatcccttataaaaacaaacataagtactacagttatatttaaagagaagccaagaagcttgggaagccttttttgtcctcaagctattaatttttctttcttttgggaaagggtgttttggatttcttgttatcaattcttcgcttaatataaaacttaatgaattccagctgttagccacataatttctctcaacatttgatttctgggcttttcccttgtctctaaattcttcccatatgttagtccgggaggcccaggcctgggggtgcagaggacacagaggctcagagcttccccctgtccaagggctaaagtgataggcgggaccacgtgacggcccgagagcgcctgattaggaggcactctttgcctttataccaggctttctgccctgcaggctgcggcagctacctgctccttattttcctgaactattcctcaattcaccatgttaaaaaaaaaaaaaaagtatacttttttcagctgaaacctctcctagactgtctgcattctggcttttgtttacaaaggctctgcggtgttcttgccaagggaagaagaggaataaaataccatacttcatcttcaatttaaccttttgcaatcaaggtatcttttagtatgtgagtaaaatataaaacagtcattcatatgggaaagatatgattcctaagagatgtgacaatggcttaaattgctcaaatacacatgtatgtaaaaggttgcaatttctaagctaggaatatttgtttaaactaaaacacattgaatgcagcctccaacataaggagcatctagtggtttcatagctgacttgtcaggaatcctcaggctgttaaatgttgctggtaattcaggttgtgcctcagtctgggcacagtggatcc

SEQ ID NO: 9247 - DNA, 758 bp, Homo sapiens
aaaaaaaaaaaaaaaaaggtacatcttatttagtcgagcatggtggcaggcacctgtaattccagctacttgggaggctaagtcagggagaattgcttgaacccaggagatggaggttgcagtgatctgagatcgcaccactgcactccaggctgggtgacagagtgagactctgtctcaaaaaaaaaaaaaaawaaaaatggtatatcttataactggaattgtatttatttatttttaactggcactttaaatttgatgagtatagcaataacaatgacaatcacagttacggcttaagggatgcttattgatgccaaggccttcagtttttcacactactctatgaggcaggtgctacaactgttcccattttatagatgaaaaaaccgaggcacaggtttgttaagcgatttagcctaggttgcaaagctgcaagtggtggaggggagattcaggccccgagtctagcctaaaagtatgctgacaggggtactgacctgaatgctggcacttgacatgaacctgcagcaaggctggcgtggggaagagctccttacactggtcacattcatggaacttcatatctgtgaagtgcataaagaaagacgtgctgggaaagaacaaatggttggctctccaggctgaagagtaacagggctggggttggggcgatggccaatacttagcaagcatctaccaagtgccaggaatcttataacctatggtatatttgtacaatctagtggaaagagcat

SEQ ID NO: 9248 - DNA, 758 bp, Homo sapiens
aaaaaaaaaaaaaaaaaggtacatcttatttagtcgagcatggtggcaggcacctgtaattccagctacttgggaggctaagtcagggagaattgcttgaacccaggagatggaggttgcagtgatctgagatcgcaccactgcactccaggctgggtgacagagtgagactctgtctcaaaaaaaaaaaaaaaaaaaaatggtatatcttataactggaattgtatttatttatttttaactggcactttaaatttgatgagtatagcaataacaatgacaatcacagttacggcttaagggatgcttattgatgccaaggccttcagtttttcacactactctatgaggcaggtgctacaactgttcccattttatagatgaaaaaaccgaggcacaggtttgttaagcgatttagcctaggttgcaaagctgcaagtggtggaggggagattcaggccccgagtctagcctaraagtatgctgacaggggtactgacctgaatgctggcacttgacatgaacctgcagcaaggctggcgtggggaagagctccttacactggtcacattcatggaacttcatatctgtgaagtgcataaagaaagacgtgctgggaaagaacaaatggttggctctccaggctgaagagtaacagggctggggttggggcgatggccaatacttagcaagcatctaccaagtgccaggaatcttataacctatggtatatttgtacaatctagtggaaagagcat

SEQ ID NO: 9249 - DNA, 676 bp, Homo sapiens
atactcatatatatattcatatatactcatatattcatatatatactcatatatatattcatatatactcatatattcatatatatactcatatattcatatatatactcatatatatatgagtatgggagtttaagtattaactttacacgatcacagtgtcccacaatagactgtctgtaggctggggagaaaggagagccagtttgaattccaaatctgaagaacttggagtccgaagccgaagtttgagggcaggaagcatccagcacgggagaaagatgtaggctgggaggctaggccagtctctcttttcacatttttctgcytgcttatattctagctacactggcggctgattagattgtgcccacccaaattaggttggatctgcttttcccagcccactgactcaaatgttaatctcctttggcaacacactgacagacacacccaggatcaatactttgtatccttcaatccaatcaagttgacagtcagtattagccttcacacatgtctatatccaccagaatataaattcctcaaggacaaattgtaggcttcaatccttagaacagtatgaagtacactaaatttttatggaatgaatgcattctttgcatggctgtttgctgtagattgatcatgtttaaaagtaggaactattaacctg

SEQ ID NO: 9250 - DNA, 2228 bp, Homo sapiens
  misc_feature (1)...(2228): n = A,T,C or G
cctgctttagcctcccaaaatatgggattataggtgtgagccaccacactcagccaaaagaggataattttcaaagatcccatatctagattggaaataaagatraaattctctctagaatagttatggggaagaatttcagtctcagagtataattggattgaattgcagaggaaaataaatctttttttagtgcactattttataactgggtctgtagctgctatgtgataaatgctgcttcatatagttaaccaaagataaacatctaatattnnnnnnnnnnnnnnnnnnnnnnnnnnnnnnnnnnnnnnnnnnnnnnnnnnnnnnnnnnnnnnnnnnnnnnnnnnnnnnnnnnnnnnnnnnnnnnnnnnnnggtagagacaatattccatctttgatcttgctcactgttcccacaataccagttagaagaaatatctttcatgaaagacaccaagatgtatatgcatcagccataaataggtgtctggactatgtggtgtataaaaacacttctagtgctaaactttgatgaattgtatgcttagaattcacttcataataccatatctcctttattttgaataagacacacactctttttcatgtcttgtgaaacaagtaaatctacagacccaatttaaattttcgttacagttatttaagtgctcaggtaagactatacccttttaaaatttaacaatggaaattaatatcatcaagggggtatctgttctaataagcaaaaaaaaagatgatatatataaatcctaaacactaaatattaaattaatacaatgcaatgccttgaaaaagtgaaatattagacaaatatctataaaatttttactaatatttttagaactttttttttggtggggaggggggatggagttccactcttataggccagactggagtgcaatggcatgatctcagctcactgcaacctccacctccaaggttcaagtgattctccagtctcagcttcccaagttgctgggattacaggtgcccgccaccacacctggctaatttttgtatttttagtagagacggggtttcgccatgttggccaggctggtcttgaactcctcacctcaggtgatccacctgtctcagcatccccaagtgctggtattacaggtgtgagccaccttgtctggcctagaacttttaaagtaaaatactattaagtaaggccacaaaaccagaggtatagatccagttaatatcatccaaatcttccactgatctgaccaacaagactcctgtatcagccccaagcaccactgaactttgaacattgtcatcctcacttagctcaaataataatgtggttgaaagtcaggtcatggcagtatttggaaatgaaatagcaaaacacctttaaaccaaagctctgtttacaaatttaaagccactaaattccactgatgcctcttgtctctcactctcaagccccaaataaactgtttcctctaatcactaatcctctttcgcaatccctcgcttacacagctatgcactttttcccttttggttcatgctctccaccctaccacactccttttgatgtccttctcaaccttgtccattgtacactctatgactcccattttttaataagcaaacttccttattcctgagacattagtttgtctccaaattgttttctccttaaaagcctgatttatataagtcatcgtcttcatgcattcagatcaagatagaggctcagaataatcctacttccattttgtggcttttgtgtcattacttttccactttcatgcaaaaaattcttctttttcacttacattcacttcactaatctgtatcactctgaatactaggactcatcaacttttaggttattccttcaaaatccatttctcctgattccaaaatcccaccaaaatcaatattgataatcaatacctatgcaccacaatcaataatctatccatagaattcatgatctctacttcaactctcatttcagaaaaccatttccaacttggatctcatggccactctgaatgcctctatcactagaggcttaaacattgatgttctacttaccaattagttccctgtatttcacgcaatctaaaatattttatttcaatcaatcctgtcctggaatcctcttgagactggttagtctcttgatacatcttctcctaaactatgagccctttttagcctcactttttttctct

SEQ ID NO: 9251 - DNA, 2228 bp, Homo sapiens
  misc_feature (1)...(2228): n = A,T,C or G
cctgctttagcctcccaaaatatgggattataggtgtgagccaccacactcagccaaaagaggataattttcaaagatcccatatctagattggaaataaagataaaattctctctagaatagttatggggargaatttcagtctcagagtataattggattgaattgcagaggaaaataaatctttttttagtgcactattttataactgggtctgtagctgctatgtgataaatgctgcttcatatagttaaccaaagataaacatctaatattnnnnnnnnnnnnnnnnnnnnnnnnnnnnnnnnnnnnnnnnnnnnnnnnnnnnnnnnnnnnnnnnnnnnnnnnnnnnnnnnnnnnnnnnnnnnnnnnnnnnggtagagacaatattccatctttgatcttgctcactgttcccacaataccagttagaagaaatatctttcatgaaagacaccaagatgtatatgcatcagccataaataggtgtctggactatgtggtgtataaaaacacttctagtgctaaactttgatgaattgtatgcttagaattcacttcataataccatatctcctttattttgaataagacacacactctttttcatgtcttgtgaaacaagtaaatctacagacccaatttaaattttcgttacagttatttaagtgctcaggtaagactatacccttttaaaatttaacaatggaaattaatatcatcaagggggtatctgttctaataagcaaaaaaaaagatgatatatataaatcctaaacactaaatattaaattaatacaatgcaatgccttgaaaaagtgaaatattagacaaatatctataaaatttttactaatatttttagaactttttttttggtggggaggggggatggagttccactcttataggccagactggagtgcaatggcatgatctcagctcactgcaacctccacctccaaggttcaagtgattctccagtctcagcttcccaagttgctgggattacaggtgcccgccaccacacctggctaatttttgtatttttagtagagacggggtttcgccatgttggccaggctggtcttgaactcctcacctcaggtgatccacctgtctcagcatccccaagtgctggtattacaggtgtgagccaccttgtctggcctagaacttttaaagtaaaatactattaagtaaggccacaaaaccagaggtatagatccagttaatatcatccaaatcttccactgatctgaccaacaagactcctgtatcagccccaagcaccactgaactttgaacattgtcatcctcacttagctcaaataataatgtggttgaaagtcaggtcatggcagtatttggaaatgaaatagcaaaacacctttaaaccaaagctctgtttacaaatttaaagccactaaattccactgatgcctcttgtctctcactctcaagccccaaataaactgtttcctctaatcactaatcctctttcgcaatccctcgcttacacagctatgcactttttcccttttggttcatgctctccaccctaccacactccttttgatgtccttctcaaccttgtccattgtacactctatgactcccattttttaataagcaaacttccttattcctgagacattagtttgtctccaaattgttttctccttaaaagcctgatttatataagtcatcgtcttcatgcattcagatcaagatagaggctcagaataatcctacttccattttgtggcttttgtgtcattacttttccactttcatgcaaaaaattcttctttttcacttacattcacttcactaatctgtatcactctgaatactaggactcatcaacttttaggttattccttcaaaatccatttctcctgattccaaaatcccaccaaaatcaatattgataatcaatacctatgcaccacaatcaataatctatccatagaattcatgatctctacttcaactctcatttcagaaaaccatttccaacttggatctcatggccactctgaatgcctctatcactagaggcttaaacattgatgttctacttaccaattagttccctgtatttcacgcaatctaaaatattttatttcaatcaatcctgtcctggaatcctcttgagactggttagtctcttgatacatcttctcctaaactatgagccctttttagcctcactttttttctct

SEQ ID NO: 9252 - DNA, 775 bp, Homo sapiens
aggctttatattcacaggcccgctaaggtgttcaaggcagtttttgcgtccatcatcgcacctgatttgcatcaacatagaggttttacagataagaaaagtacatctcagagaggttaaggatatgccccggaatacacagcaagctcagggagccaggagtcctgtcctgacaccagggttccttcccctctaacaagtsgctagacatgagtgaaaagatagtaactgtagggttagatgagcaccatttacaaagacagggtgaggaagggaagttagactatagattccaaactctcaagtccagtcttcctgttgactcaaagcaggctacaagcctcctaagtgttcatcattgattttcagaccacacaactcagggatgggcatgggggccattttccatgatgcagaagctggctgttattgccacacctccttccccaaagctccagaagacccaacatatatggaacatcgtgcctgttattacatttaaccgtcacagcaaccccatgatttgatatttttagctgtttaacagaagaaagaagaaacccattaagaggttaagagcaagggcaggcttgggcctaaaggggcacagccctaccagtcctgtgccttttccgctacaccacattcccctggacaaactccctccaccactcctacccccagcaccctcctcagtatcctgcccccagcttccacacggtgcatcattgcctataatcatgattgtcaagctcaaatgcacatcagcagccct

SEQ ID NO: 9253 - DNA, 775 bp, Homo sapiens
aggctttatattcacaggcccgctaaggtgttcaaggcagtttttgcgtccatcatcgcacctgatttgcatcaacatagaggttttacagataagaaaagtacatctcagagaggttaaggatatgccccggaatacacagcaagctcagggagccaggagtcctgtcctgacaccagggttccttcccctctaacaagtggctagacatgagtgaaaagatagtaactgtagggttagatgagcaccatttacaaagacagggtgaggaagggaagttagactatagattccaaactctcaagtccagtcttcctgttgactcaaagcaggctacragcctcctaagtgttcatcattgattttcagaccacacaactcagggatgggcatgggggccattttccatgatgcagaagctggctgttattgccacacctccttccccaaagctccagaagacccaacatatatggaacatcgtgcctgttattacatttaaccgtcacagcaaccccatgatttgatatttttagctgtttaacagaagaaagaagaaacccattaagaggttaagagcaagggcaggcttgggcctaaaggggcacagccctaccagtcctgtgccttttccgctacaccacattcccctggacaaactccctccaccactcctacccccagcaccctcctcagtatcctgcccccagcttccacacggtgcatcattgcctataatcatgattgtcaagctcaaatgcacatcagcagccct

SEQ ID NO: 9254 - DNA, 579 bp, Homo sapiens
gggacccagaaaccgacatgaaataatcaaaagtggagccactgttgctaagatcagtgcccaagtctgcacctggcagcctggagagaagaaaacttggagaagatgatctaagtcaataactgaggaaggattggagaggaaggaagaaagggaatgtccatggaatacctatgttctcagcactgtgcttgacgctgtccatctgctatgtcatgtcacctttctttacaacaaagtgaagaactcgacatgatcatcactggccttgaggactatgaaatgggtctcgaagtggaggaacacttgagatcacaggaccagtaagtagcagaggaaggatttaaacccagctctctctgattccaaagctgcactttcctctgtrccaggctgtcccctgcaggtggcataaagtaatggcaggactgggttccattgtcctttttgctctgagaggagctagctgtcctgtctgcagtgaggcaaggccaaatgtttagaaggagagactggttttgtgtctttccattacctcttggcttgtattctccttccatatctgatcagtcttcaatt

SEQ ID NO: 9255 - DNA, 823 bp, Homo sapiens
aaccaggataccacattgctttcagtagtatttctatttgattagtctgaagagggaggcagcaacctaatactttgcagtstctggggttatccatataggcctttactcataaggctggaggaaactctttatggccacagaatcagatcatctgatctcatgatacagcctttctgtcctacatatgccttcctgtgtttgcactgttccattagtttagcctaagtgtgcgtgtgtgtgtatgtatatgtatatgacaaatcaacacttttagtgccttgtaatgtccctcattcaaatactatggataaagttgacatgcatattttgatgaaaccattacttgttttcatactctccacatttgcctgatctacaaaaataaatagtatgatttggttcagtggttaaaaaagagcatgcagtcttaaaaatctgtgttcaaatcctagctcatatactgaccagctatgtaatcttgggcaaattccttaatgtctctgagcttcagttttgtctcctgtagaatggaataataatagaaacttccagagatgatttatgcagatttcttatacaatagaaattctgaataaaatgtagtcttttatacactggcatcacccactattcctcttcttgaataaggtttatatccagcatattacccaggcccactgcttggaaattatcagtgtgattcttatgccgtgaaagaacaggtctgggaagaagtttggataatatggtcaagtacagagaccacacactactccagcttctcctttttctgtgtgctgctcttttactcagtactgaa

SEQ ID NO: 9256 - DNA, 672 bp, Homo sapiens
ggtggatccgttgaactcaggagttcaagaccagcctgggcaacacagcaagacctggtctctacaaaaaataccaaaattagctgggcatggtggcacatgcctgtggtcccagctacttgggaggstgagggaggcagattgctggagtccaggggttcaaggttacaatgagctgagatcatgccactgcaccccagcctgggtgacagagcaacaccctgtctcaacaacaaaaagaaaaacaagatagagaggaatctgaaagtctattcatgaatcttctgtcacgctaagggttagaacagacaacagacccttccctcctcggctgacctcatggcttcacgtcttaccgagtggtcgcagccccagcctggacttttcgttcctgccctattggtcttcctgcatttcccaaacacttggctctttttcacctttctacatctgcctggaatacccttccccactgtgtccccggtggcttcctgtccatccttcagagccgagtttgcaagctacttcctctgagacgactaagacaggagtaagggccctggattctcctgcaggaccctgtgtgaaagtgccaaacacagggtcccacaggataattgtattattttattttatttttgagacagagtcttgcttggtcgcccaggctgg

SEQ ID NO: 9257 - DNA, 672 bp, Homo sapiens
ggtggatccgttgaactcaggagttcaagaccagcctgggcaacacagcaagacctggtctctacaaaaaataccaaaattagctgggcatggtggcacatgcctgtggtcccagctacttgggagggtgagggaggcagattgctggagtccaggggttcaaggttacaatgagctgagatcatgccactgcaccccagcctgggtgacagagcaacaccctgtctcaacaacaaaaagaaaaacaagatagagaggaatctgaaagtctattcatgaatcttctgtcacgctaagggttagaacagacaacagacccttccctcctcggctgacctcatggcttcacgtcttaccgagtggtcgcagccccagcctggacttttcgttcctgccctattggtcttcctgcatttcccaaacacttggctctttttcacctttctacatctgcctggaatacccttccccactgtgtcccyggtggcttcctgtccatccttcagagccgagtttgcaagctacttcctctgagacgactaagacaggagtaagggccctggattctcctgcaggaccctgtgtgaaagtgccaaacacagggtcccacaggataattgtattattttattttatttttgagacagagtcttgcttggtcgcccaggctgg

SEQ ID NO: 9258 - DNA, 556 bp, Homo sapiens
cccagagggatgaccaagtgaggacacagggagaagacggccatctacaagccaaggagagaggcctcagaagaaaccacgctgccaacaacttattgcagacttggagccttcagaactgtgggaaactccgtttctgtggattaagcccctcagtctgtagaactgtgctatggcctgggctggctcttacagcatctcaccatctttcttaaatgcatccatcagccagaggtttcagagctcagttggaacaccctatgtgtttatttaaaaaccacttatcgcctataaatttgaatagaattttacataaagcctgctgtgctgcacagcagagaaattcaactttagaataaagtagaataacattaaggacagataaggacagatggacttttmataggcaaacattgcccaaccgctgcttctctctccactgaccttttgtttaatgatgggaacaaatcacaaaatccactaaaaaaaaaatctttttggccaggcgagatggctcatgctcgtaatcccagcattttgggaggccaaggcagga

SEQ ID NO: 9259 - DNA, 313 bp, Homo sapiens
ggcctagcccgtgtgcaatgccacctcctgatatgggaaacagctgtttaactgaactgatctagtcccaggactaggaaactgattaataatatatgggacagtgtatttaaacttgctccttcctggctgactataggtgcattgcctatgagttagccctgatccacaaggagcagtaccaaataaaataaagtaaaataraatgaaattcactcattcttgtctatcccaatatgtttgtccaaaaacctttgacccaactctctctgctagtgacccatgtctgactgattcttggagctattcacct

SEQ ID NO: 9260 - DNA, 785 bp, Homo sapiens
  misc_feature (1)...(785): n = A,T,C or G
cttgaggccaggagtttgggagccagcctgggcaatatagtagacaacctgtctctatgaaaataaaataaaaattagaggggtggggtggncgcacctacagtgagctataatcacaccactgcactctagcctggacaacagagcaagagtcttctctttaaaaatagtgtgtctgggtgtggtgatgacacccaatttcttctcttctccagtggttgatctttcctggttatttgaatccctatggaggggatttcagacaactgcattgcatttcttttggaaacaaagttacttgtttagataaggaaattccaagagagtccctccctgcactttkagtggggggaataaaagagttaggggttagggttagggatcttgattctgaggcagctttttttttttttttttttgagatggagtctcattccattgcccaggctagagtgcagtggcgtgatctcggctcactgcaaactctgcctcctgggttcaagcgattcacctgcattctgaggcagcttttaaggcctcaccatgtcaaagcatcaggaaggaagcaccatgtcaaagcacaatgaaacttaagattcctttctgctgactccaaatttttagacaaaactttacacctttaaccacttgtaaattaaagaatctctcaatccatgtataacgtgtaagatctgcttcaagacatcctgcctttctgggctgaaccaatgtatacccttcatgtactgatttatgaccttgcctgtaacttctgcctccctaaa

SEQ ID NO: 9261 - DNA, 864 bp, Homo sapiens
tgggattagyaggatactacagacaatggattccaagtctctctgccatggctcaggctctgtattcttttttaaagtctgacccatcccaaacctctacaatggctagaggatgccatctcctcttttgataacaataaagagagtcttcgttagccccctatattaagacatcctaattataaccttctcttttccctttttgttcgtgaacaaaatggaaatgccttagaagttcttagacaaaagcatggtgactatcagagacccctcagatattacagccaacagttagaccctgtgtctaaataactcccaccctgtatgcaggccatcacatccactgcaaatttattaaaggcaattaggagttaattatgggctctccattaatggtttatgtccctcactctatcgaggccttactgatctctcatcatggccaccatctctcttcgagcagacccacttcttatgagaacctattattatcaacctctaatgtaactattgctccctgcaactctttaagtcgtgccaactcttatccactttcttctagcaagacaccacatgattttataactctaactgaaaccttactaacccccgggcacgacctacaggaaacccccattccaagtgctaagctagtctgatttactgatgaatcttacctttgaaataattcagggaaacatcaagatttctatactgttgtctcactgtctgaaatcattgaaagtggtccctcacccaaggccatttctgcccaataggcagaactttttgctgtctgctaacatgtatgctagcaattaataacattgcaaatatctctaccgatagccactatgctttggg

SEQ ID NO: 9262 - DNA, 779 bp, Homo sapiens
ctggatcccttttttcactgacatctcctacaaggaaaaaatacaaaaaaaatcacagattataatctgcattttccataatggttttgttccaaacaatatcatatgcattaattaccttgaagcaatatttgttactctcaactcagaactggggacaccgaagcataggtgggctatgtgatatgtgtaaatttgtaagacctcttaattttcatctcagggttccttctataaacatgttttaaaaataaattttttatcaagsgcacatttttccatctcagatttttaagaaagctaccagctcacagatttgctgtttatcccaagagtggctaagatgtattagcatctctaatctagatcttgcttctcaaggtgtggtctgtgggccagcagtctcgacattgcctgagagcttgtgagaaatagaaaatttgggcatcccctcagtcagaatctgcatttggacaagacccccaggtgattcatgtgcactttcaagtcatagacacactgccctagagaactgaatccatattctcatctgcccatttatgacttgtcctagtcagagctgaactccccacctcaccactaccttaatgagatccaagagcaacagtcagacttggccctcaggctggggatggaggcctggtatgcatcagtggccagaggtgcactgacccagggaagaatgccaaggaagggtgcacccaggatgacacagatggacactggtgggtgatgaacctgggtcacagtccttcagc

SEQ ID NO: 9263 - DNA, 779 bp, Homo sapiens
ctggatcccttttttcactgacatctcctacaaggaaaaaatacaaaaaaaatcacagattataatctgcattttccataatggttttgttccaaacaatatcatatgcattaattaccttgaagcaatatttgttactctcaactcagaactggggacaccgaagcataggtgggctatgtgatatgtgtaaatttgtaagacctcttaattttcatctcagggttccttctataaacatgttttaaaaataaattttttatcaagckcacatttttccatctcagatttttaagaaagctaccagctcacagatttgctgtttatcccaagagtggctaagatgtattagcatctctaatctagatcttgcttctcaaggtgtggtctgtgggccagcagtctcgacattgcctgagagcttgtgagaaatagaaaatttgggcatcccctcagtcagaatctgcatttggacaagacccccaggtgattcatgtgcactttcaagtcatagacacactgccctagagaactgaatccatattctcatctgcccatttatgacttgtcctagtcagagctgaactccccacctcaccactaccttaatgagatccaagagcaacagtcagacttggccctcaggctggggatggaggcctggtatgcatcagtggccagaggtgcactgacccagggaagaatgccaaggaagggtgcacccaggatgacacagatggacactggtgggtgatgaacctgggtcacagtccttcagc

SEQ ID NO: 9264 - DNA, 779 bp, Homo sapiens
ctggatcccttttttcactgacatctcctacaaggaaaaaatacaaaaaaaatcacagattataatctgcattttccataatggttttgttccaaacaatatcatatgcattaattaccttgaagcaatatttgttactctcaactcagaactggggacaccgaagcataggtgggctatgtgatatgtgtaaatttgtaagacctcttaattttcatctcagggttccttctataaacatgttttaaaaataaattttttatcaagcgcacatttttccatctcagatttttaagaaagctaccagctcacagatttgctgtttatcccragagtggctaagatgtattagcatctctaatctagatcttgcttctcaaggtgtggtctgtgggccagcagtctcgacattgcctgagagcttgtgagaaatagaaaatttgggcatcccctcagtcagaatctgcatttggacaagacccccaggtgattcatgtgcactttcaagtcatagacacactgccctagagaactgaatccatattctcatctgcccatttatgacttgtcctagtcagagctgaactccccacctcaccactaccttaatgagatccaagagcaacagtcagacttggccctcaggctggggatggaggcctggtatgcatcagtggccagaggtgcactgacccagggaagaatgccaaggaagggtgcacccaggatgacacagatggacactggtgggtgatgaacctgggtcacagtccttcagc

SEQ ID NO: 9265 - DNA, 779 bp, Homo sapiens
ctggatcccttttttcactgacatctcctacaaggaaaaaatacaaaaaaaatcacagattataatctgcattttccataatggttttgttccaaacaatatcatatgcattaattaccttgaagcaatatttgttactctcaactcagaactggggacaccgaagcataggtgggctatgtgatatgtgtaaatttgtaagacctcttaattttcatctcagggttccttctataaacatgttttaaaaataaattttttatcaagcgcacatttttccatctcagatttttaagaaagctaccagctcacagatttgctgtttatcccaagagtggctaagatgtattagcatctctaatctagatcttgcttctcaaggtgtggtctgtgggccagcagtctcgacattgcytgagagcttgtgagaaatagaaaatttgggcatcccctcagtcagaatctgcatttggacaagacccccaggtgattcatgtgcactttcaagtcatagacacactgccctagagaactgaatccatattctcatctgcccatttatgacttgtcctagtcagagctgaactccccacctcaccactaccttaatgagatccaagagcaacagtcagacttggccctcaggctggggatggaggcctggtatgcatcagtggccagaggtgcactgacccagggaagaatgccaaggaagggtgcacccaggatgacacagatggacactggtgggtgatgaacctgggtcacagtccttcagc

SEQ ID NO: 9266 - DNA, 759 bp, Homo sapiens
ccaaaccttagcctcctgagtagttggractacaggtgcacaccaccatacccagctaactttttttttttgtacagacaagatctcgctatgttgcccaggctggtctcaaactcctgacatcaagcaatcctcccgccttggcctcccaaagtgctgggattagaggcatgagttaccaggcccagccccctttcatcttttctactgcccattctggcacacttacacctcagactttcctctgatcactgaatgccttccctacctctccgtgagagactcctcttcatctctcaagaccctatttaaatgtccctcctctgttcccagaacacacaactataaaatacacacctcactacaacacactctcttcacccgcctgcctatctctgcacttccaacagcaaaggcagtgcctggcatgttaagagacggggagcccagtaattgtgaaattgcaggaaaactggcaagggaagaaggatgcaagaaatacttgacagctttgttctgttttcctgcaatttctcaatcagtccagtccctgccaaaacctaaggaggtctcaatggcctcggattggggcccagggtccttcccacccagagacctcgcagaaacaagactttgcaggaccagaaactaaaggaaacagccacgatctcagagccaagggccagagtcttggattctaggctcagttctgttcggactcactcagtcttccgtgcaccatgggactcagttttccct

SEQ ID NO: 9267 - DNA, 803 bp, Homo sapiens
aaaggtgtccaccaccacgcccagctaatttttgtatgtttagtagagacggggtttcaccatgttggccaggctggtcttgaactcctgacctcaagtgacccgctcaccttggcctcccaaagtgctgggattagaggtgtgagccaccgtacccagccttatagtattttcttatagcagcctggacaaactaagacaggggactagaacaacagaagtttaattggctcacagttctggaggttagaaacccaaaatcaatgtgtcagcaaggccatgctcctgaaacctgtaggaaaaggacctttcctttcctcttcctagctttgggggatgtgctggcatcccccatggtgttccatggcatgtagacacatcgctccaatcctctgtcttcacatggcattctccctgtgtcttcacatattcttccccctgtgcacatctgtgcctgtgtccaactttccccttaatatgaggacactaatcatatcagattagggcccacccaatgacttcatcttattgactacatctgcaaaagctctatttccaaataaggtcactttttgaggtattgagggttaggacttcaacatatcttttaggagggatacacttcaacctataacaccaaccacaagccagtgattggctgcaggattccccttaggagaggacataatcttggtcaaatctcttccctatggccaaaaacaattcccaatggatgacagcagtgaccsagcagcagccaatattcccaagagatgtgggatgagtcaccagctatgaagaaa

SEQ ID NO: 9268 - DNA, 749 bp, Homo sapiens
aagcaaagcctgcctgcattcctgacctacagaacttgtgagataatggatgtaggttgttttaaagagctaaattttgtgatagtacgttacacattaataggaacctaacacaataacaatcaaacaaattaataagaattcaatatcatagatatctttttcttttaataagaattagatattctacattttagcaaaaggtatcagttgcttatgatcatatgtgtgtgaagggacaaagtgtcttagtggcccactggaagtaagaatwgttccctgaactacaataaatgccataatcagtgtggtttcaattgcaatatgatattccaaaaaggacatttcataaagttttacaattttgttttggtgaaaaatttattgcttatcaccttatctcacagatatacttcttttctgcatatttacgactgtgaatatagaaaatgtatttcaactgacagtacggttgaattaaaaatagtttactcagtgtcacaaaataatggaggttatccaattgagaaacctcaataattgatcaatgcgttaatggtacacattaatgctttttgtatttctttattattgggggtaaaactacagaaacacacttgccattagaaagtcagaagtcaactgagaaaagctctcaggtttatatacataattcttatggcaaaaataacttttggaggagttatttgtttcatttgttcacatttactggtgtgctcctatttaat

SEQ ID NO: 9269 - DNA, 615 bp, Homo sapiens
catggacacaggaaggggaacatcacactctggggactgttgtggggtggggcaagcggggagggatagcattaggagatatacctaatgctaaatgacgagttaatgggtgcagcacaccaacatggcacatgtatacatatgtaactaatctgcacattgtgcacatgtaccctaaaacttaaagtataacaataataaaataaaaataaaataaaataaaataatgagwaatgatatcataaatctgtgttaacaactacagaaaaataaacatgtaatttgtgatattaatagagaaggtgacacactagaatattatagttttgtacacagtttaagttggtatacatttaagatagattttcatagttttaggatgttgtacgcagtttctatggtaatgacaaagaaaatatctatagaatatacacaaaaggaaatgataagaaaacaaaaatgtatctgtgtacagcaaataaaataagacaaaaaatgaaagcagatatggaataaatgaggaaaaaaattgtaagacatacagcaaacaataatacaatgtaagttttccttctattagcagttactttaagtaaaaagtaaactcaaataaat

SEQ ID NO: 9270 - DNA, 824 bp, Homo sapiens
tccctgctcatgttcttacgatcacatctcctatccctaacaacagctacattcctttgtgtcagaccataatatgcagtctctcatactgggaaataagatatccagaacttggacagtggcgttagcaggttctctatggaaaaaaaaagaaacmacaaaacctaaaaacatcccatgtgaagataggagtcagtttctcattataaattactacctatcaagtttgggctttatctaaattattcaaattgtccccatatggctggtggatatccttaaagggtgtcgtttttttgttagacaaatgtgatatctatcactatcagctcaggcactcgctgagaggttctaggttagtctggtggaaggtatctgtgctgagtcttcattgtacatgttagggaaagttttgatataaagagagaggacactataacttgcgtagcagtattaattaaactgaagaagataatcatactatgagttccccatactcacttacccaggataatggatttcccttttcctcagctgttggcttacttaccttaaatattacagcatttacttttatttacaatgtttttttttatcttaggttattgcctgattaaagtaagcacaagtaaaatttaaaattaacaatcaatcacctgtagaaataacaaaaaatgggcttggtgaaatttaaggagcgatgccagaattaaacaaataaagaaacacattgtgtaagttagagtggtcagtgaggactgaaatgatgagaagctggtgctgaacgatatatgaagaacgtcaaatacacttgatattcagaa

SEQ ID NO: 9271 - DNA, 824 bp, Homo sapiens
tccctgctcatgttcttacgatcacatctcctatccctaacaacagctacattcctttgtgtcagaccataatatgcagtctctcatactgggaaataagatatccagaacttggacagtggcgttagcaggttctctatggaaaaaaaaagaaacaacaaaacctaaaaacatcccatgtgaagataggagtcagtttctcattataaattactacctatcaagtttgggctttatctaaattattcaaattgtccccatatggctggtggatatccttaaagggtgtcrtttttttgttagacaaatgtgatatctatcactatcagctcaggcactcgctgagaggttctaggttagtctggtggaaggtatctgtgctgagtcttcattgtacatgttagggaaagttttgatataaagagagaggacactataacttgcgtagcagtattaattaaactgaagaagataatcatactatgagttccccatactcacttacccaggataatggatttcccttttcctcagctgttggcttacttaccttaaatattacagcatttacttttatttacaatgtttttttttatcttaggttattgcctgattaaagtaagcacaagtaaaatttaaaattaacaatcaatcacctgtagaaataacaaaaaatgggcttggtgaaatttaaggagcgatgccagaattaaacaaataaagaaacacattgtgtaagttagagtggtcagtgaggactgaaatgatgagaagctggtgctgaacgatatatgaagaacgtcaaatacacttgatattcagaa

SEQ ID NO: 9272 - DNA, 824 bp, Homo sapiens
tccctgctcatgttcttacgatcacatctcctatccctaacaacagctacattcctttgtgtcagaccataatatgcagtctctcatactgggaaataagatatccagaacttggacagtggcgttagcaggttctctatggaaaaaaaaagaaacaacaaaacctaaaaacatcccatgtgaagataggagtcagtttctcattataaattactacctatcaagtttgggctttatctaaattattcaaattgtccccatatggctggtggatatccttaaagggtgtcgtttttttgttagacaaatgtgatatctatcactatcagctcaggcactcgctgagaggtkctaggttagtctggtggaaggtatctgtgctgagtcttcattgtacatgttagggaaagttttgatataaagagagaggacactataacttgcgtagcagtattaattaaactgaagaagataatcatactatgagttccccatactcacttacccaggataatggatttcccttttcctcagctgttggcttacttaccttaaatattacagcatttacttttatttacaatgtttttttttatcttaggttattgcctgattaaagtaagcacaagtaaaatttaaaattaacaatcaatcacctgtagaaataacaaaaaatgggcttggtgaaatttaaggagcgatgccagaattaaacaaataaagaaacacattgtgtaagttagagtggtcagtgaggactgaaatgatgagaagctggtgctgaacgatatatgaagaacgtcaaatacacttgatattcagaa

SEQ ID NO: 9273 - DNA, 801 bp, Homo sapiens
accccatctctaaagaaaataaatttttttctgtatattttttctttcttctctttctctttcattctttctttctttctctttttctttccttctttttctttctttcttctttctttcttttctttcttttttctttcttctctctctctctttctttctttcttctttctttttcttctctacctttttttttttcaaggtctcactctgttgcctaggctggagtgcagcagtgcgacsgtagctcactgcagcctcaattttctaggctccagtgatcctcccatctcagccccctaggtagctaggactccaggcagggaccaccacactgggctaatttttatttttattttctttaaagatgggggtcttgctgtgatgcctaggctcatcttaaactcctggaggatgcgacccctcggctggagggaaggggagcgtgtgatgaggaccaagaaggagctgaggacagcccccaggcagctcctcagagcagaacagctgtcccagtgagagcaggcctcaggactggggacacctttcagagatgatcattctttcacaagaccttcctgttaatacctggcttgtttttaggttttaaagaaagaccacgaaaagaaagagctatcactaagtagcatggtttttctgccaagggtctgtctgccagtagactacaataaatggaaacctagacacttataaagtattatctgggaagatattggaccaaaaaataaatccaaattaactatctgatgccctataaaataagcctttaaatattttgta

SEQ ID NO: 9274 - DNA, 735 bp, Homo sapiens
cgaggtcaggagatcgagaccatcctggctaacacagtgaaactccgtctctactaaaaaatacaaaaacattagccgggcatggtggtgggcacctgtagtcccagctactcgaggctcaggcaggagaatggtgtgaacctgggaggtggagcttgctgtgagctgagatcacaccaccacactccagtctgggtgacagagagagactccatctcaaaaaaacaaacaaacaaaaaaaaamctgattttatcacattatttttcaactccaaaatctaaacggtctccacattgtgaacaggaggaagttgacaggtcctggcttattattagaagccatcaacccccatatacagtctcacccagcaccactcataaatgaaacctgtctttgtgttgggttgttcattgaactggccccagaagggtcacagctcacctcagtttccttgaatcactgctactctagataattctcatgttggcttttaatcacacatagccttgtcatgacaatgttcctttctgcttttattggtaataattataatggttaatatttattgagggtttattagatatttgacacagtgtgaaggcttagatgtgccaccacctaattcatagtcacaaaatatctatcaaggatgtaccattactatccaaattttacacatgagaaaatgagtcatggggaggttaagtcaatcgtctaaggttgtaggaaataaa

SEQ ID NO: 9275 - DNA, 769 bp, Homo sapiens
acactcatccatcttccttcttagagtgatagccaggggtctgttcacaggagggcaagaaaccagtggcaaacagaatgccagccaattcaccagactgggaaatgcctagtcagcttcaaagccagatctcctgggaggtcgcagatggaagcacgtgacctgcaccasaaggctgtttgcctctttccctcaaatctctgcctgatggacaccccccaatgtggcgattagattttatcacatcagtgtggggggaggccagtcagaatcatccacaagtaccagggcacagagagaggaaatgaggcatggctcctacatgcatagacacacatgcattcacacacttacatatacattcacacactcgcacacacttattcccacatcacacacaaagtcacattcatacgactcgcacacattcacactcacattcacatcattcacacagattctcacactcacacacccattaacacacttacataaacattcacacagttacacattcatatacacacacacatacactcacacagtcacatgcctccggtcacacacatttacacacattcatacgcccacatacattcatacacatgtatgtattcacacatatgtatattcacacatgctttcacactcacacatgcattcacaccctcacacattcattcatgtgctcacacacatttgcacactcacccatacatagtcatgcacattcacacgcagacattcacacacagatgcacagacagac

SEQ ID NO: 9276 - DNA, 714 bp, Homo sapiens
gttcactcggcatcacagaatctgaactgaaaaagacttagggttcacctgactatacccctccatggcaggacgctcgggccgagggacagctgcccagagcctctggttcagatggacacctgaggcccagggtcgggctgtgccatgtcccccatgccggcatgtcactgtcctacccggatacgtcggcctatgtgctggagacagggcctttacagaggtgattaaggtcaaaccaagtcaccagggtggccctaacccaatgtgcctcgtgtccttacaagaagaggccaccaggacacagacacaygtgcagggacaggtgggcgttcctgggacgccggctcggcactcacccaatgaggtcacggtgtcaagggagggcccgagttccagcaggttgctggggggtgtctcacgggcctgagggtaattatttgtcatcgattggagtcacactgcctaaatccagagccgtgaacgctgaccacagcacagccaccactcttcttgaaagtcacagtcaccaggacccagtgttggcatttgatagattaatggtattagcaggttggtttccctccgcggtattacatttaagggaataaacaactcacatgaacggccaagggctgaagacagaagcggtgctctccgtcttcatcaggtgctcacggagggcccacagcacatctgatctggtcaccacgg

SEQ ID NO: 9277 - DNA, 714 bp, Homo sapiens
gttcactcggcatcacagaatctgaactgaaaaagacttagggttcacctgactatacccctccatggcaggacgctcgggccgagggacagctgcccagagcctctggttcagatggacacctgaggcccagggtcgggctgtgccatgtcccccatgccggcatgtcactgtcctacccggatacgtcggcctatgtgctggagacagggcctttacagaggtgattaaggtcaaaccaagtcaccagggtggccctaacccaatgtgcctcgtgtccttacaagaagaggccaccaggacacagacacatgtgcagggacaggtgggcgttcctgggacgccggctcggcactcacccaatgaggtcacggtgtcaagggagggcccgagttccagcaggttgctgggggrtgtctcacgggcctgagggtaattatttgtcatcgattggagtcacactgcctaaatccagagccgtgaacgctgaccacagcacagccaccactcttcttgaaagtcacagtcaccaggacccagtgttggcatttgatagattaatggtattagcaggttggtttccctccgcggtattacatttaagggaataaacaactcacatgaacggccaagggctgaagacagaagcggtgctctccgtcttcatcaggtgctcacggagggcccacagcacatctgatctggtcaccacgg

SEQ ID NO: 9278 - DNA, 714 bp, Homo sapiens
gttcactcggcatcacagaatctgaactgaaaaagacttagggttcacctgactatacccctccatggcaggacgctcgggccgagggacagctgcccagagcctctggttcagatggacacctgaggcccagggtcgggctgtgccatgtcccccatgccggcatgtcactgtcctacccggatacgtcggcctatgtgctggagacagggcctttacagaggtgattaaggtcaaaccaagtcaccagggtggccctaacccaatgtgcctcgtgtccttacaagaagaggccaccaggacacagacacatgtgcagggacaggtgggcgttcctgggacgccggctcggcactcacccaatgaggtcacggtgtcaagggagggcccgagttccagcaggttgctggggggtgtctcacgggcctgagggtaattatttgtcatcgattggagtcacactgcctaaatccagagccgtgaacgctgaccacagcacagccaccactcttcttgaaagtcacagtcaccaggacccagtgttggcatttgatagattaatggtattagcaggttggtttccctccgcggtattacatttaagggaataaacaactcacatgaacggccaagggctgaagacagaagyggtgctctccgtcttcatcaggtgctcacggagggcccacagcacatctgatctggtcaccacgg

SEQ ID NO: 9279 - DNA, 714 bp, Homo sapiens
gttcactcggcatcacagaatctgaactgaaaaagacttagggttcacctgactatacccctccatggcaggacgctcgggccgagggacagctgcccagagcctctggttcagatggacacctgaggcccagggtcgggctgtgccatgtcccccatgccggcatgtcactgtcctacccggatacgtcggcctatgtgctggagacagggcctttacagaggtgattaaggtcaaaccaagtcaccagggtggccctaacccaatgtgcctcgtgtccttacaagaagaggccaccaggacacagacacatgtgcagggacaggtgggcgttcctgggacgccggctcggcactcacccaatgaggtcacggtgtcaagggagggcccgagttccagcaggttgctggggggtgtctcacgggcctgagggtaattatttgtcatcgattggagtcacactgcctaaatccagagccgtgaacgctgaccacagcacagccaccactcttcttgaaagtcacagtcaccaggacccagtgttggcatttgatagattaatggtattagcaggttggtttccctccgcggtattacatttaagggaataaacaactcacatgaacggccaagggctgaagacagaagcggtgctctccrtcttcatcaggtgctcacggagggcccacagcacatctgatctggtcaccacgg

SEQ ID NO: 9280 - DNA, 748 bp, Homo sapiens
atgcaccactacccatgggctgcggcagctcctagaaatctaggatgtgacatcagacgctcctccgggagtgtggtcatgccctccgatccactgaggcatttcaaggaaagttacaccctttccaacgcagttttccttttagaaagatttggcctcagtagatgaatccatgtgatcaagcctagtgatcagctaggattcttgaatctcgggacccgttgccagaataacaaaatgggggcttcctgtaacctcggctctttaaagcaacacttctgataccagggttagggtttcagaaaatgcagccgccttaggagcctcattggcagctactttccactaaaacatcttccatttctctctctcaggagtttcctttaacagtgtttacactcagatttggagagtcctgctgcacctggctgctgacccctatccagaggtctcggacgtggccatgaaagtactcaacagcatcgcctacaaggtacgtgccgggcgctccccaccgcgctccagctgctggttctcggttacgagtatgcatgccaggaactccaggtrtgcccgggtccacaccacggtttagaaagtaacgaaacgagcttcagcaaatatcttaaatctggagatgtacacagtacaccccaaactgtgtctgtgcagctcccacgtgggcagagggtgctggatttactgatgcctgtcaaagcaattaggggaggactgccattatctttca

SEQ ID NO: 9281 - DNA, 748 bp, Homo sapiens
atgcaccactacccatgggctgcggcagctcctagaaatctaggatgtgacatcagacgctcctccgggagtgtggtcatgccctccgatccactgaggcatttcaaggaaagttacaccctttccaacgcagttttccttttagaaagatttggcctcagtagatgaatccatgtgatcaagcctagtgatcagctaggattcttgaatctcgggacccgttgccagaataacaaaatgggggcttcctgtaacctcggctctttaaagcaacacttctgataccagggttagggtttcagaaaatgcagccgccttaggagcctcattggcagctactttccactaaaacatcttccatttctctctctcaggagtttcctttaacagtgtttacactcagatttggagagtcctgctgcacctggctgctgacccctatccagaggtctcggacgtggccatgaaagtactcaacagcatcgcctacaaggtacgtgccgggcgctccccaccgcgctccagctgctggttctcggttacgagtatgcatgccaggaactccaggtatgcccgggtccacaccacggtttagaaagtaacraaacgagcttcagcaaatatcttaaatctggagatgtacacagtacaccccaaactgtgtctgtgcagctcccacgtgggcagagggtgctggatttactgatgcctgtcaaagcaattaggggaggactgccattatctttca

SEQ ID NO: 9282 - DNA, 748 bp, Homo sapiens
atgcaccactacccatgggctgcggcagctcctagaaatctaggatgtgacatcagacgctcctccgggagtgtggtcatgccctccgatccactgaggcatttcaaggaaagttacaccctttccaacgcagttttccttttagaaagatttggcctcagtagatgaatccatgtgatcaagcctagtgatcagctaggattcttgaatctcgggacccgttgccagaataacaaaatgggggcttcctgtaacctcggctctttaaagcaacacttctgataccagggttagggtttcagaaaatgcagccgccttaggagcctcattggcagctactttccactaaaacatcttccatttctctctctcaggagtttcctttaacagtgtttacactcagatttggagagtcctgctgcacctggctgctgacccctatccagaggtctcggacgtggccatgaaagtactcaacagcatcgcctacaaggtacgtgccgggcgctccccaccgcgctccagctgctggttctcggttacgagtatgcatgccaggaactccaggtatgcccgggtccacaccacggtttagaaagtaacgaaacgagcttcagcaaatatcttaaatctggagatgtacacagtacaccccaaactgtgtctgtgcagctcccacgtgggcagagggtgctggatttactgatgcctgtcaargcaattaggggaggactgccattatctttca

SEQ ID NO: 9283 - DNA, 1247 bp, Homo sapiens
gagcccacatctccccacccggacaggtgtcgttgcgccaggccctacacatggcgcatccttccctggaaacaggaagtgaaaatgccaggccctgctttcctcagctggcctccacttgtccctgaaatggtggccagctctgtcaccccacatctcagtcatgattttcctaaaccttctcccagatttgccactagatgccaaatcgctcccttcacctaccttgttgtttgctctcccagctgcacccggggtggaggggcagggagcagccctggagggggcggtgtctgttgccgcagacagcggagggagctccttgcggaagggatccgggctgcaggcggccccggtcacagagactgtgtggggagcagggaggccctgagagtcaacacagcaatgagggtgtcaggcagccccatcccagggaccctggcctctccccaggatccaggagagtacaggggcccaggcccagccctacagccccactgagggcacggagcagcagtggtgtctccgcactcctccccctgccctcgcggccacaggctcccaccactgagccagctctggctgggggacctcwagctgcccccaaccaaatcagcaccatcaaaagtcaaggactctgaccccagtctgcaggtttattgttttgaccttgcatctttgtcctgtaaaattctggagattattatgggttactttctgaagttgaggttgatgacccgtaggacagatgtcctccctcctgccaaagccgagggccctgcccgcaggcagcacaggcgccatgagcgcgtcctcagcgagcgtgcctaggcccggctcacacctctgctctgctgatcaccgaaaacactgctgacttctggtaccagcaacgtttctgaagcgcattcccacgcagctctctctgtgaaagactgcggttcatctcgcattaacgcagacggtggctgttgtgctgaaagctaattgtggttgtttgtagccctctgtgcatctgaagagctggcggcagaccaggtttaaagcatcgcatgttgcaatccggtgcgtgctgccccggcggccgccgctgaaccttgcagccagggtggctttctccagcagagagaacagaccctgctggatgagcgtctccaggtggaggcgacaggaggctgttttcctggaggttagcgattctctaggaccccagcctgctagctgggatggccagcacacgggggctg

SEQ ID NO: 9284 - DNA, 742 bp, Homo sapiens
gccctgtgtcacgcaggcccctgcccggctcttcagccttctcctgggcaacattcacgaccttggctgtcacgcactgattttcaaacgtaccaaatgcgtgggctgggtggggtttccctttgtccttcagtgcttagaattatgcccaaactccgtccagaactccctgcagctgggaatggaggcaccgctagggtaacacggtgctgccgccgcaccaaagccttcgggcctgcctgcctctgtgagtgcagcctctccttgtataacgtggcattcatttcctttccgtggttctgggtgtttgctggggactgacattgttggaaacagtagctcacccgaggtgccgagcacacaccaggcatcagtgaggcttcagcccgcagactccrtggccctggtgccacctggacagtgccaggcacaagcggaggggctgtcagctgctggaggtgggcggccttggctgtgcttaagcccagttcagagcagcctgcagcagagtgcccaagtcgcgcggctttgaccttgcaccccgacggtaggctccttctgttgtaggactttttaattcagctaaaaacagggtctttgtcacatgaccatgaaaaattaggctcccagacactttgaagggtgggaagggcagggtttattgggtgagaaggaaaaaacgggaaacagggcctccccgcaaagccggagtcctgctggtgcacttcccgcctcgcagatt

SEQ ID NO: 9285 - DNA, 866 bp, Homo sapiens
acccagcctgtccctgtcggccgcagcccctggacacctgagcctctgagagtgtcgagtcggttgtgctgacaagtgcgcagccctctcaacgcggttgcgggctcctggtgaggggcgtggccatggggacgtgtcctcgtgcagcccctcctccgagcgctgccccctcaggaccaagtagcatcaaccratgtcgaaagcccgtctttgtccctgtagctgtcagacgtgaccgggaggagatgcatagtcggggcaggggccggtgggggcaagggaccagccaggctcagccagcggtttcggagagaccagatgtgagcatctcccaacaccagagggagagggcagttccttggctgagagagcgagcactggagcagggccagggtcctttgcagaacgggctccagacagcagtagaagggctccagctccaaaaccaggaacgtttggtgtatgcgatggaaagcagagagcgggacaggcaggtgggtggaggtgaggccgtcgtccaccagggcaatcagctggggcttgaagagcgcctgagggtcacgcaggaggggctggtgaggccagggggcgcggatgtggttcccggaaggctcagagggcctgcatgctttccccacacccaggccgacctccctgcctgtctgctggaggatgcagagggccgtttcctccattctaagccctgaagagcagggcggtgcgtccctgcccacgtcttaggcggagagcccagacgtctgcattgtcccttcaagtcaaggctactctctctgtggagcacagagaggaatggggcggagggtgctggtgtcctctgtgaagctggcctttcgttctgctccctg

SEQ ID NO: 9286 - DNA, 1449 bp, Homo sapiens
agaatgtgttcccggggctgcggacgcactcggaattccaaggcccttctggggctgtctctaaacaggctgctccacctcagagtccccagaatcctaaagcaacagctccccgccaatgtccccgaaagcgtgagagccccaggtccctgagtgcactgcctggctggagtcccagccctgggcatggtctcagccactcgtgggtgcccctgtccccaaccttcatccttggcttgcagacatgtgctgcttgggacagcatcactgctggcagggcctaaagggcccgcatcacggggtccttctttggacctaaaattaggtctgctctttggacctaaatttaactcctccttgggggtcggggtgcacatggccatctggggcctcacgcgctcgctggcatgcctgggctggtgggacggagtggctgcagtgccggctctgggtacagttctgcgtgttgcctgcaccgctgcacggcctgggtgcggggcgaggcgcaggcccacaggtccttctggaaggactcaggcaggagttaggaggctcccggggtcaggcttctgggtctrgatttccagaggcccctctgcagcaccaggcattcgcctctaggagtcatcgctcttcagcggatcctgcagcccttggcgatgctcagagtgaacgcgttaccccgccagcccccgtctgccggctcctgccggtttgtgatttctgtgtcttcgtctgtggcctgtggatgtggccttacacctcgtggtcagccttccgtgtggggcctgccctggttctgccctaggttgcatggctctgtctccgcccttctgtctgagcacctgtcccgggagatgccaaccctcacgtgcctcgggacgtcatgggggcagctccagggtggacattgcctcgaacgttggatttttttttttaatgtagccatgttcttaagtttcatccagcaaaaaaaatcatccacaccccgcactccgtgggggccctttcctgttgcttctgtcctgatctctgggctctgcttcccctgcgaggcaaccctcttctggggtatgacagcttccctgggacagggcaggaaaagtgagccccagcccggggccctggtccaggaggggtcccgggagacagctggatggccagcctgggggtcaggccactcaccggccattgtgtgtctctccaaaagaccaattttggtgacactgtgtcatttgctagagaggaaagatcactgtttgataggctttccaggctgtttttctggggtcgctcagaggcagtggtgccatggaaggagctgggcttcagcacgggagcgcctggctgagccctggctctgccttgccctttctcttgtttgcttttgtgaaaacttccctccctgtccaaggctcggacctgccggaaatgcagtgctggaaggac

SEQ ID NO: 9287 - DNA, 1449 bp, Homo sapiens
agaatgtgttcccggggctgcggacgcactcggaattccaaggcccttctggggctgtctctaaacaggctgctccacctcagagtccccagaatcctaaagcaacagctccccgccaatgtccccgaaagcgtgagagccccaggtccctgagtgcactgcctggctggagtcccagccctgggcatggtctcagccactcgtgggtgcccctgtccccaaccttcatccttggcttgcagacatgtgctgcttgggacagcatcactgctggcagggcctaaagggcccgcatcacggggtccttctttggacctaaaattaggtctgctctttggacctaaatttaactcctccttgggggtcggggtgcacatggccatctggggcctcacgcgctcgctggcatgcctgggctggtgggacggagtggctgcagtgccggctctgggtacagttctgcgtgttgcctgcaccgctgcacggcctgggtgcggggcgaggcgcaggcccacaggtccttctggaaggactcaggcaggagttaggaggctcccggggtcaggcttctgggtctggatttccagaggcccctctgcagcaccaggcattcgcctctaggagtcatcgctcttcagcggatcctgcagcccttggcgatgctcagagtgaacgcgttaccccgccagcccccstctgccggctcctgccggtttgtgatttctgtgtcttcgtctgtggcctgtggatgtggccttacacctcgtggtcagccttccgtgtggggcctgccctggttctgccctaggttgcatggctctgtctccgcccttctgtctgagcacctgtcccgggagatgccaaccctcacgtgcctcgggacgtcatgggggcagctccagggtggacattgcctcgaacgttggatttttttttttaatgtagccatgttcttaagtttcatccagcaaaaaaaatcatccacaccccgcactccgtgggggccctttcctgttgcttctgtcctgatctctgggctctgcttcccctgcgaggcaaccctcttctggggtatgacagcttccctgggacagggcaggaaaagtgagccccagcccggggccctggtccaggaggggtcccgggagacagctggatggccagcctgggggtcaggccactcaccggccattgtgtgtctctccaaaagaccaattttggtgacactgtgtcatttgctagagaggaaagatcactgtttgataggctttccaggctgtttttctggggtcgctcagaggcagtggtgccatggaaggagctgggcttcagcacgggagcgcctggctgagccctggctctgccttgccctttctcttgtttgcttttgtgaaaacttccctccctgtccaaggctcggacctgccggaaatgcagtgctggaaggac

SEQ ID NO: 9288 - DNA, 783 bp, Homo sapiens
  misc_feature (1)...(783): n = A,T,C or G
tgagggtgggacccagcaattggtgttttaataatgtcctcctagtgattctaaagcaggctgggtttgggagccactaatccaaagtctagattctaaaccactaactggacacctgtgttttacatgcaatccctgtgctcctggcttccctgggaatgtggttgcatntcagagcctggatcgcacatgcccatcaatccccccccttgcccagcccaggatgccacagcaagtacttcctcagcaaacacctgtggaatttaattagcttgagttcagataccaccatcaggttacaaaatcacagaacctgaatgctgaaagaggctttagtgcccatccagcccaactgcccatcaaggctctgccaggacccagcttctccacgtttctctcaggtcaggtcagatgctccactaatgcctgggagttcagtctcattcgttcgcccagcaaatattgactgagcatgggtgcgaggcacacacagatgttcctgcacacaagtgaacgagaccaatgagaatccttgctcggagggagcagatattccagtggcaggagagacccaatcaatagcaataaataaataaaacaaaaaaaaacccatatgctttaaccattagaaaacatcagacacaccaaaatatacagaccgcctatgaaaataactaaccagcactcttcaccaatgtcaaagtcatgaaaggtaagraaagacgagtcacaaaagcacactaaggagacatggtgggtacatgcaatgtgggaccctggact

SEQ ID NO: 9289 - DNA, 808 bp, Homo sapiens
taaatccagtcacaactgtccttttacgagaagaaaaggggaaaacacacacagaggggaggattacataaaaatggaggcagagattgaaataagctgtctacaagccaaggaacaccaaggattactggaaaccaccaggagttaggagacatgtatggaatatattctttcgcaaagcgtctataaggaaccaaccctgttgacaccttgatctccgacttctrgcctccagaactatgagtgaataaatttatgttcttttaagtcactaaatttgtgatgctttgtgatgtcagccccatgaaactaatagagtcagcaaaaatgtagaagaagtagagaacacaacccttcaactaaatctgattgacattcataaaacacttcctccaacagcagtggaatatacattctttcccagtgcacatgaaacatgtaccacattgtgctctgttgtttgcattgttgatatagaaaatgataatatggtttttaaaaagaaaagtcaagtgaggggatagcaaaaggaaaaactctaaaattgaatcatgaaatagtatgtattgataacatgattgtatctagttaatttttaagtcagtgactcctaaagaaaaccatctgctggcaacagaggaagtcatactacatggaaaccatttctgaagattccataactgaaaaccagttagtatcgatttttgatatttaatttatcacactgaaagatgtaaaataagccataataatttatattgaaaagcaagccctattgtttgctgatgatattttcttttccctttca

SEQ ID NO: 9290 - DNA, 673 bp, Homo sapiens
atttcggcacattgaacatgaccaggcatggctaggagggacaagaaataccagcgtatctatgagatcagcaaatataccaggcagacttagcaggtgagcagagcataactagagaaaaaccttggcacatacatacccatagtagaaragaattttaaatgcttggcattcaaagacagggcacaaatagctgaaaagaaaaaacggacaaagcaagacaatatgcttaaagaaaccaggtagaaatcaccattgatgccatatagtcttgtagttttctttgctgggaggtttttgattactgattaagagattacagtctcttcactcatagatctgttcagatattctatttcttcttcataagttttagtggtttgtatgtttttaggaattttccatttcatctatgttatctaatttgttggtatacaattgttcatagtattgtaatatttttattgttataaggttcatagtaatatctccactttcatttccaattttagtaatttgagacttctctctttttttcttgatcagtctagctaaatgtttgtcaatttcgttgatattgaaagaatcaactttgcgcgggtcattaactctatcatttttctaatctctgttgcatttatcttcaatttttattacttccttcattctccta

SEQ ID NO: 9291 - DNA, 825 bp, Homo sapiens
ttcacacatctccagtttgtgaaaaagaagactttttactaattttactgacattaaaaaaaaattaggaatgcctagaaaagtactacttaaaattgacgcaccatgaataataaaatgcataactttacactccttaaagaaataaatattggattattaaaagcatgcgcacatacaaacatctaatttacccacataaatgaaatgtgtttacttctaagttttatcaaatatttaacaataaaacaaaagtatcttacaccaactctttcagaaaaatagagaaaaagcaacttttcaaaactcactttataagattaacacaatctttatttagaaaacagaaaattagaatgacataacagatgatagcaaagtgagaagctccagaacttagtacctttaccaaaacagttattgaactgacaagaagtatctagagaaactactttggaattctcgagtctatttggacacttgtagtctccagatgatagctttatgaagaaagagtcagggttcattacagtgaaattcactgttttctataatggcccccattctctacccttcagtcccatagtgaacaaccacgtggatgggggccaacaattccagtgtggcttgctggtgctagggtggatgataggtatattgtacttcaaaaattacggtgtatgttttgacaattgcttgtgattgctaagtgtctggcrcagagactggccactgtttcaagacttcaggctgaagcagctttaccagtaatatcagtctaagaaggtatgaaaagataaacacattttaaaaaaattttacatt

SEQ ID NO: 9292 - DNA, 624 bp, Homo sapiens
tggacttctttgaaaaagcatkcctccaaataccagatgatagggcagagaggaagaagaggattaagggtatcctgctcccaggctctaggggttctgctggaaaggaaatagtggggtggattagagaggatgggaaagtacaaaacttcagatgtagaaaaagtttgatcgtatagtctctctggaaaacattttgcaagtttcttaaaaagttaaacgtaaacctaccatgtgatccagccatttcactctaggccttaattcaagataaatgaaagcatttgtccattcaaaatctgtcatgaatgttcatagcagcttcacttgtaatagtcttaaactggaaacaacccaatctttcatcaagatagaatggataaacaaattgtggtatatctatacaatggatactatttagtaataaaaaggaatggatggattaatctcaaaataattatgctgagtgaaaaaaacagacaatttggaatgcacattatatgattccattcatataacattttggaaaatgcaagctaatctataagataggaagtaaaacagtggttgcctcaggatggaggttgtgtgggaggggcaggagcaagagattataaactctat

SEQ ID NO: 9293 - DNA, 624 bp, Homo sapiens
tggacttctttgaaaaagcatgcctccaaataccagatgayagggcagagaggaagaagaggattaagggtatcctgctcccaggctctaggggttctgctggaaaggaaatagtggggtggattagagaggatgggaaagtacaaaacttcagatgtagaaaaagtttgatcgtatagtctctctggaaaacattttgcaagtttcttaaaaagttaaacgtaaacctaccatgtgatccagccatttcactctaggccttaattcaagataaatgaaagcatttgtccattcaaaatctgtcatgaatgttcatagcagcttcacttgtaatagtcttaaactggaaacaacccaatctttcatcaagatagaatggataaacaaattgtggtatatctatacaatggatactatttagtaataaaaaggaatggatggattaatctcaaaataattatgctgagtgaaaaaaacagacaatttggaatgcacattatatgattccattcatataacattttggaaaatgcaagctaatctataagataggaagtaaaacagtggttgcctcaggatggaggttgtgtgggaggggcaggagcaagagattataaactctat

SEQ ID NO: 9294 - DNA, 624 bp, Homo sapiens
tggacttctttgaaaaagcatgcctccaaataccagatgatagggcagagaggaagaagaggattaagggtatcctgctcccaggctctaggggttctgctggaaaggaaatagtggggtggattagagaggatgggaaagtacaaarcttcagatgtagaaaaagtttgatcgtatagtctctctggaaaacattttgcaagtttcttaaaaagttaaacgtaaacctaccatgtgatccagccatttcactctaggccttaattcaagataaatgaaagcatttgtccattcaaaatctgtcatgaatgttcatagcagcttcacttgtaatagtcttaaactggaaacaacccaatctttcatcaagatagaatggataaacaaattgtggtatatctatacaatggatactatttagtaataaaaaggaatggatggattaatctcaaaataattatgctgagtgaaaaaaacagacaatttggaatgcacattatatgattccattcatataacattttggaaaatgcaagctaatctataagataggaagtaaaacagtggttgcctcaggatggaggttgtgtgggaggggcaggagcaagagattataaactctat

SEQ ID NO: 9295 - DNA, 384 bp, Homo sapiens
ccttttcttcaactttttaccttctctacttttccattctcagttctcaccatcccccacatgaactctaggctctagtcatagttgttctctaatacttcctgttccttcaggactgcatgtctttgttcatgttctttctttcatttggattgcccctttcatctttggcttcctgataaatagcttaaaaatcaccttaactgagtggctcrgatagtcatctgctgctgcttttgtgctcttgtgagtctctgcatcacctaccatattcttttgtaacggacttctcttccagtagcatgtgtgcttcaaaggcacctcattgaaactgatcattcatctccatagcatatgtaactggcatggtacctagatttcagg

SEQ ID NO: 9296 - DNA, 384 bp, Homo sapiens
ccttttcttcaactttttaccttctctacttttccattctcagttctcaccatcccccacatgaactctaggctctagtcatagttgttctctaatacttcctgttccttcaggactgcatgtctttgttcatgttctttctttcatttggattgcccctttcatctttggcttcctgataaatagcttaaaaatcaccttaactgagtggctcggatastcatctgctgctgcttttgtgctcttgtgagtctctgcatcacctaccatattcttttgtaacggacttctcttccagtagcatgtgtgcttcaaaggcacctcattgaaactgatcattcatctccatagcatatgtaactggcatggtacctagatttcagg

SEQ ID NO: 9297 - DNA, 835 bp, Homo sapiens
tcctgcctcagtctcccgagtagctgggattacaggtatgcaccaccacactcggctagttttgtatttttagtagagacggggtttctccatgttgaggctagtttcaaactcctgacctcaggtgatccgcccacctcggcctctcaaagtgctatgattacaggtgtgagccaccgcacccggcctagaactctttttcttgtcttacattacccccaccaatctttccaacctctgaaatttagataggatctggctcagaaaaaaataaaatttgttcaaagtcacatagctaacatgtctagaagctcaaactggacactaagtctcttcatcctttatcagcaagcacgctactaaatacaatgtgggtacatataaacatgtgcacagtcaaccygttctaaacattgctggcactgtcataaatagaacagggtctttgttttcaggatggaagagggtccaatgagagaaacctcagacatgcacatgtttatgtgtataatgtaattcttcagcagtaaatacaagcccacgggtctctaggagaaacaatgtggaggattgggttggcaacagttttccataaacagtgacacttgatctgagcatcaaggtacactgaacacatctgaagtcagaacaccaggataaaattactcagtcacttataagcaatgaaactttaaattccttaatattttccaagtgatagtttttcatttgaaaagtaggggtaataacatccacctcacagaattgctgtgagggttaaattaagtaattttggctaaagccctgatcatcatataattcatcgtccaaacga

SEQ ID NO: 9298 - DNA, 835 bp, Homo sapiens
tcctgcctcagtctcccgagtagctgggattacaggtatgcaccaccacactcggctagttttgtatttttagtagagacggggtttctccatgttgaggctagtttcaaactcctgacctcaggtgatccgcccacctcggcctctcaaagtgctatgattacaggtgtgagccaccgcacccggcctagaactctttttcttgtcttacattacccccaccaatctttccaacctctgaaatttagataggatctggctcagaaaaaaataaaatttgttcaaagtcacatagctaacatgtctagaagctcaaactggacactaagtctcttcatcctttatcagcaagcacgctactaaatacaatgtgggtacatataaacatgtgcacagtcaacccgttctaaacattgctggcactgtcataaatagaacagggtctttgttttcaggatggaagagggtccaatgagagaaacctcagacatgcacatgtttatgtgtataatgtaattcttcagcagtaaatacaagcccacgggtctctaggagaaacaatgtggaggattgggtyggcaacagttttccataaacagtgacacttgatctgagcatcaaggtacactgaacacatctgaagtcagaacaccaggataaaattactcagtcacttataagcaatgaaactttaaattccttaatattttccaagtgatagtttttcatttgaaaagtaggggtaataacatccacctcacagaattgctgtgagggttaaattaagtaattttggctaaagccctgatcatcatataattcatcgtccaaacga

SEQ ID NO: 9299 - DNA, 1539 bp, Homo sapiens
tgagctgatgacaccaactttggaggatggctaagaggacaagaagaacccagtagaggacctggagggagggaggcccctctcagagcctcagtttcccttatctataaaacgggtacaacataacatgagaagttggtgctatggtgcatgtccagagagaggaatgcctccctttttatgcgggcccatttcctggcctgcaggcggcgactgtgccaccctgctgaagaatattggagcgctgcccgtagagatggcccgcatgtactttgctgagacggtgctagccctggagtatttgcacaactatggcatcgtgcaccgcgacctcaagcctgacaagtgagctttgatctttcccatcactccctctgtccctcgggaggccaggaggcagaatggacgggcctcatccctgagatccccacctgtgcctacagcctccttatcacctccatgggtcacatcaagctcacagatttcggcctctccaagatggggctcatgagcctcaccaccaacttatatgaaggccacatcgagaaggacgcccgagagttcctggacaaacaggtgtgtgtgcgggcatgggggtcgctgagggtggagtgaccctgcaggacctcgggaacccagggcctggtggggggcacagctctcccttgagggccctcctctggctggggcgtgggctgacagcctgcccccaggtgtgtgggaccccagagtacatcgcgcccgaggtcatcctgcgtcaaggctacggcaagccagtggactggtgggctatggggatcatcctctacgagttcctggtgggctgtgtgcccttcttcggagacacaccagaggagctatttggacaggtcatcagtggtacgtggcttggcagtgtacaggggcagagtgtggtgtgcacggaragatggacaggctcagggttccagggatttcaaaagcgaccccccagaggatcgcttgcactcaggaggtcaaggctgcagtgagccatgatcgtgccactgcactccagctgggtgacacagtgagatcctgtgtccaaacaacaacaacaacaaaaaccgcccctaagttccgttttgttttgcagatgacatcctgtggcccgagggggatgaggccctacctacggaggcccaactcctcatatccagcctcctgcagaccaaccctctggtcaggcttggggcaggtaagtccgccatgcagaggagctgagggcccactgatagagagcaggcctccaaaaccccaggcccagcctgtgctgtggccccggggcggaagacatggggggcggggctgggctgctgggttggccatcagctgtggctggaatcccttccgtcccaggcggcgcttttgaggtgaagcagcacagtttctttcgagacctggactggacagggctgctgaggcagaaggccgagttcatcccccacctagagtcggaagatgacactagctactttgacagtgagctgggacaccaggcacgacctgggtcgaggggtg

SEQ ID NO: 9300 - DNA, 1539 bp, Homo sapiens
tgagctgatgacaccaactttggaggatggctaagaggacaagaagaacccagtagaggacctggagggagggaggcccctctcagagcctcagtttcccttatctataaaacgggtacaacataacatgagaagttggtgctatggtgcatgtccagagagaggaatgcctccctttttatgcgggcccatttcctggcctgcaggcggcgactgtgccaccctgctgaagaatattggagcgctgcccgtagagatggcccgcatgtactttgctgagacggtgctagccctggagtatttgcacaactatggcatcgtgcaccgcgacctcaagcctgacaagtgagctttgatctttcccatcactccctctgtccctcgggaggccaggaggcagaatggacgggcctcatccctgagatccccacctgtgcctacagcctccttatcacctccatgggtcacatcaagctcacagatttcggcctctccaagatggggctcatgagcctcaccaccaacttatatgaaggccacatcgagaaggacgcccgagagttcctggacaaacaggtgtgtgtgcgggcatgggggtcgctgagggtggagtgaccctgcaggacctcgggaacccagggcctggtggggggcacagctctcccttgagggccctcctctggctggggcgtgggctgacagcctgcccccaggtgtgtgggaccccagagtacatcgcgcccgaggtcatcctgcgtcaaggctacggcaagccagtggactggtgggctatggggatcatcctctacgagttcctggtgggctgtgtgcccttcttcggagacacaccagaggagctatttggacaggtcatcagtggtacgtggcttggcagtgtacaggggcagagtgtggtgtgcacggagagatggacaggctcagggttccagggatttcaaaagcgaccccccagaggatcgcttgcactcaggaggtcaaggctgcagtgagccatgatcgtgccactgcactccagytgggtgacacagtgagatcctgtgtccaaacaacaacaacaacaaaaaccgcccctaagttccgttttgttttgcagatgacatcctgtggcccgagggggatgaggccctacctacggaggcccaactcctcatatccagcctcctgcagaccaaccctctggtcaggcttggggcaggtaagtccgccatgcagaggagctgagggcccactgatagagagcaggcctccaaaaccccaggcccagcctgtgctgtggccccggggcggaagacatggggggcggggctgggctgctgggttggccatcagctgtggctggaatcccttccgtcccaggcggcgcttttgaggtgaagcagcacagtttctttcgagacctggactggacagggctgctgaggcagaaggccgagttcatcccccacctagagtcggaagatgacactagctactttgacagtgagctgggacaccaggcacgacctgggtcgaggggtg

SEQ ID NO: 9301 - DNA, 595 bp, Homo sapiens
cagttcctaggacctgtgtgaccatgagcacrtatcttaatttctgagccttagtttcctcacttctgaaaagaggacaataatatccacctcactaaggtggtatgggatagttgctatgtttgttttgtttttgtttttaagcctctaaggccagaggctttgtgagtgctggatgacttcatttctagctcaggcaagcagaaactggatatgaaactgaagaagagtgacatccacatatggcctaggcgtgaacaaattctgcttgcttgcatgcgtgcatggctaggacgctagcatttcaaggagccagctccatgagtttacagccaaactggagaaccattccatagtgatgagtacagcacatttacacagacatgctcaaaagcactgcaaaattctctccctagtctagaattcctgagttggccaactctacacagttcagaataaaacccaaagactgccaagaccagtcaatgtcttttttttttttttttttttttttgagacgttgtctcactctgttgcccaggctagagtgcaatggtgcgatctcagctcattgcaacctctgcctcccgggttc

SEQ ID NO: 9302 - DNA, 595 bp, Homo sapiens
cagttcctaggacctgtgtgaccatgagcacgtatcttaatttctgagccttagtttcctcacttctgaaaagaggacaataatatccacctcactaaggtggtatgggatagttgctatgtttgttttgtttttgtttttaagcctctaaggccagaggctttgtgagtgctggatgacttcatttctagctcaggcaagcagaaactggatatgaaactgaagaagagtgacatccacatatggcctaggygtgaacaaattctgcttgcttgcatgcgtgcatggctaggacgctagcatttcaaggagccagctccatgagtttacagccaaactggagaaccattccatagtgatgagtacagcacatttacacagacatgctcaaaagcactgcaaaattctctccctagtctagaattcctgagttggccaactctacacagttcagaataaaacccaaagactgccaagaccagtcaatgtcttttttttttttttttttttttttgagacgttgtctcactctgttgcccaggctagagtgcaatggtgcgatctcagctcattgcaacctctgcctcccgggttc

SEQ ID NO: 9303 - DNA, 595 bp, Homo sapiens
cagttcctaggacctgtgtgaccatgagcacgtatcttaatttctgagccttagtttcctcacttctgaaaagaggacaataatatccacctcactaaggtggtatgggatagttgctatgtttgttttgtttttgtttttaagcctctaaggccagaggctttgtgagtgctggatgacttcatttctagctcaggcaagcagaaactggatatgaaactgaagaagagtgacatccacatatggcctaggcgtgaacaaattctgyttgcttgcatgcgtgcatggctaggacgctagcatttcaaggagccagctccatgagtttacagccaaactggagaaccattccatagtgatgagtacagcacatttacacagacatgctcaaaagcactgcaaaattctctccctagtctagaattcctgagttggccaactctacacagttcagaataaaacccaaagactgccaagaccagtcaatgtcttttttttttttttttttttttttgagacgttgtctcactctgttgcccaggctagagtgcaatggtgcgatctcagctcattgcaacctctgcctcccgggttc

SEQ ID NO: 9304 - DNA, 595 bp, Homo sapiens
cagttcctaggacctgtgtgaccatgagcacgtatcttaatttctgagccttagtttcctcacttctgaaaagaggacaataatatccacctcactaaggtggtatgggatagttgctatgtttgttttgtttttgtttttaagcctctaaggccagaggctttgtgagtgctggatgacttcatttctagctcaggcaagcagaaactggatatgaaactgaagaagagtgacatccacatatggcctaggcgtgaacaaattctgcttgcttgcatgcktgcatggctaggacgctagcatttcaaggagccagctccatgagtttacagccaaactggagaaccattccatagtgatgagtacagcacatttacacagacatgctcaaaagcactgcaaaattctctccctagtctagaattcctgagttggccaactctacacagttcagaataaaacccaaagactgccaagaccagtcaatgtcttttttttttttttttttttttttgagacgttgtctcactctgttgcccaggctagagtgcaatggtgcgatctcagctcattgcaacctctgcctcccgggttc

SEQ ID NO: 9305 - DNA, 595 bp, Homo sapiens
cagttcctaggacctgtgtgaccatgagcacgtatcttaatttctgagccttagtttcctcacttctgaaaagaggacaataatatccacctcactaaggtggtatgggatagttgctatgtttgttttgtttttgtttttaagcctctaaggccagaggctttgtgagtgctggatgacttcatttctagctcaggcaagcagaaactggatatgaaactgaagaagagtgacatccacatatggcctaggcgtgaacaaattctgcttgcttgcatgcgtgcatggctaggacgctagcatttcaaggagccagctccatgagtttacagccaaactggagaaccattcyatagtgatgagtacagcacatttacacagacatgctcaaaagcactgcaaaattctctccctagtctagaattcctgagttggccaactctacacagttcagaataaaacccaaagactgccaagaccagtcaatgtcttttttttttttttttttttttttgagacgttgtctcactctgttgcccaggctagagtgcaatggtgcgatctcagctcattgcaacctctgcctcccgggttc

SEQ ID NO: 9306 - DNA, 822 bp, Homo sapiens
tgagtaatctggagaataataatgaccccatcgtttcaggcagctaaacttctctaccttcatacctaagagttcacataagtgcatgatagccaagcctgccaaactaattaattacagtcagttttgaagggactgaaatgaaattttgatcaatttcattctccagctctaatctcktctccaatttattttagtctagatttctctaaagagaacccctaatacaaagccttacccacagatagtttatttggggagtgatacaagtgagaaagggagggggcatgaggattgagacaggagaaagggaaataatccaagggtgcatgttgaattggccatcactatggagggctgatgcaccatgtagccaggaatttctcaggaatctcatggaacatgtctcagaattgtccaaacagggaacaaaaaaagagaaaagcatttatgacgtggccccatttcccccattagtaaaggaagctcctacagatctgtcatctctgcagtcctggtttgtacattcatgaaagctaagtgggttcgtgcaaacatcctgtgctgcagcatcagagatgttctggggaaaaagtgacagcaggtctgagtgaggtgttgtcaagaagctcctgaggaaagctggtggatatctacatggaagatatgaagtgacacacaagaaaggtatgatgtagtccatcctttgtgttttttaaatgcagttatgatccattaagtcaagcccatcatagggttcccttctaggtcaaaaccagcagcagtatctgtaaggactttatacacatggcttattgtgac

SEQ ID NO: 9307 - DNA, 776 bp, Homo sapiens
gacatcccagaaatacctagcagttgagatatacctctctgttctcgtcatgtaacagcaaacctacatcttcagtgcaattagagttgattactttaggttactccttttcttgctgacatgggaagcccaaagtggccgggtgctagttggaactttaaattcagagtactctttcctatgtgctttagtggaagtgttcccttccctgagaactgggacacttgatctggcagagcagaaatgggaaacacaaattccaaaagagggtcaccatgatggcgagggtgatgggggcaggtgagccccaaagtggaacttagttcatgagggttcctggcttttcccaggaaaaaattcaagggcaagccagaggtagaagaaaacagctttatggaaaactgtgttacagctctgacagtgttacaagtctgtgattactcctgcagattagggctaccccacaggcagagagtagcagctcatggcagttttgcagtcatatttacacccacttttaactgcatccaaataaggggcagttgatgcagagatttctagggaagcggtagtaacttttgggtcactgggtcattgtcayggaaagggatggtaactcctgagtgttgccatggcaatggtaaattgacatagcacactgatgtgtgtatctgattgaaagctgctttgaccttggccctgttttagctagtccttaatctggtccgttgtcgcagccctgcctctggagtcaagtcccacctcctacatcaaca

SEQ ID NO: 9308 - DNA, 776 bp, Homo sapiens
gacatcccagaaatacctagcagttgagatatacctctctgttctcgtcatgtaacagcaaacctacatcttcagtgcaattagagttgattactttaggttactccttttcttgctgacatgggaagcccaaagtggccgggtgctagttggaactttaaattcagagtactctttcctatgtgctttagtggaagtgttcccttccctgagaactgggacacttgatctggcagagcagaaatgggaaacacaaattccaaaagagggtcaccatgatggcgagggtgatgggggcaggtgagccccaaagtggaacttagttcatgagggttcctggcttttcccaggaaaaaattcaagggcaagccagaggtagaagaaaacagctttatggaaaactgtgttacagctctgacagtgttacaagtctgtgattactcctgcagattagggctaccccacaggcagagagtagcagctcatggcagttttgcagtcatatttacacccacttttaactgcatccaaataaggggcagttgatgcagagatttctagggaagcggtagtaacttttgggtcactgggtcattgtcacggaaagggrtggtaactcctgagtgttgccatggcaatggtaaattgacatagcacactgatgtgtgtatctgattgaaagctgctttgaccttggccctgttttagctagtccttaatctggtccgttgtcgcagccctgcctctggagtcaagtcccacctcctacatcaaca

SEQ ID NO: 9309 - DNA, 301 bp, Homo sapiens
gaggtcaggagttcaagaccagcctgaccaacatactgaaaccctgtctctactaaaaatacaaaaaattagcgggtatggtggcgggcacctgtaatcccagctactcaggaggctaagacaggaaaatcacttgaacttgggaggcagaggttgcagggagctgagatcgtgccattgcattccagccygggcgataagagtgaaactctgtctcaaaaaaaaaaaaaaaaaaaaaaaaagaagtctccctaggctgaagctacctgctcaatcttctcttgtgtcttataggatcaca

SEQ ID NO: 9310 - DNA, 301 bp, Homo sapiens
gaggtcaggagttcaagaccagcctgaccaacatactgaaaccctgtctctactaaaaatacaaaaaattagcgggtatggtggcgggcacctgtaatcccagctactcaggaggctaagacaggaaaatcacttgaacttgggaggcagaggttgcagggagctgagatcgtgccattgcattccagcctgggcgataagagtgaaactctgtctcaaaaaaaaaaaaaaaaaaaaaaaaagaagtctccctaggctgaagctacctgctcaatcttctcttgtgtcttayaggatcaca

SEQ ID NO: 9311 - DNA, 699 bp, Homo sapiens
tccctgctatggtmtgcatgcatcctccaaaattcatgtttggaaattaatagattggtgcccttataaaaatggctatgggagtgggctcatgctcttctgctcttccaccacatgaggacgcagcaagaagacccttgccagatgctggtaccttggtcttggacccctcagcctccagaacgatgaggaaataaatttctattattcataaaaccaactcccgccccccccaaaaaaaaaccctacttaaaaactttgtggaccttcctcctataaacaggaactgtccaaaaagagcactatatttttttttggatgtagtcttgctgtgtcacccaggctggagtgcagtaatgtgcacatggctcactacagcctcaacctcctgggttcaattgaccctcccacctcagcctcccaaagtactggattacagctgtgagccactgtgtctgaccccatttatttatttttgaagcattataaaattaattttagtgtcctttgctccccacaaacctaagaggtttgcactgataaaacaattgtgactatataatcctgatctcctaggatcactgttctctgaccactagcatccaccaaagacaacttggtcctcaacatcttcagccaatctcttctctttaaagtatagaattataaaaaaatgaaaggaacctcaaaagtcacttt

SEQ ID NO: 9312 - DNA, 719 bp, Homo sapiens
gcaacctccacctcctgggttcaagcaattctcctgcctcagcctccagagtagctgggattacagacatgcaccaccacgcccagctgattttgtatttttagtagagacagggtttctctatgttggtagggctggtctggaactcccgacctcaggtgatccacccacctcggcctccgaaaatgctgggattacgggcatgagccaccgcgcccggccttcactgaagtttcttatcaaatatccccgcactctggcctgggcaatggagtgagaccctgtctcaaaaaaaaaaattaagattaccattttacaattaagcaaataattccatgatgaagccaggcccagactacaggctgsagcccttataaaaaaacagtgggtaagtaaaagttgataaacagcaacaaggaaatgcacacttgtgttaatcaaatatttaatttcacacatgctctaatgctttacttcccttacaattctaagtagcagtctaatgagatcacataggcctaacaacatttattcaacattcttctgacagaagctacaggcatttgctccaatttattctacctttctttctagggaaattgaataacaagcagaatggaataagattctaatccagaattctggagacaacgccaaggagactgcccttcaggtgactctaatctgcaaccagattgaagaaccagatgactttcaca

SEQ ID NO: 9313 - DNA, 719 bp, Homo sapiens
gcaacctccacctcctgggttcaagcaattctcctgcctcagcctccagagtagctgggattacagacatgcaccaccacgcccagctgattttgtatttttagtagagacagggtttctctatgttggtagggctggtctggaactcccgacctcaggtgatccacccacctcggcctccgaaaatgctgggattacgggcatgagccaccgcgcccggccttcactgaagtttcttatcaaatatccccgcactctggcctgggcaatggagtgagaccctgtctcaaaaaaaaaaattaagattaccattttacaattaagcaaataattccatgatgaagccaggcccagactacaggctgcagcccttataaaaaaacagtgggtaagtaaaagttgataaacagcaacaaggaaatgcacacttgtgttaatcaaatatttaatttcacacatgmtctaatgctttacttcccttacaattctaagtagcagtctaatgagatcacataggcctaacaacatttattcaacattcttctgacagaagctacaggcatttgctccaatttattctacctttctttctagggaaattgaataacaagcagaatggaataagattctaatccagaattctggagacaacgccaaggagactgcccttcaggtgactctaatctgcaaccagattgaagaaccagatgactttcaca

SEQ ID NO: 9314 - DNA, 719 bp, Homo sapiens
gcaacctccacctcctgggttcaagcaattctcctgcctcagcctccagagtagctgggattacagacatgcaccaccacgcccagctgattttgtatttttagtagagacagggtttctctatgttggtagggctggtctggaactcccgacctcaggtgatccacccacctcggcctccgaaaatgctgggattacgggcatgagccaccgcgcccggccttcactgaagtttcttatcaaatatccccgcactctggcctgggcaatggagtgagaccctgtctcaaaaaaaaaaattaagattaccattttacaattaagcaaataattccatgatgaagccaggcccagactacaggctgcagcccttataaaaaaacagtgggtaagtaaaagttgataaacagcaacaaggaaatgcacacttgtgttaatcaaatatttaatttcacacatgctctaatgctttacttcccttacaattctaagtagcagtctaatgagatcacataggcctaacaacatttattcaacattcttctgasagaagctacaggcatttgctccaatttattctacctttctttctagggaaattgaataacaagcagaatggaataagattctaatccagaattctggagacaacgccaaggagactgcccttcaggtgactctaatctgcaaccagattgaagaaccagatgactttcaca

SEQ ID NO: 9315 - DNA, 805 bp, Homo sapiens
gaccaagatccaaccttcacagcaggtcagagttaaaatgtcattactcgagcagcacttactggagcagaacagaactggctgctcactggcccttggccttgctgcccttgctgcggggggaccagagtccagagcctggctgcatattgaaggacaccagccagaaagggcagcagggggaactgcagttcgtaaggtcatcagctccaggggccactactatggccgtggaattggctgttgtcatcccaggttggcggaagtggtgggtcctcactgggctttttgggccaygttgccctgtggctcagagctagacatgaggctttctgggccagctctgacctcagttagctgtgtggctttagggaaggtccctaaccctgagcttcctttaatcgtctgttagacagagagaacaataattatacattaataaagacatgtttacggatgaacaaaatactgtgtgttaaagtgttcaattctaacaccttaaaaatggttgtttttggttcgtttgcttgtttggttggcttaactccaatctgtggtcctcctccccctctgcctcttatggtctgaccttcttagggttctccaaaacctgcttgctctcagtcctcgcagctcacacaggctatgctatctgaccccctacttttctgtgtaccaaatctttttacattcctagttcctacttgtcatttgagccctccctaattgtatacttccttctttccatcttaatcctgtgattctcagtcccggagctgggaaatgttgcacctagtaagtgact

SEQ ID NO: 9316 - DNA, 623 bp, Homo sapiens
gaagaactatggttcttgcctgaggaagtcaagttgccttgtgtctcccacttctcattttcttcaaagacagaactagataccaacatwtccctcattttataaagccaaccctggatggagaattacacaccaaaataactacaagactttgctctttattctggaaaaaaagtcttcagaatacatgtgggaatggattttaagggtgctaaaccagagtaggaggcaaagaactttgtttaccaagagattctagttcaatatgcttcctggagcagagggaggggtctgtttgtctggttcattggttgaatgaaacctggaattgatggcagcccacatcattcaagagaagctgagaggtctgaaattatcaagcataatgtagaagcaggaatcccaggaaataggaatgttgctgtggatttattgtgcaaatcccactcaccaatcccctaactggtcctggagagggaccagaagacactccctttgtcaaggcaccgagagagacactggtgagagaagtatatctcaaaagtactgtcgtagctatactctgtacatcagggatgctattgagagcggctggagatgaatggactccctcatgtttgcca

SEQ ID NO: 9317 - DNA, 586 bp, Homo sapiens
tgtgacaaggcagctggggatgggcaggactgttgccggactgtctacacaagcccattggaaaatagcaacttgtggcatttaggctgtgaacaggatcaaagggggtcaaagtctcctaatggcaactgggaacagggaagagctaagaggctggcaattacaacatgggcaaagtgcaggtccactcaaaacagtagccagcaggtagccrtgtctgctgtgtggtaagcgtcttacctacatgatctgttttgatcatcctgataaccttatgaagtaggattgattacctgttaatgatgaaaaaacattgaggttcaaagatggtaagcaatttgcccaagaattacagaatgattaaatcttggagccagattcaagatgaaattcctcagactcaaaagcacttactctcttcacttgagctcattgcatcccaagaaggaaaagacatgaaacaaaatggatggcttaagaagccggcatggccattacctgtgtgacttggcaggacatcatgttgggacttcagaaggaggccagtaggaagaggaagctggaaatagatgtggcagaagcagca

SEQ ID NO: 9318 - DNA, 586 bp, Homo sapiens
tgtgacaaggcagctggggatgggcaggactgttgccggactgtctacacaagcccattggaaaatagcaacttgtggcatttaggctgtgaacaggatcaaagggggtcaaagtctcctaatggcaactgggaacagggaagagctaagaggctggcaattacaacatgggcaaagtgcaggtccactcaaaacagtagccagcaggtagccgtgtctgctgtgtggtaagcgtcttacctacatgatctgttttgatcatcctgataaccttatgaagtaggattgattacctgttaatgatgaaaaaacattgaggttcaaagatggtaagcaatttgcccaagaattacagaatgattaaatcttggagccagattcaagatgaaattcctcagactcaaaagcacttactctcttcacttgagctcattgcatcccaagaaggaaaagacatgaaacaaaatggatggcttaagaagccrgcatggccattacctgtgtgacttggcaggacatcatgttgggacttcagaaggaggccagtaggaagaggaagctggaaatagatgtggcagaagcagca

SEQ ID NO: 9319 - DNA, 628 bp, Homo sapiens
atgcattgaaacctgtgttgttcaagggacaagcatcgaggatagrcacaggctactggagacaaatatgggaatgtggctatgggcaagacagtgctggtggggcaggcatcactccaacaagcggacaacagcagggatcagtgagttgccaggggtctgggcatgagtgctgaacaagttggaggtcttccttggagccggcctcaggctgggagaggattgtggggcctgagcggctccagcctggatgggtccagtcaggaactctgcaagaggagctcacctgtgcacacagggatgcatactgggagagaggagaagccggggtcagaggctctggccctcttgcactgcatgtggggagctgcaactcagggaggctgctgggcaatggtcagtgccaacagagtggatgcatcacagccatgaagctgtggtcatgcagagcacagcatgagagcctctgaccgagttgtctgactggggttgtggatggagttgatgggcacagggaagagaggaggaggggcttgcttagcagaaaagatactgagttgagttgggggcatgtggaatttgaggtgcctgtgggagacccatttgagatgttcagtagacaagtggg

SEQ ID NO: 9320 - DNA, 628 bp, Homo sapiens
atgcattgaaacctgtgttgttcaagggacaagcatcgaggataggcacaggctactggagacaaatatgggaatgtggctatgggcaagacagtgctggtggggcaggcatcactccaacaagcggacaacagcagggatcagtgagttgccaggggtctgggcatgagtgctgaacaagttggaggtcttccttggagccggcctcaggctgggagaggattgtggggcctgagcggctccagcctggatgggtccagtcaggaactctgcaagaggagctcacctgtgcacacagggatgcatactgggagagaggagaagccgggrtcagaggctctggccctcttgcactgcatgtggggagctgcaactcagggaggctgctgggcaatggtcagtgccaacagagtggatgcatcacagccatgaagctgtggtcatgcagagcacagcatgagagcctctgaccgagttgtctgactggggttgtggatggagttgatgggcacagggaagagaggaggaggggcttgcttagcagaaaagatactgagttgagttgggggcatgtggaatttgaggtgcctgtgggagacccatttgagatgttcagtagacaagtggg

SEQ ID NO: 9321 - DNA, 662 bp, Homo sapiens
ccaagaagcattaaagacaagttatatttagcatcagttagagaaaaggaagacaaaaccaaaaagcaagcccctaccaaaaaagagaaaaccagaaataccaaaaacattatttaattacgtacttttacctatattttataattccaaacacaaggggcaaaaaaatcctccataaatggaagttctttaggtggttccaggtatctgcttcagtttataactatcttcacagtttacatttacagaaatataaatattatttcttaaaattcacatttaatacaaactttcaaagatatttaaacgtaggatagtagtaaggagaatcttaaatcttagaaacttgrgggtatgacaagagcaattcctaaatccagatgatgattttaccattgctatgtataagctgccatttgtagcaggttttacatgggacattattgaacattttcgggggtgggggaaaaataagaatctattttatcatctttgattgcaaacatgggttcatgacatgtcacaaagctactttctctgagagcagttagtatctccaaaccaggctagaatttctaagggcagtcttgccttttggtggactattaagtattttttggtgatatttccatgtttgggggtgcattaggccattaagatga

SEQ ID NO: 9322 - DNA, 1971 bp, Homo sapiens
ttagattacaaagactggaagattgaatggatattaaatcaccaggtcttcaaggaaacaggggagaattctatgtcttgaacttataatctgagaaggtaattcaagcatggagaacaccaatgaggcacttctgctggttcgttgcatttccctatgtcactgctatgcagcggcaagccgtaggaataaaaattgttaggagaatataaatgatcatgtagcatcattttctcagctgcagactttatctcaacatgcagcgtttaagatccttttcactctgtgtcggattgggttcctcgtccccattcaatgtgccctcctgtttgagacacgcagtccagcctgatggctcacaaacttaggtccccacgccggccgcatcaacatcaatgcaaaacttgttagaagtgacatgcttaaggtactacttcctgagaactgtggaatcagaaacaccgggaatgaggcccaacagtctttcttttaacaagccttccaggtaattttgatacatgctaaagtgtgagaaccactaactctagcctattgatattgcctttttaaacactatccccagccaggtgcggtggcttatgcctgtaatcccagcactttgggagccagggtgggcgaatcacttgagcccaggagtttgagatcaacctgggcaatgggtgaaaccctgtttctactaacaaaatacaaaaaaaacagacaaatagccaggcatggtgggtgggtaccagctcctcaggagactgaggtaggaggattgcttgagcctgggaggtcgggcctgcaatgaacagtgtttgagccattgcattacagcctgggcaacagagcaagaccatctcacaaaaaagaaattaaaaaataaacactacccccaataaatacttattttatatgtagctgattttagttattttcatctgagcaaacttagagtacattgtatatgtacagtattattctaagtattttagaaatagtaactaatttaatcctctaacagccctatgacataatagctctatcatttcaatcttacagtggaggaaacaggcacagagtagctggtggaagatgtgagtcccgtgctgggaagcctggctcccaagccaccctctcacacaggatcctaataagaccactcgtgaccagccctcagctcactctgggctacccttctcaaccctcactttgaatatgcatttgttatttctaccactcattgtycaccttcattcttgcagcaagaactttccagcagtccctggggaacacttcctctaatcccttgctaactaaaatgaagtgtggcatcagcccagcagcggcagtgccccccggaggtgttagaaaggcagaacttcaggctctaccttggagctgctgaatctgaatctcatttaacaagatcctcaggagaagcaaatgcactgtcctaccacagtcttcataacattcttccagggacaagtccatctacaagatgcagaaatgagcattgatctgggggaatttgatcagcaataatcaatccctctagccacaggaactggtgcctgataataacataatgcaaagcaaggcaataaggtgagtgaaacttgaggggcatgacttcttgtgtgtgtttttggaggagagagtttccctgttactctagactggatgccattgtgacgtgagactaaagacgccagactccaccatatagagcagggtatggagccagtcaggtgatatggagccccagacaaagacaggccctgcagcatctttgtctggtgccaggttttcttttaaccttttagttttgtgagtcaatcaatctcctttttactgaatgcaggttgagtcctgtttttgtttctgggtcacatatgcagtaagacatagataccagtacaacatctgctctactcattgggtactttattagctctcacccagggt

SEQ ID NO: 9323 - DNA, 1971 bp, Homo sapiens
ttagattacaaagactggaagattgaatggatattaaatcaccaggtcttcaaggaaacaggggagaattctatgtcttgaacttataatctgagaaggtaattcaagcatggagaacaccaatgaggcacttctgctggttcgttgcatttccctatgtcactgctatgcagcggcaagccgtaggaataaaaattgttaggagaatataaatgatcatgtagcatcattttctcagctgcagactttatctcaacatgcagcgtttaagatccttttcactctgtgtcggattgggttcctcgtccccattcaatgtgccctcctgtttgagacacgcagtccagcctgatggctcacaaacttaggtccccacgccggccgcatcaacatcaatgcaaaacttgttagaagtgacatgcttaaggtactacttcctgagaactgtggaatcagaaacaccgggaatgaggcccaacagtctttcttttaacaagccttccaggtaattttgatacatgctaaagtgtgagaaccactaactctagcctattgatattgcctttttaaacactatccccagccaggtgcggtggcttatgcctgtaatcccagcactttgggagccagggtgggcgaatcacttgagcccaggagtttgagatcaacctgggcaatgggtgaaaccctgtttctactaacaaaatacaaaaaaaacagacaaatagccaggcatggtgggtgggtaccagctcctcaggagactgaggtaggaggattgcttgagcctgggaggtcgggcctgcaatgaacagtgtttgagccattgcattacagcctgggcaacagagcaagaccatctcacaaaaaagaaattaaaaaataaacactacccccaataaatacttattttatatgtagctgattttagttattttcatctgagcaaacttagagtacattgtatatgtacagtattattctaagtattttagaaatagtaactaatttaatcctctaacagccctatgacataatagctctatcatttcaatcttacagtggaggaaacaggcacagagtagctggtggaagatgtgagtcccgtgctgggaagcctggctcccaagccaccctctcacacaggatcctaataagaccactcgtgaccagccctcagctcactctgggctacccttctcaaccctcactttgaatatgcatttgttatttctaccactcattgtccaccttcattcttgcagcaagaactttccagcagtccctggggaacacttcctctaatcccttgctaactaaaatgaagtgtggcatcagcccagcagcggcagtgycccccggaggtgttagaaaggcagaacttcaggctctaccttggagctgctgaatctgaatctcatttaacaagatcctcaggagaagcaaatgcactgtcctaccacagtcttcataacattcttccagggacaagtccatctacaagatgcagaaatgagcattgatctgggggaatttgatcagcaataatcaatccctctagccacaggaactggtgcctgataataacataatgcaaagcaaggcaataaggtgagtgaaacttgaggggcatgacttcttgtgtgtgtttttggaggagagagtttccctgttactctagactggatgccattgtgacgtgagactaaagacgccagactccaccatatagagcagggtatggagccagtcaggtgatatggagccccagacaaagacaggccctgcagcatctttgtctggtgccaggttttcttttaaccttttagttttgtgagtcaatcaatctcctttttactgaatgcaggttgagtcctgtttttgtttctgggtcacatatgcagtaagacatagataccagtacaacatctgctctactcattgggtactttattagctctcacccagggt

SEQ ID NO: 9324 - DNA, 1971 bp, Homo sapiens
ttagattacaaagactggaagattgaatggatattaaatcaccaggtcttcaaggaaacaggggagaattctatgtcttgaacttataatctgagaaggtaattcaagcatggagaacaccaatgaggcacttctgctggttcgttgcatttccctatgtcactgctatgcagcggcaagccgtaggaataaaaattgttaggagaatataaatgatcatgtagcatcattttctcagctgcagactttatctcaacatgcagcgtttaagatccttttcactctgtgtcggattgggttcctcgtccccattcaatgtgccctcctgtttgagacacgcagtccagcctgatggctcacaaacttaggtccccacgccggccgcatcaacatcaatgcaaaacttgttagaagtgacatgcttaaggtactacttcctgagaactgtggaatcagaaacaccgggaatgaggcccaacagtctttcttttaacaagccttccaggtaattttgatacatgctaaagtgtgagaaccactaactctagcctattgatattgcctttttaaacactatccccagccaggtgcggtggcttatgcctgtaatcccagcactttgggagccagggtgggcgaatcacttgagcccaggagtttgagatcaacctgggcaatgggtgaaaccctgtttctactaacaaaatacaaaaaaaacagacaaatagccaggcatggtgggtgggtaccagctcctcaggagactgaggtaggaggattgcttgagcctgggaggtcgggcctgcaatgaacagtgtttgagccattgcattacagcctgggcaacagagcaagaccatctcacaaaaaagaaattaaaaaataaacactacccccaataaatacttattttatatgtagctgattttagttattttcatctgagcaaacttagagtacattgtatatgtacagtattattctaagtattttagaaatagtaactaatttaatcctctaacagccctatgacataatagctctatcatttcaatcttacagtggaggaaacaggcacagagtagctggtggaagatgtgagtcccgtgctgggaagcctggctcccaagccaccctctcacacaggatcctaataagaccactcgtgaccagccctcagctcactctgggctacccttctcaaccctcactttgaatatgcatttgttatttctaccactcattgtccaccttcattcttgcagcaagaactttccagcagtccctggggaacacttcctctaatcccttgctaactaaaatgaagtgtggcatcagcccagcagcggcagtgccccccggaggtgttagaaaggcagaacttcaggctctaccttggagctgctgaatctgaatctcatttaacaagatcctcaggagaagcaaatgcactgtcctaccacagtcttcataacattcttccagggacaagtccatctrcaagatgcagaaatgagcattgatctgggggaatttgatcagcaataatcaatccctctagccacaggaactggtgcctgataataacataatgcaaagcaaggcaataaggtgagtgaaacttgaggggcatgacttcttgtgtgtgtttttggaggagagagtttccctgttactctagactggatgccattgtgacgtgagactaaagacgccagactccaccatatagagcagggtatggagccagtcaggtgatatggagccccagacaaagacaggccctgcagcatctttgtctggtgccaggttttcttttaaccttttagttttgtgagtcaatcaatctcctttttactgaatgcaggttgagtcctgtttttgtttctgggtcacatatgcagtaagacatagataccagtacaacatctgctctactcattgggtactttattagctctcacccagggt

SEQ ID NO: 9325 - DNA, 581 bp, Homo sapiens
ttgttgtggccatgaagaaaagttcgtgtcaaaatgtattcatttcctttcattttcttccgagacgcagacaacttttttaaaaaaatctagtattttgttataagacttttaagcaaatgtactacttttatatgcatgttttgaatgcctatgtaaaaatgtaatgggcacattgcttacagtactctgatgagagcacaccgtttgtctttaaataaacctagatgtgatctttggtttgcatttagtttcaataagccaattattggcagatttttcactgggtggggccgaaacggcggcttattcattttttcttaagcatagatactcaagggggttaagtaactgcacaccactggcaaagatttgtaatcctcagtgctagtaaaggtgaggcacttacccctttaagtgaggagagatggcttccatttaattattgctctgtggcatttctgtrtaggaagtgggaggcactgcagatgctcggaggagttgggaggcccatgtgtttctgcactacctggtctctgtgccctcgcctcccttcagcctgccctctacatagcagcaga

SEQ ID NO: 9326 - DNA, 1965 bp, Homo sapiens
cttcctctagatagtcaagttcgaccgtcttctcagcgctccgccagggccgtgggccgaccccggcggggccgatccgagggcctcactaaaccatccaatcggtagtagcgacgggcggtgtgtacaaagggcagggacttaatcaacgcaagcttatgacccgcacttactgggaattcctcgttcatggggaataattgcaatccccgatccccatcacgaatggggttcaacgggttacccgcgcctgccggcgtagggtaggcacacgctgagccagtcagtgtagcgcgcgtgcagccccggacatctaagggcatcacagacctgttattgctcaatctcgggtggctgaacgccacttgtccctctaagaagttgggggacgccgaccgctcgggggtcgcgtaactagttagcatgccagagtctcgttcgttatcggaattaaccagacaaatcgctccaccaactaagaacggccatgcaccaccacccacggaatcgagaaagagctatcaatctgtcaatcctgtccgtgtccgggccgggtgaggtttcccgtgttgagtcaaattaagccgcaggctccactcctggtggtgcccttccgtcaattcctttaagtttcagctttgcaaccatactccccccggaacccaaagactttggtttcccggaagctgcccggcgggtcatgggaataacgccgccgcatcgccggtcggcatcgtttatggtcggaactacgacggtatctgatcgtcttcgaacctccgactttcgttcttgattaatgaaaacattcttggcaaatgctttcgctctggtccgtcttgcgccggtccaagaatttcacctctagcggcgcaatacgaatgcccccggccgtccctcttaatcatggcctcagttccgaaaaccaacaaaatagaaccgcggtcctattccattattcctagctgcggtatccaggcggctcgggcctgctttgaacactctaattttttcaaagtaaacgcttcgggccccgcgggacactcagctaagagcatcgagggggcgccgagaggcaaggggcggggacgggcggtggctcgcctcgcggcggaccgcccgcccgctcccaagatccaactacgagctttttaactgcagcaactttaatatacgctattggagctggaattaccgcggctgctggcaccagacttgccctccaatggatcctcgttaaaggatttaaagtggactcattccaattacagggcctcgaaagagtcctgtattgttatttttcgtcactacctccccgggtcgggagtgggtaatttgcgcgcctgctgccttccttggatgtggtagccgtttctcaggctccctctccggaatcgaaccctgattccccgtcacccgtggtcaccatggtaggcacggcgactaccatcgaaagttgatagggcagacgttcgaatgggtcgtcgccgccacggggggcgtgcgatcggcccgaggttatctagagtcaccaaagccgccggcgcccgccccccggccggggccggagaggggctgaccgggttggttttgatctgataaatgcacgcatcccccccgcgaagggggtcagcgcccgtcggcatgtattagctctagaattaccacagttatccaagtaggagaggagcgagcgaccaaaggaaccataactgatttaatgagccattcgcagtttcactgtaccggccgkgcgtacttagacatgcatggcttaatctttgagacaagcatatgctactggcaggatcaaccaggtaggtaggtagagcgcggcgaggccccgacgcggccggacggccggccggggggcctcgcgaggacgggcccggcgccccgcaagcgaggaggacgacggacggacggacgggccgcggacgggcggacgggagggagcgagcgggc

SEQ ID NO: 9327 - DNA, 1609 bp, Homo sapiens
gggcgcacgcgcgcgccgaacggggcgacgccacgcggggaggacgggctctccccgacgccgacgcccgggacggacgcctcggggaagggccgcggcaggcccgggaagcgaggcgcacccgggggacgcgccgacccggttcggaagagcgggccgggagaagacgagagaccacgggcgaggccggggcgacggggaaggcgcgagaaaggcggccggcggggaaggggacgccacggggaccccgcgagcgcggccgaccgcagccgggacacacgcgcggggcctcaccgccgccggcggcaccgcgcggcacccggggcggccgaccggccctcggcgatccccgcggctccccccaccaccgccgccgcrgtcgcggccggtcccccggaaccgtctcctcccccgcacgcgccgcaggccgacccccggaaccctccgggaagcccaccgggccccacgcggggcgccaccgacccggtccccaaggcgcgcgccgggggacgcggacgccgggccgatcagtggccggcggcggcgccccacgaggcggtgccgggttcggtcccaggcggggccaccaacggacgtgaagccggtgagccgctcggggggaagaagaggatcggcgggcggcgggcggggaagagggcacagacgggcgagggccggggaccgcgagggcaagggcacccgggagcccgcagaggcggcggctcggggagaaacctcaggcacggccgggccaccaggaaaacacggccgcgggatcccaccgccacagacacgagggcggtcccgcggcgccccgcctgggacgccggacggccctcggcccccaccgagaaccgcctcgcgagccccggggccccgccaccgggggccccggagcgaccgcagccacgaacccgacacgcccgcaccaccgtcgctcgtgattctcgtccatcctccgacccggtcccgctccgggagaccggcgcgcccccaccgtgggacgctttcccagggccaggcgggcccgaccccgtgccacgcaaacgcggtcgtcggcaccggtcacgactcggcacgggagcgggcggagagccgactcgcggcggagggggtcacgcgccggacagagcgccgggcgcgcacacccaccgcccgccggccgccgcgtcccaacccgctgggaacgccgggcccggcccggcgggatcctcccccgactcggaaggggggaggcgcgggccacagtaggcgacgagccgcactcggccaccaccgcggtggccggcggaaccctcgcttctcccccccaaccccgtcgagggggaagcggaggagggtcctctgcgagcgggtcgctaacggcagcgctaccataacggaggcagagacagaggcggcggcccgggggatccggtacccccaaggcacgcctctcagatcgctagagaaggcttttctcaccgagggtgggtcacactccccccacccgccagccgctcctcctcgggcccgcagaggcgccgagggacgcctggggaagggagggggccctgcggtacgaggaaacacctgcgcgcggccacctcgagcgttcgcgttcagggcg

SEQ ID NO: 9328 - DNA, 1609 bp, Homo sapiens
gggcgcacgcgcgcgccgaacggggcgacgccacgcggggaggacgggctctccccgacgccgacgcccgggacggacgcctcggggaagggccgcggcaggcccgggaagcgaggcgcacccgggggacgcgccgacccggttcggaagagcgggccgggagaagacgagagaccacgggcgaggccggggcgacggggaaggcgcgagaaaggcggccggcggggaaggggacgccacggggaccccgcgagcgcggccgaccgcagccgggacacacgcgcggggcctcaccgccgccggcggcaccgcgcggcacccggggcggccgaccggccctcggcgatccccgcggctccccccaccaccgccgccgcagtygcggccggtcccccggaaccgtctcctcccccgcacgcgccgcaggccgacccccggaaccctccgggaagcccaccgggccccacgcggggcgccaccgacccggtccccaaggcgcgcgccgggggacgcggacgccgggccgatcagtggccggcggcggcgccccacgaggcggtgccgggttcggtcccaggcggggccaccaacggacgtgaagccggtgagccgctcggggggaagaagaggatcggcgggcggcgggcggggaagagggcacagacgggcgagggccggggaccgcgagggcaagggcacccgggagcccgcagaggcggcggctcggggagaaacctcaggcacggccgggccaccaggaaaacacggccgcgggatcccaccgccacagacacgagggcggtcccgcggcgccccgcctgggacgccggacggccctcggcccccaccgagaaccgcctcgcgagccccggggccccgccaccgggggccccggagcgaccgcagccacgaacccgacacgcccgcaccaccgtcgctcgtgattctcgtccatcctccgacccggtcccgctccgggagaccggcgcgcccccaccgtgggacgctttcccagggccaggcgggcccgaccccgtgccacgcaaacgcggtcgtcggcaccggtcacgactcggcacgggagcgggcggagagccgactcgcggcggagggggtcacgcgccggacagagcgccgggcgcgcacacccaccgcccgccggccgccgcgtcccaacccgctgggaacgccgggcccggcccggcgggatcctcccccgactcggaaggggggaggcgcgggccacagtaggcgacgagccgcactcggccaccaccgcggtggccggcggaaccctcgcttctcccccccaaccccgtcgagggggaagcggaggagggtcctctgcgagcgggtcgctaacggcagcgctaccataacggaggcagagacagaggcggcggcccgggggatccggtacccccaaggcacgcctctcagatcgctagagaaggcttttctcaccgagggtgggtcacactccccccacccgccagccgctcctcctcgggcccgcagaggcgccgagggacgcctggggaagggagggggccctgcggtacgaggaaacacctgcgcgcggccacctcgagcgttcgcgttcagggcg

SEQ ID NO: 9329 - DNA, 1609 bp, Homo sapiens
gggcgcacgcgcgcgccgaacggggcgacgccacgcggggaggacgggctctccccgacgccgacgcccgggacggacgcctcggggaagggccgcggcaggcccgggaagcgaggcgcacccgggggacgcgccgacccggttcggaagagcgggccgggagaagacgagagaccacgggcgaggccggggcgacggggaaggcgcgagaaaggcggccggcggggaaggggacgccacggggaccccgcgagcgcggccgaccgcagccgggacacacgcgcggggcctcaccgccgccggcggcaccgcgcggcacccggggcggccgaccggccctcggcgatccccgcggctccccccaccaccgccgccgcagtcgcggccggtcccccggaaccgtctcctcccccgcacgcgccgcaggccgacccccggaaccctccgggaagcccaccgggccccacgcggggcgccaccgacccggtccccaaggcgcgcgccgggggacgcggacgccgggccgatcagtggccggcggcggcgccccacgaggcggtgccgggttcggtcccaggcggggccaccaacggacgtgaagccggtgagccgctcggggggaagaagaggatcgrcgggcggcgggcggggaagagggcacagacgggcgagggccggggaccgcgagggcaagggcacccgggagcccgcagaggcggcggctcggggagaaacctcaggcacggccgggccaccaggaaaacacggccgcgggatcccaccgccacagacacgagggcggtcccgcggcgccccgcctgggacgccggacggccctcggcccccaccgagaaccgcctcgcgagccccggggccccgccaccgggggccccggagcgaccgcagccacgaacccgacacgcccgcaccaccgtcgctcgtgattctcgtccatcctccgacccggtcccgctccgggagaccggcgcgcccccaccgtgggacgctttcccagggccaggcgggcccgaccccgtgccacgcaaacgcggtcgtcggcaccggtcacgactcggcacgggagcgggcggagagccgactcgcggcggagggggtcacgcgccggacagagcgccgggcgcgcacacccaccgcccgccggccgccgcgtcccaacccgctgggaacgccgggcccggcccggcgggatcctcccccgactcggaaggggggaggcgcgggccacagtaggcgacgagccgcactcggccaccaccgcggtggccggcggaaccctcgcttctcccccccaaccccgtcgagggggaagcggaggagggtcctctgcgagcgggtcgctaacggcagcgctaccataacggaggcagagacagaggcggcggcccgggggatccggtacccccaaggcacgcctctcagatcgctagagaaggcttttctcaccgagggtgggtcacactccccccacccgccagccgctcctcctcgggcccgcagaggcgccgagggacgcctggggaagggagggggccctgcggtacgaggaaacacctgcgcgcggccacctcgagcgttcgcgttcagggcg

SEQ ID NO: 9330 - DNA, 727 bp, Homo sapiens
caaggccagggtctaaaggcggcttcagaagtggcccccagaaggagggggcatgttgctcaagtcttgtgaagggcatcaggggctggccatacaagaatcactgagaaacaatcccgcccctgatccctaagagaacgactttgaacatctgccaagcccagaggacatcaaagcagaacatgcagcccaggtctggaaagctctgtctctccctacaaggcctagaacctggatcgttactggtgcagcctctgggggcaaggtgagggagggaggaatcccgcagcttccctcttcatgcaggctttggagctgggttaacatgcacttcaaattaagtttggagtaatatgcgttagatygaacattttgttttatgaaatgagactattcccgtggctagagagccagaaaaggcttgagacacactgagagtttatccaggtcccgggaaaaaactagcccaggacccagggggaacagggtccggttccctggggacagcggcatgtggagtccagtgtcttcctatactgggagcatttatctatttataaggtttgatttcctaatttagggatagacatttttctttttgataatggaagcttgcattcattgtacactttactgcatgccaagaactgtgctaaacatttaaatgtacactttctaatttcattctcaagcaaacctaggaggcacaaccatctactgtacagac

SEQ ID NO: 9331 - DNA, 727 bp, Homo sapiens
caaggccagggtctaaaggcggcttcagaagtggcccccagaaggagggggcatgttgctcaagtcttgtgaagggcatcaggggctggccatacaagaatcactgagaaacaatcccgcccctgatccctaagagaacgactttgaacatctgccaagcccagaggacatcaaagcagaacatgcagcccaggtctggaaagctctgtctctccctacaaggcctagaacctggatcgttactggtgcagcctctgggggcaaggtgagggagggaggaatcccgcagcttccctcttcatgcaggctttggagctgggttaacatgcacttcaaattaagtttggagtaatatgcgttagatcgaacattttgttttatgaaatgagactattcccgtggctagagagccagaaaaggcttgagacacactgagagtttatccaggtcccgggaaaaaactagcccaggacccaggsggaacagggtccggttccctggggacagcggcatgtggagtccagtgtcttcctatactgggagcatttatctatttataaggtttgatttcctaatttagggatagacatttttctttttgataatggaagcttgcattcattgtacactttactgcatgccaagaactgtgctaaacatttaaatgtacactttctaatttcattctcaagcaaacctaggaggcacaaccatctactgtacagac

SEQ ID NO: 9332 - DNA, 625 bp, Homo sapiens
ggtggctgggcatactctcactgtccagacgatgactggattcgggggtcttttctggtgccagatttccagtgtgtgtcggcagctctggtttttgttggtcccttatcaccaaagaccacttcccctttgcccttgtgggggatgtgaagggtggccctgaatcacgcacttccacttcctctggtcttcgctggagctctgaaaaggtgtgaacaccaaacactactattctgggctgatggcgttcaatctggccttctgtgcacctggagcatgggcagctcatcttggtctcgctgatggcactgttttccagtggctgaaggagcaggtgatgctctgttttgcatgttctgtgctttctgcagactcccctggtcacacktgggcctgggagctgcatggtcacccagacagggcatgtctcagcctgccagccttggaaggaaacatccccaacccatcagtgagtccttgccgcatcctatgaccttccgggtcccagggcccagagcacacctgcctctcatgagactttcctcagctgggatttaagtctgaattgcttaagaggaaaggagcaggtccacaaggactcagaggctacagcaagtgtccagtg

SEQ ID NO: 9333 - DNA, 1823 bp, Homo sapiens
  misc_feature (1)...(1823): n = A,T,C or G
accagcctcagcctcccaaagtgctgagattacaggcgtttaaagtctttcctggtattaatcattaggtagaaagaggataaattctaaattgtttccccttaacatgacaatttgttcggtgtaaatttattttgaaatgctactgaaatttttctttaaactcgttccacatgagacattaaaaacaaacagtaaattcatgttaaacttgcctttattttttactatttcatagttatctaacatagaataaaaagggttaaataagagrggatcagagcaacaaaaatcttcataatctagaagataaagttcccatgaaaaacaagttgaaaagcttttaaggagagaaaagcaacacataaggatatcagagtcagatacaacgtaaaaaaaaaaatttgatctgacattccaaacacatgaaaaattagtgagagaaaattaaaaattaaagcaacaaaacatattctgctacagtccaacctccctagcaacaatttgcattcatatgcattttatattccataccttgactgtgaaatttaattaaaataattataaatacagctccttgaggctactgaggatttcacagtttgaatctttacttttgaaacattttattttcataaaatatcatgcatcactaatggtcttgtcagaatttgtcttcagaagaaatgacaactcatccagttcaaatacatccaagtaagctaaatttagatggaatgacctaggaaccttgactcagggttcagtcaatatataaagtgaataactgaaaactgtccctgtagttccaaattggccttgattttattcatttagatggaggtttgagggaccnnnnnnnnnnnnnnnnnnnnnnnnnnnnnnnnnnnnnnnnnnnnnnnnnnnnnnnnnnnnnnnnnnnnnnnnnnnnnnnnnnnnnnnnnnnnnnnnnnnntgccaaatttccttttttattatttctacttcctatcagagaaaactatgtagttttctctgctggttcactgcaggctgtcttctgcctttacctctctactcagtctagagtgtggcaaccttcctgaccgtggtggacagggtaaagctctgggcatttttggactgtgtgtctgagattttgcatattttactttactttcctaatctcaatgtcgttacctctaaaatgaggacagtatccttcttgctaatttctagtatacaaactgatacataatacattttaataaatattgatcagatgatctaaaaagcaatctcatcatagcatcatggcaaagatgcaatcccttatcatctttcctctagattcttgcaatggtctactagtgttatagatgaactaacttccctaaaagagtctcagtgtgtctgccctcacaacccttcaaatctctgagtcaacacaatatccagcgtgggcccattgtagcctaaaaagtgtgcatctctcctctcctcagaaccttccagagcttactattgcacaagaatgtgagtttgttattgtttgtatgggtgtgtgtatatgtgtgtgagagactacaatgtgtatttgctgaggtaatcctaggactcaccaacactggagtggaaaaatatgggagggaagaaagtaagccaataaaagttttgttatcaagcagcgtactgctgtgggcaccaggtgcctaggctcagcaggaaactcagaaggatagggtgaatatgacccagagcagttccaaccaaggttccaagaagctgacaatttggtccataccatctgacaattattggttgatggctgctttggggaagga

SEQ ID NO: 9334 - DNA, 1823 bp, Homo sapiens
  misc_feature (1)...(1823): n = A,T,C or G
accagcctcagcctcccaaagtgctgagattacaggcgtttaaagtctttcctggtattaatcattaggtagaaagaggataaattctaaattgtttccccttaacatgacaatttgttcggtgtaaatttattttgaaatgctactgaaatttttctttaaactcgttccacatgagacattaaaaacaaacagtaaattcatgttaaacttgcctttattttttactatttcatagttatctaacatagaataaaaagggttaaataagagaggatcagagcaacaaaaatcttcataatctagaagataaagttcccatgaaaaacaagttgaaaagcttttaaggagagaaaagcaacacataaggatatcagagtcagakacaacgtaaaaaaaaaaatttgatctgacattccaaacacatgaaaaattagtgagagaaaattaaaaattaaagcaacaaaacatattctgctacagtccaacctccctagcaacaatttgcattcatatgcattttatattccataccttgactgtgaaatttaattaaaataattataaatacagctccttgaggctactgaggatttcacagtttgaatctttacttttgaaacattttattttcataaaatatcatgcatcactaatggtcttgtcagaatttgtcttcagaagaaatgacaactcatccagttcaaatacatccaagtaagctaaatttagatggaatgacctaggaaccttgactcagggttcagtcaatatataaagtgaataactgaaaactgtccctgtagttccaaattggccttgattttattcatttagatggaggtttgagggaccnnnnnnnnnnnnnnnnnnnnnnnnnnnnnnnnnnnnnnnnnnnnnnnnnnnnnnnnnnnnnnnnnnnnnnnnnnnnnnnnnnnnnnnnnnnnnnnnnnnntgccaaatttccttttttattatttctacttcctatcagagaaaactatgtagttttctctgctggttcactgcaggctgtcttctgcctttacctctctactcagtctagagtgtggcaaccttcctgaccgtggtggacagggtaaagctctgggcatttttggactgtgtgtctgagattttgcatattttactttactttcctaatctcaatgtcgttacctctaaaatgaggacagtatccttcttgctaatttctagtatacaaactgatacataatacattttaataaatattgatcagatgatctaaaaagcaatctcatcatagcatcatggcaaagatgcaatcccttatcatctttcctctagattcttgcaatggtctactagtgttatagatgaactaacttccctaaaagagtctcagtgtgtctgccctcacaacccttcaaatctctgagtcaacacaatatccagcgtgggcccattgtagcctaaaaagtgtgcatctctcctctcctcagaaccttccagagcttactattgcacaagaatgtgagtttgttattgtttgtatgggtgtgtgtatatgtgtgtgagagactacaatgtgtatttgctgaggtaatcctaggactcaccaacactggagtggaaaaatatgggagggaagaaagtaagccaataaaagttttgttatcaagcagcgtactgctgtgggcaccaggtgcctaggctcagcaggaaactcagaaggatagggtgaatatgacccagagcagttccaaccaaggttccaagaagctgacaatttggtccataccatctgacaattattggttgatggctgctttggggaagga

SEQ ID NO: 9335 - DNA, 884 bp, Homo sapiens
caaaaaagaaccaaggtcatgggtccattccttcactgttctacttaaccctctctgttctacaggcctgtgactacctctctaacaggtggtcctgggaggcagcaactgtgttcctctctgtatttccagcatataccaaatgcctaggttatataggtgtccaataaacgcttgttggttttaatttgattgttgcaaagacaaccagttgaagtatggttagaatagtataaacctggctgggtgcagtggctcatgcctgtaatcccagcactttgggaggctgaggtgggaggatcacttgaggtcaggagttcgacaccagcctggccaacatggtgaaaccttatctctactaaaagtgcaaaaattagccaggcatcatggcacatgcctgtaatcccagctacccaggaggctgaggcaagagaattgcttgaacctgggaggtggaggttgcagtgagccgagattgtgccactgcatccagcctgggtgtcagagtgaggctgtctcagaaaaaaaaaagtggggrggggggggtggttccaagatggccgaataagaacagctccagtctacagctcccagcgtgagcaatgcagaagacgggtgatttctgcatttccaactgaggtaccgggttcatctcactggggcttgtcagacagtgggtgcagtgcaccgagcgtgagctgaagcagggtgcggcattgcctcacccaggaagtgcaaggggtcagggaattccctttccgagccaagcgaagctgtgacagatggcaactggaaaatcaggtcactcccaccctaatcctgcacttttccagtggtcttagcaaacggcacactaggagattatatcccgtgcctggctcaga

SEQ ID NO: 9336 - DNA, 884 bp, Homo sapiens
caaaaaagaaccaaggtcatgggtccattccttcactgttctacttaaccctctctgttctacaggcctgtgactacctctctaacaggtggtcctgggaggcagcaactgtgttcctctctgtatttccagcatataccaaatgcctaggttatataggtgtccaataaacgcttgttggttttaatttgattgttgcaaagacaaccagttgaagtatggttagaatagtataaacctggctgggtgcagtggctcatgcctgtaatcccagcactttgggaggctgaggtgggaggatcacttgaggtcaggagttcgacaccagcctggccaacatggtgaaaccttatctctactaaaagtgcaaaaattagccaggcatcatggcacatgcctgtaatcccagctacccaggaggctgaggcaagagaattgcttgaacctgggaggtggaggttgcagtgagccgagattgtgccactgcatccagcctgggtgtcagagtgaggctgtctcagaaaaaaaaaagtgggggggggggggtggttccaagatggccgaataagaacagctccagtctacagctcccagcgtgagcratgcagaagacgggtgatttctgcatttccaactgaggtaccgggttcatctcactggggcttgtcagacagtgggtgcagtgcaccgagcgtgagctgaagcagggtgcggcattgcctcacccaggaagtgcaaggggtcagggaattccctttccgagccaagcgaagctgtgacagatggcaactggaaaatcaggtcactcccaccctaatcctgcacttttccagtggtcttagcaaacggcacactaggagattatatcccgtgcctggctcaga

SEQ ID NO: 9337 - DNA, 884 bp, Homo sapiens
caaaaaagaaccaaggtcatgggtccattccttcactgttctacttaaccctctctgttctacaggcctgtgactacctctctaacaggtggtcctgggaggcagcaactgtgttcctctctgtatttccagcatataccaaatgcctaggttatataggtgtccaataaacgcttgttggttttaatttgattgttgcaaagacaaccagttgaagtatggttagaatagtataaacctggctgggtgcagtggctcatgcctgtaatcccagcactttgggaggctgaggtgggaggatcacttgaggtcaggagttcgacaccagcctggccaacatggtgaaaccttatctctactaaaagtgcaaaaattagccaggcatcatggcacatgcctgtaatcccagctacccaggaggctgaggcaagagaattgcttgaacctgggaggtggaggttgcagtgagccgagattgtgccactgcatccagcctgggtgtcagagtgaggctgtctcagaaaaaaaaaagtgggggggggggggtggttccaagatggccgaataagaacagctccagtctacagctcccagcgtgagcaatgcagaagacgggtgatttctgcatttccaactgaggtaccgggttcatctcactggggcttgtcagacagtgggtgcagtgcaccgagcgtgagctgaagcagggtgcggcattgcctyacccaggaagtgcaaggggtcagggaattccctttccgagccaagcgaagctgtgacagatggcaactggaaaatcaggtcactcccaccctaatcctgcacttttccagtggtcttagcaaacggcacactaggagattatatcccgtgcctggctcaga

SEQ ID NO: 9338 - DNA, 713 bp, Homo sapiens
cctgtggggtggtggttcaagatatcctaggcatgcctacttcattaagccagcagtaaatcagttaagattaatgagatataaatacatcagtctcagaaaaactcttcacattgaaattgaacaaataattcatttgttagtaaagtctgtctataggaatggcattagaacattgaaaccactgtacaattttcttattacagttattttctggctctccagctgtcacgatgacaccaacaagattgaagtggtctgaagggaagaaagaggggaaaaaaggtactaattgtacttactctctgttcttactaaatgtaattcctttctgcatctagtcagtagcatttgtttgaattcccaggatagtacatttgtagtcagaagtgacataaaaattacaaggccaggtccttgcccttgagtkcattcaccagatggttattgaaccatttactcagcattgtcttgggtgctaagggtagagctgtgaacacagacccacatggtccctgtgttcttggacagacaggacacatgggggaaaataccttaagaatacttgcgaagcaaattaaaaacaagtgtaaatgaatttgtgaaaccaagttcaacagtgctgggagtatgcttatggaatagttaggttccttttctgtgtaggccagccctaattagtgaagctttctagatcaacagctcgtgcctaa

SEQ ID NO: 9339 - DNA, 806 bp, Homo sapiens
cagatcccagcctgagacctgccatgtctcccagccctccagcacagagctcagcccaagtcccctctctctgcaggtcccctgaagaccttgccaaagtgtgagatcrccctggagaaactcaagaatgacatggcggtggtgagtgggatgctggggacccctgggggatcggggctccctcaagagctcctgggggcaccactggaggggccttcatggtcaggctgggtgggggctgggcctgatctgagaccctgcccaccaggcctcttccaggccaggtttgctgtgctgggcgggaacgtgggagaagtcaccctctgtctgtggcccccgtgggtgcctctgccacccggtccagagacagcagggactctggggaggacaaggctgtgggggtggggattatacccaggatcggccaacattgtctgcacaagggtggaggctaagagagaggcctcgggaatctggctgtgagtgaggactggccagaggtaggaaggccccctaaatggagaaccctcaggtcccgggcttctgaccgtgcccatcctaccgccagcccgctgcccctggtgccgctgaccaaacagcagtacctatgccagcagctcctggatgctgtcctagccaatatctgctcaccctcttcagccattccctgtaccgcacattcgctccagccatgactgccatccacggcccactcatcacatacatccagctgggctgggctttacagagggcggatggccagccctggaccatgtgtgcccactgtggtcaccatgctgcctcct

SEQ ID NO: 9340 - DNA, 806 bp, Homo sapiens
cagatcccagcctgagacctgccatgtctcccagccctccagcacagagctcagcccaagtcccctctctctgcaggtcccctgaagaccttgccaaagtgtgagatcaccctggagaaactcaagaatgacatggcggtggtgagtgggatgctggggacccctgggggatcggggctccctcaagagctcctgggggcaccactggaggggccttcatggtcaggctgggtgggggctgggcctgatctgagaccctgcccaccaggcctcttccaggccaggtttgctgtgctgggcgggaacgtgggagaagtcaccctctgtctgtggcccccgtgggtgcctctgccacccggtccagagacagcagggactctggggaggacaaggctgtgggggtggggattatacccaggatcggccaacattgtctgcacaagggtggaggctragagagaggcctcgggaatctggctgtgagtgaggactggccagaggtaggaaggccccctaaatggagaaccctcaggtcccgggcttctgaccgtgcccatcctaccgccagcccgctgcccctggtgccgctgaccaaacagcagtacctatgccagcagctcctggatgctgtcctagccaatatctgctcaccctcttcagccattccctgtaccgcacattcgctccagccatgactgccatccacggcccactcatcacatacatccagctgggctgggctttacagagggcggatggccagccctggaccatgtgtgcccactgtggtcaccatgctgcctcct

SEQ ID NO: 9341 - DNA, 675 bp, Homo sapiens
tccaaaaactggacaaactttctctttgcataaagtcaaatcagacacagatggatggragagtgtcccctctgcccacctccaaaattggagcttagcctgggagggttctttgcttcactcaggaaagaatttatgagtgagctgttggtggaagaaagcaggtatactgaagcactggaatacacacactgactgctccttgtagagcagggcaaatccgtaggtggtgtgaccagagtagcagcatacaagctgttggctagcagtgtttacactcatttttaattatatgcaaataaaggagcaagttattcagatatctctagaaaagaagcagtaacttctgggtgttgctgtggcatttgtaaactgtcatagcattggtgggagcgtcttacgtgcagtgaaagcaactagagtttgccttccgtgccattttgctggttcgagtttcttttttccattctgtcgggaccaggatataagtcctgccaatctcctgctctgtttccattagctctttcccattcttttttctttttttttttttttttttttgagacagagagtcttgctctgtcgcccagggtaagataagctctccactcacttcaacctccactttccaggttcaagcaattctcctgcctcagcctcctgagtagttgggac

SEQ ID NO: 9342 - DNA, 675 bp, Homo sapiens
tccaaaaactggacaaactttctctttgcataaagtcaaatcagacacagatggatggaagagtgtcccctctgcccacctccaaaattggagcttagcctgggagkgttctttgcttcactcaggaaagaatttatgagtgagctgttggtggaagaaagcaggtatactgaagcactggaatacacacactgactgctccttgtagagcagggcaaatccgtaggtggtgtgaccagagtagcagcatacaagctgttggctagcagtgtttacactcatttttaattatatgcaaataaaggagcaagttattcagatatctctagaaaagaagcagtaacttctgggtgttgctgtggcatttgtaaactgtcatagcattggtgggagcgtcttacgtgcagtgaaagcaactagagtttgccttccgtgccattttgctggttcgagtttcttttttccattctgtcgggaccaggatataagtcctgccaatctcctgctctgtttccattagctctttcccattcttttttctttttttttttttttttttttgagacagagagtcttgctctgtcgcccagggtaagataagctctccactcacttcaacctccactttccaggttcaagcaattctcctgcctcagcctcctgagtagttgggac

SEQ ID NO: 9343 - DNA, 809 bp, Homo sapiens
atctgtgtggagctaaagtcacagcagacatttatccatcctcggttttcacaccraggtcaggccctgtgctagtacatgatgagctgtggccatagttacctgaggctgggctcagcccattaaaataaaacttcttttggtacgatctgttttggggtggcctgagctctccccaggggggtgaggtgaggaactgtgggggcaggtgttctggggtcatataagcctcagcgtccatcctttccaaggtcccagtggtgctgacgaccttgacgcccccaggtttgagccattgaccttcctttggcttgcaggtggctctggtgaggggcttcagttcctcctgagcttggagagctcactgcctgctcccttgtgaggactgctagaaatgcccgccttgttctgagctagcattggcctcccccagccaccttcagaggtttgcaggctgttctcagcctttctcgatctcctcacctttgagccacctccaaggagaagccttctctgccttcctcctttctccacctgacctcccatgatagtaggtgtttccttcttttaaacactgaacacagtgaatcctggtttgtccctcgaaccagaccagagctttctgagtgagaaattgtatcttagtcatttctgtttctgctctgggcacaagcttgtgtcaatgtaggttctcagccaatcctgtctgaatccaacccccaggtgatccccaacaactctcaaaataatctaagatttctgtgaccctagtgccaagctcacctgcctacaagtgtctgaatctagtt

SEQ ID NO: 9344 - DNA, 809 bp, Homo sapiens
atctgtgtggagctaaagtcacagcagacatttatccatcctcggttttcacaccaaggtcaggccctgtgctagtacatgatgagctgtggccatagttacctgaggctgggctcagcccattaaaataaaacttcttttggtacgatctgttttggggtggcctgagctctccccaggggggtgaggtgaggaactgtgggggcaggtgttctggggtcatataagcctcagcgtccatcctttccaaggtcccagtggtgctgacgaccttgacgcccccaggtttgagccattgaccttcctttggcttgcaggtggctctggtgaggggcttcagttcctcctgagcttggagagctcactgcctgctcccttgtgaggactgctagaaatgcccgccttgttctgagctagcattggcctcccccagccaccttcagaggtttgcaggctgttctcagcctttctcgmtctcctcacctttgagccacctccaaggagaagccttctctgccttcctcctttctccacctgacctcccatgatagtaggtgtttccttcttttaaacactgaacacagtgaatcctggtttgtccctcgaaccagaccagagctttctgagtgagaaattgtatcttagtcatttctgtttctgctctgggcacaagcttgtgtcaatgtaggttctcagccaatcctgtctgaatccaacccccaggtgatccccaacaactctcaaaataatctaagatttctgtgaccctagtgccaagctcacctgcctacaagtgtctgaatctagtt

SEQ ID NO: 9345 - DNA, 768 bp, Homo sapiens
ttttttttttttttttaaggcggagtctcactctgttgcccaggctggagtgcagtggtgtgatttcggctcactgcaacctccgcctcccgggttcaagcgatgctcctgcctcagccttctgagtagctgagactacaggcgcacaccaccacgccaggctattttttttttcttttttatacaagagttttgctctgtcgcccaggctggagtgcaatggcgctatctcagctcactgcaacctccgcctcctcggtaagaaaactgtcatgacagagaggttaagactctagtccaaggtctgtgctaaagccagcccagcggactgtcgscagaatgaaccaacgggaaagaggtcagaaggagccagatccgccagtgccagccctctccagggctccctggggacccccagcgggcaagggctgcaggcggcccaggctaaacgtgcagtgagtcccgctctcagaggtatctgcgccccgcctgcctccgccccgccccttgttctggtttgtccagtcccacagagtcccacagtcttcatgtaaatgaggcacccagagagagcctatgcgagcgtggcaggggcgtggccttccacctcccgagcatcgctctgattcattgttaaaataaagaggccatgaccctggcactcccaccccggcagcccctgtgcgtggaaacccagccaaggttagcactgggcctcagaaaagaggagctggtagggggaggcctacaggaggggtaggggtcgag

SEQ ID NO: 9346 - DNA, 768 bp, Homo sapiens
ttttttttttttttttaaggcggagtctcactctgttgcccaggctggagtgcagtggtgtgatttcggctcactgcaacctccgcctcccgggttcaagcgatgctcctgcctcagccttctgagtagctgagactacaggcgcacaccaccacgccaggctattttttttttcttttttatacaagagttttgctctgtcgcccaggctggagtgcaatggcgctatctcagctcactgcaacctccgcctcctcggtaagaaaactgtcatgacagagaggttaagactctagtccaaggtctgtgctaaagccagcccagcggactgtcggcagaatgaaccaacgggaaagaggtcagaaggagccagatccgccagtgccagccctctccagggctccctggggacccccagcgggcaagggctgcaggcggcccaggctaaacgtgcagygagtcccgctctcagaggtatctgcgccccgcctgcctccgccccgccccttgttctggtttgtccagtcccacagagtcccacagtcttcatgtaaatgaggcacccagagagagcctatgcgagcgtggcaggggcgtggccttccacctcccgagcatcgctctgattcattgttaaaataaagaggccatgaccctggcactcccaccccggcagcccctgtgcgtggaaacccagccaaggttagcactgggcctcagaaaagaggagctggtagggggaggcctacaggaggggtaggggtcgag

SEQ ID NO: 9347 - DNA, 539 bp, Homo sapiens
catgcagttgctcaaagaatgtttggacccatgcgcactggagtttgaaaacatattggtataggaaaatgcaggttatagaacagtacttagactatggacccatttatatgaaacacttagatctccctgtgtatgtgtaacacatctaggaaaacactcgaagaggaaacacatcaaataaatgagaatgaaaactctgggaagaagttggagtgcaggaggggtgatttttcacactctactttatcatatatttattatttgaaccttttcagtgaactggtattcaccttatcacttaggtgatacatttttaaaaggcagaaaccattttaaaaaatgacacatactggtgattttgaattctcatactgccttaaaaaatattgaatggtagttatctactgcttttttttcctttttctttgtctgttcttgaaactattttgatcccatctgttctagagaggaggggaaggaactggttacttcgtggacttctctgtgcggaactgcyccagacaccatttccccag

SEQ ID NO: 9348 - DNA, 544 bp, Homo sapiens
tccctccttagttgggagccccatcacgttcctccgaagctctagttgtgtgataaggagggtggaatctgagacagagaacgatggccctccaaggagggagttcggggtgaggaaaacagcaaaaccatgtgctagacaagatcttcaactgcagggctctggaggcaactgggaagttttgaaagtgcagattgaagctcagggccgctgtgggtggcgcaggaactgcagaagacaagataggattagggagggccagcaggttgccagaggcccttttccacctgctgggcttagaggggcgggactctgcccgctccctcacttggttgggtttaaatgaccactccccgccctagctgtgcctytgagtgtgtggcaagggattgcagacgggagactgcttgtcaattcagggaagtcagcctctttctgccacttaattcgcccatcagtagagatccgactttcccacggttcactgtcacccccattgcacaggtggggaatccaaggcacagaggcgtctgggccagagtcc

SEQ ID NO: 9349 - DNA, 583 bp, Homo sapiens
gccaccacgcccgactaattttgaatttttaatagagacggggtttctcyatgttggtcaggctggtctggaactcccgacctcaggtgatctgcccgccttggcctcacaaagtgctgggattacaggcttgagccaccatgcacggcctggatagatcgtattataaccatgatgcagtgaaaagagtatagagagaagccagggtgtaattccctgccttctgctccttaggtatgtggccttgaacaagtcattttcacatttaagaacctcaaatactctataaaatgaggttgatgcttttctagcaggatttatatcagataagagtaatggatgggaaatatttgtaaactctaaaagtttaggctgttcttaataatgtgctgattacattctgtcactatcagatgaacctttttttctgactttcccctttttttttctttttgactgcttttatcttagacctattagcaacttgcatattaattatgtagttacagcagttaaaagaactaagatgtcaaccttaagcagctgtaataatgttgatgtgtaactgactagttaatagtaa

SEQ ID NO: 9350 - DNA, 556 bp, Homo sapiens
ataccagggagtgtgccctatataaaagagaataacctagcattattaggttgtttacctaatttgttagggatccttggagcctatgtgtttggtcagtgtcagccctgcttctttaccttctacaccattagtcccttcccagcagcccactggcagttgttttccctgttcaggttaccttttcyccaaatttggggcattagtaagaatcctcaggtttgaccagttgtgtagcacttttaatggattgagacagtattaggaatcagctgcatcagaatcatttggttctttttacagctgcactttttaagcgtatggcatggcttaaactcttctccttgattaattaacactgtcgagttttgtttgattaattttagatgggagaagttgagagaatgatgatacatcatacagctgctgacttttttctattttttttttgcttatttcattaggaattagatggactgtgttctagatgatttcaccaaatcacttctctttttgctagaatcattttagttgctattggtaggacttactctat

SEQ ID NO: 9351 - DNA, 194 bp, Homo sapiens
ccatctcaaaaaaaaagaaacttgcagacatcatgaccattcacccctaaatacktcatatacatctcttacacaatcataatagaatcatcatgtttaatgagttaataatttttaatgtcatctagcattaaacttctccaatttgaatgccttttatagcatttaatttttcctaagtataattaccaaat

SEQ ID NO: 9352 - DNA, 606 bp, Homo sapiens
tgctaatttcagcagttctgacatattaactcatttaactcccacagtaattattacagttattatgaggtagttattaccatatcattctcaatttatagatgagaaaastgaaacagaagagggcaagtagcttcccaaggtcacacagccagtaagtggcaggcctggacctgaagctagtaatgatatttaatggttcttgaattttgccacctatttctctataaattatacgatgcaatagtctcaaaaattcaatggtaatggacgttcacttatagtatgaattcttgtattttttaagtctttgaaaaataaccaattgacatagttaggctgaagagtcatattcttttaaacagttagacatgggatttgggagtcactcaattccaataccgtctgggtatctgtggggacactaggctggctcctttagctttgcatcattgccatcaaaccacaggccaattctgtggtcaggcagctggaccagctatacagttagatcagctggtggggctatttggtcaaaaggtcaaattattttgcatagataatagcaaatatttggatgcataatctccaaaatcagataatctc

SEQ ID NO: 9353 - DNA, 606 bp, Homo sapiens
tgctaatttcagcagttctgacatattaactcatttaactcccacagtaattattacagttattatgaggtagttattaccatatcattctcaatttatagatgagaaaactgaaacagaagagggcaagtagcttcccaaggtcacacagccagkaagtggcaggcctggacctgaagctagtaatgatatttaatggttcttgaattttgccacctatttctctataaattatacgatgcaatagtctcaaaaattcaatggtaatggacgttcacttatagtatgaattcttgtattttttaagtctttgaaaaataaccaattgacatagttaggctgaagagtcatattcttttaaacagttagacatgggatttgggagtcactcaattccaataccgtctgggtatctgtggggacactaggctggctcctttagctttgcatcattgccatcaaaccacaggccaattctgtggtcaggcagctggaccagctatacagttagatcagctggtggggctatttggtcaaaaggtcaaattattttgcatagataatagcaaatatttggatgcataatctccaaaatcagataatctc

SEQ ID NO: 9354 - DNA, 606 bp, Homo sapiens
tgctaatttcagcagttctgacatattaactcatttaactcccacagtaattattacagttattatgaggtagttattaccatatcattctcaatttatagatgagaaaactgaaacagaagagggcaagtagcttcccaaggtcacacagccagtaagtggcaggcctggacctgaagctagtaatgatatttaatggttcttgaattttgccacctatttctctataaattatacgatgcaatagtctcaaaaattcaatggtaatggacgttcacttatagtatgaattcttgtattttttaagtctttgaaaaataaccaattgacatagttaggctgaagagtcatattcttttaaacagttagacatgggatttgggagtcactcaattccaataccgtctgggtatctgtggggacactaggctggctcctttarctttgcatcattgccatcaaaccacaggccaattctgtggtcaggcagctggaccagctatacagttagatcagctggtggggctatttggtcaaaaggtcaaattattttgcatagataatagcaaatatttggatgcataatctccaaaatcagataatctc

SEQ ID NO: 9355 - DNA, 565 bp, Homo sapiens
gctccaagtttgggggttggggaacatgaagataaagagccaacggtttggtcagctcaagagtttggcttctactctgagagcaatgggagtctgcygaaggagttatgatggagactgatgcttcgaattggctaaaggtggaagatgtcctagtgaggagagactagacgcacgaaactgctagggcagatgggaactcctggcagtggcagcacgaggcaaaggagaggacaagccagacacgcttaaaaggccactgctgtgtcctctgccctgagcagcagagaggctggcacacaatatgtgcccaatacaggtctgttgaattaaacattattttaaaagactacttcacttacattaatatttaaagaaggaagccacagcagatagtatcagagagctgtataaataatgtatcacattctagagagatacacgaaggatttacgctttgagtataaactaggagagttttataatgttctctcttctctttcttcaaataaactaatatgtgagctcaggatattaattcaggattttccagggtcttgaaggt

SEQ ID NO: 9356 - DNA, 555 bp, Homo sapiens
aatcaattcactgacctgctgaggttcaagaattctgattcctcaagttcattccaaaaaatgcttttattcctttttttttttttttttttggctcaacaacttcctaaaacctccaaaccagcatgtggaagaccctacacattcacaaactcttaaaactgcatttctgaaggcttagtcagtaatttttttttttttttttttgagacagagtctcgctctgtcgcccaggctggagtgcagtggcgcgatctcggctcgctgcaagctccgcctcccrggttcacgccattctcctgcctcagcctccccagtagctgggactacaggcgcccgccaccacgcccaggtaattttttgtatttttagtagagacgggatttcaccgcgttagccaggatggtctcgatctcctgacctcgtgatccacccgcctcggcctcccaaagtgctgggattacaggcgtgagccacccgcgcccggcccttagtcagtaatcttaataaggaaaatggtttaacattttcagggcatcctatattctttaaaca

SEQ ID NO: 9357 - DNA, 555 bp, Homo sapiens
aatcaattcactgacctgctgaggttcaagaattctgattcctcaagttcattccaaaaaatgcttttattcctttttttttttttttttttggctcaacaacttcctaaaacctccaaaccagcatgtggaagaccctacacattcacaaactcttaaaactgcatttctgaaggcttagtcagtaatttttttttttttttttttgagacagagtctcgctctgtcgcccaggctggagtgcagtggcgcgatctcggctcgctgcaagctccgcctcccgggttcacgccattctcctgcctcagcctccccagtagctgggactacaggcgcccgccaccacgcccagrtaattttttgtatttttagtagagacgggatttcaccgcgttagccaggatggtctcgatctcctgacctcgtgatccacccgcctcggcctcccaaagtgctgggattacaggcgtgagccacccgcgcccggcccttagtcagtaatcttaataaggaaaatggtttaacattttcagggcatcctatattctttaaaca

SEQ ID NO: 9358 - DNA, 555 bp, Homo sapiens
aatcaattcactgacctgctgaggttcaagaattctgattcctcaagttcattccaaaaaatgcttttattcctttttttttttttttttttggctcaacaacttcctaaaacctccaaaccagcatgtggaagaccctacacattcacaaactcttaaaactgcatttctgaaggcttagtcagtaatttttttttttttttttttgagacagagtctcgctctgtcgcccaggctggagtgcagtggcgcgatctcggctcgctgcaagctccgcctcccgggttcacgccattctcctgcctcagcctccccagtagctgggactacaggcgcccgccaccacgcccaggtaattttttgtatttttagtagagacgggatttcaccgcgttagccaggatggtctcgatctcctgacctcgtgatccacccgcctcggcctcccaaagtgctggsattacaggcgtgagccacccgcgcccggcccttagtcagtaatcttaataaggaaaatggtttaacattttcagggcatcctatattctttaaaca

SEQ ID NO: 9359 - DNA, 773 bp, Homo sapiens
gtctttttagagattgttttgatatgtgcacccacccttggctactagatggatggttctaattagtttagtcaattgagtcaaataatcagtcattcaatcaagcaatcagttgacctgcttctacccttctcccctcaccaaagtggcttatttgattatgctgttgttcagttttacatttaatcctcatgcgtgtccccttaagtagaagagtcagccattacaaggcataacatgattttttcaaaactaaatgggatagactttgggttttctgatttccagagaaactacttttcctccacagatcacacacacacacacacacgcgcacacacacacacacawaaacacacacacacacacacacacacacaccccacatacacacaggggaaagaagcaactacctttgccctgaagtacaagccatttttactttacaggtggggaaactaaagttcagagagatgtgactttgccgatgtcacagggcaatgggtgttccaagggactgaaccaaaactcacaaaatctagatcccctattcagtaagacgcagtacctaagtaacataagacacagtacctaagggacagaagcctgatctggggctccaaagagcatagttttgcagacaagaccaaaccatggaaatagatagcttctggcaaaagaaggtctagaaaactcagtgtagataaggtggaaggggttgctgcaatggcccaagcataaagtgggaagagtgtagagaggaaaagcagatc

SEQ ID NO: 9360 - DNA, 773 bp, Homo sapiens
gtctttttagagattgttttgatatgtgcacccacccttggctactagatggatggttctaattagtttagtcaattgagtcaaataatcagtcattcaatcaagcaatcagttgacctgcttctacccttctcccctcaccaaagtggcttatttgattatgctgttgttcagttttacatttaatcctcatgcgtgtccccttaagtagaagagtcagccattacaaggcataacatgattttttcaaaactaaatgggatagactttgggttttctgatttccagagaaactacttttcctccacagatcacacacacacacacacacgcgcacacacacacacacatamacacacacacacacacacacacacacaccccacatacacacaggggaaagaagcaactacctttgccctgaagtacaagccatttttactttacaggtggggaaactaaagttcagagagatgtgactttgccgatgtcacagggcaatgggtgttccaagggactgaaccaaaactcacaaaatctagatcccctattcagtaagacgcagtacctaagtaacataagacacagtacctaagggacagaagcctgatctggggctccaaagagcatagttttgcagacaagaccaaaccatggaaatagatagcttctggcaaaagaaggtctagaaaactcagtgtagataaggtggaaggggttgctgcaatggcccaagcataaagtgggaagagtgtagagaggaaaagcagatc

SEQ ID NO: 9361 - DNA, 575 bp, Homo sapiens
gggctggggagactgctctgggaaaggaagggaaggtgaggggccctgatctccaggcctcagccctgaccctgctgaagagctccagaagggctcctgctttccctgagaaaagacatgacccctcrttcccctctttacccatctccctccttaccccatctcaggatgaggggctggggcagcccctcgtgctgcacatggcatgtgtatctctgttcctctccagaaggcaccaccacagcggcccacttctggaaggttccatcccctgcaggcctggtctccacaagctctgtgtcctgggtctgttcctccccatcccgctgccaggtcagcgtgatctccgcagggtagaagcccagggcccagcacctcagggtggcctcatggtcagagatggggtggtgggcaacgtgtgcctttggaggatctgagaagagtcagaaaattcaggcactttgcactcctcatgggaaaccccagcagcacccatgtgaccaacctgagaatggacaggacacctggggtggggaagggagcacagaacccagacaccagcctggacacagaca

SEQ ID NO: 9362 - DNA, 575 bp, Homo sapiens
gggctggggagactgctctgggaaaggaagggaaggtgaggggccctgatctccaggcctcagccctgaccctgctgaagagctccagaagggctcctgctttccctgagaaaagacatgacccctcgttcccctctttacccatctccctccttaccccatctcaggatgaggggctggggcagcccctcgtgctgcacatggcatgtgtatctctgttcctctccagaaggcaccaccacagcggcccacttctggaaggttccatcccctgcaggcctggtctccacaagctctgtgtcctgggtctgttcctccccatcccgctgccaggtcagcgtgatctccgcagggtagaagcccagggcccagcacctcagggtggcctcatggtcagagatggggtggtgggcaacgtgtgcctttggaggatctgagaagagtcagaaaattcaggcactttgcactcctcatgggaaaccccagcagcacccatgtgaccaacctgagamtggacaggacacctggggtggggaagggagcacagaacccagacaccagcctggacacagaca

SEQ ID NO: 9363 - DNA, 548 bp, Homo sapiens
  misc_feature (1)...(548): n = A,T,C or G
aaagcctgtcaaatctctccaaactgtaacaaaagcatgggagagatagtttctctttaatgaatgctttgatcagccacagttgatataataattatataaaactagagcaagacagaaataagatgtgtttttctctcacatagcctgtaacctttgtganntggttcatttatttaagaraagagcaaggctcttctccaaaacagaggcatatgtcagaagagaacctgttttctccactaacttatgcaggaaatttgcagcaaagactgcgtcccttttcctccctgctctggaaggaagggagcatctaccagccatgactctgaaagtgaactaatggtggtggagtcttcctcacatgtatcttggtcttatttctcaggctaatgccttctcctaacccacagcttgacagtaccttcttttcttcctttcttaccccaaactgttctccctacttcagttggctctcctaacagttgacatcagtcgggcattgctcaagtactaagatacctcgtgctgcttgaattattgacttg

SEQ ID NO: 9364 - DNA, 548 bp, Homo sapiens
  misc_feature (1)...(548): n = A,T,C or G
aaagcctgtcaaatctctccaaactgtaacaaaagcatgggagagatagtttctctttaatgaatgctttgatcagccacagttgatataataattatataaaactagagcaagacagaaataagatgtgtttttctctcacatagcctgtaacctttgtganntggttcatttatttaagagaagarcaaggctcttctccaaaacagaggcatatgtcagaagagaacctgttttctccactaacttatgcaggaaatttgcagcaaagactgcgtcccttttcctccctgctctggaaggaagggagcatctaccagccatgactctgaaagtgaactaatggtggtggagtcttcctcacatgtatcttggtcttatttctcaggctaatgccttctcctaacccacagcttgacagtaccttcttttcttcctttcttaccccaaactgttctccctacttcagttggctctcctaacagttgacatcagtcgggcattgctcaagtactaagatacctcgtgctgcttgaattattgacttg

SEQ ID NO: 9365 - DNA, 574 bp, Homo sapiens
acagcagtctcccataatacccacgctggtatggttctctgccaggcataaccagtgggaaattaggatgggtcctgagaatggcatccccaccgatcattcttgccctgcactggcccactgtaggggtataacagatayaccaaggcaacagtagaaagaaggtaaggcaagaaggccatgtatagggagatgggatgtggggaccaatggggagaaagcaggctgtagtctgtagtacctgtggccagggtgaccgacggagtatgagattgtgtctctctaacaattgaattgaaaaataagtcaatctggttttaaagatcaggtttttggaaatttaaaaaaaagtcaaccagctacgtggtaaaatgcataaaaacagctggttaagtactatcccctttgcaaagaatggcttcaggaaatggtttggagggctggccagggtggccccaagcagagccttgcctgtgtggtaggacaaggggggcccaggatgcagcagagctagaagccttccccctgccacatgccggatactgatttattgggactggaacaatttgtctaa

SEQ ID NO: 9366 - DNA, 529 bp, Homo sapiens
aacttttgtcttaaggtactgaaaactagtcaggctagttaatgcaaaagggtatattagatatgataatgggaaatcaaagccagggctacattaagaatttgataaaaactctaaaaatatatcctttctccacccttatctctgctttattacaaaaggctttttaagtatttgttccaacctttttcgttggtggcatttatggctttggagcactgtcaggcccatgttcattaccgtgagctcctgtgcatctcctaatttccaaactagccttgaaaacacctccattgaccatgattggttcatggtcctgtgcatgkaacatcatatgttcagggagataaagaactctgatagtggcacctgggtaaaaagtacaatccattatatctggatatcaagatcttttgcagttgaagagaggtattgccacagagaaaattataggagcagaagaaagtcaatgaaagtcaatgatgacactccattaggaaccagaaagaggtatttatttatacatgta

SEQ ID NO: 9367 - DNA, 529 bp, Homo sapiens
aacttttgtcttaaggtactgaaaactagtcaggctagttaatgcaaaagggtatattagatatgataatgggaaatcaaagccagggctacattaagaatttgataaaaactctaaaaatatatcctttctccacccttatctctgctttattacaaaaggctttttaagtatttgttccaacctttttcgttggtggcatttatggctttggagcactgtcaggcccatgttcattaccgtgagctcctgtgcatctcctaatttccaaactagccttgaaaacacctccattgaccatgattggttcatggtcctgtgcatggracatcatatgttcagggagataaagaactctgatagtggcacctgggtaaaaagtacaatccattatatctggatatcaagatcttttgcagttgaagagaggtattgccacagagaaaattataggagcagaagaaagtcaatgaaagtcaatgatgacactccattaggaaccagaaagaggtatttatttatacatgta

SEQ ID NO: 9368 - DNA, 1760 bp, Homo sapiens
aagctaagtactgggaactctaagggttaagagctaatgcacgcacagtcaattcttcactgggaagtgatgctttacaaagtcaaggtattgtgatgaatccttctgtgttccgcctgcatgccttagacggtgctgagcacagaatcgttcctcaataagattctcttggggagtcgattgctgactaaagtggattggtacagcttctgttttgatctgcctgtcataatgttctatctcccatcttttcggggaacttccctattctcaccccgccatgtgactttggtggggyttgtcaaccaagatacgttgctaagttgggaggaagttaccagtggctctctagttggggcagagtccacctacacgtgacagccagtcagaggtgagagaagatgtcctgtagacattgtgtgagtccctggaaccaggcatcactgaactccagtgatgcatgctgataaatcctcctttgtgttggcttaaacttgtggattggatttctgccactggcaactgaaagtcctggctctcttttccttccattttggaatgcagcagtgattctctctcttcttccattaacaaagggaaactgaaagggtgtcagaagtaaaagtcaaaactggaaaactttatttaggttgggttatggtggctcgtgcttgtaatcctagcactttgggaggccgaggcaggaggagcgcttgaagccaggagttcaagactagcttgggcaacattagggaaaccctttctctgtaaaaaataaaaaaagtagctgggcatggtggtgtacacctgtagccctagctattcaggaggcttaggtgggagactcacttgagccaaggatgtcaaggttgcagtgagccatgatcatgccattgcactccagcctggatgacagagtgaggccctatctgtaaataaatagatagatggtaggtaggtacgtagattgatgatagactcttataatcacattaaatgctgtcattaaatgacgtagaataatatttaataacaagataaaatatcaccaagaaaaatgaacatgtgacagttttgttagaaaacagtattgttagaaaacaatacttaaaagaggcttcatctgagcttcatcagtgacaagtatttaaaaaaaaaacaaaaacaaaaacaagcaaacgaaaccctttaacttggtatgttggcctgtgcctatagtcccagctactagcagggctgaggcaggagaaccacttgagcccaggagtttgaaatcagcttgggcaacagagcaagaccccatctctaaaaaaaaataaccaaacttaaaaaaagaagaagtctgacatctggaaatatgcttttaagtcaggtccagggaacctcagaaccagcctcagttcacaggcttctacttttttgtagagcacttgctgggtgtcaagctttgttctattctttttaatcctaacaacaacttcatgcgttaggttctactattgtccccattttacaggtggggaaactgaggcacagaagtaaagtgacttgctcacttatggtcacaccatgatgatgcctggattgaatgaaatttaacagccttggccaggtgcggtggctcacgcctgtaatcccagcagcttgggaggccgaggtgggtggagcattttaggtcaggagttcgagaccagcctggccaacatggtgaaaccctgtctgtattaaaaatataaaattagctgggcggtagtgatgca

SEQ ID NO: 9369 - DNA, 530 bp, Homo sapiens
gaatcttttcttcaatctgaaaagaagaaaatagaaatcaccatttgaagatgctaccaaatttgaattgagaaaacatttttccaacatgcctgtgataccaagaataaggcaaacaaactagaatttcaagaaagtagaacaggcacaaagttagagatggaaaaagaagtggaagcaataagtgaccttaagagaaatattgaaactttaaccaatttgcttgttatatgtaatagtttattctsttaaaagttaggtaactacacgcctgtaatccccacactttgggaggccaaggcgggcggatcacgaggtcaggagatcaagaccatcctggctaacatggtgaaaccctgtctccactgacaatacaaaaaattagctgggcgtggtggcagacacctgtagtcccagctacttgggaggctgaggccggagaatggcatgaaccagggaggtggagcttgcagtgagccgagatagtgccactggactccagcctgggcgaaagagcgagactccgtctc

SEQ ID NO: 9370 - DNA, 530 bp, Homo sapiens
gaatcttttcttcaatctgaaaagaagaaaatagaaatcaccatttgaagatgctaccaaatttgaattgagaaaacatttttccaacatgcctgtgataccaagaataaggcaaacaaactagaatttcaagaaagtagaacaggcacaaagttagagatggaaaaagaagtggaagcaataagtgaccttaagagaaatattgaaactttaaccaatttgcttgttatatgtaatagtttattctgttaaaagttaggtaactacacgcctgtaatccccacactttgggaggccaaggcgggcggatcacgaggtcaggagatcaagaccatcctggctaacatggtgaaaccctgtctccactgacaatacaaaaaattagctgggcgtggtggcagacacctgtagtcccagctactygggaggctgaggccggagaatggcatgaaccagggaggtggagcttgcagtgagccgagatagtgccactggactccagcctgggcgaaagagcgagactccgtctc

SEQ ID NO: 9371 - DNA, 506 bp, Homo sapiens
gggtaattcttctagagctgctggggcaaagctaggcaggatgaactgaacttattttcaaaaggtatccaccctgacygagaagggtgtgtagaaagttgctacgagtcactgccaacttgtaatggcttgactagaccctgcctgcatttaacacccccagaggggtggccaaaagtcaaatatataataagcacctgatgactgccacagacatggatatgagtgatgctagtcaccagacgcagcccccttcccactgctcacccacccttccaagcctgccagagaccctcacccaaaatgaattagcaaaatgtgcaagcagatgttttcatctctggagactttaaaacaatgatcatcaacacggagatttaccaggaaagataatatcttccctcaaaatctccttggagtttactgtgaggcatctcagacagtgctttccatatagaaaaaaacccaggtaatagatatgctgcagcgttttatcttgtgtttga

SEQ ID NO: 9372 - DNA, 506 bp, Homo sapiens
gggtaattcttctagagctgctggggcaaagctaggcaggatgaactgaacttattttcaaaaggtatccaccctgactgagaagggtgtgtagaaagttgctacgagtcactgccaacttgtaatggcttgactagaccctgcctgcatttaacacccccagaggggtggccaaaagtcaaatatataataagcacctgatgactgccacagacatggatatgagtgatgctagtcaccagacgcagcccccttcccactgctcacccacccttccaagcctgccagagaccctcacccaaaatgaattagcaaaatgtgcaagcagatgttttcatctctggagactttaaaacaatgatcatcaacacggagatttaccaggaaagataatatcttccctcaaaatctccttggagtttactgtgaggcatctcagacagtgctttccatatagaaaraaacccaggtaatagatatgctgcagcgttttatcttgtgtttga

SEQ ID NO: 9373 - DNA, 537 bp, Homo sapiens
gcagtggcatgatcttggctcactgcaacctccacctcctggttcaagcgattctcccacctcagcctccctagtagctgggattacaggtgcccgccaccacactcagctaatttttgtgtttttagtagagacagggtttcaccatgttggccaggctggtctcraactcccaacatcaggtgatctgcccacctcggcctcccaaagtcctgggattatagccataagccaccgtgcccggcccagaaccatttaaaagtatcattggagctgtagtattagctctctgtcattatgtatagttttaaacaatagattctaaaataaaattactatcttatatgtttggagtgtgtgtgtgtgttggttaagaagtttttgaacatttctggaactaaaaggaatcttcataaaatagataatgatgatgtttgaacaacatttgaatgtacttagtgccactgatttctacactttaaagtgctaaatcttctgctatgtatattttaccacaataaaaagtattttttaaaa

SEQ ID NO: 9374 - DNA, 533 bp, Homo sapiens
aaaactggcttctttcatgtgggggagggaagtccactgaaccttcactggacagtttttcatgtctatagacaagaattattttgcattgctatcaggtatctaccatttatacaattttaaaatagctcaaaggcattgacaggtatagagcccccatagactcagaatcagataaccccttgagaggtatgctttagttttccattgtaaacaaacatttcctacagtctggcagaagttaaaaaagagatcaggcggcagaggtagaaagggatcagattgtggaagatcttaatgccagtgggatggggctrtatgcataccagtatcaagttgtcaacttgatgttagccttaaggagacaatggtcatgaaggcagtaatgaagagacctaaggcatttggggaacatggcattgataaagattctaagctaaaggggcctaaactaaaatggaggcagtgagactataagaaaggacgattataagcaaaattatataagaaggataaacattggttgagaaaag

SEQ ID NO: 9375 - DNA, 533 bp, Homo sapiens
aaaactggcttctttcatgtgggggagggaagtccactgaaccttcactggacagtttttcatgtctatagacaagaattattttgcattgctatcaggtatctaccatttatacaattttaaaatagctcaaaggcattgacaggtatagagcccccatagactcagaatcagataaccccttgagaggtatgctttagttttccattgtaaacaaacatttcctacagtctggcagaagttaaaaaagagatcaggcggcagaggtagaaagggatcagattgtggaagatcttaatgccagtgggatggggctatatgcataccagtatcaagttgtcaacttgatgttagccttaaggagacartggtcatgaaggcagtaatgaagagacctaaggcatttggggaacatggcattgataaagattctaagctaaaggggcctaaactaaaatggaggcagtgagactataagaaaggacgattataagcaaaattatataagaaggataaacattggttgagaaaag

SEQ ID NO: 9376 - DNA, 363 bp, Homo sapiens
ggtggttcgcccctcctcggagccgcagggcccgtccagggcttccaaggctggggaagcgtagccgggcggccgggagggccaccgcagtgccgcgccaggctggggccaagggcgccccggccccgggagggcggagccggaggcagcaggaaaagttgccgcttcccgggtaagttgacggcgatggcggggccgggggtggcggcccgggggtccccgaggctgggccaggtccggggtgggggccgcgggctggaaggacggggtccggcctcggcgccgcggccmcgaaggggttaatgagcgggtttttttgcagaaacgcgggtaccgagagtaggtggaggtatcgggccgcct

SEQ ID NO: 9377 - DNA, 1107 bp, Homo sapiens
ctttcccgcagggcatcttgggctctgttttggagaggggtgggcagcaccttctctgagaggcacccctatgcgatgtacctcagggcctggtgtgcccaggaacctgttttgggaaacagtggttgaagtgcctcggaggaccagaggagacctgtgggcctccagcaagtgccccaggatgggtagaccctgccacacaaaccccgcacccacggggcgcccagtgggtggagggaccactgcttcccccagcagtttgaggcgatgtgcaaatttaacctttggatttatgactcaatttctttgtagcaaatgtcacgggaaatgtcaggccaaggctgaggctgggtgaggggcccgtcgaggaagcgggtagggctaggcaggctagagtaccgaggaggggctcaggccagggtgggcttcaggcccctcacctcctcctgggagccttcctggattgtccctygcttgcctggatccccggcactgtgtcctcaatttgtcccagctatcacaaccttgttgagatgttgcctttatttgccttctaccagggcccagatgaggccagctcggggacatgccagaagtcccccattccccaaggctgggcagccatgggatcagcttgtgcagtgccggcttgctgtatgaccttgggcagctccacccttcctggtcaccgtaggcctctctgcagtccacagctggtggccagaggtggtgttcccagctcagtgccttcaagagtgggaaaacgcctagagtcctcagtatgtggggtgtggggctctggaggaagtgggtgggggctgaatgcagggctggggttgcggagggctggcccttggtggtcccaggggctagagcagcccctgcacacagcaggtgctcagtaaagaccaaaaggcagtgcgtggatgtggaaggtggaggtggattccagctgggagtccacagtccccagttacatgtcccccctccaccgccacatgccagatgtcattccaaggccccacgctggcccgtcaccagctctgccctgcctcccaggcccgggcgggtcagggaatggtgactgcctcctccctgccgtgtgcc

SEQ ID NO: 9378 - DNA, 530 bp, Homo sapiens
atatataggcagagaagtagtacaaatgtggcaaaatgctaacaactggtgaccacaggtgaaggtgtacaggtatttattttactacacttgcagcttttctgtagatttaaaaccataaaagcatgccagaggggtggagaaagacaagtccacactggactcgtatccagaatatctaaagaacacagaggtcaacagaatacaaaagcaaacaccraaagaaaaataagcaaaaggcttggacagatatttcacaagcaacgtaaatgtccaataaatatatgcaaagatgtttaacctaattaataatcctgggaatgcctgtcaaaactacaatgtgatataattacactctcagcagattagcaaaaaattaaacagtctgtcaaatgttgatgaagacagaggacaactggaaccttctaccatgctagaaggagcgcacacggaaacgaccactttggaaaacaatctgactccatcttgcacaccgtatgactcggcaaccctactcttagataaacacc

SEQ ID NO: 9379 - DNA, 530 bp, Homo sapiens
atatataggcagagaagtagtacaaatgtggcaaaatgctaacaactggtgaccacaggtgaaggtgtacaggtatttattttactacacttgcagcttttctgtagatttaaaaccataaaagcatgccagaggggtggagaaagacaagtccacactggactcgtatccagaatatctaaagaacacagaggtcaacagaatacaaaagcaaacaccgaaagaaaaataagcaaaaggcttggacagatatttcacaagcaacgtaaatgtccaataaatatatgcaaagatgtttaacctaattaataatcctgggaatgcctgtcaaaactacaatgtgatataattacactctcagcagattagcaaaaaattaaacagkctgtcaaatgttgatgaagacagaggacaactggaaccttctaccatgctagaaggagcgcacacggaaacgaccactttggaaaacaatctgactccatcttgcacaccgtatgactcggcaaccctactcttagataaacacc

SEQ ID NO: 9380 - DNA, 578 bp, Homo sapiens
tttaaactgtgaaatttcatacctacagtaaaagtatggcttcagaggggctaatgcttttctaaaagaggaaatratttcaaaaccctgtcaccaatatttgaacatttcaataaaatagaggtaatgaaaacttttggtaattcttagacaaatttcactagctggagtaattagattgagatctacacaaagcaagcattgcttcattatccctctagtaatgatgatgaatgggaccgatcatctgggataacccccacagactggttctcttggttagaatgctgtgttaaagagaccaggataatagattgtcctcccgggtaagctagttagttgtcaattctacagttcccatatctcctgttagccataggaatgtgaggccgtgtccatagctagaaggccaaagaactgggatttttagtcaagattttaccactcgtgggctagatgaccttaggtaagtcactctgatcctcaggatcatcctcaagatgaagtccctaatggagcacatgttgtcattattactatatttaatttaggcagtttgaagataaaattaggaatcg

SEQ ID NO: 9381 - DNA, 562 bp, Homo sapiens
gaggtctctccctccacatttgcttatggaatcaagtgacagtcaccccatgttcactctgtgcagatagcaggtgatgcctccagtagaacagacaggaaatagactagcagagagaaacttgcaagccagagggcagcagaggcagcacagggcagagctggacagtgaggaaactgaacatcagctgctggagcagctgccgtgagggagctggtggggttcatctcaagatgctatgctgctggggccgaccatcagtgggaggtccgatgctcacccggacataacatgtcctgtgcacgagccgcactggagctgatgtcctttgttttaacaaaagaccaatatttcagccagaaaaaccagagcatgacattcaaagacaccaatcagcaactgggggaatttgagaasatgaactaaactcctggaacctcagtttttctgactgtgcacctcatataaaatgtgatatggcaagtgacagcggtatttgtcatgcttctattaaaggctcaggtttgggggtataatttacatatcctaatcaatgaattaa

SEQ ID NO: 9382 - DNA, 562 bp, Homo sapiens
gaggtctctccctccacatttgcttatggaatcaagtgacagtcaccccatgttcactctgtgcagatagcaggtgatgcctccagtagaacagacaggaaatagactagcagagagaaacttgcaagccagagggcagcagaggcagcacagggcagagctggacagtgaggaaactgaacatcagctgctggagcagctgccgtgagggagctggtggggttcatctcaagatgctatgctgctggggccgaccatcagtgggaggtccgatgctcacccggacataacatgtcctgtgcacgagccgcactggagctgatgtcctttgttttaacaaaagaccaatatttcagccagaaaaaccagagcatgacattcaaagacaccaatcagcaactgggggaatttgagaagatgaactaaactcctggaacctcagtttttctgactgtgcacctcayataaaatgtgatatggcaagtgacagcggtatttgtcatgcttctattaaaggctcaggtttgggggtataatttacatatcctaatcaatgaattaa

SEQ ID NO: 9383 - DNA, 572 bp, Homo sapiens
cagtcataaaaaagaagagaggtatgtcagctaatgttaatgatgttggaattatcaacacacagatggtaacttgctattttgaaaggatgaatttcctctgaaaatgagatgaaaatagagtccatgcagagttctgagaatatcatcatttaagtaatgcacagacgaaggcgataatacactaaacagcccttaagcaggataaataaaataaattcatcaccttgggcacaaaatagttaaattcatgtaaaccaaagataaaatgaaacactagaaagtaaaaagaaataagatgacacattacatacagaggaatgaagatatgaaaggcagctaatagcacattaaaaacaatgcaaacattgtcagcagaacaaatcttctccaagaaatgttaaaagtaattccatcaggctgaagtaaagtaaaggtagttaaaaaacctaaattttcaggaaggcatgaataacactggsaataggaaaatatgatacacagaaaagtaatcttttttatttttttaaaacacatgactatacaaaactatgacattgtatttgaattta

SEQ ID NO: 9384 - DNA, 550 bp, Homo sapiens
aaattccataatcccagagcagctctgactcttgacccctggtaagtggtcgaaatgaggagcctggaacagtgcttccatttcatatcaggttgccctgacaaaattcttgtagattgcagatgctgatgcatcctcacttcctgcatgttgcttgtgaaaatgagcacagagatattcttcagtggtcagaaaaagcagaatggktgtattatttttgagaactgagagtgaagaggagcatgcagaggagagcacaacagaaattatagtgataaaaagatgatttatcaaagtctagcaccttactggacttattgaactgagatataaactaatgcagtattcatttcccaaaagtcattgatcatcgctgtgtaatatggatttgcaaattggcacagcctttgggcatttttatagaggatgggaagactatcattccacatgcagttaaatactttccctaaaattggaatcttttagtgagctttccttctcagatgtggtttagtataacagtggaagggtagataccagccaggggcca

SEQ ID NO: 9385 - DNA, 658 bp, Homo sapiens
tcattaaacctcagggactcaagccagagagaaccagaaacttccaaggcttgctaactggaatgtttctgtgctatgccggcctggagaatcctaaagagcttttagactttataatctcaagaatacacaagcacacgaacctgcagcaattatacattaatcaaatgcaatccatattaagtatatcaaaattctgctcattgtgcagtagcctatttaccgtaatatacatgtaatgcatacagagccaggaagtttctgaaattcacaaataaactttgtctkttctttccatccctcttgagtagttggcataacaaacagtataaagaatagcgtgatttgatataaaatcaaagccacttaaaaatacaaatattagtaatcctactgaaaattaaagagttacttcctcccttggaataacagccatataggtccataatcccttgaggttagatgaattctataattcaaataacttaattaacttatagatttccaaaaggtaatatggtgcatatgccatgcctagagcagcactctataatccaacacattaatacttctgcagtgaaatgcatgataattcacataagtaacagaaataatgatcataaatagcttcaaatcctttcaactcaggtcttgctgc

SEQ ID NO: 9386 - DNA, 511 bp, Homo sapiens
aggaaggtttaatatattttaacaaaaatgtccactatctgagataactaaacattatttcctcaaaagagaaacatttagtatgcaaaacttaatgcaaggaaaagtacaaattttcctgaaaaagattcacgcatatgtggcataaaaatgggccaaagcctagtaaagtacygggcctagaagcttattttaatcatttctcgataaatgaccatatcaatctagttttatgtagtctaaacaaattttctaagcccgtaggaagttcaccatcttttccacatttactgaggtaaatgcaccacggaaaaattaaagtagcctgaggaagaatgatatagttcaacattatttagtatactcccatttggatactacctgccttgcctcatactagtgactatgagtgaattattaagttcttatattatatgaacttggtataaaggcctttactctttcctgtattaaatgtaaaatgcatgcttgctagactggtcctcatttg

SEQ ID NO: 9387 - DNA, 830 bp, Homo sapiens
ctggcttcatcctttgtgtattcttgaaactaatttcattctcagagttataggtgtgtttccttcctatagacagccacattttatgtaggagtcttactcattttgtataaaggcttattttattttcccagagatttctgtggtaagaaatgctgtccatagttaagttcctagtaaagatctcaggggtaaaggtgggagatgggatggtggcagccaggatcttataggttcaccaggtgaggctttaagctcaatctataggttacccagttaatcacaggtaacaaatagtgttttccacaaaatgtagcattactttaagtcctttataattacatatttcccacaattacttagctaatggaccactacagaaaatttggctayattcatagtttagtaaaatggaagtgattacaaaaaataaaattgatagaaatacactaaaatatttacttgataaatgcattcataaattagttttagttggaattttaaacttttagtcagggcgaagtatatgtggggcagggggtcggggggaggtacatctaacaacagagaaatcaggaataaataaggacacttgtcttattatccatgatataaatctaccttctttggttttgaatgggataatgtggagggagtagtagtggcctacgaagccagccaagaagctgttgaatctaatttatgacatagtccagacctgtttttgagccacctgccaaggggattcttcccattattgggggagggagaggaaggcatgtgaatagccagcactaaccacctggttgggctaatgttcactgggatcc

SEQ ID NO: 9388 - DNA, 830 bp, Homo sapiens
ctggcttcatcctttgtgtattcttgaaactaatttcattctcagagttataggtgtgtttccttcctatagacagccacattttatgtaggagtcttactcattttgtataaaggcttattttattttcccagagatttctgtggtaagaaatgctgtccatagttaagttcctagtaaagatctcaggggtaaaggtgggagatgggatggtggcagccaggatcttataggttcaccaggtgaggctttaagctcaatctataggttacccagttaatcacaggtaacaaatagtgttttccacaaaatgtagcattactttaagtcctttataattacatatttcccacaattacttagctaatggaccactacagaaaatttggctatattcatagtttagtaaaatggaagtgattacaaaaaataaaattgatagmaatacactaaaatatttacttgataaatgcattcataaattagttttagttggaattttaaacttttagtcagggcgaagtatatgtggggcagggggtcggggggaggtacatctaacaacagagaaatcaggaataaataaggacacttgtcttattatccatgatataaatctaccttctttggttttgaatgggataatgtggagggagtagtagtggcctacgaagccagccaagaagctgttgaatctaatttatgacatagtccagacctgtttttgagccacctgccaaggggattcttcccattattgggggagggagaggaaggcatgtgaatagccagcactaaccacctggttgggctaatgttcactgggatcc

SEQ ID NO: 9389 - DNA, 553 bp, Homo sapiens
agattttaacacaagatgggactgagctgttgaaaattctatggcaaccactatgtgagaagaaaatgagtagctgtatgcaatagcacaggtctacagctgcgctacctttgactaacgcagcctccctaagtagaacatgtgaagctttgctccatcagtgactagctctgtgaccttgacagagtccctgacytctatcagggtgctttttcattttctaagttggaataataatggctaccctagagttttcaactaccaactctatatgcagttctccctaatctgtcttttacccagacatctatatggttccctctggaagggggagtaatttatctgatcagtaagattagacaaaggcactaggaatgcgtaactcagccctgccaagtttatgtttttgggatcagctggctgtagaaggctgtcatgaggagcagcttccctggcatgactggcaggggaagtcacagctctgcggagctgcttcctctctctgataatgagtctcaagaatcacactcatggccactggggaagcatgggg

SEQ ID NO: 9390 - DNA, 509 bp, Homo sapiens
tttgtcttcattcacataagagtctaatagaattaatatcaagaaattcccacactattcatgccatattcatgatctccactttggttattattaagcactaaaatttgataacttatttctgaatgawgtcatctctttattgcagttttttgacttatggtgatctttaaatggcagagattcattcattcataatccaagagagaaatgtgattcacagggattcttttatcatgtgatacatgataaatacacccaatgttatatgtcaatttaaaaagtaagtaacttaaaaaatgataattactttatacctagcttgtccaacccacaggtgacaggccgcatgcagcccagaacagctttgaatgtggccccacacaaatttgtaaactttctccaaacattatgagagttttttgtaatttttttttagctcatcagctagttctagcgttagtgtattttatgtgcggctcaagacaactctccttcttttaatatag

SEQ ID NO: 9391 - DNA, 537 bp, Homo sapiens
acaccctgatgcaaaagaacgaaccctcaaggaagttggctgtacatgtattttccttcctagcacaggaaaagacagaaagattatccaatcagtaccactcatagcacctgattatatatgtatgaggaattcagaaatggtttgatcaaggttgaagacctaaaaagtagcttttctctcagacaccaagtccccatctcatgcgtggttgagttagtagaatctgaggatgatgcttcttcctccaggattggtatcctatggtttttgttgttcagtaaatgaagtacctccatcccccaacatccccaagctcaattccagtttcctcacatacacttttttttttattttttttttgagacagagtctcgctctgtcacccaggctggaatactgtgcagtggtgcaacctcagctcactgcaacytccacctcccaggttcaagtgattctcctgcctcgggctcctgagtagctggcattacaggcatgcaccatcacgcctggctaatttttgtatttttagtagag

SEQ ID NO: 9392 - DNA, 535 bp, Homo sapiens
ccaaagctgagaaacccaggtttctcctcagcaagaaggaaaatccctgcaacgtggatgcacctctacaggagccccaggctgacaataaccttcctgatctggtttcaaccctggatrcttttacctggtgcgtccatcagggatttcagggactccagtgagttatcacccttgaatgctcggttctgcctgacaacccagaaatctctgccgaggtgcctggtcttgcggaagactcagcaagtggttgaggtggacaaccaaatacctaggagagacttttctctccctccaggaggagctgtgggtcagacacacactgggatcattcacaagcggtcaataaaggcttgaggaggggcagattttctaggccttctcaatggggtgggtgtttgtggataaacaagaagcctgtgaaacttctgatattgggaggaaatcaatgcccccccatccaccctcccccacctccccaccataaacacatgccctgcagcaggacttgacactcaggggctcctggggtccc

SEQ ID NO: 9393 - DNA, 535 bp, Homo sapiens
cagaggcatggctattgcaccttgggagaagcctttaatcggttagacttctcaagtgcaattcaagatatccgaaggttcaattatgtggtcaaagtaagtgttctatttcaaaaactactttgatgactcttttgaacaactatattttgaagattgtaagtgtacaacgtttaagatgcttttggcagcttgaaggtgtgcctgtttgctgtgtattaatcgaaaaacagaagggaacaagttcaggagaaaacagtgaggttggaggatttctccagtattggtggcagaggttgcagagcctcagtgggagcaaacactcatctgccctgtggctctgtggttgctgaggatgccacaaggtggtcccttgggggttgtaccatgtacctacatactgtgtcagtgatagaacggtcatgggatctttacctgatgatttcacgaatgttttctgcttcgtgtttttcacaaggaatgaggcttgtgtcacaraagaagaggtagctaatagaaaacaggaatttcgtac

SEQ ID NO: 9394 - DNA, 535 bp, Homo sapiens
cagaggcatggctattgcaccttgggagaagcctttaatcggttagacttctcaagtgcaattcaagatatccgaaggttcaattatgtggtcaaagtaagtgttctatttcaaaaactactttgatgactcttttgaacaactatattttgaagattgtaagtgtacaacgtttaagatgcttttggcagcttgaaggtgtgcctgtttgctgtgtattaatcgaaaaacagaagggaacaagttcaggagaaaacagtgaggttggaggatttctccagtattggtggcagaggttgcagagcctcagtgggagcaaacactcatctgccctgtggctctgtggttgctgaggatgccacaaggtggtcccttgggggttgtaccatgtacctacatactgtgtcagtgatagaacggtcatgggatctttacctgatgatttcacgaatgttttctgcttcgtgtttttcacaaggaatgaggcttgtgtcacaaargaagaggtagctaatagaaaacaggaatttcgtac

SEQ ID NO: 9395 - DNA, 535 bp, Homo sapiens
cagaggcatggctattgcaccttgggagaagcctttaatcggttagacttctcaagtgcaattcaagatatccgaaggttcaattatgtggtcaaagtaagtgttctatttcaaaaactactttgatgactcttttgaacaactatattttgaagattgtaagtgtacaacgtttaagatgcttttggcagcttgaaggtgtgcctgtttgctgtgtattaatcgaaaaacagaagggaacaagttcaggagaaaacagtgaggttggaggatttctccagtattggtggcagaggttgcagagcctcagtgggagcaaacactcatctgccctgtggctctgtggttgctgaggatgccacaaggtggtcccttgggggttgtaccatgtacctacatactgtgtcagtgatagaacggtcatgggatctttacctgatgatttcacgaatgttttctgcttcgtgtttttcacaaggaatgaggcttgtgtcacaaaagaagargtagctaatagaaaacaggaatttcgtac

SEQ ID NO: 9396 - DNA, 601 bp, Homo sapiens
cgagctttgaattcattttgtaccccccagcgcaaccccgatactgtctatgtaaatatgagaggtcaaaggacccgtgaggggtttctcttttcctttgggttacctgcttcctgtctggttgttgaaatgccaaggtgaaagggatggccaattggatcggagygcaaatgctgctccaattgtttggcagagtactcaatattggtcccccacaataccactgtacatctgcttggggatggattagggctgactgactggttagctcttggaaaggtttaggcccagtacatcccatcaggtttccgaggaacgtcagattttccccttgccatgagagacatgaggtaaaattggcatcaagagctggaagtcgaatggcccttgggggctgtcccgtagggcttctgacttttgggaaaactggtggttttggcaatttgagggtgtgactcctttggtaaggtggatgtaaggttttagggcggtgcaaccctctgaggaggtccagccctgatactgggtggtctagataacatctccccaattataacataacccctggaaggctcgtggttgtccatcacaagggtttctg

SEQ ID NO: 9397 - DNA, 601 bp, Homo sapiens
cgagctttgaattcattttgtaccccccagcgcaaccccgatactgtctatgtaaatatgagaggtcaaaggacccgtgaggggtttctcttttcctttgggttacctgcttcctgtctggttgttgaaatgccaaggtgaaagggatggccaattggatcggagtgcaaatgctgctccaattgtttggcagagtactcaatattggtcccccacaataccactgtacatctgcttggggatggattagggctgactgactggttagctcttggaaaggtttaggcccagtacatcccatcaggtttccsaggaacgtcagattttccccttgccatgagagacatgaggtaaaattggcatcaagagctggaagtcgaatggcccttgggggctgtcccgtagggcttctgacttttgggaaaactggtggttttggcaatttgagggtgtgactcctttggtaaggtggatgtaaggttttagggcggtgcaaccctctgaggaggtccagccctgatactgggtggtctagataacatctccccaattataacataacccctggaaggctcgtggttgtccatcacaagggtttctg

SEQ ID NO: 9398 - DNA, 526 bp, Homo sapiens
tgggcatcaagagtgaaactctgtctcaaaaaaaaaaaaaaaaaaaaaaagacaactgttttcagaaatagttaaaaatttctgaggcttaaagggtaagcttcagttttatatagaatgatatatcccctcattaatgaagaatagaaaatgacttaactagctcaactctaagaagtgcatgtgagtgttattggatacagaaagcaagagatgttaaaatagggacagaaaaatagaaaaagaaataatgcatgcaaggaggaaggggaatgcagactgaaagaaagcaacacatgagtggtaggaaaggattactgtcaaaaatacctatttcaggtgtcacagtcaataatagcaagatagcataaattgactttttccgccctagggatatatagtttatcttcttcagatttctgaggattaacckaagcaatttttaccagcattcacttcttcctaacgttgtcagactgccctccttcaaggaaatctcaaatctcttctggaagtatatgggaca

SEQ ID NO: 9399 - DNA, 558 bp, Homo sapiens
tgtcttcaaaattttcacagtgggatcagggaacagggaagcccgtatttatcagagtgcttttagtttatcatttgctattaaaaacattattggaagtttgttcacaagataacaaaatgtgtgtttatatttattaactatggtccgacctttgaatggtcccctaaaaatgttactggattctaaaagacgtgagaagaatcagattcattttagaatctaagtagatggtttctttttctttattaggcgctttgacttccgtccaaaacctgatccttattgtcaagctaagtatactttctgtccaactggctcacctatcccagttatggagggtgatgatgacattgaagtttttcgattacaagccccagtatgggaatttaaatatggagacctcctgggacacttggtaagratgcatcttggtcttataactttggttaattcaatgatttggttattaagttgatttttaaggagtaatcactatttagatggctgactttagatcatgttggtgtttgtcttagtacatttaaaatgagtagt

SEQ ID NO: 9400 - DNA, 551 bp, Homo sapiens
tctgttgaaagcataaaccacctgtgttaggacatgagccaaagaggttcaccttcccatggaatggtacctgttscaacttaacagagtccattgataaaatgattcactcaattttcatttaagtgaaggctgtgcttttttaaagagacacacagtctcactctgttacccaggctagagtgcagtggcaggatcatagctcactgcagtctcaaactcctagcctcaagtgatcctcccaccttagcctctcaaagtgctgggattataggacagaggcaccatgcccagcccggcatgtgctgtttaatacaatttttgttaacaagatgacaaggcagttaagttaaacccaacacggtattctggaaaaaaaaaaaagtgctaaatcaaggatagaaaaaaaataatgaatttacacaataaaaaagaaaataattttgactaaagaaccaaccaacccagaactcaatgcctagaacaagacagacacacactgaacagcctggtttcaaatcctacccctatcacagatcacctgaagctca

SEQ ID NO: 9401 - DNA, 551 bp, Homo sapiens
tctgttgaaagcataaaccacctgtgttaggacatgagccaaagaggttcaccttcccatggaatggtacctgttgcaacttaacagagtccattgataaaatgattcactcaattttcatttaagtgaaggctgtgcttttttaaagagacacacagtctcactctgttacccaggctagagtgcagtggcaggatcatagctcactgcagtctcaaactcctagcctcaagtgatcctcccaccttagcctctcaaagtgctgggattataggacagaggcaccatgcccagcccggcatgtgctgtttaatacaatttttgttaacragatgacaaggcagttaagttaaacccaacacggtattctggaaaaaaaaaaaagtgctaaatcaaggatagaaaaaaaataatgaatttacacaataaaaaagaaaataattttgactaaagaaccaaccaacccagaactcaatgcctagaacaagacagacacacactgaacagcctggtttcaaatcctacccctatcacagatcacctgaagctca

SEQ ID NO: 9402 - DNA, 534 bp, Homo sapiens
tgtttcccccctgctcactygtgtaacatgcaggttgtttcaggttgagaaagtaggagtgagatactttatgaagttgtttagggatcaggctgatgccagcttcactatggcttccaaggttgtgttgggcattaccattttagtgagttgagcagaacgtgaaggattgcttggcagatgttaccggctagctctagaagcggcacacacttctactcatattctgttggtaagaacctagtcacaaggctccctcttaatgcaaaggagcccgaggcatataatatgcatcaggaagaagggataaatggatgttgttggacacataacatattatctttgccacattatatacttctcagacttgtaaagaaaggctgtccatcccccagccatttgagacatacatagatttttaaatagttttgagacctgaaaatcccgaagggagtatcagttggggtcactaccaagttagggatgtctcttccctaactctggccagtgattgtcagagaagggcttaggtag

SEQ ID NO: 9403 - DNA, 534 bp, Homo sapiens
tgtttcccccctgctcacttgtgtaacatgcaggtygtttcaggttgagaaagtaggagtgagatactttatgaagttgtttagggatcaggctgatgccagcttcactatggcttccaaggttgtgttgggcattaccattttagtgagttgagcagaacgtgaaggattgcttggcagatgttaccggctagctctagaagcggcacacacttctactcatattctgttggtaagaacctagtcacaaggctccctcttaatgcaaaggagcccgaggcatataatatgcatcaggaagaagggataaatggatgttgttggacacataacatattatctttgccacattatatacttctcagacttgtaaagaaaggctgtccatcccccagccatttgagacatacatagatttttaaatagttttgagacctgaaaatcccgaagggagtatcagttggggtcactaccaagttagggatgtctcttccctaactctggccagtgattgtcagagaagggcttaggtag

SEQ ID NO: 9404 - DNA, 534 bp, Homo sapiens
tgtttcccccctgctcacttgtgtaacatgcaggttgtttcaggttgagaaagtaggagtgagatactytatgaagttgtttagggatcaggctgatgccagcttcactatggcttccaaggttgtgttgggcattaccattttagtgagttgagcagaacgtgaaggattgcttggcagatgttaccggctagctctagaagcggcacacacttctactcatattctgttggtaagaacctagtcacaaggctccctcttaatgcaaaggagcccgaggcatataatatgcatcaggaagaagggataaatggatgttgttggacacataacatattatctttgccacattatatacttctcagacttgtaaagaaaggctgtccatcccccagccatttgagacatacatagatttttaaatagttttgagacctgaaaatcccgaagggagtatcagttggggtcactaccaagttagggatgtctcttccctaactctggccagtgattgtcagagaagggcttaggtag

SEQ ID NO: 9405 - DNA, 549 bp, Homo sapiens
aggggccaggcgtgggaggagtggacagggaagctgggccccctgaactgccccccaccgcggcctggctcttgctgctctgctgccccgagtgcagctgcacttggaggcggtgccgtcctcaccaggcagccctcagtgctgctgcacctgtgctccgtcccgcacgtggcttgggagcctgggacccttaaggctgggccgcaggtgcagccgttcaccccgggctcctcaggcggggggcttctgcygagcgggtggggagcaggtgggggtgccgcggctgccccacttgggcctgtccccacaggtgagtacgtcctgaccgtgctggcatctaatgccttcgagaaccggacgcagcaggtgcctgtgagcgtgtgcgcctccctgccctctgtgagcgtgtgcgcctccctgactggggcctgctggtaccccagagtgggtgtctgttccccagtccctgctttcctcagctggcctgattgggggtctgcccagaggggtcgtctgaggggagggtgtgggagcaggttccatcccggc

SEQ ID NO: 9406 - DNA, 549 bp, Homo sapiens
aggggccaggcgtgggaggagtggacagggaagctgggccccctgaactgccccccaccgcggcctggctcttgctgctctgctgccccgagtgcagctgcacttggaggcggtgccgtcctcaccaggcagccctcagtgctgctgcacctgtgctccgtcccgcacgtggcttgggagcctgggacccttaaggctgggccgcaggtgcagccgttcaccccgggctcctcaggcggggggcttctgctgagcgggtggggagcaggtgggggtgccgcggctgccccacttgggcctgtccccacaggtgagtacgtcctgaccktgctggcatctaatgccttcgagaaccggacgcagcaggtgcctgtgagcgtgtgcgcctccctgccctctgtgagcgtgtgcgcctccctgactggggcctgctggtaccccagagtgggtgtctgttccccagtccctgctttcctcagctggcctgattgggggtctgcccagaggggtcgtctgaggggagggtgtgggagcaggttccatcccggc

SEQ ID NO: 9407 - DNA, 549 bp, Homo sapiens
aggggccaggcgtgggaggagtggacagggaagctgggccccctgaactgccccccaccgcggcctggctcttgctgctctgctgccccgagtgcagctgcacttggaggcggtgccgtcctcaccaggcagccctcagtgctgctgcacctgtgctccgtcccgcacgtggcttgggagcctgggacccttaaggctgggccgcaggtgcagccgttcaccccgggctcctcaggcggggggcttctgctgagcgggtggggagcaggtgggggtgccgcggctgccccacttgggcctgtccccacaggtgagtacgtcctgaccgtgctggcatctaatgccttcgagaaccggacgcagcaggtgcctgtgagcrtgtgcgcctccctgccctctgtgagcgtgtgcgcctccctgactggggcctgctggtaccccagagtgggtgtctgttccccagtccctgctttcctcagctggcctgattgggggtctgcccagaggggtcgtctgaggggagggtgtgggagcaggttccatcccggc

SEQ ID NO: 9408 - DNA, 549 bp, Homo sapiens
aggggccaggcgtgggaggagtggacagggaagctgggccccctgaactgccccccaccgcggcctggctcttgctgctctgctgccccgagtgcagctgcacttggaggcggtgccgtcctcaccaggcagccctcagtgctgctgcacctgtgctccgtcccgcacgtggcttgggagcctgggacccttaaggctgggccgcaggtgcagccgttcaccccgggctcctcaggcggggggcttctgctgagcgggtggggagcaggtgggggtgccgcggctgccccacttgggcctgtccccacaggtgagtacgtcctgaccgtgctggcatctaatgccttcgagaaccggacgcagcaggtgcctgtgagcgtgtgcgcctccctgccctctgtgagygtgtgcgcctccctgactggggcctgctggtaccccagagtgggtgtctgttccccagtccctgctttcctcagctggcctgattgggggtctgcccagaggggtcgtctgaggggagggtgtgggagcaggttccatcccggc

SEQ ID NO: 9409 - DNA, 514 bp, Homo sapiens
ctctcctctctcccttctgccctcctccttctctcatgtgaagaggtgccttgtgtggtcagtgggctgcatcacgtgttccccaggtggaggccctgggtcatgcagagccacaaaaaatgcttagtgaggaggctgtgggggtccagtcaagtgggctctccagctgcagggctggrggtgggagccaggtgaggacccgtgtagagaggagggcgtgtgcaaggagtggggccaggagcggggctggacactgctggctccacacaggggcccagcagggagctcgtatgccgctcgtgcctgaagcagacgctgcacaagctggaggccatgatgcgcatcctgcaggcagagaccaccgcgggcaccgtgacgcccaccgccatcggagacagcatcctcaacatcacaggtgccgcggcccgtgccccacgccacccgcccgccccacgtggcccgtccgccccatgccgccctttcctctgcctccctcctccccacaaccgcctcg

SEQ ID NO: 9410 - DNA, 593 bp, Homo sapiens
cacgcctgtaatcccaacactttgggaggccgaggcgggcagatcagttgaggtcaggagttcgagaccagcctggccaacacaatgaaaccctgtctctactacaaatacaaaaacttagctgggcatggtggcgggcgcctgtagtcccagctactcgagaggctgaggcaggagaatggcatgaacccaggaggcggagcttgcagtgagccgagattgcgccactgcactccatcctgggcaatggagcaagactccatctccaaaaaaaagaaaaaaaaaatcccacaaagaaaagcttgggctcagagccttcacgatagaatttttctaagcagttaaggaagaattaacaccaatccttcacagactctttccaagaatacagcaggtgggaactcttcccattcatacggaaacgggaggccgcaccccttaggaatgcacacgtggggtcctcaagaggttacatgcaaactaaccccagcagcacacagagaaggcgcataagccgcgaccaggaggggttgctcccgagtccgtggcaggaaccagaggccacatgtggctgctcgtattwaagttaatta

SEQ ID NO: 9411 - DNA, 568 bp, Homo sapiens
ctttgagaaattggctaaggccctttctctgatctgcaggggatgcacagctcctctcagtagtgagcaagtatttattggaatagctcagctaagctaaagtggagacctctagtattttgtttggcttgtcgtacaagacatacacaatacctagcatgcacggataatgcagcgtgctggtggtggcaagaatgagtgctactttatagattattgatgttactgctttctgggtagaggttctaaaggaaggctgtattttactcgaaaaataatcttcaayggccagttggtatgatgcaagttgcttatcagtagtttcctgttttgctttataatccctctctactggctccccaaacttattaaaatcccattgtatgaaataacaatgtaacatagggagggaaggaaagaaaagaggctgagttcatgcttggagggaagcaagaagggagagaacaatgccagccaggtcatgtggctaagacctgggccactggagttacaaattgctagactggcaattctgctgcctcccctcccagggcttttcttgagtgaa

SEQ ID NO: 9412 - DNA, 590 bp, Homo sapiens
ctggcatggaccctkgccctggccctttgctacttaaggccataccctggcccagccctggtcctgaccctgtcctggccctactttggcctggctctaccccggcatgctattctggccctagccctgaccctgtccctgtccctgtcctggccctagccccattgctggtcctgccattgcccttgtcctgacattgccctttcctggtcctggcactggccttgtcccagccctgctctggccctggtctgaaccctggccctgcaatggacctgccttggtcctgcccagaccctggctctggccctacctctaccctggccatacccttgccctggcctggaccccggtcctggtccttgtcctgccccagccatggccctggccctgccctgcctgtgccctgttctatcctgggctggccctgccatggcctggtcttgccattgccctgccctagcctgccctgcttgtgccctagatctgccccggcctttgcccctgtcttggttctagccttaactcttagactagcaaggagtatatatttctggcaaaattccagaaatgattaactagatcgctta

SEQ ID NO: 9413 - DNA, 590 bp, Homo sapiens
ctggcatggaccctggccctggccctttgctacttaaggccataccctggcccagccctggtcctgaccctgtcctggccctactttggcctggctctaccccggcatgctattctggccctagccctgaccctgtccctgtccctgtcctggccctagccccattgctggtcctgccattgcccttgtcctgacattgccctttcctggtcctggcmctggccttgtcccagccctgctctggccctggtctgaaccctggccctgcaatggacctgccttggtcctgcccagaccctggctctggccctacctctaccctggccatacccttgccctggcctggaccccggtcctggtccttgtcctgccccagccatggccctggccctgccctgcctgtgccctgttctatcctgggctggccctgccatggcctggtcttgccattgccctgccctagcctgccctgcttgtgccctagatctgccccggcctttgcccctgtcttggttctagccttaactcttagactagcaaggagtatatatttctggcaaaattccagaaatgattaactagatcgctta

SEQ ID NO: 9414 - DNA, 514 bp, Homo sapiens
tgggcgtggtgacgggtgcttgtaatcccggttactcgggaggctgaggtaggagaattgcttgwacccaggagacagaggttgcagtgagccaagatcgcaccactgcgctccagtctgggtgacaagagcgagactccgtctcaaaaaaaaagaggaggattcaacacagttgatgatgctacaaaaaataataataaggatagtgagactcaatcaggtagaaacagctgtgagtggctgtcatttgccctcatggtctgttgctgcagaggaagctaaaaagtgtgcaggagtgtctacccgtctaccctgtggtggtctcacgtattgcagcctctgcctgatgggcccagcatggcttttgtctccctgcatgcccagaaattgcacagaatgtggatcagctgttctctcagggaacagcgttctatttgaggactgcgtttttaccagaccaggctcaagtcagttatatttcaggatggcagcctttgtaaccacctaaaataat

SEQ ID NO: 9415 - DNA, 525 bp, Homo sapiens
tggaggaagcaaggaagaggagatttagttagagcagacagccaggatcagagcatgcagggtctgatcatttatttccaagttattctgaaatcaaagagaagcaggcttttaagctaagaatgcagcacatcggctggcatagaataagagttcaaaaaaagtgtaagctcccttccctatcctgaaacaaccaaagtaaataaaaatggcccctctgttttgaattatttatttatttgtgctttcaaactgttttcttaaaaaaaaaaaaaactacagagtagtgagtgggggcgggggggtaaggggtggaatactcaaaacgtgttcaaaatcaaacgagccagaaactcctcgctggaaattttctctctagatctctgcaggaatcagtggaaccatgagagacagagtcgaaagcagcagagcctggaattatttctctaagcaagacccagacgccasgcaggtagtgaaattgctcctgccccacctccatccttgctgcctatctgagaacag

SEQ ID NO: 9416 - DNA, 1366 bp, Homo sapiens
aaagttaaaggattttttaacattggccaggcgtggtggcacacatctgtgatcccagctacttgggaggctggggcaggaggattgcttgaagcccaggaggttgaggctgcagtgagctgtgatcgagccactgcactccagcctgggtgacagagcaaactccagtctcaaaaaaaaaacaaataataatattttacataaccaaccacttctaaagattaaaaaaacccctatgattaaaaacctcaggtccctcaggcaatcataccagatattgaaacaaagcaataacataaggactgcagtattcattttatttttatattatttatttattcttccttagtttcttgagattatcatccgctgagggtggaaggggagtgagcagacacactygggaggtgtcttgagattatcatccgctgagggtggagctgagggtggaaggggagtgagcagacactcgggaggtgtcttgagattatcatccgctgagggtggaaggggatagagcagacactccgcaggtgtcttgagattatcatccgctgagggtagagctgagggtggaaggggagtgagcagacactcgggaggtgtcttgaggctcagggagttatcaattatagaatgttgttgagttggaggaggtggctggtggcccatcctgttttttaaagtttcagctgtgaggtagggccagtagggcaatcctgaagaatgacgatgctccgctgccgccattctgacctgtagggccaaaggagggaatgttttcacacatattcatttgatggacaaaattaccgccaccaacacagtctgcaccttctgttgctggtgatagatttttgcacctttccatcctccaggtttcaaaatagcagtgtcagtgtcataatatcacccttccactgagtactgccgacagctggggggtaaagaaaagtcattgggacacactgttgtctccacatgccactgtgtctgtctgcaaatgtaggcaggctggggtcctgccccagggaagacagagtcataacagagtaataaagaagcatgtttgagacacaggagtgtctatgtctatcctcattcctccctcacagccatcaccagagcatgtttcttgcaccaggtcaatagacagtaagagacagtaagagaggcatgaaaagcccattgtccacacatgttgcagcttctttttggagaatgttttccaggccttttatgttctgtctctgattctcagaactctgcaaggtcagtgtgaccaccctgctccaaatctaagaaaacagaggtttccagaggaaggagaaattgtgcccagggtcacacagcttgcaagaggcag

SEQ ID NO: 9417 - DNA, 1366 bp, Homo sapiens
aaagttaaaggattttttaacattggccaggcgtggtggcacacatctgtgatcccagctacttgggaggctggggcaggaggattgcttgaagcccaggaggttgaggctgcagtgagctgtgatcgagccactgcactccagcctgggtgacagagcaaactccagtctcaaaaaaaaaacaaataataatattttacataaccaaccacttctaaagattaaaaaaacccctatgattaaaaacctcaggtccctcaggcaatcataccagatattgaaacaaagcaataacataaggactgcagtattcattttatttttatattatttatttattcttccttagtttcttgagattatcatccgctgagggtggaaggggagtgagcagacacacttrggaggtgtcttgagattatcatccgctgagggtggagctgagggtggaaggggagtgagcagacactcgggaggtgtcttgagattatcatccgctgagggtggaaggggatagagcagacactccgcaggtgtcttgagattatcatccgctgagggtagagctgagggtggaaggggagtgagcagacactcgggaggtgtcttgaggctcagggagttatcaattatagaatgttgttgagttggaggaggtggctggtggcccatcctgttttttaaagtttcagctgtgaggtagggccagtagggcaatcctgaagaatgacgatgctccgctgccgccattctgacctgtagggccaaaggagggaatgttttcacacatattcatttgatggacaaaattaccgccaccaacacagtctgcaccttctgttgctggtgatagatttttgcacctttccatcctccaggtttcaaaatagcagtgtcagtgtcataatatcacccttccactgagtactgccgacagctggggggtaaagaaaagtcattgggacacactgttgtctccacatgccactgtgtctgtctgcaaatgtaggcaggctggggtcctgccccagggaagacagagtcataacagagtaataaagaagcatgtttgagacacaggagtgtctatgtctatcctcattcctccctcacagccatcaccagagcatgtttcttgcaccaggtcaatagacagtaagagacagtaagagaggcatgaaaagcccattgtccacacatgttgcagcttctttttggagaatgttttccaggccttttatgttctgtctctgattctcagaactctgcaaggtcagtgtgaccaccctgctccaaatctaagaaaacagaggtttccagaggaaggagaaattgtgcccagggtcacacagcttgcaagaggcag

SEQ ID NO: 9418 - DNA, 1366 bp, Homo sapiens
aaagttaaaggattttttaacattggccaggcgtggtggcacacatctgtgatcccagctacttgggaggctggggcaggaggattgcttgaagcccaggaggttgaggctgcagtgagctgtgatcgagccactgcactccagcctgggtgacagagcaaactccagtctcaaaaaaaaaacaaataataatattttacataaccaaccacttctaaagattaaaaaaacccctatgattaaaaacctcaggtccctcaggcaatcataccagatattgaaacaaagcaataacataaggactgcagtattcattttatttttatattatttatttattcttccttagtttcttgagattatcatccgctgagggtggaaggggagtgagcagacacacttgggaggtgtcttgagattatcatccgctgagggtggagctgagggtggaaggggagtgagcagacactcgggaggtgtcttgagattatcatccgctgagggtggaaggggatagagcagrcactccgcaggtgtcttgagattatcatccgctgagggtagagctgagggtggaaggggagtgagcagacactcgggaggtgtcttgaggctcagggagttatcaattatagaatgttgttgagttggaggaggtggctggtggcccatcctgttttttaaagtttcagctgtgaggtagggccagtagggcaatcctgaagaatgacgatgctccgctgccgccattctgacctgtagggccaaaggagggaatgttttcacacatattcatttgatggacaaaattaccgccaccaacacagtctgcaccttctgttgctggtgatagatttttgcacctttccatcctccaggtttcaaaatagcagtgtcagtgtcataatatcacccttccactgagtactgccgacagctggggggtaaagaaaagtcattgggacacactgttgtctccacatgccactgtgtctgtctgcaaatgtaggcaggctggggtcctgccccagggaagacagagtcataacagagtaataaagaagcatgtttgagacacaggagtgtctatgtctatcctcattcctccctcacagccatcaccagagcatgtttcttgcaccaggtcaatagacagtaagagacagtaagagaggcatgaaaagcccattgtccacacatgttgcagcttctttttggagaatgttttccaggccttttatgttctgtctctgattctcagaactctgcaaggtcagtgtgaccaccctgctccaaatctaagaaaacagaggtttccagaggaaggagaaattgtgcccagggtcacacagcttgcaagaggcag

SEQ ID NO: 9419 - DNA, 1366 bp, Homo sapiens
aaagttaaaggattttttaacattggccaggcgtggtggcacacatctgtgatcccagctacttgggaggctggggcaggaggattgcttgaagcccaggaggttgaggctgcagtgagctgtgatcgagccactgcactccagcctgggtgacagagcaaactccagtctcaaaaaaaaaacaaataataatattttacataaccaaccacttctaaagattaaaaaaacccctatgattaaaaacctcaggtccctcaggcaatcataccagatattgaaacaaagcaataacataaggactgcagtattcattttatttttatattatttatttattcttccttagtttcttgagattatcatccgctgagggtggaaggggagtgagcagacacacttgggaggtgtcttgagattatcatccgctgagggtggagctgagggtggaaggggagtgagcagacactcgggaggtgtcttgagattatcatccgctgagggtggaaggggatagagcagacactccgcaggtgtcttgagattatcatccgctgagggtagagctgagggtggaaggggagtgagcagacactcgggaggtgtcttgaggctcagggagttatcaattatagaatgttgttgagttggaggaggtggctggtggcccatcctgttttttaaagtttcagctgtgaggtagggccagtagggcaatcctgaagaatgacgatgctccgctgccgccattctgacctgtagggccaaaggagggaatgttttcacacatattcatttgatggacaaaattaccgccaccaacacagtctgcaccttctgttgctggtgatagatttttgcacctttccatcctccaggtttcaaaatagcagtgtcagtgtcataatatcacccttccactgagtactgccgacagctggggggtaaagaaaagtcattgggacacactgttgtctccacatgccactgtgtctgtctgcaaatgtaggcaggctggggtcctgccccagggaagacagagtcataacagagtaataaagaagcatgtttgagacacaggagtgtctatgtctatcctcattcctccctcacagccatcaccagagcatgtttcttgcaccaggtcaatagacagtaagagacagtaagagaggcatgaaaagcccattgtccacacatgttgcagcttctttttggagaatgttttccaggccttttatgttctgtctctgattctcagaactctgcaaggtcagtgtgaccaycctgctccaaatctaagaaaacagaggtttccagaggaaggagaaattgtgcccagggtcacacagcttgcaagaggcag

SEQ ID NO: 9420 - DNA, 522 bp, Homo sapiens
tctattcatgctaacattatttttcaaaacatacatggaaatttagcccagattgtctacatataaggtttttatttgaattgtaaaatatttaaaagtatgaataaaatatatttataggtatttatcagagatgattattttgtgctacatacaggttggctaatgagctctagtgttaaactacctgattaatttcttataaagcagcataaccttggcttgattaaggaattctactttcaaaaattaatctgataatagtaacaaggtatattatactttcattacaatcaaattatagaaattacttgtgtaaaagggcttcaagaatatatccaatttttaaatattttaatatatctcctatctgataacttaattcttctaaattaccacttgccattaagctatttcataataaattctgtacagtttcccccmaaaaaagagatttatttatgaaatatttaaagtttctaatgtggtattttaaataaagtatcataaatgtaataagta

SEQ ID NO: 9421 - DNA, 614 bp, Homo sapiens
tttttgaaagatatactttatttttcataaaacatttttatctgtttacaagtattcaaaacctattgaaaagttgtaaaatacagaaaaatgtaaggagacaggtaatagttgtcattaaaatgcatttttaaagaatattctaatattagaattagagtaatgtactaaataggagtacatatttggrtatgattattataacacacacacaggaatggtattctgaatagagaacttatataaatcaataatagaaaaataagggtaattgacagaagagtagaccttaatattcagtaaacatgagaaaaaatactgaaatattctaaatttagatagacttaataacaaagccatttcaaggaaatgatatattgtcttccccaaatgaagcttaacaaaaattaatttggtaaaatacaatctcagcaattttttgagaaaatgaacacttcatatgcttttgatgagactatcagctggtataatcaccaaggaagaaaactggcattatctgtttaatctgaaagtgatctagaaattttactcttggtgtctacccccaagtcagtgagagaagatattctttatgtgagtgatttttctgaagg

SEQ ID NO: 9422 - DNA, 211 bp, Homo sapiens
aaatcaatgtcgttctgaggctgagattcataaagcaaatggaattgtttagcgtagctagattttatttcatattgrcaaatgcttataatatttgtgcaataggtttttttttttcttgatacaacctgttcagtggcttagaggcaaatactgtgtgatctcatttatttgcaagctttcctttttggagaataaatgatatatcagc

SEQ ID NO: 9423 - DNA, 970 bp, Homo sapiens
gtcatcacaacacaatacataattgttacttttctataaactgaggtgcagtaggtgctccctttcctgcataaacttctatagagttccttaaagggtttcttgcctctatttacatttcttttcaaacctcatggcaacacaggtgaaatttctaaaatgataatctgataatgtctcttccctgcttctaatacttcactggattccaatcccctagagaacaaattccaaattttttagcatcacaggaaaagcccatcatgatatagatggatggactaactttccaatcttatctcctgctatgcctttctcacactttacrctccagcaattctgaacagcttacagcatctcaagcacaccatactgtttacatgtcaatgccactgggcatctcccgttatttgcacatgatgttgcctgtattggaatgcccaccttcttgtgctcctgcctcaaactacctacacttcttgcaagtggagcctgtgtctgatttatatttatcccaagacctagcacaggggaacacagatggtgctccatcaatatctgcttgattgattagattcaaggggaacttcaaagtattttcttgcttttcttcctttcaaagttaaaatataaaccctgagatctctgcaggccccattgttctgtatgaaaaggcctttatcagtaccgaggcatttaacaaagaagctctttctgaaaatattaaaccatcttcatttatttaaatttccagaaacctgcagtagtaagcaaacctaacagcagtgcttaagcaaatgcacaacctatttccatttctgaactttcataatttctaagggcagatgcaagaagaaaaagaaaaatgcctcctcagataaaggttgtgagcatgctttaaatcacttcgaaactctgctctatggggcacaaaaatcatattgaaacaaaatatttttaccaaaaatgg

SEQ ID NO: 9424 - DNA, 590 bp, Homo sapiens
cgcttgaacccaagaggcagaggttgcagtgagctgagatcgtgtcattgcactccagcctgagcaacagagcaaaaactctgtctcaaaaaaaaaaawatatatatatatatatcttgactcatttaaataatcaatgggaactgaatatcctaattgatatgacacagagcaggaatctccatgcctttcaaacaaatatcacagaaagaaatcagcccttgctgggcacagtggctcacacctgtaatccaagcactttaagaggcagaggcaggtggatcacttgagctcagttggagtttaagaaaagcctaggcaacatggtgaaacctcatctctacaaagaatacaaaaaattagcctggcatggtggcatgcacctgtagtcccatccactagggaggctggggcaagaggatcacgtgaatccaggaattcgaggctgcagtgcccccagatcatactactgcactccagcctgggtgataaagtgagaccttctcaataaataaataaatacaaaattaaaaaccagcacttaactcttcagctaccacattaattctcagcaaataccttcttagcag

SEQ ID NO: 9425 - DNA, 590 bp, Homo sapiens
cgcttgaacccaagaggcagaggttgcagtgagctgagatcgtgtcattgcactccagcctgagcaacagagcaaaaactctgtctcaaaaaaaaaaaaatatatatatatatmtcttgactcatttaaataatcaatgggaactgaatatcctaattgatatgacacagagcaggaatctccatgcctttcaaacaaatatcacagaaagaaatcagcccttgctgggcacagtggctcacacctgtaatccaagcactttaagaggcagaggcaggtggatcacttgagctcagttggagtttaagaaaagcctaggcaacatggtgaaacctcatctctacaaagaatacaaaaaattagcctggcatggtggcatgcacctgtagtcccatccactagggaggctggggcaagaggatcacgtgaatccaggaattcgaggctgcagtgcccccagatcatactactgcactccagcctgggtgataaagtgagaccttctcaataaataaataaatacaaaattaaaaaccagcacttaactcttcagctaccacattaattctcagcaaataccttcttagcag

SEQ ID NO: 9426 - DNA, 590 bp, Homo sapiens
cgcttgaacccaagaggcagaggttgcagtgagctgagatcgtgtcattgcactccagcctgagcaacagagcaaaaactctgtctcaaaaaaaaaaaaatatatatatatatatcttgactcatttaaataatcaatgggaactgaatatcctaattgatatgacacagagcaggaatctccatgcctttcaaacaaatatcacagaaagaaatcagcccttgctgggcacagtggctcacacctgtaatccaagcactttaagaggcagaggcaggtggatcacttgagctcagttggagtttaagaaaagcctaggcaacatggtgaaacctcatctctacaaagaatacaaaaaattagcctggcatggtggcatgcacctgtagtcccatccactagggaggctggggcaagaggatcacgtgaatccaggaattcgaggctgcagtgcccccagatcayactactgcactccagcctgggtgataaagtgagaccttctcaataaataaataaatacaaaattaaaaaccagcacttaactcttcagctaccacattaattctcagcaaataccttcttagcag

SEQ ID NO: 9427 - DNA, 982 bp, Homo sapiens
ggcacttttatacccattggggataggcacagggaagaccaacatttcagaggtctggcacaggaactgatttttaaaawatctttgcatttcttcagagccccaaaacactgcatgtgtcttagtggctgcccacgctctggctgagtggggcaagccaagccatcttctatgccagatgctagcaggaagtcaaagctcctgcaagaatgggaaggtagataacaaggatcccctatatcaccaggcagtggagtagatttgtcctcctgcagggtatagtgtttctatcagacagctgaaggactcctagatattgttctcagggaaggaaacaagcaagcaaacattcattcctgactagatgctaacttaactgattgcactgaattctcctaaaaccctgtattaatcagtgttagcctcttttcatagaaggggaacttgaaactcagtttgaaaaataagcctaggttttctctggtacaaagtaatctcgaacttggaagtcaggtagcctagactccaaaagacaagatttttaccctacttgcaagatatagaaatatgaagaagaaaagagtttggagataaacatgttatttcaaggcctggctctgccgcctcaccctctgtgtgactttaggaattgaaaggaactctctgagattcagataaaaattgttaacaccagaaatagaaataaggtgttagtgcctgcttaacggagattcatgagaaataaatgagggaatgcatcaaatattcttgcctcccccttaatatacagtaggaagatattaatactttccatggattttaataatgaaacagcatgaggaagtgtggactgggtgtcagtaggaaggagatgaagagactggcttgaggatctatttttattctagcattttaggagagcagaacagaaggaaggtgaattgaatttttttttttttgtaaaataactatacgagacaag

SEQ ID NO: 9428 - DNA, 682 bp, Homo sapiens
cagagctttgygtatattatcttgtttattcctcccaattatcctctgaattaaatgctattactatcgctattttgaagaaacagaggcacaggtgagttagataacatagatgagggttgcacaggcaaaaatttgttgtggagcaagaatctgagctgggaatatggtttcagagtatatccaattaaccatactgtactgattatccacttaaccacttacccatactgagtatatccacttaaccatactgtactgattatacatcagagctaggggctcaggacctggaagttccattttatatataatataacatattattatatattttatagagaaataatatttctatatattacatacatatttctacacactatataaattcatttgttgaactcctaactccctcggtggggtttttggtaggtaattaggtcatgaagacagagttctcataaataggattaccgtccttataaaagagaccccagagagcttcgtcatccctatcaccaggtgaggacaaaatgaaaagacaggtgttcatgaaggagggagcaggccctcgccagacgctgaatctgctgatgtcttgatcttggatgccccagcttccagagctgtgagaaatacatttctgttggttaaaagtcaccagtctatgatactctgg

SEQ ID NO: 9429 - DNA, 576 bp, Homo sapiens
agccagtcttgctctggatgaggatgaggagggtggatcacgaggtcaggagttagagaccagcctggccaacatggtgaaagcttgtctctactaacctctcaaccttccttacactcttatccatccacctccacgaacactcccaaagaaaaaagygatgggtctcttctctccaatggtgatacgcttggttccaaatttgtccgagtttcgagcaacttgaggtgttgttgattcaagtaactctggtggtgtttgctgaggacatctgccatcagttgatggatcccagaaatcttgagtctgaaaaccctgaacttcatccacgtagattgtggtggctcttctgggaccatgtggatggctgagccatgaacagagatgcatgcccggagaccaccacagtgaggacactaggaggtcatccaagccccatgctaaggtgtgaatatttgttccctccaaaactcctggggagactttatcccctacatggcagcattgagaggtgagttatttaagaggtgattgggccgtgaaggctctgctcttagagatggattaatccaatca

SEQ ID NO: 9430 - DNA, 574 bp, Homo sapiens
ccaagatattttaaagataaaatattaggcaagcctattcgttttgtctaaaaatacgaatacttgatggaatacacacatacaaacatgatatataatatacatataatatgtcacaatataatatctattatacagcataaattataatatatagtatactatgtatattatgcatactacattatatatatcccactagatagttgtatgcacaatgaattaaatctgcctatctatctgtctatctatctctatctagtgcaacagtgtaatgcaggaactttaaagtgctaagttcagattgraagtctcctaacctgctaaatattttaagggaacgattacattgaacctcatgagttttctgtgaatgtcgtgaagatttcaatacacataatagctctttaaatcacaacccatgcaaacgtaattctgatattttataaaacaaaattctttctgcaataaaaccatgcttgtgtattagagagctgttgctgccacaagaaagtgccgcaaacttggcggcttgaacaatgaaaatttatgttttcatacttctggagagcaa

SEQ ID NO: 9431 - DNA, 574 bp, Homo sapiens
ccaagatattttaaagataaaatattaggcaagcctattcgttttgtctaaaaatacgaatacttgatggaatacacacatacaaacatgatatataatatacatataatatgtcacaatataatatctattatacagcataaattataatatatagtatactatgtatattatgcatactacattatatatatcccactagatagttgtatgcacaatgaattaaatctgcctatctatctgtctatctatctctatctagtgcaacagtgtaatgcaggaactttaaagtgctaagttcagattgaaagtctcctaacctgctaaatattttaagggaacgattacattgaacctcatgagttttctrtgaatgtcgtgaagatttcaatacacataatagctctttaaatcacaacccatgcaaacgtaattctgatattttataaaacaaaattctttctgcaataaaaccatgcttgtgtattagagagctgttgctgccacaagaaagtgccgcaaacttggcggcttgaacaatgaaaatttatgttttcatacttctggagagcaa

SEQ ID NO: 9432 - DNA, 525 bp, Homo sapiens
atatcttctattactaaatayagtaattcaatggtaaaaatgacataagtacatcacagactatatggaaaaaagaaaaaacaatttcagtcatctaaaactgttactattagcattttggtgtgtttcctgttaatttttttagtcaatgtattggttgtatttttgataaaattgtgtgtattggagttttaaaatatcagttaattgcaatgtatctctcctcttctcccctcttcatgatccttcttcctttcttttagcacgtgattgttctcttctgctggcttcaaaaataccatacttagtattcccatttttctggccattctctctcaggttttgttgctgtctcctgatcttctacctgcttctctcaatgatgcaattccccaaagatcagtccaaggctcccttcttttcttactctatcctctcatctgagagtagctcatctacatccatggcttcacttgccttctgcatcccagtgattccagatctatatctctagaggtatcacat

SEQ ID NO: 9433 - DNA, 597 bp, Homo sapiens
tataataataataaaatttaaaaaaaaccaaaaaacatatttggggagaagcttccaagtaattaaaaaaatttttcctttttaaaaatttttgtgggtacataatgcttgtatatatttttgggctacatgagatgtgttgatacaggcatgcaatgtgaaataatcacaaarcagggaatgaggtatccatcccctcaagtatttaccctttgtgttacaaacaatccaattacactctttcggttattttaaaatgtacaattaagttattttaaaatgtgcaatttattattgactacagtcatcctattgtgtgatcagagagtagtcttgttcattcattcttttttttttcagacggagtctcgctctgttacccaggctggagtacactggctcaatctcagctcactgcaaactctgcctcctaggctcaagcaattctcctgccacagcctctgagtagctgggattacaggcatgtgccaccacgcctggctaacttttgtatttttagtagagacggggtttcaccatgttggccaggctggtctcgaactcctgacctcaggtgatccgcccacctcggcctcc

SEQ ID NO: 9434 - DNA, 551 bp, Homo sapiens
attgttctctgtccccagtccctggcacagagctcctaaaacccttgtaatttcctgagtgataggagtgctaggggaatttttttgttctaatgcttggcttctgctgaagttcctgagagagagctccgaatacccctgtagacagaggtgctagaattttttagcatttggtccttgaccccaattttctgacacagagctcctaaatcccttggaatttcctgggtgataggagcatcttttgttctaatgagatgactcttggtgggcacctggctagcccaacatkggcctgttggccaggaaaatgaaccatgtgattaaaagtagtactactatttgatccagcaatccagaggaaaagaagtcgttattcgaaaaagatacttgtgcacgcatatttctagcagcacagttcacaatcgcaaaatcgtggaaccaacccaaatgcccgtcaatcaacaagtggataaagaaactggtatatatatatatatatatatatatatatataatattacataaatatataaaaatatatatttgtg

SEQ ID NO: 9435 - DNA, 551 bp, Homo sapiens
attgttctctgtccccagtccctggcacagagctcctaaaacccttgtaatttcctgagtgataggagtgctaggggaatttttttgttctaatgcttggcttctgctgaagttcctgagagagagctccgaatacccctgtagacagaggtgctagaattttttagcatttggtccttgaccccaattttctgacacagagctcctaaatcccttggaatttcctgggtgataggagcatcttttgttctaatgagatgactcttggtgggcacctggctagcccaacattggcctgttggccaggaaaatgaaccatgtgattaaaagtagtactactatttgatccagcaatccagaggaaaagaagtcgttattcgaaaaagatacttgtgcacgcatatttctagcagcacagttcacaatcgcaaaatcgtggaaccaacccaaatgcccrtcaatcaacaagtggataaagaaactggtatatatatatatatatatatatatatatataatattacataaatatataaaaatatatatttgtg

SEQ ID NO: 9436 - DNA, 526 bp, Homo sapiens
gtctctgactgcctcttaagtccctaagatgtgtcaggcactaagccaggtatagatgagtaggaaataattaagtgaatgcagaaggcatgacagagacaatgacataaatctgcattgggcccagagagaggctgtgagttctgtctggggcgagggtgcggggtactcaggaaggaatgaatcgaggagttgacttgaactgcatctttaacagcaggaggtgatcagtttgtagctgggaatcgggtagggygtcaaggccactgtagacagagcaatgctagaaaaagagtcaaggaaggagtggtgtgtacttggggacagatggagtgtgaggtgcagggcgatgtggagatggaaggggagggagggctgctgtgagaaatgtggctggtggggtcagcacagaccacaccagaaggtcttcccagcactactgggagtttggacttcatccggaggcaatgcggaaccaccgaagggattgaagccaaggagtagcatgatcacatttgcacttaat

SEQ ID NO: 9437 - DNA, 526 bp, Homo sapiens
gtctctgactgcctcttaagtccctaagatgtgtcaggcactaagccaggtatagatgagtaggaaataattaagtgaatgcagaaggcatgacagagacaatgacataaatctgcattgggcccagagagaggctgtgagttctgtctggggcgagggtgcggggtactcaggaaggaatgaatcgaggagttgacttgaactgcatctttaacagcaggaggtgatcagtttgtagctgggaatcgggtagggtgtcaaggccactgtagacagagcaatgctagaaaaagagtcaaggaaggagtggtrtgtacttggggacagatggagtgtgaggtgcagggcgatgtggagatggaaggggagggagggctgctgtgagaaatgtggctggtggggtcagcacagaccacaccagaaggtcttcccagcactactgggagtttggacttcatccggaggcaatgcggaaccaccgaagggattgaagccaaggagtagcatgatcacatttgcacttaat

SEQ ID NO: 9438 - DNA, 470 bp, Homo sapiens
tttgccaatttcctgcaactctttggcccagattcctgtctataaaatgaaaaaaaaataattgaactagattctgtaaggatctttccagttctaataaaatggcattatatagctatattttcacactataattaataggccaccctctcctcattatcctgcatccagttagattaattgacacttgtggttttttttttgcagatgcactgagagatggtgttggggttgggaacctaactcattcctggtaccaatcactggtcacttctcagatgtggagtcaactgaatgtgcttttgtgtcctacctctttaggttcttgtagagcaacctcataccaaaagtatgaggaagactaggtraagagatctgggctgccatgtgtgtttgtgatgttccctggaggactcaggattcataaatcaatggacctcactctctttaatctttgggagttatatgca

SEQ ID NO: 9439 - DNA, 1119 bp, Homo sapiens
tagctgggattacaggcatgcrccaccacacctggctaatcagaggctcatttttgaacgcctgtaccagtcacacatggaagcacttgaacagcagcagaaatgggccagagcgagtgtgacccagattcagatagtccttggggcctgtgatctctgctcttcattttccctggaagtgttgaaaccatctgcctgccacagtcttcagggcttattaccagctgtgttcttgagggaatcagaacccttgaaaccctagaattgccttgacctgccccgtgggttccctgtgctgcttccctgcatgctaaaggtgggattccccagccaactcctagggactcatcagggagatgctggtggtaccttcaaataaaggtgtttgcttgggtcccaccttcctttggaaatagattctgttgaagtgaggcaggctccttgcctggtggagtgtggtggggagtcccagtactgagtgcaggtggcagctaaaagtacacccgtgctgcagacctggtccttctaggtgtggctgcacgtgcttgatgggatcaccattcccttccctgttaaaaaccttgtcacctggatttttccccctcttagagagaagaagatggtagagatcaacttcctgtgtgtccacaagaagctgcgttccaagagggttgctccagttctgatccgagagatcaccaggcgggttcacctggagggcatcttccaagcagtttacactgccggggtggtactaccaaagcccgttggcacctgcaggtaaaactgtcttcctgtaaggccccaaaaatgcgggtgtctgcactgtagttgaggagcatgtgccactgtgagtcacagctccgcccttagcatcccacctctggcgtatctggtaaggcgggcacttggtgcctgcaggagccagatggggagcatggagagggcgggagggttgtagggatggcagattggcaagtccctgccttgtctggagggctcttggtgtctgctggctgctgccatttggagatggtggggggcggtactggtggtttgtttttgtttttagggatgagcccaaatctggatttttatgggaaatgtcctaaagtttta

SEQ ID NO: 9440 - DNA, 1394 bp, Homo sapiens
tgaatataatggaaagatttctgacatcaatacctagttatcttcttatctttcaaatatggtacttccagggcagtaaactcactttgtatttagctggcacatcttgcattattctgttctcttcattccacttatatgtatctcatgtcattttttgtactacattttgatacttggatagtcattatttgtattattagttgccccaaattttcaatctttacatcaacaagtactcaaagttgagtctaatactgtagcttaggtaagttctgyagtgattttgcttcttgctaatatgctctacaaaatgctggctccctggtttgtctattaatcccagcactgacttctgtctgtcaggctctgcaactttcatttgatcttgaatgtatgtccttgtgttggcttttgatacatagatgtgaccaggaagacccttttcttgggaagaatcccttttgagttggaattttagctcaggaatagatgcaaagggccatattgcttcctaaataataatattaaaaatgaccaatattttctgcttatcatactacttgctgtttatcaagtcttcatttctcacctgggtttaggcactggtaagaacagtaaaaattctggtccaaaaaatgtaataaacatttcttaaattccatttgggtactaaacactattctgggtcttccaacttttattatcttccagtcctcaaaacaaacctggctgatagatagtactgttatctgtaagattaataaactacttctcagatagacaatgtgaacttcccagggtcattcagctggtaaatggctgcattcaggtgtcttgactgccacttcaatgattcataatcgatatggtttggctgtgtccccacccaaatctcatcttgaattgtagctccggtaattctcaaatgtcgtgggagggacccagtgggaggtaattcagtcatgggggtgggtctttcccatgctgttcttgtggtggtgaataagtcttacgagatctgacggttttataaagggaagttcccttgtacatggtctcttgcccgctgccatgtaagatgtgactctgctcctcttttgccttccaccacgattgtgaggcctccccagcaatgtgaaaatgtgagtcagttaaacctctttcctttacaaattacccagtcttgggtatgcctttattagcagtgtcagaacagacaaatacaataattttgcaaaatttgagaccttttaaaatggcacagaatagggctcatctcagtgaatattctacgtgcacttaaaaagaatgtaaactttgcagggtaagttaggtgttgtaacctaaacataaaaattatgttaaagtggttgatagtgtttttcagacta

SEQ ID NO: 9441 - DNA, 1394 bp, Homo sapiens
tgaatataatggaaagatttctgacatcaatacctagttatcttcttatctttcaaatatggtacttccagggcagtaaactcactttgtatttagctggcacatcttgcattattctgttctcttcattccacttatatgtatctcatgtcattttttgtactacattttgatacttggatagtcattatttgtattattagttgccccaaattttcaatctttacatcaacaagtactcaaagttgagtctaatactgtagcttaggtaagttctgtagtgattttgcttcttgctaatatgctctacaaaatgctggctccctggtttgtctattaatcccagcactgacttctgtctgtcaggctctgcaactttcatttgatcttgaatgtatgtccttgtgttggcttttgatacatagatgtgaccaggaagacccttttcttgggaagaatcccttttgagttggaattttagctcaggaatagatgcaaagggccatattgcttcctaaataataatattaaaaatgaccaatattttctgcttatcatactacttgctgtttatcaagtcttcatttctcacctgggtttaggcactggtaagaacagtaaaaattctggtccaaaaaatgtaataaacatttcttaaattccatttgggtactaaacactattctgggtcttccaacttttattatcttccagtcctcaaaacaaacctggctgatagatagtactgttatctgtaagattaataaactacttctcagatagacaatgtgaacttcccagggtcattcagctggtaaatggctgcattcaggtgtcttgactgccacttcaatgrttcataatcgatatggtttggctgtgtccccacccaaatctcatcttgaattgtagctccggtaattctcaaatgtcgtgggagggacccagtgggaggtaattcagtcatgggggtgggtctttcccatgctgttcttgtggtggtgaataagtcttacgagatctgacggttttataaagggaagttcccttgtacatggtctcttgcccgctgccatgtaagatgtgactctgctcctcttttgccttccaccacgattgtgaggcctccccagcaatgtgaaaatgtgagtcagttaaacctctttcctttacaaattacccagtcttgggtatgcctttattagcagtgtcagaacagacaaatacaataattttgcaaaatttgagaccttttaaaatggcacagaatagggctcatctcagtgaatattctacgtgcacttaaaaagaatgtaaactttgcagggtaagttaggtgttgtaacctaaacataaaaattatgttaaagtggttgatagtgtttttcagacta

SEQ ID NO: 9442 - DNA, 1394 bp, Homo sapiens
tgaatataatggaaagatttctgacatcaatacctagttatcttcttatctttcaaatatggtacttccagggcagtaaactcactttgtatttagctggcacatcttgcattattctgttctcttcattccacttatatgtatctcatgtcattttttgtactacattttgatacttggatagtcattatttgtattattagttgccccaaattttcaatctttacatcaacaagtactcaaagttgagtctaatactgtagcttaggtaagttctgtagtgattttgcttcttgctaatatgctctacaaaatgctggctccctggtttgtctattaatcccagcactgacttctgtctgtcaggctctgcaactttcatttgatcttgaatgtatgtccttgtgttggcttttgatacatagatgtgaccaggaagacccttttcttgggaagaatcccttttgagttggaattttagctcaggaatagatgcaaagggccatattgcttcctaaataataatattaaaaatgaccaatattttctgcttatcatactacttgctgtttatcaagtcttcatttctcacctgggtttaggcactggtaagaacagtaaaaattctggtccaaaaaatgtaataaacatttcttaaattccatttgggtactaaacactattctgggtcttccaacttttattatcttccagtcctcaaaacaaacctggctgatagatagtactgttatctgtaagattaataaactacttctcagatagacaatgtgaacttcccagggtcattcagctggtaaatggctgcattcaggtgtcttgactgccacttcaatgattcataatcgatatggtttggctgtgtccccacccaaatctcatcttgaattgtagctccggtaattctcaaatgtcgtgggagggacccagtgggaggtaattcagtcatgggggtgggtctttcccatgctgttcttgtggtggtgaataagtcttacgagatctgacggttttataaagggaagttcccttgtacatggtctcttgcccgctgccatgtaagatgtgactctgctcctcttttgccttccaccacgattgtgaggcctccccagcaatgtgaaaatgtgagtcagttaaacctctttcctttacaaattacccagtcttgggtatgcctttattagcagtgtcagaacagacaaatacaatmattttgcaaaatttgagaccttttaaaatggcacagaatagggctcatctcagtgaatattctacgtgcacttaaaaagaatgtaaactttgcagggtaagttaggtgttgtaacctaaacataaaaattatgttaaagtggttgatagtgtttttcagacta

SEQ ID NO: 9443 - DNA, 585 bp, Homo sapiens
catagcaagacctccccttcacaaaaattttaaaagttagctgagtctgttggtgcacacccgtagtcccagatactcagaaagctgggttgggaggattgcttgagcccaggagkttgaggctgcagtgagctaagatcacgccactgtatgccagcgtgggagacaaaacaagactctgtccccaccgccccctccaaaaaaaagaaagaaaagaaaaagaaatcaactaacagattcaaggtgtcattgagaggaactatgtgtggagtagtcaggcatatttatgacttgagaaggtatattggaaaagtagttaaatttgaatgagatttagggagagcagtttaataaagaattgtgtttagctgaatagaaccttaaaatgagaacaatttaatagagttaaattaaatttcaagataaaagtttacatactttatgcaagtacctcaaacctggacaaagttgtaatgtcaggaattagccacaaacatttcttctttgattgaaatttaaggtactttcaacacacttgcttcactcttaatatttgattcaaattatgtttttcataattttata

SEQ ID NO: 9444 - DNA, 551 bp, Homo sapiens
gatactacctgagactgggtaatttataaagaaaggaggcctaattgacttatggttccacatggctggggaggcctcaggaaacttaacaatcatggaagaaggtggaggggaagcaagcatgtcttcacatggcagcaggaaagagagcgtgtgcagrggaaactgccactttgaaaccatcagatctcgtgagaactccctcactatcatgaaaacagcgtgagggaaaacacacccacgatttaatcacctttcaccaggtccctccgtcaacacatgggggctacaatttgagatgagattcgggtggggacacagagccaaaccatatcagcaagcaatcatcttcacattggaaaatgttcacaattttttcccagtccattctccagccctctccaccacctccataacagctcacatcctgtgaacagtggcagggatgctatcaggtatgagaagcaaggttactgaggaaatctcctccccagtttggagatgtttctccttaacagcgtcatctggggagctgtcttcttgtgggctca

SEQ ID NO: 9445 - DNA, 990 bp, Homo sapiens
agggccattttccttctctcagagaggctgctccaaaatccagcttcccccaggaccaagaacttccttctgttagcaaagggagctacaagttcccctgcactccaaggtcctagggggctgggcagcaggcattctctgaaagctcccagaagccactggaacccaagtcgtttcctgtttcctccacctgacaagccattttctcatgtttgcrctataagaaggtagtcatggggtggaggcgacagtgtctttctctggaatgcaaacccactgtgtgtctaacagtggcattggccttcctgcacgccttgtaaatgtccccccaactgcacctcttccttgggccacaccatgcgatgtggcatccattccaaatccaatttcctgccagttccaacccagattttgcagcactagaagttctgcttgatcttttcccaaccgacttggttgttttcagactttcttgctctttacacgtatttccaatcctttctattctgcatcacacacaactattttgtattctgcttctgtggatctgattctgcaccccgtggtttttgctgcctctgtgcgatgcatcttgtttccttggatgatctatgctttttgacagttaatgtgtatttcttagaacattacctctggggattatttgaggctgaaagtggatttgcatttcctttttccaggcacccaggagagccaaaaatccccgtattctactttaaactcttagctccaggtttttcgaaccaaaggaagtgtaatttcaggctggaaccttcttaggtgtcaaatcagagttgcacatcatattactggtgcagtacaaagtaccacacactccatggctggaacaacaatttgttgtctcatagttctggaggcccaaagtccaagatatgagtgtcggcagggttggttccttctggaggctctaggggagaatctgttccatgcctctcccttagtgccggg

SEQ ID NO: 9446 - DNA, 990 bp, Homo sapiens
agggccattttccttctctcagagaggctgctccaaaatccagcttcccccaggaccaagaacttccttctgttagcaaagggagctacaagttcccctgcactccaaggtcctagggggctgggcagcaggcattctctgaaagctcccagaagccactggaacccaagtcgtttcctgtttcctccacctgacaagccattttctcatgtttgcactataagaaggtagtcatggggtggaggcgacagtgtctttctctggaatgcaaacccactgtgtgtctaacagtggcattggccttcctgcacgcctwgtaaatgtccccccaactgcacctcttccttgggccacaccatgcgatgtggcatccattccaaatccaatttcctgccagttccaacccagattttgcagcactagaagttctgcttgatcttttcccaaccgacttggttgttttcagactttcttgctctttacacgtatttccaatcctttctattctgcatcacacacaactattttgtattctgcttctgtggatctgattctgcaccccgtggtttttgctgcctctgtgcgatgcatcttgtttccttggatgatctatgctttttgacagttaatgtgtatttcttagaacattacctctggggattatttgaggctgaaagtggatttgcatttcctttttccaggcacccaggagagccaaaaatccccgtattctactttaaactcttagctccaggtttttcgaaccaaaggaagtgtaatttcaggctggaaccttcttaggtgtcaaatcagagttgcacatcatattactggtgcagtacaaagtaccacacactccatggctggaacaacaatttgttgtctcatagttctggaggcccaaagtccaagatatgagtgtcggcagggttggttccttctggaggctctaggggagaatctgttccatgcctctcccttagtgccggg

SEQ ID NO: 9447 - DNA, 990 bp, Homo sapiens
agggccattttccttctctcagagaggctgctccaaaatccagcttcccccaggaccaagaacttccttctgttagcaaagggagctacaagttcccctgcactccaaggtcctagggggctgggcagcaggcattctctgaaagctcccagaagccactggaacccaagtcgtttcctgtttcctccacctgacaagccattttctcatgtttgcactataagaaggtagtcatggggtggaggcgacagtgtctttctctggaatgcaaacccactgtgtgtctaacagtggcattggccttcctgcacgccttgtaaatgtccccccaactgcacctcttccttgggccacaccatgcgatgtggcatccattccaaatccaatttcctgccagttccaaccsagattttgcagcactagaagttctgcttgatcttttcccaaccgacttggttgttttcagactttcttgctctttacacgtatttccaatcctttctattctgcatcacacacaactattttgtattctgcttctgtggatctgattctgcaccccgtggtttttgctgcctctgtgcgatgcatcttgtttccttggatgatctatgctttttgacagttaatgtgtatttcttagaacattacctctggggattatttgaggctgaaagtggatttgcatttcctttttccaggcacccaggagagccaaaaatccccgtattctactttaaactcttagctccaggtttttcgaaccaaaggaagtgtaatttcaggctggaaccttcttaggtgtcaaatcagagttgcacatcatattactggtgcagtacaaagtaccacacactccatggctggaacaacaatttgttgtctcatagttctggaggcccaaagtccaagatatgagtgtcggcagggttggttccttctggaggctctaggggagaatctgttccatgcctctcccttagtgccggg

SEQ ID NO: 9448 - DNA, 538 bp, Homo sapiens
ccggagccaggggacccaggggcctgaggggctgggctcagggttttcttggtccttcgtcctccactccctttcccgatgatgaaatgatttgtattcatgatgaaaggcttgcccgctaagacagtgtgaaaggaaaactccgtgatcctcagtccctggagctcggggtcagaggctggggtttcttggtctctcttcagctctccatcatcctttttgtttttctgtgttctctccctcctccctccctctttctccccttttcctctctctttccttgtttctttcctcctcccatccccgctccacgcttcccctctccatccctcccttcgttcttctttcccgccatcttttctaacccagtaggctcctatttgccaaactcttttttctggaccactttgaaagccctttgtccgagagctcggagagatggcgaggcctgtggggtggccgaaggggaggcagggaagggggcagttgtgggttgctcagtcggggatggcttcacggrgggtgccccaggcccatg

SEQ ID NO: 9449 - DNA, 573 bp, Homo sapiens
ggagtgcctggaagtgatacctccctgcaagttcagtgagtaccccccctcaccyccccaccccagtccctggccacgcctgctcacttctgccctctaccacctgggtacgggcctcgggcaccgtctcccacggggcagcgaccagatgagggcaccagtgctcacgtgccccagggcagacaccagacgcctgccgcacgtcacacacttatcaggagacacagccgggatgaattccattccaagccctctctcctaatgggtacttgaggacccctccccatctcctgcatcccctgccccactccaggaggaagcttctagaatctccacccccaaacacggcacagaacattctcaacaggtgcatggaggtttctcatcacagaaacaccggtcaccctgggttctcccggcgggtgaggcctggccatcagtagctatagccatgttagtaaatggttcagacacacacacacatgcacgcatacacacatggcacttacagtggttcccttctgttcatgcccatttagggaagcttgaggctcagggaggggagaggattga

SEQ ID NO: 9450 - DNA, 573 bp, Homo sapiens
ggagtgcctggaagtgatacctccctgcaagttcagtgagtaccccccctcacctccccaccccagtccctggccacgcctgctcacttctgcccyctaccacctgggtacgggcctcgggcaccgtctcccacggggcagcgaccagatgagggcaccagtgctcacgtgccccagggcagacaccagacgcctgccgcacgtcacacacttatcaggagacacagccgggatgaattccattccaagccctctctcctaatgggtacttgaggacccctccccatctcctgcatcccctgccccactccaggaggaagcttctagaatctccacccccaaacacggcacagaacattctcaacaggtgcatggaggtttctcatcacagaaacaccggtcaccctgggttctcccggcgggtgaggcctggccatcagtagctatagccatgttagtaaatggttcagacacacacacacatgcacgcatacacacatggcacttacagtggttcccttctgttcatgcccatttagggaagcttgaggctcagggaggggagaggattga

SEQ ID NO: 9451 - DNA, 550 bp, Homo sapiens
aaacaagtcccaagccttcycagattcaagacatgggggatgggctgtatctcttatggagagagtcacatagcaagggtgtggctctagggaggaatgaagagtggtcaagtgcagcctgccatgctggctccttcaccagcctgtcagttatatgagccaatgggctgaatcatagtcatctttctctccacatgcctggcccgtgaaggatttgcctgcccagcagagaccgtggaatgaatgtgtgctccaggcactctgccttctctctcttctttgacttctctaagctcgttcctgcccctgtccccctctgtctctcttccccaggatcatggcattagtcggatccttcccatcattttcattttagctccagtatcacctctttgagccttccctgactacccttccagcattctctaatcccatcaccttgttttttttatcttttctttttttttgagacggagtctcactgtgttgcccaggatgaagtgcaggggcacaatctcggctcactgcaacctgtgcctcctgggttcag

SEQ ID NO: 9452 - DNA, 550 bp, Homo sapiens
aaacaagtcccaagccttctcagattcaagacatgggggatgggctgtatctcttatggagagagtcacatagcaagggtgtggctctagggaggaatraagagtggtcaagtgcagcctgccatgctggctccttcaccagcctgtcagttatatgagccaatgggctgaatcatagtcatctttctctccacatgcctggcccgtgaaggatttgcctgcccagcagagaccgtggaatgaatgtgtgctccaggcactctgccttctctctcttctttgacttctctaagctcgttcctgcccctgtccccctctgtctctcttccccaggatcatggcattagtcggatccttcccatcattttcattttagctccagtatcacctctttgagccttccctgactacccttccagcattctctaatcccatcaccttgttttttttatcttttctttttttttgagacggagtctcactgtgttgcccaggatgaagtgcaggggcacaatctcggctcactgcaacctgtgcctcctgggttcag

SEQ ID NO: 9453 - DNA, 516 bp, Homo sapiens
gtgaggtaaagaaagcatcctgattgtaaatataactctcatgttaaaagctgggagcagtggctcatacctgtaataccagcactttgggaggctgaggagggtgaattacctgaagtcaggagtttgagaccagcctgatcaatatggtgaaaccccatctctactaaaaatacaaaaattagcagggcatggtggcgtgtgcttgtaatcccagctactcgggaggctgaaacaggagaatcacttgaacctgggaggcgaaggttgcagtgaaccgagatcatgccactgcactcctgcctgggtaacagagcaagactccgtctcaamacaaacaaacaaaagcattcttacagattatcttggcttttattcctttattctaccaataagttgttagcctctcttatgtgccatttgttacaaaaaatcagctgtcatttttatggagactgagaagtcccctgatctgtccattgtaagctgaagacccagtagggccggttttatgga

SEQ ID NO: 9454 - DNA, 667 bp, Homo sapiens
ggtacgcctgcaggcacgagggcacatcgcacagttacacgtgtgtgaccgcacagcccaggactgttgttaatatcggaaatggggcygggtgcggtggctcgcgcctgtaatcccagcactttgggaggccaaggtgggcggatcacctgaggtcaggagttcaagaccagcctggtcaacgtggtgaaaccccatctctactaaaaatacaaaaattagctgggcgtggtggtgcgcgcctgtaatcccagctactcaagaggctgagacaggagaatcgcttgaaccggggaggtggaggttgcagtgagctgagattatgccactgcaatccagcctgggtgacaaagcgagactctgtctcaataataataataataataataataataataataataataatatcagagatgttaaggcaggttacatgtgttgagcactaggtaccaggcactctgttcccatttcacctggataatctcatttaagcctcacaacaagcgcacccacgtgcaggtactgttattatcctcagacaaagaaactggggcacagagaggttgcgcagcctgccccaggtcacccagagtacgtgaacctgactgctggagccgcactgtgggggaaagtgctttaaacggcactggttcccgtgcagctg

SEQ ID NO: 9455 - DNA, 667 bp, Homo sapiens
ggtacgcctgcaggcacgagggcacatcgcacagttacacgtgtgtgaccgcacagcccaggactgttgttaatatcggaaatggggccgggtgcggtggctcgcgcctgtaatcccagcactttgrgaggccaaggtgggcggatcacctgaggtcaggagttcaagaccagcctggtcaacgtggtgaaaccccatctctactaaaaatacaaaaattagctgggcgtggtggtgcgcgcctgtaatcccagctactcaagaggctgagacaggagaatcgcttgaaccggggaggtggaggttgcagtgagctgagattatgccactgcaatccagcctgggtgacaaagcgagactctgtctcaataataataataataataataataataataataataataatatcagagatgttaaggcaggttacatgtgttgagcactaggtaccaggcactctgttcccatttcacctggataatctcatttaagcctcacaacaagcgcacccacgtgcaggtactgttattatcctcagacaaagaaactggggcacagagaggttgcgcagcctgccccaggtcacccagagtacgtgaacctgactgctggagccgcactgtgggggaaagtgctttaaacggcactggttcccgtgcagctg

SEQ ID NO: 9456 - DNA, 667 bp, Homo sapiens
ggtacgcctgcaggcacgagggcacatcgcacagttacacgtgtgtgaccgcacagcccaggactgttgttaatatcggaaatggggccgggtgcggtggctcgcgcctgtaatcccagcactttgggaggccaaggtgggcrgatcacctgaggtcaggagttcaagaccagcctggtcaacgtggtgaaaccccatctctactaaaaatacaaaaattagctgggcgtggtggtgcgcgcctgtaatcccagctactcaagaggctgagacaggagaatcgcttgaaccggggaggtggaggttgcagtgagctgagattatgccactgcaatccagcctgggtgacaaagcgagactctgtctcaataataataataataataataataataataataataataatatcagagatgttaaggcaggttacatgtgttgagcactaggtaccaggcactctgttcccatttcacctggataatctcatttaagcctcacaacaagcgcacccacgtgcaggtactgttattatcctcagacaaagaaactggggcacagagaggttgcgcagcctgccccaggtcacccagagtacgtgaacctgactgctggagccgcactgtgggggaaagtgctttaaacggcactggttcccgtgcagctg

SEQ ID NO: 9457 - DNA, 667 bp, Homo sapiens
ggtacgcctgcaggcacgagggcacatcgcacagttacacgtgtgtgaccgcacagcccaggactgttgttaatatcggaaatggggccgggtgcggtggctcgcgcctgtaatcccagcactttgggaggccaaggtgggcggatcacctgagktcaggagttcaagaccagcctggtcaacgtggtgaaaccccatctctactaaaaatacaaaaattagctgggcgtggtggtgcgcgcctgtaatcccagctactcaagaggctgagacaggagaatcgcttgaaccggggaggtggaggttgcagtgagctgagattatgccactgcaatccagcctgggtgacaaagcgagactctgtctcaataataataataataataataataataataataataataatatcagagatgttaaggcaggttacatgtgttgagcactaggtaccaggcactctgttcccatttcacctggataatctcatttaagcctcacaacaagcgcacccacgtgcaggtactgttattatcctcagacaaagaaactggggcacagagaggttgcgcagcctgccccaggtcacccagagtacgtgaacctgactgctggagccgcactgtgggggaaagtgctttaaacggcactggttcccgtgcagctg

SEQ ID NO: 9458 - DNA, 667 bp, Homo sapiens
ggtacgcctgcaggcacgagggcacatcgcacagttacacgtgtgtgaccgcacagcccaggactgttgttaatatcggaaatggggccgggtgcggtggctcgcgcctgtaatcccagcactttgggaggccaaggtgggcggatcacctgaggtcaggagttcaagaccagcctggtcaacgtggtgaaaccccatctctactaaaaatacaraaattagctgggcgtggtggtgcgcgcctgtaatcccagctactcaagaggctgagacaggagaatcgcttgaaccggggaggtggaggttgcagtgagctgagattatgccactgcaatccagcctgggtgacaaagcgagactctgtctcaataataataataataataataataataataataataataatatcagagatgttaaggcaggttacatgtgttgagcactaggtaccaggcactctgttcccatttcacctggataatctcatttaagcctcacaacaagcgcacccacgtgcaggtactgttattatcctcagacaaagaaactggggcacagagaggttgcgcagcctgccccaggtcacccagagtacgtgaacctgactgctggagccgcactgtgggggaaagtgctttaaacggcactggttcccgtgcagctg

SEQ ID NO: 9459 - DNA, 621 bp, Homo sapiens
tggactaggtattgtgtaatattatggaaatattattcattttgtagggtgtaatactggtcttatgactgtgaaagaaaaagtttaattttaaaatatgcaaactgaagtatttaggggtgaaatgtcgtgacacttgtaattcacctttaaatacttcaggggaaaaatggtgaagcaaataaagcaaatgttaacagttattaaatcaaagtgatagatttgctcattattttattccctctactttcctgtatgtcttataaattgtcttagcttttttaaaagttkttttttaaaggcgatgtgattggttacactgttcatgggaatgtagattggtgcagccattatggaataaaaggatgaaggtttctaaagaagttaaaaatagaactaccatatgacccagcaatccctctcctgggcatacacccaaaggaaataaaatcaccacctcgtaagggcatctgcagtctcacattcactgcagcattattcacaacagccaagatttggaaacaacctaagtattcactgacagatgaatggatgaagaaagtgggggctgggcacagtggctcacacctgtaatcccagcactttgggaggccaaggcgg

SEQ ID NO: 9460 - DNA, 554 bp, Homo sapiens
tgaggcacctactgtgtgtcagcaaacaagacaaaccttagagcctgtttcctcctctttccttcctggaggcgcactgcaggagtccacccctcctggttgcttcctggccaggctgccctgcaccagccctgtctaagccacagggtttcctttctcccccaaacctgtgacgacgtccgggaaagcccagggtacacctggccctgcaccctcctgagcattcagtcctcagtctctttattattaggcccaatttttacccagtcttgaaatgaacctrtatcttaggtctcctttggcccaaaatcactcatcacatgtatccatcagggttctttagtgtcatgcagcagaagccagctctgcaaaactatcaggcacgaaaggaatttattagaaggcagaaggtgggggagaatggtgagaccacctgggtcagatgggaccagagcagtgagtagctgggccggctgagggattcattcaaattcccagggcagagcatctgaccctctgccaggggaaggcggggcatcttaattgacagctcc

SEQ ID NO: 9461 - DNA, 553 bp, Homo sapiens
caacgcctagcaaggcccaccctgtgcctggcactatgcagttctctgcacaccttctctcccccagtccttaaccaccctacacatgcacccccattttacagatgaggaaacagaggctccaagaggttagcttggccagttgcagtaagagctgacacccgatccctaaatcactactgcctctctcaatatcttttttaaatcttcccaataagaattcctgggaaggccaggtgtggtggctcacacctgtaatcctagcaagcctaggaagccaaggcaggaggatcactttaggcaggggtttgagaccagtctgggcaacatagcaagaccctatctctacaaaaattaaaaaattagtggccaggcgcagtggctcatacctgtaattctagcgcattgggaggcyaaggcaggtggatcacctgagattgggagtttgagaccagcctggccaacatgatgaaaccccatctctactgaagatacaaaaattagcctggcatggtggtagctgtagtcccagctactcgggaggctaaggcag

SEQ ID NO: 9462 - DNA, 533 bp, Homo sapiens
ccagtgggtagaggtcaaggatggtgctgaacatcctacaatgcacaggatcgaccccaccacagcaatgaatgatccagcccctaatatcaatagtgcctgagattgctctaagccaatcatacagcatccgggcctgcaattggctgaggcaggagcacatgactcagacctggtcaatgagctgtgaggggaggtatgagacaggcatggttggggagaaggctccttgtccccatagacctacgtggaaggaacttctsctaattgatgctctgtctccatggaaacctggaggtgggcagccacactgatgcccccaaaactaggagggagctggctgagaagctgagggtggtggagtggaaagtctgtctttgatgaggtgggtggatggatgaattaagctttggtagctgtctgccttcagtaccttttcttacgctaaacgtggtaacagcatcatcttatcctttagagccagtcgaattagaatttctgttatttgcagccagctaaggcattctcactcg

SEQ ID NO: 9463 - DNA, 1033 bp, Homo sapiens
taaaaatacacacamaaaaaaaaaattagctgggcttggtggcgtgtgcctgtagtcccagtgactcagggaggctgaggcaggagaatcgcttgaacccaggaggtagaggttacagtgagccaagatcatgccactgcactccagcctgggcgacagagggagactccatctcaaaaaggaacaaaaaaataaaaaataaaaaagatgaactagttgatagttaataatcatgactggtctatttgtctgctacactttctttcctctatgtgtggcaagtgcctacttactcttttaagacttgtgtcaaagaccacctagttcttcaccttttctggaccctgttagttctcaaacaaaattgtgccccctttcctctcttttagtggttctgtacctctcaaaccctgtattgtggctgttatttactgaactgttaccctagagtgtaaaaactttatcatagtcctaattttatttttggaaactggtatgttcccagccatacaggaggtgcacaatacacacgtactaaataaagtaatggtcatttgaaagagtaaatggtgaatacacagcaattctccaatctttgtgtttatgcaaacacaagaattaactttattggcctaattcaaacgttatcttgaaatttattcaaagttcccattttccatgaattaaccagacattttttgttactagattttcactaattaaccagttaaatctcttttgtcttatatcattttaaaagagcatgtggaacaaattcaaacaacttaggtagttcacgtctgtttagctcactattttaaggagtgaagttcaccccgccatttgcctacttgcctcagtactcacacaacaattgcactgatgtcctgctaatgcgcattaaatcagatatccatacctggctttgaagtgtgccctattcaacaaacagctcacttggttgttatcttccatctagtataaagataaaatatgtgccagagaaagatgtcttatagagattttcgtgatg

SEQ ID NO: 9464 - DNA, 520 bp, Homo sapiens
acttggggagatttcaaagagactgatgacccacgtgatgccaaaactgctggtccatgcaccacacttttgaaaagcaaaggcccaagcaataatactgtttcttaaaattgcctatggcagggtttctcaaacatggtactattaatctggtgagayagattattcattgttggggaggtgggctgtcctgtacattgtaggatgtttagcagcatccatggcctgtattcactagataccagtagcaccttcacctagttgtcacaagcaaaaatatctcctaatgttccaaataatctggggcatggctggtaccctcagatcacaagtttaatcactattcacaataattagctttatcaaacaataaaaattccattctgaggccatggagcacagaaaaactagttaccttttataaaagagctccatagtcaccccagcgttactcagcgagaacatgaccactgaagcttcaaggaaaagaaatataagtatttgtcctatgtgccaatgt

SEQ ID NO: 9465 - DNA, 2578 bp, Homo sapiens
tggaaatactgtggtaaaagggatggggattgtttttaaaaatgggcaaacccaaatgcaagaaagagaaataaggtgctacttcaaatccatccacttactctattttttaaattytctcattcttccctatgttttttccatcttactgtcatatggcttctcatcgtattttgattttacggacagcaaaataaaactattactaatagaacaatttgtttttctttttattcatgatgtgtatatgattcaaatggccagagaaataaaaatagaaaatagaaaacaaaaagaggacatataaaacacatatatttgaaaataaccaaacataaattccaaaaacaaattaaggaatttagcaaagctctcaaaatatgtgatgaaccatagattagattgaactagagaattagtgaattagaagatatgtaaagagaaattaaaatacgtggtagtatgaaaggagaatattcaatgcacatacagtggaatcagagaaaaagtgactagagagaatctgggaaacaatatttgaaatgataatggtagacaatgttccagaatcatagaaacacaagagtcctcacttgaagatgcataccaagttccaatgtataaatactcagaacacatagttatggaaatacagaacatgaaagacaaaatcttaagagcagcaaaaagaaaagatgcattatcctcaaaagataattacacaaagaatattatatatagaatacaatgccttgctgaacttttaattttgtttcgagacggagtctcactctgtcgcccaggccgggatgcagtagtgaaatctcagctcactgcaacctctgtctctcaggttcaagcaattctcatgcctcagcctcccgagtcgctgggattacaggtgtgcgccaccacccacggctaatttttgtgttttcagtagagacgggattttaccatgttggccagtatggtcttgaactcctggcctcaagtgaagtgatccgcccgcctcagcctcctaaagtgttgggattacaggcaagagccactgcgcccggcccctgctgaactgttattcaagggtaagaatgaaatatagatttacaaaggtacttgttaacatgtgtacatggggaaggaggaaatttgaaccagaaagaagaatcagaactcataagaagaaaatagtattataaatattttactaccataaaaaatgactaatgggaggggtaacaatgtataggagcaaaatatcaggcaacaataacatgaaatatggtaggagggaaatcagaatttaaacattctactgctcttgcgatgtttagactagaatgtcattaattatgaatgatataaatttaaggataagggctcagaaaatgtatatagaatatataattccccaaccagtagaaagacgaaaaagagaataaagagaacatgattattcaaacaggagaacgcattagaagaaaagaatggcgttataaataaattaaatggcaaaatgaataaaattaggtcagtaattagggatattttaaagaaaaacagacatatgaactgaagtttataagaattttgcaagtacatactgatatttgatagcagaaattattttgccctcaccatattaattaaggtgattcatcattgtgaataaatgttctaataaattacttattacaacatataaaaagcattgctcttcttacacggatattgcaggtcttcataaggcataataactattttaagaaaattggaatctattcagaacattcactttaaaaatgtttgctaacagaacaaaaattcatattatatcagattatatcccttctattccaactctggcttgaaataatcttttttacagaaagtggttataaaataggatatcaaaattaaaagattggagatgtaccactcattaaaatattccatttccttaaacaacctattgtgtatctattgtccatgaactccaccttgaaactatttatattttcaacccattctaccgcttatggtaaagagttttttaagtttactacccactggttaaaacagaatttactttcattttgtcctcagagtaattctttaaagcctcagggagtgctttaaagcactagttctagtattttgactttggtaaataagaatgtgtttgctgagaatgatggtttccagcttcatccatgtccctacaaaggacatgaactcatccttttttatggctgcatagtattccatggtgtatatgtgccacattttcttaatccagtctatcactgatgaacatttgggttggttccacatgtaccctagaacttaaagtataataatttaaaaaaagaatgggttgaccctattcatacaatttttgattttataagctttgataatatcttctcttaggcttcatttttaaaaagttatttttcttaaaaaaaagtttgtcctagtatgaaagttttcttccccaacatgttcagtcctccttataatttactggattattcccaactatgttttttctttcaactacacatgtagaaatgca

SEQ ID NO: 9466 - DNA, 662 bp, Homo sapiens
tctccccctccctcatgttctatagcctatcaatcaccgaatcctaccttcctcatttactttgaaactgtagttccaacactttggccatcaccttacaacaggtaagcatcatgactcagctgatttctgctgctggttttcttacctctggccccacactgctgaacccctgccttttccacgttgcagccagactgatctcttagtgccacccattgcctaaagaaagaagtcaaacctctggagatccccttgtgacctggcccttgctgcccttgccagcttcttctaacttactgccttccagctatatgaagtgtgccatcatacttttaccagctaatctcagtttactcttgatatcctttgggaagacttctcaaagcaggtattcctcttttctgttcctgcagtttttgtagtccttacgccactgaaactcgtctcacattctattttgattgcctgtttacatatgttactctcccaatagcctggaaactccttgagggcaaggagtatagtgaaattaatttatcattstatcccttgtacctagcacagaacgtagcacttaagtaggggcctaataaatatagtcatgaatcacttaacaacagggatgcgttctgagaagtgcatcattagacaatttatca

SEQ ID NO: 9467 - DNA, 563 bp, Homo sapiens
ctcagcctcccgagtagctgggactacaggcacatgccaccatgcccggctaattttttgtatttttagtagtgacagggtttcaccgtgttagccaggatggtctcgatctcctgacttcattatccacccgcctcggcctcccaaagtgctgggattacaggcgtgagccactgcgcccggcctgattttgtatttttagtagagacagcgtttctccatgttggtcaggctggtctcaaactcccaacctcaggtgatccgcccgcctaggcctcccaaagtgctgggattacaggcatgagccaccrctcctggctgcataaagtatttctaagcaaaaagattttactgagagtttgcagaggatatggagaacaatttacattgcagcgatgtagatgacttcaacatgtactataggcatcaccattcttaaccatctgttagctaccacaaccatgtgaagtttcactagcctgtcatcaaaacccagtttctgtcttgctaattctttcacatttctattttaagatcaaaacaataatttttctctcatctca

SEQ ID NO: 9468 - DNA, 554 bp, Homo sapiens
atataattttggttgtttgttattatgaaagttgtcacacttctacatttctgcttacccattctatattttcctctggagtaaataacaaagaatcagaggtgccttgctgatggcagtggtcatggtgatggtgatgatgataatgatgctgatgatgataatgatgctgatgatgataatgatggtgatgatgatggtttatttagaagttccaagtttgctagagctacccattaagtttctttcaaataaaaaggtccactctattaagtttcagctgtccctctggaagccttattcactaaacaaacacaaacctaaccactccttttggtgatttgataaaataggcaaactctctaggtcacaatgtgcccgtattgttatsgaaaagacaagtgttcagctttctagatatagagcctgaaactaggaaaataatttttttttatcgtctactgcccatcacctgcctcttagccaattgctctctctgcttaaacagactcatggttgaaggaaagtcacttaacagaattattaaatacttt

SEQ ID NO: 9469 - DNA, 1320 bp, Homo sapiens
ttatttttattttcatttttttgagacaaggtctcactctgtcacccaggctgcagtacaggggtgcatctcggctcactgcaacctccacctcccaggttcaagtgattctcctgcctcagcctcccgagtagctgggactacaggtgcccgccactatgcccggctaatttttgtatttttagtagagacagggtttcaccatgatagccaggctggctttgaactcctgacctcaggtgatccacccacctcggccccccaaagtgctaggatttacaggtgtgagccactgcgcccggccagagttgctaacgtttaaaaacctaaggctttcttttacagttctagattcccatcttccctttaaaattgttagaaagtctgatcctacatggcaacagttagctagtattaaacagtgaccgctctccttgccagagcatgtgcccagttcactgcaagccccaccattccctattgtgtctgacactgaggctgactacccatgaggattgttgctgtactgtggaacgtggactatttcttgtatccagccctcttcactcatttatgttacatgcctggcccctataggcacttgagaacttgagttcatgatttttgggtcaggatcatattacagtagaacttaaaatgtcaacataaataactttttcttctttgagtgtgtcattaatggccaatgaattcactcactatcccaaaccaaacaacattcttttcttttttttaaagattaaggcacaacgcttttaggtttttttgttgtttgttttttaatttatttatgtttgrgacagagtctcactctgtcacccaggctggagtgcagtggtgcaatctcagttcactgcaacttccacctcctgggttcaaggaattcttgtggctcagcctcccaagtagctgggattacagacatgcaccaccgcacctggctaatttttgtatttttagtagagacagggtttcaccatgttgccaggctggtcttgaactcctggcctcatgtgatccgcctgccttgacctcccaaagtgctgggattacaggtgtgagccacctcactcggccccaaacagcattcttgaaactaatggacttctcttaaactctctctcttttggaagttttatatgaagacaaatcaactgtggcctaatccgactttgtaaataagcaccaaacactttccctcttttctggcagacgactgagatgaaaataaccagctagttttgttggatagagcaggggttgacaaatttttttctgtaaaggaccaaatagtacata

SEQ ID NO: 9470 - DNA, 1320 bp, Homo sapiens
ttatttttattttcatttttttgagacaaggtctcactctgtcacccaggctgcagtacaggggtgcatctcggctcactgcaacctccacctcccaggttcaagtgattctcctgcctcagcctcccgagtagctgggactacaggtgcccgccactatgcccggctaatttttgtatttttagtagagacagggtttcaccatgatagccaggctggctttgaactcctgacctcaggtgatccacccacctcggccccccaaagtgctaggatttacaggtgtgagccactgcgcccggccagagttgctaacgtttaaaaacctaaggctttcttttacagttctagattcccatcttccctttaaaattgttagaaagtctgatcctacatggcaacagttagctagtattaaacagtgaccgctctccttgccagagcatgtgcccagttcactgcaagccccaccattccctattgtgtctgacactgaggctgactacccatgaggattgttgctgtactgtggaacgtggactatttcttgtatccagccctcttcactcatttatgttacatgcctggcccctataggcacttgagaacttgagttcatgatttttgggtcaggatcatattacagtagaacttaaaatgtcaacataaataactttttcttctttgagtgtgtcattaatggccaatgaattcactcactatcccaaaccaaacaacattcttttcttttttttaaagattaaggcacaacgcttttaggtttttttgttgtttgttttttaatttatttatgtttgggacagagtctcrctctgtcacccaggctggagtgcagtggtgcaatctcagttcactgcaacttccacctcctgggttcaaggaattcttgtggctcagcctcccaagtagctgggattacagacatgcaccaccgcacctggctaatttttgtatttttagtagagacagggtttcaccatgttgccaggctggtcttgaactcctggcctcatgtgatccgcctgccttgacctcccaaagtgctgggattacaggtgtgagccacctcactcggccccaaacagcattcttgaaactaatggacttctcttaaactctctctcttttggaagttttatatgaagacaaatcaactgtggcctaatccgactttgtaaataagcaccaaacactttccctcttttctggcagacgactgagatgaaaataaccagctagttttgttggatagagcaggggttgacaaatttttttctgtaaaggaccaaatagtacata

SEQ ID NO: 9471 - DNA, 1320 bp, Homo sapiens
ttatttttattttcatttttttgagacaaggtctcactctgtcacccaggctgcagtacaggggtgcatctcggctcactgcaacctccacctcccaggttcaagtgattctcctgcctcagcctcccgagtagctgggactacaggtgcccgccactatgcccggctaatttttgtatttttagtagagacagggtttcaccatgatagccaggctggctttgaactcctgacctcaggtgatccacccacctcggccccccaaagtgctaggatttacaggtgtgagccactgcgcccggccagagttgctaacgtttaaaaacctaaggctttcttttacagttctagattcccatcttccctttaaaattgttagaaagtctgatcctacatggcaacagttagctagtattaaacagtgaccgctctccttgccagagcatgtgcccagttcactgcaagccccaccattccctattgtgtctgacactgaggctgactacccatgaggattgttgctgtactgtggaacgtggactatttcttgtatccagccctcttcactcatttatgttacatgcctggcccctataggcacttgagaacttgagttcatgatttttgggtcaggatcatattacagtagaacttaaaatgtcaacataaataactttttcttctttgagtgtgtcattaatggccaatgaattcactcactatcccaaaccaaacaacattcttttcttttttttaaagattaaggcacaacgcttttaggtttttttgttgtttgttttttaatttatttatgtttgggacagagtctcactctgtcacccaggctggagtgcagtggtgcaatctcagttcactgcaacttccacmtcctgggttcaaggaattcttgtggctcagcctcccaagtagctgggattacagacatgcaccaccgcacctggctaatttttgtatttttagtagagacagggtttcaccatgttgccaggctggtcttgaactcctggcctcatgtgatccgcctgccttgacctcccaaagtgctgggattacaggtgtgagccacctcactcggccccaaacagcattcttgaaactaatggacttctcttaaactctctctcttttggaagttttatatgaagacaaatcaactgtggcctaatccgactttgtaaataagcaccaaacactttccctcttttctggcagacgactgagatgaaaataaccagctagttttgttggatagagcaggggttgacaaatttttttctgtaaaggaccaaatagtacata

SEQ ID NO: 9472 - DNA, 1320 bp, Homo sapiens
ttatttttattttcatttttttgagacaaggtctcactctgtcacccaggctgcagtacaggggtgcatctcggctcactgcaacctccacctcccaggttcaagtgattctcctgcctcagcctcccgagtagctgggactacaggtgcccgccactatgcccggctaatttttgtatttttagtagagacagggtttcaccatgatagccaggctggctttgaactcctgacctcaggtgatccacccacctcggccccccaaagtgctaggatttacaggtgtgagccactgcgcccggccagagttgctaacgtttaaaaacctaaggctttcttttacagttctagattcccatcttccctttaaaattgttagaaagtctgatcctacatggcaacagttagctagtattaaacagtgaccgctctccttgccagagcatgtgcccagttcactgcaagccccaccattccctattgtgtctgacactgaggctgactacccatgaggattgttgctgtactgtggaacgtggactatttcttgtatccagccctcttcactcatttatgttacatgcctggcccctataggcacttgagaacttgagttcatgatttttgggtcaggatcatattacagtagaacttaaaatgtcaacataaataactttttcttctttgagtgtgtcattaatggccaatgaattcactcactatcccaaaccaaacaacattcttttcttttttttaaagattaaggcacaacgcttttaggtttttttgttgtttgttttttaatttatttatgtttgggacagagtctcactctgtcacccaggctggagtgcagtggtgcaatctcagttcactgcaacttccacctcctgggttcaaggaattcttgtggctcagcctcccaagtagctgggattacagacatgcrccaccgcacctggctaatttttgtatttttagtagagacagggtttcaccatgttgccaggctggtcttgaactcctggcctcatgtgatccgcctgccttgacctcccaaagtgctgggattacaggtgtgagccacctcactcggccccaaacagcattcttgaaactaatggacttctcttaaactctctctcttttggaagttttatatgaagacaaatcaactgtggcctaatccgactttgtaaataagcaccaaacactttccctcttttctggcagacgactgagatgaaaataaccagctagttttgttggatagagcaggggttgacaaatttttttctgtaaaggaccaaatagtacata

SEQ ID NO: 9473 - DNA, 639 bp, Homo sapiens
attatgtgagcggggtcgggatcaggactgaaaaggtgagacttgggactgggactttgaaaagctgcttaaggaactgggcactgctctgaggccgtgggagaatccaattaagactatcaggggctggctggcgtggtggctcacgcctgtcatcccagcgctttgaaaggaggctgaggagggagtatctcttgagccccagagatcaagaccatcctgggtaacatagtgagacccccatgtctaaaaaaaattagccaggcgtggtagcgcacgcctgtagtcccagctacatgggaggtatcgcttgagcccaggaggttgaggctgcagtaagccacgattgcaggactgcgctccagcctgggcgacagagtgagaccctgtctcttaaagaartaaaaataaaaaagtcagaagaatggacactgggagtggacgaaaggtagggtccattgcttggtgttggaagtgtcggaagcaaagcataaagaacctgggggcttgtctcaggagggcgatgacagccaatgaaaagcagtcatgggcgtggcgctgtcaaacttcgaggggcgggaccgaggacacagagccggggcggagcccaaggtgaaaccaatgagaagcctccgggtg

SEQ ID NO: 9474 - DNA, 670 bp, Homo sapiens
ggtagtaaggcaatatttgctctttttgttcttagcaaggacctcctgtagctgagatgatgttggccttgggaccaaaggaagtacgggaacggatccagaaggtggtttccagctagggagaggatgtktcgggcagtggagatcgccctaagaacctgtgagcttagaaacagctttcagagaccagaaggaggcctggggcccgtcgggaagtttgctgaaggaactaagagtggaaacaatctctgactgcacacaagtgcatttgtgatccaccacaggcacgtttttgtcaattggctggggaagcccaacccatctaacctcctggactctggaaaggcattctccgggtctggtttctcacacattacacagcagaggtttggagttagttcacagaaaagttaacatcccggaacagtgcagaaggcttgggtttcagtttgctagggcccccataacaaaatgccacagaaccaggtggtttaaacaacagagatttattttctcacatttggaggctagaagttcaagatcaaggtgtcagcaggcctggtttttcctagaggcctcttttgttggcttgcagacagctgtcttctcactgtgtccttgtgcggtcttccctccatgcacacacatctctaagtttcattatgtgccc

SEQ ID NO: 9475 - DNA, 547 bp, Homo sapiens
gctgggcacggtggttcacgcctgtaatcccagcactttgggaggccaagcgggcagatcacaaggtcagsagatcaagaccattctggctaatacggtgaaaccccgtctctactaaaaaagaaataaagccttctctctctcaacaaatctaaacactcctaagaagagatactttctgggctaacaagactttacctgtttgacaagaaaagtttaggccatcagaatattctaattttcttaaaaagaaaaatcctctttcagcggtaggtaggtaagataaactcctagagttctgtaatttggtcacttttttttttggtttaggatttaatgtttgaaaaacacttctgctagagaggttctgcttttgacttcttaaaagaactaaaaccggccttaaagtttatgctgtaaacagaaaagctaaaatgggtattagacagtataactgagtttactcatagctaggcttcaaagtgcctgatttcaaggtgacttggaaatttactttgtgtctgcccctcatttaaaaaataaagaa

SEQ ID NO: 9476 - DNA, 539 bp, Homo sapiens
ttttatgaagcacctgtccaaaccttttacacatttttctgttgtattgtctttttcttatgaattggtaaaagatacacgcgtgcacacacacacacacacacacacacacacacacacacacacatatcttctggatattattccttgtcagatatagatattactaatatcttctctcaaacattgttttccctttttactttcttaatagtgccttttagataacagaagttcctaattttaatgcaatccaacttatcaacagcatagtggttaaataaataggctctgaagttggacagayacatgttaaaaggctagttctgactcctactaaatatctgtgtgacttgagtaattattttctctctctaaaatccagtttcctcatctataaatgaataataatctcatatccttcatggtgctgctgtaaagattaaagaggaccattggtgagaagctactatgtgctaaaactactattctactccacatcattatcaatgtaatacccattattttattcccatgtt

SEQ ID NO: 9477 - DNA, 638 bp, Homo sapiens
gttcacattttattggaaaagcaggaaggatgctggattttggtgagcagtagtagagtctcccagaataggtttgatttaattagcttttacaagcctcctccttgtcttgttaacaggttaacaagtttaagctattcagcagatcatcaaggcttggaatatatttaattcaaatgttgattttcctatgtggtctcatgaacattcagaataaacaagtgctgcagctgaagcttcctatatctgagtattaaaagtagagtcgcaaggagagtgctctgtaaagatttccaccccataatcagccatgcaaaactaaycttgagatttagtcattttctagatagcctgggagacagaagaaacaaacaggcagttgttatccaaagatttcctcttgaatgtgtaataagagccattggctataggcaaagtttgatgaaatcacagtgtggtgagggtggggggacttgtttactagtagttgccttcttcagcatgtggtccagcaaattcttttgttgtggactgcattttctctgtgagctgaaaaagacaactagagtaaatgtaaaagaaacattaaccattgacacacacacacacttcaaagagggactatgaaaagaaaaatg

SEQ ID NO: 9478 - DNA, 542 bp, Homo sapiens
tggctaaaaatagtggatttggaaatatcagcatagggggtatattttccaacttggaaattctggatctattcacataatattagaaaaaaaatgtgtgcagtattttggttggtttgcttttgtttttggctgcccaggcaaataaaaaattgagttgtaatgacttgcagataaaagtcactgttgcttaggaattgttgagactttagggggaaggagggcctcagtaatttttgttttaattttgtctaaagacacagggagcaaattacatctctgtaatggttcatttcctagaagtagttatttccccaaggcttactttccccttgtccttttgaactttaagcctttaaagcctttagcccagcacttagaaacttgtcattgcawttctttggctatcatttcttgcctgtaaacccagctttcctctcattaggaattcagtgttcttgctaggatgtttatccatagagagaagtattgagtgaagctgtcagctcattagcagtggggcatgtgatttagacttgata

SEQ ID NO: 9479 - DNA, 493 bp, Homo sapiens
tgctcaagttggaaaaccactggtctggttaccctcaagcttggctacacattggactcacctggggaggcttgcaagtcgttgatgcctgggttccatctccaaggatgctggatttaattgttctagaatgtggcctgagcagggttttgaatgtgtgctgccaagtttgagtaccactgacctagatctttacagactgtcactctctgtatgccccatatctgttgagagtttacgtaccctatgtcccattcccgtaaagaaatgtaaaaaacagtcagctctrttaatgatcttattatgctaagatggtgtgcaaagtacatggctgggctttaaagccaaatggtcttgattacctttcagggctctggcactcacctgctgtatgattagtcagcaggttacttcacctctttatggctcagttttctcatctgcaaaataatcaaaatgcctattgcatacttgttgcatgccagtcactctt

SEQ ID NO: 9480 - DNA, 493 bp, Homo sapiens
tgctcaagttggaaaaccactggtctggttaccctcaagcttggctacacattggactcacctggggaggcttgcaagtcgttgatgcctgggttccatctccaaggatgctggatttaattgttctagaatgtggcctgagcagggttttgaatgtgtgctgccaagtttgagtaccactgacctagatctttacagactgtcactctctgtatgccccatatctgttgagagtttacgtaccctatgtcccattcccgtaaagaaatgtaaaaaacagtcagctctattaatgatcttattatgctaagatggtgtgcaaagtacatggctgggctttaaagccaaatggtcttgattacctttcagggctctggcactcacctgctgtatgattagtcagcaggttacttcacctctttatggctcakttttctcatctgcaaaataatcaaaatgcctattgcatacttgttgcatgccagtcactctt

SEQ ID NO: 9481 - DNA, 521 bp, Homo sapiens
aaggtttaagaattaaagaaagataaaagactagacagacagcaaaggaaaaagagaataattagtatctttttagacagttttgttgacatgaaatgccatagaaccttttggatgcagatataaaaaaagaaacctgggtgatagaggcaagaaatggcagcaaaaccaagatgccaccaagaacttgggtcagagcagctatctgtaagtttgctatgaggcgcttgtatgaaacaaaagtatgactaaagaatgaatgtataggccgggcatggtggctcatgcctgtaatcccagcactttgggaggccgaggcgggtggatcacctgaggtcgggagtttgagaccagcctgatcaacatggagaaaccccatctctattaaaaaaaaacaaattagccaggcatggtggcacatgcctgtaatgccagctacttgggaggctgaggcaggagaatcrcttgaacctggtaggtggaggttgccgtgagccaagatcgtgccactgtactccagc

SEQ ID NO: 9482 - DNA, 530 bp, Homo sapiens
agtggtatctttttgtctcttcactatctcttgcaagcctagggaatctagaatgcactttccttttggacactagttaagccagacagggaagactactgagtaaggtgatgtctctcctctctgcacccgaacccttcgtgcagggtttaaaactgtgtctttgttcttgttcacaccagtgtttccccttcatctgggcaatcaaaccctatgcttagcatcagagcagctggtggtgcaaccccggatttatagaatctgttctttcttttcctttgcattcyttgttttgttttgttttgtttgtgctttgtatttacctggtttttaaatttttgtgaattttacaccaacataaaacaaatggaactgtcacttttgcttcctaaactacatagctggtttcatataagggcatgttttacttttttaatttttacgttcatcaaatattaaaacatgttttaaaaaattatttattattttcttttgaatattgccctgggactcaccagcggctcataatt

SEQ ID NO: 9483 - DNA, 772 bp, Homo sapiens
caaacagactttgtgtgagcaacaaggctgtttatttcacccggctgcaggcgggctgagtccgaaaagagagtcagtgaagggagatggggtggggctgttttataagatttggttaggtagtggaaaattacagtcaaagctggtagttttctggtgggcaggggcgggggtcacawggtgctcagtgggggagcttctgaaccaggagaaggaatttcacaaggtaatgtcatcagttaaggcaggaacaggccattttcacttcttttgtgattcttcagttacttcaggccatctggacatgcaggtcacaggggctatgatggcttagcttgggctcagaggcctgacattcctgtcttcttatattaataagaaaaataaagcgaaatagtggtaaactgttggggtggtgaaaattttggggggtggtgtggaaaggtaatgggcgatgtttctcagggctgcttcaagcaggattaggggtgacatgggaacctagatgactaagccctttaactaggcaggaaatcatgtaatctcacctagctatagctggggaatctgcctgatagttccattggggatcctttcagggaactgctctaatgccttcctggaggtctggctcatggagccagcagttgtcagcatgagattgggccagagaaaaaactctttcccgtgcatctggggagagggtagaagttaagatgacatttaagtcactccaggttaaattgtaggacacagttagatatctgaattc

SEQ ID NO: 9484 - DNA, 772 bp, Homo sapiens
caaacagactttgtgtgagcaacaaggctgtttatttcacccggctgcaggcgggctgagtccgaaaagagagtcagtgaagggagatggggtggggctgttttataagatttggttaggtagtggaaaattacagtcaaagctggtagttttctggtgggcaggggcgggggtcacaaggtgctcagtgggggagcttctgaaccaggagaaggaatttcacaaggtaatgtcatcagttaaggcaggaacaggccattttcacttcttttgtgattcttcagttacttcaggccatctggacatgcaggtcacaggggctatgatggcttagcttgggctcagaggcctgacattcctgtcttcttatattaataagaaaaataaagcraaatagtggtaaactgttggggtggtgaaaattttggggggtggtgtggaaaggtaatgggcgatgtttctcagggctgcttcaagcaggattaggggtgacatgggaacctagatgactaagccctttaactaggcaggaaatcatgtaatctcacctagctatagctggggaatctgcctgatagttccattggggatcctttcagggaactgctctaatgccttcctggaggtctggctcatggagccagcagttgtcagcatgagattgggccagagaaaaaactctttcccgtgcatctggggagagggtagaagttaagatgacatttaagtcactccaggttaaattgtaggacacagttagatatctgaattc

SEQ ID NO: 9485 - DNA, 772 bp, Homo sapiens
caaacagactttgtgtgagcaacaaggctgtttatttcacccggctgcaggcgggctgagtccgaaaagagagtcagtgaagggagatggggtggggctgttttataagatttggttaggtagtggaaaattacagtcaaagctggtagttttctggtgggcaggggcgggggtcacaaggtgctcagtgggggagcttctgaaccaggagaaggaatttcacaaggtaatgtcatcagttaaggcaggaacaggccattttcacttcttttgtgattcttcagttacttcaggccatctggacatgcaggtcacaggggctatgatggcttagcttgggctcagaggcctgacattcctgtcttcttatattaataagaaaaataaagcgaaatagtggtaaactgttggggtggtgaaaattttggggggtggtrtggaaaggtaatgggcgatgtttctcagggctgcttcaagcaggattaggggtgacatgggaacctagatgactaagccctttaactaggcaggaaatcatgtaatctcacctagctatagctggggaatctgcctgatagttccattggggatcctttcagggaactgctctaatgccttcctggaggtctggctcatggagccagcagttgtcagcatgagattgggccagagaaaaaactctttcccgtgcatctggggagagggtagaagttaagatgacatttaagtcactccaggttaaattgtaggacacagttagatatctgaattc

SEQ ID NO: 9486 - DNA, 522 bp, Homo sapiens
ttcttaaaggggcctcttccttttcctttggaatcatgtaaaagttactttacattacaaaagcattagacagcaagttataaagcactaggcttgaacttttaagactgtactaaagggtgagtgggttattagaataacaacaacaacaaaaaaaataccatgaggacctatcctttcttcatgttactaaggagtcctcttagtaaccaagacattctttcaaagaaaaaaacaaatggttgtaggtgacaaaaggtgacttttccatggccctgtgaaacaaaccatccctttacaccctttgtctctctgcctagacagccccagctaagtaaaagattgtggtagtcaggtctctgggcaggtggtatcyagcaccacattgaaaatatatcctaggtgcagtaatgggatgagaatggagacagctgctgaatgatgaaggtgggagtgcacaagggtgaagtgatgaaacaggtacagaaacacttgctttcacaggtcagatgggccggggca

SEQ ID NO: 9487 - DNA, 522 bp, Homo sapiens
ttcttaaaggggcctcttccttttcctttggaatcatgtaaaagttactttacattacaaaagcattagacagcaagttataaagcactaggcttgaacttttaagactgtactaaagggtgagtgggttattagaataacaacaacaacaaaaaaaataccatgaggacctatcctttcttcatgttactaaggagtcctcttagtaaccaagacattctttcaaagaaaaaaacaaatggttgtaggtgacaaaaggtgacttttccatggccctgtgaaacaaaccatccctttacaccctttgtctctctgcctagacagccccagctaagtaaaagattgtggtagtcaggtctctgggcaggtggtatccagcaccacattgaaaatatatcctaggtgcagtaatgggatgagaatrgagacagctgctgaatgatgaaggtgggagtgcacaagggtgaagtgatgaaacaggtacagaaacacttgctttcacaggtcagatgggccggggca

SEQ ID NO: 9488 - DNA, 491 bp, Homo sapiens
atttaaaaaaataaataaaaatccttaaggagattctaacacttctctggtcaaaatatactttacaaagttaatgtcaattaatttatatctctgtgtccacagccgttttgtagatttggattacagaccacaatctgggttgggggagggacaaaaattgatggaggaagaaatgaggtttactgaaataaactttacaattgaaccagagactagagaaagtcttctttgcatgggatcaggaaacacaacaataaagcccccatgamtcacccagggtcactcagcagtgcagtcagctaggaatggaactccgagtcctaactttctgtccctgtcctaaccaccagcccacactccctcctctgttaccatcactcttcacaggcggaactctctttgaggttagcaggaacgtcatacagaatcaaacactgggcagctgaggccgtgtgcagcaatgacatctgtaccctttatagaatctt

SEQ ID NO: 9489 - DNA, 616 bp, Homo sapiens
ggtgcaaatatttttagaaaacattagtctaattgaggtacatagcatctttttgatagcaacatgttagcaaatacttttcagggattttacgtggaatggtgaatgtgctgaaaagaaagacttacaccagcttcagcctgccagcttgtgatatgctgcctagaaatgcctacttataaatatgttttatatagcctcaggagttcccttacctttattgctccacctctagcagtcctttaataaaacaaggtcaaagacaaggacaataaattcccagggcctttcctagcacagttctgcaggaaatgatcatcaaagatgtcctgatcagaaaaagagagttgctgaatgtaagtttttctgtgaaatgcagatgatttcttgctcctttgtctaatcagtggtgaccttttttctttttgcaaaaaaagaaagcaagtgcagggtgagacatgtggggttagagcaaaggagaaaaccctcccctgagaaggtgagagtcaaaggtgatgaagagtcaggagggttctcccgcataaatacaygctgaaagatgtaccttccttactgtccccaagagtatgaggggcatttgtcctgtgaggctttc

SEQ ID NO: 9490 - DNA, 1011 bp, Homo sapiens
acatataygacacatatatatgacacatatatgacacatatatatgacacatatatgacacatatatatgacatatatatgacacatatatatgacatatatatgacacatatatatgacatatatatgacacatatatatgacaatatatatgacacatatatatgacaatatatatgacacatatatatgacaatatatatgacacatatatatgacaatatatatatatatatatatatgtctcagcctgggcgacagaatgagactccatctctctctctctctctctctctatatatatatatatgtacatatacatatatatgtacatatatatatatatattcctctctctctagccatacgtatatagtgtcagtcttaactaatgtgctatgataaatattcattcatacattaaaattttaagaaaacaatttagtcagactttacactttatctttcaagttaataaaagcaggcgaaatttctatatatggatgtttgtgactagtcagtgcacttcttccagaacattacgtgtctgctctcctgtgacacggaggcttataaagagtcttcttttcctaggagctacaacttaacttgtctcttcttgctagttcaacagtttggattcagaagtagccatcaggaaacagatgcactggttatgcaggcagtctcagcaaaatatttgcgctggcaatgacaaatactactcaaattgatgttgttattatttaaccacagataaaactgcagaaagaaaagagtggaaaaccatcagttatcaataaaatttctaaaaaccgatgcttgggtgtgtcgtgagtgagggagagaacacacatgcctctgaagcatttatcaagaagataaaagtgagtggtcatgacagaacgagaaaagtgagatgttaatatcctcaaaattggcttcctagcctccagtacatgttcatgttattttcactgtgaactatgactgaaaacttagtaaaactcc

SEQ ID NO: 9491 - DNA, 1011 bp, Homo sapiens
acatatacgacacayatatatgacacatatatgacacatatatatgacacatatatgacacatatatatgacatatatatgacacatatatatgacatatatatgacacatatatatgacatatatatgacacatatatatgacaatatatatgacacatatatatgacaatatatatgacacatatatatgacaatatatatgacacatatatatgacaatatatatatatatatatatatgtctcagcctgggcgacagaatgagactccatctctctctctctctctctctctatatatatatatatgtacatatacatatatatgtacatatatatatatatattcctctctctctagccatacgtatatagtgtcagtcttaactaatgtgctatgataaatattcattcatacattaaaattttaagaaaacaatttagtcagactttacactttatctttcaagttaataaaagcaggcgaaatttctatatatggatgtttgtgactagtcagtgcacttcttccagaacattacgtgtctgctctcctgtgacacggaggcttataaagagtcttcttttcctaggagctacaacttaacttgtctcttcttgctagttcaacagtttggattcagaagtagccatcaggaaacagatgcactggttatgcaggcagtctcagcaaaatatttgcgctggcaatgacaaatactactcaaattgatgttgttattatttaaccacagataaaactgcagaaagaaaagagtggaaaaccatcagttatcaataaaatttctaaaaaccgatgcttgggtgtgtcgtgagtgagggagagaacacacatgcctctgaagcatttatcaagaagataaaagtgagtggtcatgacagaacgagaaaagtgagatgttaatatcctcaaaattggcttcctagcctccagtacatgttcatgttattttcactgtgaactatgactgaaaacttagtaaaactcc

SEQ ID NO: 9492 - DNA, 1011 bp, Homo sapiens
acatatacgacacatatatatgacayatatatgacacatatatatgacacatatatgacacatatatatgacatatatatgacacatatatatgacatatatatgacacatatatatgacatatatatgacacatatatatgacaatatatatgacacatatatatgacaatatatatgacacatatatatgacaatatatatgacacatatatatgacaatatatatatatatatatatatgtctcagcctgggcgacagaatgagactccatctctctctctctctctctctctatatatatatatatgtacatatacatatatatgtacatatatatatatatattcctctctctctagccatacgtatatagtgtcagtcttaactaatgtgctatgataaatattcattcatacattaaaattttaagaaaacaatttagtcagactttacactttatctttcaagttaataaaagcaggcgaaatttctatatatggatgtttgtgactagtcagtgcacttcttccagaacattacgtgtctgctctcctgtgacacggaggcttataaagagtcttcttttcctaggagctacaacttaacttgtctcttcttgctagttcaacagtttggattcagaagtagccatcaggaaacagatgcactggttatgcaggcagtctcagcaaaatatttgcgctggcaatgacaaatactactcaaattgatgttgttattatttaaccacagataaaactgcagaaagaaaagagtggaaaaccatcagttatcaataaaatttctaaaaaccgatgcttgggtgtgtcgtgagtgagggagagaacacacatgcctctgaagcatttatcaagaagataaaagtgagtggtcatgacagaacgagaaaagtgagatgttaatatcctcaaaattggcttcctagcctccagtacatgttcatgttattttcactgtgaactatgactgaaaacttagtaaaactcc

SEQ ID NO: 9493 - DNA, 1011 bp, Homo sapiens
acatatacgacacatatatatgacacatatatgacacatatatatgacayatatatgacacatatatatgacatatatatgacacatatatatgacatatatatgacacatatatatgacatatatatgacacatatatatgacaatatatatgacacatatatatgacaatatatatgacacatatatatgacaatatatatgacacatatatatgacaatatatatatatatatatatatgtctcagcctgggcgacagaatgagactccatctctctctctctctctctctctatatatatatatatgtacatatacatatatatgtacatatatatatatatattcctctctctctagccatacgtatatagtgtcagtcttaactaatgtgctatgataaatattcattcatacattaaaattttaagaaaacaatttagtcagactttacactttatctttcaagttaataaaagcaggcgaaatttctatatatggatgtttgtgactagtcagtgcacttcttccagaacattacgtgtctgctctcctgtgacacggaggcttataaagagtcttcttttcctaggagctacaacttaacttgtctcttcttgctagttcaacagtttggattcagaagtagccatcaggaaacagatgcactggttatgcaggcagtctcagcaaaatatttgcgctggcaatgacaaatactactcaaattgatgttgttattatttaaccacagataaaactgcagaaagaaaagagtggaaaaccatcagttatcaataaaatttctaaaaaccgatgcttgggtgtgtcgtgagtgagggagagaacacacatgcctctgaagcatttatcaagaagataaaagtgagtggtcatgacagaacgagaaaagtgagatgttaatatcctcaaaattggcttcctagcctccagtacatgttcatgttattttcactgtgaactatgactgaaaacttagtaaaactcc

SEQ ID NO: 9494 - DNA, 1011 bp, Homo sapiens
acatatacgacacatatatatgacacatatatgacacatatatatgacacatatatgacacatatatatgacatatatatgacacatatatatgacatatatatgacacatatatatgacatatatatgacacatatatatgacaatatatatgacacatatatatgacaatatatatgacacatatatatgacaatatatatgacacatatatatgacaatatatatatatatatatatatgtctcagcctgggcgacagaatgagactccatctctctctctctctctctctctmtatatatatatatgtacatatacatatatatgtacatatatatatatatattcctctctctctagccatacgtatatagtgtcagtcttaactaatgtgctatgataaatattcattcatacattaaaattttaagaaaacaatttagtcagactttacactttatctttcaagttaataaaagcaggcgaaatttctatatatggatgtttgtgactagtcagtgcacttcttccagaacattacgtgtctgctctcctgtgacacggaggcttataaagagtcttcttttcctaggagctacaacttaacttgtctcttcttgctagttcaacagtttggattcagaagtagccatcaggaaacagatgcactggttatgcaggcagtctcagcaaaatatttgcgctggcaatgacaaatactactcaaattgatgttgttattatttaaccacagataaaactgcagaaagaaaagagtggaaaaccatcagttatcaataaaatttctaaaaaccgatgcttgggtgtgtcgtgagtgagggagagaacacacatgcctctgaagcatttatcaagaagataaaagtgagtggtcatgacagaacgagaaaagtgagatgttaatatcctcaaaattggcttcctagcctccagtacatgttcatgttattttcactgtgaactatgactgaaaacttagtaaaactcc

SEQ ID NO: 9495 - DNA, 525 bp, Homo sapiens
ctaagtaaaaaagcaaattaaaacaaaattgaagagaaaaaagaatttttgaaatcaatgaatataataaattaaaaaaccagataaatgtaataaaattcaaagcttgttccttaaaaaacaataaaattgataaacatgtagctatactaattagtataaaaacacaaattactaatatcargaatagagggtcttcaaacctttactggacatgaaggaaatatttttagtaatttataagaaatgaataaatgtcttaatagatacaaattacaaaaactgaaagaaaaaatatattgcttcagaaaatctaaattcctttatctctcttaaagaagttgaacttatttttaaaaagccttcaaaaatgtaagttctagatgcatatgtggtcattgatgaattttacaaaatatttaagggataattaataccaatcttacataacctctttcagaaaatagagacaggggaaatacttcccaattcattattgaggccattaatattatatcaaattga

SEQ ID NO: 9496 - DNA, 898 bp, Homo sapiens
aaagacatggaatcaacccaaacgtccatcaatagactgcataaagaaaacgtgatacatatacaccatggaacactacacagccataaaaagggaatgagatcacatcctttgcagggacatggatgtagctggaagccatcattctcagcaaactaacacaggaacagaaaaccaaacactgcatgttttcactcataagtgagagctgaacaatgaaaacagatggacacagggaggggaacaacacacaccagagcctgttgcggggtgaggggagggaacttagaggatgggtcaatagatgcagcaaaccaccatggcgcatgtatacctatgtaacaaatctgcaccttctgcacatctatcacggaacttaaagtaaaaaataataaaacataaataaatttttaaaaaagaaaaagttgaatatgaaattataaagtttgattgaaactatataaaaatataaatatcaatgatccaaattttggcagtatttatcttttgtataactgttaatagaattacagatattaacatgctatggtttgaatgtttatcctcaccaaaactcatgttgaaagttaattgccattgtaacagtattgagaggtgagacctttaaaacatgattagactataagggctccactctcatagatgggattggtaccattataaaatgaccagtttggccccatcttgccctctctcaccctctcaccttccacgatgtaattatgcagaaagaaggctctcatcagaagttgrcaccttgatattggattttccagcctttagaactgtgagccaataaatttctgtttattataaattactcagtcttggttattctgttatagtggcacaaaatgaactaagacatgaggataca

SEQ ID NO: 9497 - DNA, 502 bp, Homo sapiens
cattcacaatttccttttcttcaaagatattcaattaagatgacattataatatcacattatacagagaatgaagcaagatggctgaatggaagcctccaccaattgtcccttgataaggacaccaatttaacaactatctacacacacacacacacacacacacacacaaatcttcttaagaagaaaaaaatcaggtgagcacttacagtacctgattttaacttcctacactgaaagaggcattgaagaggatagcaaagagtcttgaatcaccratgccatctcttccccatcccccagcagcagccctgtggcacagagagagaatctgagcacttcggagacagtaagcacagcaattgtgagacattgcattgaactcagtgctgacctgtcacaatgacaaacaaaacaaggcttaactcacctgtcaccccataccgcaatgaagggagtatttaaatcagccctaactagaagggaatcacccatgccagatg

SEQ ID NO: 9498 - DNA, 567 bp, Homo sapiens
tttataatttaaaatcttccctgtcctaaaagatggaagaataacacccttagctggcattttttgttttgttttgttttgttttgtttatggcttgtattaattttatttttttaactctaagacaatagygtttagctgatctgaaggaatgcacatttattacaaggggccacagaggaatatcgcagggggacaccagtcacatcaccacagaacccagtgcatttggaaagaaaaatgataagacctgggttgacaaacagtgggaaagtagacaggagctcactacacatggttcatactatctgtagtcagaactgcacaactatatggaaactgaacaacttgctcctgaatgactactgggtaaataataaaattaaggcagaaataattaagttatttgaaaccaatgagaacaaagacacaacgtaccagaatctctgggacacagctacagcagtgtttagagggaaattcacagcattaattgcacacaggagaaagtgggaaagatctaaaattgacaccctaacatcacaattaaaagaactagagaagcaa

SEQ ID NO: 9499 - DNA, 572 bp, Homo sapiens
tgaggtcttgtgggggccatttcacagattggaaactgagctgctttcataggtcaccccgttttctcagtggcagagacagcatttggattcagcttcaatgaactcccaccttgcccacccctttcttgaacttccccgcccccaactctctgtgttgcaggactttccactctgcattcaggcactggggagtctcccatgtgcagggcagggcaggagaatgggtgccagccaacaaggaaggagagtggtggggtagggtggatgaggaagggacttgtatccagcatcrgctgcacagcagagggtctaactccaccccacataccccctcctgtgatgaggcccctcctctatccaccagcaacaccagcaggacccaggtgacatggcccagctttcaggggtggaggcacatccctgaggaaagggaggactcacgcctgcccacctgccccagacccagcacctaccgcagatgctgctgcttttgctcagggcacctgccagggcctctgtacctgccccatagagcccactgtcccaaaagttcagccacttgacatatg

SEQ ID NO: 9500 - DNA, 582 bp, Homo sapiens
tgtttagagtattaagcctagtgcctgcctgcaataggtgctcaacaaatagatgctattactgatcatcactattcttgccttatcttcccaaagcgcctccatactgaggatacaaatgaggtcaggttaacaggaccaatttaaatctcactgattgcttggcctcatttgcacctgcagaccttcacacatcctccacctgtaagctccaggccagtatttctgggactctccagagggtgtctcatgggtatgtaagaatgagtccgctctctgtgccacacaagcctgctcatggctcacttgtcaccagaatgcccgccaccagctgtcacagctccacggggtgcaggagtgaggccctggctccacctggaacagcaactccatgttggtggttatggactgtgtgccacccatctgctcttctgtcctaagaacagactgtggtgtggtctctgagcagacagctttttgtgttactggctgtyggacgggggccgagtagggctccttgagacctcgcatgttagaatttactgacagagtttttctttttggaattctcacctttttcct

SEQ ID NO: 9501 - DNA, 646 bp, Homo sapiens
agacaaaccaggagagaaaaacaaaactcaatttaaaaaaaatgaaaattaggatgatcctcacggtgcttcagctgagcattttatagtgaaaggtaatgagggagcccttttacttaagaaattagtaaaaaggatgagatgctcaygaattcatattaaaggtaatttaggggatccagtggtgaaaataactcacttagcccaaaatgccccagtaagcccacagtgcttcctgagcatcctgaggatttcatcatgtgtattggggcacagtaggggctggcgtggagatgacctggcacagggctgcctgcccttggggctctgaaggctccttccctaattcaggcaccagccagattcctcactgcatcactgggcagctgtgttaccttcaggcagatgctcatccatacgggcttcccttcagactaaaagcccaaacccagcagatcacgaattatagaccttgtcctttgaagttctctaataaagccttttatttctttctcaggaatgaataaaggtttttatattccacatattagtgaaggtacaagattattaattagcatgttactttttaaaatctatatttgctattaatattaccttctttggaaaactacctcatgataaaagt

SEQ ID NO: 9502 - DNA, 492 bp, Homo sapiens
ggctcactgcagcctcaacttcccttaagcgatcctcgccactcagcctcctgagtagttgggatgacaagtgtgtgtcaccatgcccagctaatttgttgatgttttgtagagatatattcttgctatgttaccaaggctgacctcaaattcctggcctcaagtgaccctcctgccttgacctcccaaagtgttaaamttataagcataagccactgcatctggcccattttagtctaaaagagttcccacaaattacattagctgtagttccacaaaatctgtatctgtccctgacaattatatatgttttctatctggtattaataaaatcgtgttttgtaaatttgactgacatgttgattctattaaaatagtgaataaaaagcttatagtaaccccagatggttaagagatgttaaagtatttgcatatcaaatggctattaattcatttgagagatctgatcgttatttttctaagatactgagg

SEQ ID NO: 9503 - DNA, 598 bp, Homo sapiens
tgcctcggcctcccgaagtgctaggataacaggtgtcggtcacagctcctggccactggcttctatttttttattttttgagayggagtctagctcttgttgcccaggctggggttcagtggcgcgatctcggctcactgcaacctctcaagttcaagagattctccagcctcagcctcccgagtagctgggattacaggcacgcgccgccatgcccagctaatttttgtattttcagtagagacaggtttcaccatgttggcaggatggtctcgatctcctgacctcatgatccacccaccttggcctcccaaagtgctgggattacaggcgtgggccatggcacctggcccagcctctatttttaaagtaacttttatgggatgtcagacattgtaaattttaccttggtgggtgctggatgtttttgtgcctggcacagtcctaggtgctgaggacctagcattgaacaaaaacaaagatccctgctcttgctgaacttccatgctactgtggggagacaatcagtgaacaacaagcataatttaggtttgctcttattatactgttgcacacgtaccttttgtatatgtactct

SEQ ID NO: 9504 - DNA, 598 bp, Homo sapiens
tgcctcggcctcccgaagtgctaggataacaggtgtcggtcacagctcctggccactggcttctatttttttattttttgagatggagtctagctcttgttgcccaggctggggttcagtggcgcgatctcggctcactgcaacctctcaagttcaagagattctccagcctcagcctcccgagtagctgggattacaggcacgygccgccatgcccagctaatttttgtattttcagtagagacaggtttcaccatgttggcaggatggtctcgatctcctgacctcatgatccacccaccttggcctcccaaagtgctgggattacaggcgtgggccatggcacctggcccagcctctatttttaaagtaacttttatgggatgtcagacattgtaaattttaccttggtgggtgctggatgtttttgtgcctggcacagtcctaggtgctgaggacctagcattgaacaaaaacaaagatccctgctcttgctgaacttccatgctactgtggggagacaatcagtgaacaacaagcataatttaggtttgctcttattatactgttgcacacgtaccttttgtatatgtactct

SEQ ID NO: 9505 - DNA, 598 bp, Homo sapiens
tgcctcggcctcccgaagtgctaggataacaggtgtcggtcacagctcctggccactggcttctatttttttattttttgagatggagtctagctcttgttgcccaggctggggttcagtggcgcgatctcggctcactgcaacctctcaagttcaagagattctccagcctcagcctcccgagtagctgggattacaggcacgcgycgccatgcccagctaatttttgtattttcagtagagacaggtttcaccatgttggcaggatggtctcgatctcctgacctcatgatccacccaccttggcctcccaaagtgctgggattacaggcgtgggccatggcacctggcccagcctctatttttaaagtaacttttatgggatgtcagacattgtaaattttaccttggtgggtgctggatgtttttgtgcctggcacagtcctaggtgctgaggacctagcattgaacaaaaacaaagatccctgctcttgctgaacttccatgctactgtggggagacaatcagtgaacaacaagcataatttaggtttgctcttattatactgttgcacacgtaccttttgtatatgtactct

SEQ ID NO: 9506 - DNA, 598 bp, Homo sapiens
tgcctcggcctcccgaagtgctaggataacaggtgtcggtcacagctcctggccactggcttctatttttttattttttgagatggagtctagctcttgttgcccaggctggggttcagtggcgcgatctcggctcactgcaacctctcaagttcaagagattctccagcctcagcctcccgagtagctgggattacaggcacgcgccgccatgcccagctaatttttgtattttcagtagagacaggtttcaccatgttggcaggatggtctcgatctcctgacctcatgatccacccaccttggcctccyaaagtgctgggattacaggcgtgggccatggcacctggcccagcctctatttttaaagtaacttttatgggatgtcagacattgtaaattttaccttggtgggtgctggatgtttttgtgcctggcacagtcctaggtgctgaggacctagcattgaacaaaaacaaagatccctgctcttgctgaacttccatgctactgtggggagacaatcagtgaacaacaagcataatttaggtttgctcttattatactgttgcacacgtaccttttgtatatgtactct

SEQ ID NO: 9507 - DNA, 598 bp, Homo sapiens
tgcctcggcctcccgaagtgctaggataacaggtgtcggtcacagctcctggccactggcttctatttttttattttttgagatggagtctagctcttgttgcccaggctggggttcagtggcgcgatctcggctcactgcaacctctcaagttcaagagattctccagcctcagcctcccgagtagctgggattacaggcacgcgccgccatgcccagctaatttttgtattttcagtagagacaggtttcaccatgttggcaggatggtctcgatctcctgacctcatgatccacccaccttggcctcccaaagtgctgggattacaggcgtgggccayggcacctggcccagcctctatttttaaagtaacttttatgggatgtcagacattgtaaattttaccttggtgggtgctggatgtttttgtgcctggcacagtcctaggtgctgaggacctagcattgaacaaaaacaaagatccctgctcttgctgaacttccatgctactgtggggagacaatcagtgaacaacaagcataatttaggtttgctcttattatactgttgcacacgtaccttttgtatatgtactct

SEQ ID NO: 9508 - DNA, 529 bp, Homo sapiens
taatacatgctgctgtgagagcaaaaaaaaaaatcatagtcattttkaataatttttacatgtttattaaaacaatggtaagcaaaataagtggttattatatgctctcatgttagtcttagtattcataagctaaaagcactcatccttctttaaaataaataacccaattgaaaataaaatgttattaatcatataaagaagatctctgaattcttaaacactgtgaattcttaaacactgtgagtatagcatcgcttctatttatacaaataaatgaaaccacaaacttattagagtaccttttaactataaaaataaatagataagcagaaaaatacattctaacctaattttcaatatctgaaataaataattagagaatatataaggaagaaattttggtgaataactgtagcaaattcctaattctatgaatatggaaattgaggcactacatattaaacaataaggcataaacccatctgagtattagtgagaattaaaaacacatctcctaatttccagt

SEQ ID NO: 9509 - DNA, 529 bp, Homo sapiens
taatacatgctgctgtgagagcaaaaaaaaaaatcatagtcattttgaataatttttacatgtttattaaaacaatggtaagcaaaataagtggttattatatgctctcatgttagtcttagtattcataagctaaaagcactcatccttctttaaaataaataacccaattgaaaataaaatgttattaatcatataaagaagatctctgaattcttaaacactgtgaattcttaaacactgtgagtatagcatcgcttctatttatacaaataaatgaaaccacaaacttattagagtaccttttaactataaaaataaatagataagcagaaaaatacattctaacctaattttcaatatctgaaataaataattagagaatatataaggaagaaattttggtgaataactgtagcaaattcctaattctatgaatatggaaattgaggcactacatattaaacaataaggcataaacccatctgagkattagtgagaattaaaaacacatctcctaatttccagt

SEQ ID NO: 9510 - DNA, 2704 bp, Homo sapiens
cttgggaggctgaggcagggggattgcttgaagccaggaggcagaggttgtggtgagcctagatcgtgccactctactcccgtctgggtgacagagcaagactccatctcaaataataataataataataataataataataataataataataataaatagtatctacctacaaagtgcttactttgtgccagatgttgtgcttggcactttacacatttaagtcatttaatttccacaatagtcctatcaaggaggttctcttattatctccattttacacatggaaaaaacctaagttacagaaaagctgaataatttgcttaatgtcattcactaagtggtgtaaccagaatttgaaccagacagtctggcttcaaatcctgtgcttttaaccatgagattctactgtaaaatttatcaaagaaaggtttcctagaagtgtaatgggagcccagatgaaatgcaatataggcagtggcttcacggaaaagatcatcccctttttcatatatacagttgacactcaaacaatgcagaaatctgcatataacttttggctccccaaaaagttaactacttatagcctgctgttgaccagaagccttactggtaacatatacaatcgattaacacatattttatatgatatatatgtgtatatatatatataaacacactctattcttacaataaagtaagctagagaaaaaatggtattaagaaaatcataaggaagagaaaattcattcatagaactgtattgtatttatcgatatcataagtgtatgtcatctgttgtcaaggtgaaacttctatctgaaatggtaggcaaccacggctgcagatctcaatctatggtacatatcaagcaagccaactttttcctgtaatgtcgtgacttttctctgtttcttgggagcacttcaagcattactactggcactttgtatgggtcccatggtgctttcaaggtttacagtattgcactaaatgcaatgaaaaatgcaagaacgttgacacatcactttttattgctatacacaatttactggagagatgaaattgctcatgtggagatgattagcatcacaaggcattttaagcagatactcacaacacttgagctcaccacaatagcagcagcaggtggttacaaaattattacagtagtacatatgtattactgttcatttcatgcagttatgatttaatgctgcacccttaagtttgtttacatttctctcaactgtaaacggcaccatgtatggtctgaaagtgtgtaagttttgatgaactttaacttttataatagattcatgtatattttatggcagtaaataataaaataggctagaatctacattttttacatttgtggtatacctacctttctgattttttgctacttctaagctacataatttatctgtgaattatctcaaattgtcacaaatctccaaaaaaatttccaatacatttattgaaaaaaattcgtggataaatggatccatgcagctcaaatccatgttgtttaaggatctactgtatttgtttgcacccatctctatctctccaacaccaatattcaaatatagctaggccatgtttctatagctaaaattttgcttttgtaggctgaggtaaccttactcctatcttttcaaataccctttctatcactgccaatggcttttctgtcccatttcctttatggataattccaaccaaaactgattttattttttctgaccaccatgataggttattaactgagcatgtattttcacagttgcttataattgaactctgttctctaattttttttcacatgcataagtcctttcacctaaaatagattttatatcacctaggcataaatatatttgcatcctctagagcagacagacatatagtaagtgcttaatamtactcagtttgacacaatttaattgaattaagaagcatttaaatttaggcaggaaaactgaataaacattgaataaacacttttttttctctctctaaaatgctcatctggcttctttttcaaaacagtttttttttttccttacatatagtcagggtcttagactcctgaattgtagtctaattggcctaatttgagactcatgttggcagcaacaatttctgtaactatctggagttgtgaagcagttagccagagaagtatatttgacagctaagttatttctctacagaaaaaaaaaaaagtgttgaaattcagaaagggatcagttaggcttgtaatagttactgtttttctataacaccctttgctccccgtggcatctgcctatgtcattctccttgggtgctgagggtgggtgctgctagaacgtatgacttcatgatgcatcactcaggattccttccctaaattcccctatgaaatgttggttttcacctccatcatcctgatgcatgctctcttttgtccaaaacttctactctgttgtgtattctatgtgtgcctgtgcccagaaacttcaagagccaaggactttcattctccctgaggatgtttctaaggatctctctactctcatgtatgattttttacaatgtttgtaggtagaaaataaattatcggtgaggagagagaaaatgaagaaatgggagtgattgagaggaaagcatgagggagaagaggaagaatcatgaacatgagtggaggggttat

SEQ ID NO: 9511 - DNA, 663 bp, Homo sapiens
tgacaaccaagccaggctcactacaccagctgatggtgctgcttggagccgacttccccactcaaggactgtgaaactttagtttctttaggaaactaagcactcatcttttcataatttaatagggcggattccaagccctagcttcrtactgcctgactttcttttcagaatttcaactgttttttcacccctgggccatgaagttagagagtgcaggtatgatgccctgaaaagcagacttgtgctccaatcccacctccatatgctcatctgcgaaatagagacaccagctggggcagtgcagtgttgcccggccctgcttacaggggccctccctgggcaggctgcccaacttccagaccaaccttccaccacgtggagcagcaagcccgcctgcagccctgccatgctgcgcagctctgagacgtggtccagtgtgctgccacccaggtgcagtgagaagtgatgtggtgacatgggtattcatggtccatgaacagctggtggatctccagcaccatctcctgcgggaacacctgccagggagaaggcccggaccagcccggtcagaggccacatggtagggagcaaggacataccccttccccagcccaaaacacctgggtcctgagaataagtgtctcaaatactcagtttccc

SEQ ID NO: 9512 - DNA, 663 bp, Homo sapiens
tgacaaccaagccaggctcactacaccagctgatggtgctgcttggagccgacttccccactcaaggactgtgaaactttagtttctttaggaaactaagcactcatcttttcataatttaatagggcggattccaagccctagcttcatactgcctgactttcttttcagaatttcaactgttttttcacccctgggccatgaagttagagagtgcaggtatgatgccctgaaaagcagacttgtgctccaatcccacctccatatgctcrtctgcgaaatagagacaccagctggggcagtgcagtgttgcccggccctgcttacaggggccctccctgggcaggctgcccaacttccagaccaaccttccaccacgtggagcagcaagcccgcctgcagccctgccatgctgcgcagctctgagacgtggtccagtgtgctgccacccaggtgcagtgagaagtgatgtggtgacatgggtattcatggtccatgaacagctggtggatctccagcaccatctcctgcgggaacacctgccagggagaaggcccggaccagcccggtcagaggccacatggtagggagcaaggacataccccttccccagcccaaaacacctgggtcctgagaataagtgtctcaaatactcagtttccc

SEQ ID NO: 9513 - DNA, 861 bp, Homo sapiens
atggtaataccttaacccgatatatccaaaatattatcactcaaatatgtgagcaatatgaaattattaatgaagaccaccagagaatgcttcttaagtttggggtactaaatcttgtaaagtcactctgtatttaaacttctagcacatctcagttccaaccagctctatccaaagagctcagcagccccacgtgggcagtggcttccgcattgaagagcagatctgagggcacttgcgcgtctaacctcagggaaatcgagggcctggaccccctttcctgccagacgagagcgaacaccctcatcctgcccatctctttcctcatgcccaagggtgggagaggcagtgcccagtgagagagccagggctgcagtcaggaggtgtccacaggtcgaccactgctgcccacctgcttctgggcagggctccctcagccttccaaaggtcagacagtgaatgaagagtgtcaggcttcaggaggaaacccctgacttcagatctgtctacagccttgacctccaaagtttggatgtggagggaataaaagcaaattttttttattttgcaatttgcccttggccctgatggttaggctatggcgggctgtttcctcctatggtgtgggsactgtgtgagtttaagcaccaagcatgtcaacatgcatttctgtataatttatccctatccaacaagaggccccactttaaataaagggaaaagcaaatcaataccttatacagtgccttctgtttgccaggtaacaacaagtagtgaccaacctgtcatttgaatcctggcaacctgactgcaggtgtatgtatcagttagctattgctgcattaaaaaccaccctaaacc

SEQ ID NO: 9514 - DNA, 552 bp, Homo sapiens
tctagttcccaactttgctggctccctagaatcccctctctaattctgggtagacaggtagttaagatctaatggttggacagttaaaggttgcagtcccaattctgcctactaaaaggcatggggctttcagcaatctacaagttttggtcacctcaactrtaaaaaggagatcataacaataatatctgaatcatggagattttagaatagtgcatataaaacagtgggcacagggtcagacacataaatatttaccgttattattaggtattatctttgtaccttctaccttgaacaaaataactcttctgttttatacaaaacttaataaataaaatttcgttccccaagattttgatttttaatttgttcaaagaaattcatcccaagtggaataaaacacttatataggtcagatttggggtccccaccctcactcatggatttatagatgaatatgcccatgatagtgatactattatcctttatttctctgatgaaccttgtatataaaactattactttcttgaatgcaaaaccttactattt

SEQ ID NO: 9515 - DNA, 530 bp, Homo sapiens
ggcacattgtacttattgtacatcagtgctgtttaaatatttaatagcagttgctcccatacctattcctggctggtctagccttcctgacttgtcatgttcgtaatcaaatatgtatttctacattaatcatttggggtgtggkgccacttttaatcccaggtgggatgatgccatcttctgaaggcttggttgtgctctgggtgactagaataaagataattagctatgaatatcaaacattactttttctttttcttatttaaaaatatgttcctttttagagatagattctttgcggagtgagtgtatttttttctaaagatgaagtagtcactgtttttgaaaatactctaggacctgggcttcatcatccaggctttataactaatgacgtgacctgacctctctggtcagtttggttatctgtaaagaaatcctcctgggctaattgcaaatgtttccagccccagagttttagtgttattgcctatttccagttgtaatatttgtgcttatttacttagaag

SEQ ID NO: 9516 - DNA, 2012 bp, Homo sapiens
taattgccccgccaatgaaattggagagacacaatttccacccacacttggaactacagtggcacataaggaagactgactcaccacaatacattgacagtaaatcatgcagtcactccctacttcacagccactgttttccatgggaatctattcctcaacccaaacccacttcagcagcacccttttttaagctcatttggggaacacaacttaaccgcagccatgggttggtatgtcccatcctgggttatctatacagcacaggtgaaagccaaaatgttcctaggatgaccaaacgtacaagagtagcttgggaatgggaaggagagaaggagagaggaagaacaaacaacatagatggagaattctgtggcatagggcgcaaagacagcaggaacaaccaccgagacccccacctctgcccagagccatgggctacatgaatgtcttctggaaactggagacggcatgcatatcaatctctcaccagtctaaggataaaaaggcttaggccaggcacggtggctcacacttgtaatcccaacactttgggaggccaaggtgggcagatcacaaggtcaggagttcgagaccagcctcgactaccctgtctctactaaaattacaaaaattcgccaggcgtggtggtgcatgcccataatcccagctactcaggaggctgaggcaggagaatcacttgaacccaggaggcagacgttgcagtgagccaagattgcaccactgcactccagcctgggcaacagagcaagactccatctcaaaaaaaaaaaaaaagcggcgggcgggggcggtggggaatattatctcaggtttgggataaagtgaagaaggcaagattctttttttttttttttttttyttccccctagagacagggtctttctttctcaccaaggctcaagtgcaagtgcagtagtacaatcatagcttacagtagcctcaaactcctgggctcaggcgatcctcccacctcagcctcacaagtggtggggactacaggcatgcaccaacacatccagctaattttttgtagagacagggtctccctatgttgcccaggctggtctccaactcctaggctcaagtgatcttcctgcctcagcctcccaaagtgctgggattacataggcatgagccactgtgcctggccaaagttagactccttacaaaccttgtttactgacaaatactgagcctacaaaaaaacttcataatgttgagttacaaagcataatagaaaaaagcaatataaattatacaaaaaaaaagtttcatgcaaaagaaagttaccatcatctggaagacgtagagaaaaagacttttattatgaatatatatacaaataatttatgaccagaaacagaagagattttcacaaactggaaaatagctaatagctatttcctaatagctccaaactgaaaacaacccaaatatccactgagaataaaataggaaaataaattaagatatatttatatacagtggaacattatatattaaagaaaagaggtaaacttcagatggaggtgaatttagtttaagattaagatagcattacaaggccaagcacagggtctcacgactgtaattccagcactttgggaggccaaggtgggtagatcacttaaggtcaggagttcaataccagcctggccaacatggtgaaaccctgtctctactgaaaacacaaaaattagtcaggcgtggtggcacatgcctgtaatcctagctacttgggaggctgaggcaggagaatagcttgaacctgggaggtggaggttgcagtgagcaaagatcgcgccactgcactccagcctcggtgagagtgagactgtctcaaaaaaaaaaaaaaaaagatagtatcacgagattattcaataaatagcattaagaaaactattcttcaacaatcatactgcatatatctaatagaattccatataatgcactctaaaagtataagatattgctaataaatctggtat

SEQ ID NO: 9517 - DNA, 554 bp, Homo sapiens
cagcagataaggatagcacccaactaatgcctatgctcaaggcagccagaccacaaaggatgctgcgatgtccatcagtgtccaacacatcaactcccagtgcagcaccacctgtcctctgaggrtaaatgagtgcccccaaccagcagaactttagggtcaccttgccatgcagcagcccaagagaacagcaagcaaactatgccctggaaactggcttccccaacaccaatccatagtcatctgaattgattcaagccagttggtttccagaccctgcgtgcctgctctaaaatcagaacacatccgcactgtcctgcccagagccccgagatgcttgtaataaaccaggaacagtcataactcagtgttcgccttggcaaaaactaaataaataagtagaacgaatcttctgtcagaaaataaatggcccttccccaggctgagagcctggattaccctcctgaaggacaaacacagcatcttcaccagccaatctcgggactttataaagcccccacttcactcaataaactaccccaaggctgccaatg

SEQ ID NO: 9518 - DNA, 554 bp, Homo sapiens
cagcagataaggatagcacccaactaatgcctatgctcaaggcagccagaccacaaaggatgctgcgatgtccatcagtgtccaacacatcaactcccagtgcagcaccacctgtcctctgagggtaaatgagtgcccccaaccagcagaactttagggtcaccttgccatgcagcagcccaagagaacagcaagcaaactatgccctggaaactggcttccccaacaccaatccatagtcatctgaattgattcaagccagttggtttccagaccctgcgtgcctgctctaaaatcagaacacatccgcactgtcctgcccagagccccragatgcttgtaataaaccaggaacagtcataactcagtgttcgccttggcaaaaactaaataaataagtagaacgaatcttctgtcagaaaataaatggcccttccccaggctgagagcctggattaccctcctgaaggacaaacacagcatcttcaccagccaatctcgggactttataaagcccccacttcactcaataaactaccccaaggctgccaatg

SEQ ID NO: 9519 - DNA, 929 bp, Homo sapiens
tgttaacctgtctcataacacaacgtatttatcaaaacaaataagattttattaagatttccccagttgtttccctaatggctttccactttggatctcttaatggcaaattagccccctatttacttatcagattgtagctttttctgtctgctaagacacatttaaactaacacacagtctttcaaatatgctttcatatttccccttcaatgttaatcttcctgttctgcgtttctttcctgatttagacaattgtatttctgtaaaatatctaatttggattccttgatggaggacaaaattgccacatgtgaccaatstatcatggacagctaataccccaattatgtaagatattataaattaaatatgaggttggtttggtgataaaacagataaaaatgggctaagagctaacttgttacatttgagtgagttattaagaaacaagaatctgacaggatctgggaaatgagattttgtttgtaaagttgattgaaaaaaattataaatcacattgggaatccatatggataaatcatctatatatatagctcatatatatatctatatctataatctgcccatctatcatgaatctattactaatgcccccttgaagttgaggacatagaggaaagataactgaatctgttattcattttcatatataacagtgagtagcaatatagaaagcctttcttattctatccctcatttggtaattatttttctacaagcagtatttaaatcataaaagaacagagaatagaaacagggcaagagaagctgctttacaagggaaccaaagtacaacaatttactgcaagggttggcaaacttttcctatagaagcatagaaagtaaatactttaggctttgcaggttatgtgtgttatctgttgcaatttttcagccttgccatt

SEQ ID NO: 9520 - DNA, 3128 bp, Homo sapiens
atcatttgtccccagaacaatgtgaatttgaacgatggtaaaagggagatctcaatcgtttctatcttggcccccaagtcctgtgacatctgatggtaatgtaagcgtcctggaaacagtaaactatctcatacatatttatattggaaaatgtacccataaatattcagtttgaagcccccatctgtactgttcttctgaggtaggtaagattatgctaatctcatacaggtagccactaaagtgcaaagtgattggtttagcaaaacacaactattttacttgcaaaatattatatttagagaaaaagctctggattaaaatcttgacttcaccacttactagctctgtgatttgattaacttctccatgcctcaatwtctgctttccaaacatttagttgatagtatgaatacctgctttacaacattatgggtaaaaaatgagttaatgcatgataattttaagctcttaataaatgcttattattattactgtaattactacaaatttagaactagcaatagtacttttgacgcctagtcctatatccttcacattggcaatgtgatattgagtgccttaacactacaacctacaaatatagttgttttcagaggaagaaaacttaggtaacagtcaggcatttaacaaacatgcattgagtgtctccttgtggcttgatgagtgttggaaatggtgaacaagatagacatagactctgcctctttgagctattgtttctgtaacctataagaaacttatttattgattctactcaaagagaacaatggtggatacattgggattttaaaacatcattcttcagtattaacatcaagtacatggcttaaggaccattcaggtatgctcgatgtcctttttctaaatctcaagtacttaaagaaaaggtaaggtaagaacaagatctctaaggtggcaaatatttcttgaattcatcaatcttttcaagctctttttctttaccttcaaagaaacttatccagccaaccaaaacttttcaataagaaagtgtggtgccccagaagaaatacagaatgatttttttctttttctagaggtttactgctgattgctctaaagataggggaagaagtaggggaggaaaataaccccaaattctctttggatcaagatgaaatgctctagcaacatgaaccagagggaggcatctaagggaaatggtaataagcaactcttcattgttttggaacaagtgtgccttctttgctcactaacaatctatcgttgagtgccacggtgctgtttcatatcaagattgcaaaaaccattacaagctgcataggtattggaggctcaaccagatgtgatgaatttccattgttttacttagtgcatggaaaatattactaatggctggtgtcaggggaggcttaactgaccccaattggccaaactcatctgggcgcatttctgtaagtcagaccctttaaatactctctcctgttatttcacaggcccctctcccgttttatgagatgtttgactatataaagctcattttagtaaaggagaaattccatgactgcatgaacaggtggtctgggaacctgggagaggagagggatatctttccttgagaccgaattttatttacagccaattcttgattatctttggacacacaagacacacttgagcacaatgaagaaaataaagtctgaaaaattccattcagtctttttccctgccattatcttcacaagaactgctaaaggttacaacaattacaaatctaattgagcaaaatttcatctcctgttgcaattcaggagatgaattcacttcctattccgtttttccaatgcatcagctgagctacaatcaagcagttagaagaaaaagagagaaggcctttgaaaatcccttatacctatacctagagttgacattcaagttttgattttaatatatgatttgcactttgaattttcttggagatattgataataacacatatcagataaatacctgacttccactttcttaatatatcaaggtttccagaacaacccagttcttgctacagtcacagacctgttctttccttttagtttagaaggcttcagaatgtgtcaaattcttcattttctgcctctagaagtctcatttacaaaagacatcctcttttgtaaacttgacattgtctttagatattagctcatcaagacccagagtccagtttcagtttagaggaacatggaaaaatttaaatacttttctaaaccttgtgtaactttatctgaactcctgtgtctttatgtgaactcttcttattggcaatgagttggagatcccctgagtataagtttccttgtaagaagttttctggcatctaaaatttagccttgaaattataagttaaagaaaaggttaagacaataaaatgtgactatgaatttggaaatgaacaacattttagtgagcttcctatttttttttcttaaatgtgcagctcattaaacagaattttagtgtgccgtggcattgaattttgagaccttcttaacagctattacataaatgtacaatgggcattatttaaaaaaaatcaaaactcacacacctctagcctctgaatgatggttttaaaatatagaataggagtatcattggccaggcgtggtggctcacgcctgtaatcccagcactttgggaggccgaggcgggtggatcacgaggtcaggagatcgagaccatcctggctagcacagtgaaaccctgtctttactaaaaatacaaaaaattagccgggcgcagtggtgggcgcctgtagtcccagctgcttgggaggctgaggcaggagaatggcatgaacccaagaggcggagctggcagtgagcaaagatcgcgtcactgcactccagcctgggcaacagagcgagactctgtctcaaaaaaaaaaaaaaaaaaaaagagtatcattaatgaaaaacaaagcccttcaccatgcatgacaagtacctgcttttgctgtgcagttgatgtattttcattggcttcttaattgtttctgttaatagtgtgggtccctgcaaaagattactcgttgctaaactgggtactcaactggaggttttgcctca

SEQ ID NO: 9521 - DNA, 485 bp, Homo sapiens
ttttacaataatatggtattatgtgatgttatatagaatataagagcttacaaattgtgaacytataaactgtattaagtgtatcctgttgatttttaataaatactaaacagacaataccatcattaatagagagtcattgcgtgtgcctgtaatcccagctactcgggaggctgaggcaggagaatggcatgaacccgggaggcggagcttgtagtgagccgagatggcaccattgcactccagcctgggcgacagagtgagactccgtctcaaaaaaaaaacaacaacaacaacaaaagggagtcattaaaagtggaggggccgggtatggtgcctcacacctgtaatcccagcactttgggaggccgaggcaggcggatcaccagaagtcaggagttcgagaccagccttgccaacatggtgaaaccctgtctctactaaaaatacaaaaacattagccaggcatggtggtgcacacctat

SEQ ID NO: 9522 - DNA, 485 bp, Homo sapiens
ttttacaataatatggtattatgtgatgttatatagaatataagagcttacaaattgtgaacttataaactgtattaagtgtatcctgttgatttttaataaatactaaacagacaataccatcattaatagagagtcattgcgtgtgcctgtaatcccagctaytcgggaggctgaggcaggagaatggcatgaacccgggaggcggagcttgtagtgagccgagatggcaccattgcactccagcctgggcgacagagtgagactccgtctcaaaaaaaaaacaacaacaacaacaaaagggagtcattaaaagtggaggggccgggtatggtgcctcacacctgtaatcccagcactttgggaggccgaggcaggcggatcaccagaagtcaggagttcgagaccagccttgccaacatggtgaaaccctgtctctactaaaaatacaaaaacattagccaggcatggtggtgcacacctat

SEQ ID NO: 9523 - DNA, 485 bp, Homo sapiens
ttttacaataatatggtattatgtgatgttatatagaatataagagcttacaaattgtgaacttataaactgtattaagtgtatcctgttgatttttaataaatactaaacagacaataccatcattaatagagagtcattgcgtgtgcctgtaatcccagctactcgggaggctgaggcaggagaatggcatgaacccgggaggcggagcttgtagtgagccgagatggcaccattgcactccagcctgggcgacagagtgagactccgtctcaaaaaaaaaacaacaacaacaamaaaagggagtcattaaaagtggaggggccgggtatggtgcctcacacctgtaatcccagcactttgggaggccgaggcaggcggatcaccagaagtcaggagttcgagaccagccttgccaacatggtgaaaccctgtctctactaaaaatacaaaaacattagccaggcatggtggtgcacacctat

SEQ ID NO: 9524 - DNA, 567 bp, Homo sapiens
gaggtccaaagtcaaatacattgtcttagaaagtagttttagagcaagccacaaagctctctacttggtaatttaaatgactgaccgctcaatttatgwgcattcccagcaataaaattcagcctgaacttactaatagcacattttatatgacaacgatgacaattacaacctatagttactgcagtcgccctttggtctagggaaaaatgacagtattaattatacacacttgccatttatcagacttaagttggcaggtgattgagctcagcaccatctctaacttgacttctacatttaccattttctaatccactgaaacgaagataattagaatagagaaaaatgagtggctccttctttcactgcctttatctctgatttcttatacagtatagttctttttttttttaatttctacagcaacacaattgttttattgatatgcttcatttgaatgtttactgtatattcaaatcttgatattaaattacaacttccagttacaatgaactggaagataaaatcaatcaaaaaagtaatttgataatatatgtttatgat

SEQ ID NO: 9525 - DNA, 567 bp, Homo sapiens
gaggtccaaagtcaaatacattgtcttagaaagtagttttagagcaagccacaaagctctctacttggtaatttaaatgactgaccgctcaatttatgagcattcccagcaataaaattcagcctgaacttactaatagcacattttatatgacaacgatgacaattacaayctatagttactgcagtcgccctttggtctagggaaaaatgacagtattaattatacacacttgccatttatcagacttaagttggcaggtgattgagctcagcaccatctctaacttgacttctacatttaccattttctaatccactgaaacgaagataattagaatagagaaaaatgagtggctccttctttcactgcctttatctctgatttcttatacagtatagttctttttttttttaatttctacagcaacacaattgttttattgatatgcttcatttgaatgtttactgtatattcaaatcttgatattaaattacaacttccagttacaatgaactggaagataaaatcaatcaaaaaagtaatttgataatatatgtttatgat

SEQ ID NO: 9526 - DNA, 507 bp, Homo sapiens
atgccctcagaagaggaattcgtccattttctccctcagctggaagccacacaccttgctaggtctcctgtcaaccacaacatatttgaactacttttacttaagcaggatcactctgccctaatagaataaccaggaggcatccctgcaactttacttcattctggaggggctaaccttcctgctgctgtccatcagcttctctagtctccaaaggtgtacaattctgaagcagagtcctcttttccctcccagcagcgcattcagctagcacttattgagcactaattatgtgccagccaytgggacgctggtcagaacatgatgcgtgctctcaagaagtgcccagtcattgagaagacagaccgggccgtgcccctatgaggcaggcagagttctgctgggcccactggaacgaggcaaccagctcacagtcagagttggggcagatagcccaggtgctctgttaactcctggaagccagatcccgtgctttgctgttacaaa

SEQ ID NO: 9527 - DNA, 507 bp, Homo sapiens
atgccctcagaagaggaattcgtccattttctccctcagctggaagccacacaccttgctaggtctcctgtcaaccacaacatatttgaactacttttacttaagcaggatcactctgccctaatagaataaccaggaggcatccctgcaactttacttcattctggaggggctaaccttcctgctgctgtccatcagcttctctagtctccaaaggtgtacaattctgaagcagagtcctcttttccctcccagcagcgcattcagctagcacttattgagcactaattatgtgccagccactgggacgctggtcagaacatgatgcgtgctctcaagaagtgcccagtcattgagaagacagaccgggccgtgcccctatgaggcaggcagagttctgctgggcccactggaacgaggcarccagctcacagtcagagttggggcagatagcccaggtgctctgttaactcctggaagccagatcccgtgctttgctgttacaaa

SEQ ID NO: 9528 - DNA, 532 bp, Homo sapiens
agttacagaggagtgattttgatttttatttaattattttatttctttttcttttctttttttttttttttttttttttttttttgaggcagagtctcgctctgttgcccaggctggagtgcagtggygcaatctcggctcactgcaacctccgcctcacgggttcaagcgattctcctgcttcagcctcccgagtagctgggattacctccatgcaccaccacgccaggctaatttttacaaaatagaggaggtttcgtcacattggccaggctggtctcaaactcctggcctgaagcgatccacccaccttggcctcccaaagtgctgggattacaggcctgagccaccgctctggcctaagagtatctttttataatgcaagtcttgtcgttttcctttcctgcttaaaacccctcacatccttgctaatgaggtctctaaatggccttctcagggtaaaggtagaaagaatggcagataaaacaagacagctggctgatgtggagggtcctgccccttcccccttact

SEQ ID NO: 9529 - DNA, 644 bp, Homo sapiens
ctcttcctcctctataagcccaggccacaggccagtgagagagtctggcctggctaatcaatactcaagagtattcagggaatacaatattcctgacaccagtcttcatttgccctcccaggaggcaacgactataatcaatttcttatgtgtccttctagaaatattctacaggtatgcagctatgcagaacatatgctttgtctcctttacccacccatccattcccctcatgcaatacacattgttttcttcttgattttttttttttttttttcatttaacaacatgtcttggagagcattcctcagcaggtcatagggacagacctctctcttttcatggctgcctagtactccattgtgaatttacaggaatgtaattctttactygaaacatttaaggccaaatatatttcatttttttatatttaaaaagttataccatcctataaggacctggaaaagcactctataatcaaatacattaatatatgtacagaactcattgaggtggctgatgcttgttatcccaccagctacttgggatgctgaggtgggtggctcacttgaccccaggagtttgaatccaggttgggcaatatagtgaagccccatctctaaaacatatatatatataatgta

SEQ ID NO: 9530 - DNA, 552 bp, Homo sapiens
tgcagcaagaagggtaggattgtccagtcaggacctgccttaagaattgctcagtaggccaggtgcagtggctcacacctataatcccagcactttgggaggcagaggtgggtggatcatgaggttaggcggtcaagaccatcctggccaacatggtgaaaccccgtctctactaaatatacaaaaaaaaaaaaaaattagctggatgtggtggcacatgcctgtaatcccagctactcgggaggctgaggcaggaaaatcacctgaaccagggagtcggaggttgcagtgagccgagatcattccactgcagtccagcctggygacagagtgagactccgtctcaaaaaaaaaaaaaaaaaaaaaaaagaattgctcagtaaacagtagctcttagaaatttttattctaataaatgaaaatttctgtacccaagtaaagtataagtagaatgactaataatgaaaagttagtccacctcactcataaatcaacaaaagcataggaaaccaatggcatacaacttttattaatcagactaccaaaaaaatt

SEQ ID NO: 9531 - DNA, 509 bp, Homo sapiens
cgcccagggtggcccgggccctttcctcggtcgttgtctcaccgccacaggctccgatggcggcggccacgctgagggaccccgctcaggtgagcgccgcgtcctcccggcctcccccgaatcctaaagccctgtgagggccgcctgctcaggtccccgggtgcagaactgtggggcgttcgtgggcggcgtcccgtttctgacacgcagtgtgatggggtggcaatggagggcaaggggcccggctcgcaaagatgtgaggcgcattcagcgagtcccgaacctgaggcctcctggtgtctgtagtgggcagcttgggaagggacgaggcgcgtgtcgagcgacagcccgagcagctgcgctttcatcctgagggggccacagtggccgcggagggctggagacagaagagtgacaagatctgtttctcaaagtttgccaaaggcccytcaagtcaaaacagactggggtgggggtgaggcgggtgaagacagacctgtgagtaggta

SEQ ID NO: 9532 - DNA, 545 bp, Homo sapiens
tacagggattcaatatttttagtaactactccatcttcctttcttgtttaaggtcatttttgatcaaccatctaaacatttttatccaattctgttttcctgaggtttcttccatctctttttatttatttatgtatgtatttatttatttattttgagatggaatttcactcttgttgcccaggctggaatgcaatggtgcaatctcggctcatcgcaacctctgcctcctaggttcaagcaattctcctgcctcagcctcctgagtagctaggattacaggcacgcgccacaaygctcggctaatttttttgtatttttagtagagatggggttttaccatgttggtcaggctggtctccaactcctgacctcaggtgatctgcccacctcaccctcccaaagtgctgggattacaggcatgagccaccgcgccaggctatctcatctcttttatttttagttacttttcttctgaatgattcttacttttccctccccctccagtattaagtcttattcaagacagctcaataaggaggtcc

SEQ ID NO: 9533 - DNA, 875 bp, Homo sapiens
gttttccagactcccattcatacactgatatgattcacttccagatcaagccaccaatatctgagagagaaatgctggcttcaggagagctcaagtcagaggatcccagcagggattttatacccttctggggtaacacagttgagccagagtgcctacctaatcaygtatgccaaccagaaaccatcagcagtcaaacttgccctccatattgtcatgggatcttccagatgttaaacaataataataaagctcactgcatttaaatgtcaaaatgagatacctaaagtccctacagacaaaactagagcttttccagtccaattttaaactaattccatctcacacaaaacaagtgcacactatatcaaaatttgggggatactgctaaagcagtacttacagggaaatttatagcctatattattatacaagaagagagttcacaaataaatgacagttcattttaagaaattaggaaaaccagccaggcatgctggctcatgcctgtaatcccagtgctttgggatcacttgaagccaggagttcaagaccagcttgagcaatacagtgagactccatctccaaaaacaaaaacaaacaaaaaagttagccaggtgtgatggcacatgcctgtaatcgcagctacttaggaggctgaggattacttgagcccaagagttcaaggttacagtaagctatcatagtgccactgcattctatcctgggttgacagagagagaccctgtctcaaaacaaaaaagaaaactgggaaaacacagacaaatcctataggcaaccctatatagactctatcctctcttgcctcttgcttcaggagcagccctgcctcagtgacagcaaaaagtggcaac

SEQ ID NO: 9534 - DNA, 638 bp, Homo sapiens
aatcttgcagctattcattgtgaagttaaaatgcagtaattcatatagagctttgcacatcaaaagagcttcttaaatattagtcatggttatcatcttaggaaatacttagtgaatactgagaactgaaatgaatagctaaccagagcctgtttcaagggaccaaggtctgtggtctcaaatgtctcaaatctcagcaatgcggcccacatccctgccactgaaatggtgctgcttggacattatatcagagtaggagttatggtgggccatgccatgatcccttttgctttaggrcaagttgcaattagacctaagactttgttcctgtaccatatttactaggaggaagctatatcacctggacttaccttagatagactgaatataagccccatggggacagggaccttgtccctctccatcagccttattttcccatgatctagcccagcacccagcaccttgttatttgttaaatgaatggaaaatgttggactttaataactctgaggtttaataattcctttctagtgtagtgtgcctacccacctggagactttcaaagtctgattgggggatgcaaaatccctagagtccacaaaaggagggtacttccatgatactccccaccctag

SEQ ID NO: 9535 - DNA, 615 bp, Homo sapiens
agttgttgaacaggcagtgtatcatggtggttatctggacttcctaggttcaaatcccaactctgctacatagtagctttgtmgttttggataagttacctaacactgcctccattttctcctctgtattttggggattaattaaatctaccacgtaggattgtaaaggttaaatggtgttaattcacttagtggagtcgacagaatcagcaaagaaaatacaggaacatacttagagtaaaaaattatttgtcgtttgctggaattcaaatttatttgggtgccctttatttttatttactaaatctggcagcaaccctatcacttaaagcactaagaaaagtgcccagcaagtgctcataagtgtttgctattattattattatttctattacttgatttttattgagtccactccattcccagcctctctttcagactagagtccttcagaaccttactaatttggcttctaatatttaatgcaaacccattcaaatagagggtagtttagagcttttcagcactaaccaaacactccctcaaaaataaaataaaattatgttcaaaacaagatcatagtgggaatacttaaaataactaactgaacaagac

SEQ ID NO: 9536 - DNA, 512 bp, Homo sapiens
gtttcaaccaagaaaatgtgagatggggtttaggtagggtatcattggcataaaccttccmaagagatttcaaaaagttccaccagcttcaccacaccaaagcttcaagcatcctctgtttgatgccagcattcgagcatgttgatagggtcaccaccatgcccttcttctctgcccgttggcattaacctgcccattgtctccacttagggaagctacagtgagctgttccttgagcagggatagatctcatcatccaggcacaggctgtctttgcagacgatatctgctgaggtagcctccaatggtggggtctgcccaatgtgtgtgattcccactacgatgacattcagtcaagccacttctgctttaggaatgagggatccagtggtgttcagcagtttgcaagacactgacagtgaagacttgaagaaagaagtgagtacactgtaatgaaaactcaatagctaacaagagagaggaagcaaataaactgagcaaatatctggttc

SEQ ID NO: 9537 - DNA, 573 bp, Homo sapiens
ggaagttttccatttttataaataagattttctacacgtgtatttattttgacattttgagttgcacaggaatgaatgtgctttggagggtggctaattttttaaaaatcatgtgccataaatcagataatggttataaaatgatttcacaatctaaaaagtcttgaagtacacttttcaacaaatcatttttctttcttttttttttttctttttgagacggagtttcgctcttgttacccaggctggagtgcaatggtgtgatctcggctcaccgcaacctctgcctcctaggttcaagcgattctcctgcctcasccttcctgagtagctgggattacaggcatgctaccctacgcccgactaattctgtatttttggtagagacagagtttccccattttggtcaggctggtctcgaactcctgacctcagataatccacccgtcttggcctcccaaagtgctgggattacaggcgtgagccaccacacccggcctacaaatcatttttcttagctaaatttcctttttctttatatccatggcatggactctatgaaactatcttggg

SEQ ID NO: 9538 - DNA, 531 bp, Homo sapiens
ttctttaatcctttcctggacttactaatattaactacatggtggaattctattatcactcttctcaatactgttggaatgcagatgagttcttcggggagtgttacaactattttttcaaactcttaattagactttgggatgtttccacggtagcggctgggtatagactgctgaagattttcttcttttgctaatgttgtgactgatacggaagcccaaagattgacatattatgcaaagcrtaattatctagttatgtaaccttgaattcccaaggtgaaaactcacaagcattttcaagcaaagattcatgatttttgccatttattttaatatatttcagtctccaaggttgaaacaataaatctctgatgtgcctccatttccattttgtgtaataattgagattcagccacatcccacatccagagtggggggcaagctggggaaaagtgatggggcaacatttgaattctagaatcgagaccatcaaatgaagagatggaattttccatggagtactggaaa

SEQ ID NO: 9539 - DNA, 1092 bp, Homo sapiens
cttactgtgttcttgcttctagtgtccctacttgtgtgatcttctgaaaacgtaaatatgatggcatcatttgcctacataaaaccattctgtgactctgtgacatgtaggcttgacaggacaaaacccaagaccccaatatggcatatatggctaaccatcacgtaggtctcattcaggacaagctatataattttcccagagcaatgaaaattatatatgaaaatgtggtgggcattactaataaattcagaatttcaatgtggtgacagaaaaacattcaacctagcacgaggttttccaagcacaaagccctgtgctattgcacaggtatcataaccgtgaagctggtcttgatctcaccacttaccacataatcttttaaaatttcctgacaagtagcctctggtgtaggaattgctaataatcatgtgtcactttcataagtgtttatactgcttatgaaagttctatgtgtcataactttatatgattttagatcaaattacgtttgggttacaaatgttgaaagaatttgaaaccattttgtatttgaagatatttggaatggtcaaatggtgttattaaaatgttttattatatagataacatgtagtatgaaactcagtttgaaacccaccctatttcaactgagaaattagaaaaatttcctgcctctagcragggatgatgaaccaaattagatttttatgtttctattgatattttcatctctaccatctctatcattatttatgcttatattagaagttttccagagagtgtatggataagctattactgtgaagcattaaatcaagtctaaccagaaataataattttgaatatcagatggttaaataataagagatattgtaggccctttaatagaaggatatgttatacgaattggaaggactcatgacatcacagaaaatgtatcaaaatggtgatgataatgattgaagacttatagtagcattaattttaaaataggctaatttagaatcatgagtaattttgaattcatgaaataatacttttttggggtagtatattaggtagacattctctccttgctcacatatagta

SEQ ID NO: 9540 - DNA, 599 bp, Homo sapiens
ttgttgttgttgttgttgggtttttttttgagatggagtattgctctgttgcccaggctgaagtggtataacctcggctcactgcaacctttgctttctgggttcaagggattctcctgccttagtctcctgagtagctgggattacaggcacccatcaccacgccagactaatttttgtatttttagtagagacggttttgccatgttggccagrctagtctcgaactcctgacctcaggtgatccacccgcctctgcctctcaaagtgctgggattacaggcgcgagtcacttcacccggcctcaccaagctgctcttgtttgctcaccttcgtcactctgatcccaagcttctaagtgcccctgcaggtttctaaaataccagtggaccctttgtggccccctagcttgaagcccctgcatggcgcctactgctttcagtaccaagcccaggtgccatctcagagctgactgcaccctccagagcccgggccgccctctgccccacgcctctgggcctttctcatgccaggcctcctggatgtcctttccctctttctttcctggctgagtcttccacatcctccaagactccaca

SEQ ID NO: 9541 - DNA, 604 bp, Homo sapiens
atggawtgggtctgccctcagcagtcacaggccaagctgacacctcattgccaatcccattgcaagagacagttcccttaaccatcatcgaacccccgtcctacctagtctcagcttctactccttagagtaagatagagaaagcagctggcccttctaaggccactacccagtcctcacttctcacttgagggctgactgcatccaggatgattgaaaatgagaaagtaaggccaggtgcagtggctcacacctgatatcccagcactttgggaggccgaggtgggaagatcacttgaggccaggagtttgagaccagcctgggcaacataacaagaccctgtctacaaaaaatacgaaactcgctgggtgtagtggtgtgcgcctgtagtccccgctactcaggaggctgaggtaggaggattacttgagccggggaggtggaggttgcagtgagccgagatcacgccactgcacttcagcctgggtgacagagtgcgattctgtatcaaaaaaaaaaaaaaaagaaagaaagaaagaaagaaagaaagaaagaaagaaaaaggaaaaagaaaatgagaaagtcttgtcctttcagaagaac

SEQ ID NO: 9542 - DNA, 576 bp, Homo sapiens
gaaaccctatctctactaaaaatacaaaaattagccaggcacggtggcaggcgcctataatcctagctacttgggaggctgaggcaagagaattgcttgaacccggtaggtggaggttgcagtgagccaagattgcgccactgcactccagcctgggtgacagagtgacagagcgatactctgtctcaaaaaaaaaaaaaaaacaaaaaaaaaacaaaaaaaggacagtaatcatacgggctcagggctaacacagatgaactcatttcaccttaatcacctctttaaaggccctgtctccaaatatagtcacattctgaggtatwggaggttaaaacttcctataaagttctgggaaacacgattcagtccataacacttttctatctatttatgttatgtctatgacagctgtccagatacacatggcatacttattttttaatgctatgtaatattttgttatatgactgaaccaaaatttctttattaattcatttgttaagcacctgagttgtttccagctttttgttttcaagaatgctgctttgagcattcttgtacatactcctggca

SEQ ID NO: 9543 - DNA, 549 bp, Homo sapiens
gctgacaaaagaatgtgtgggtgagacctcttggtgtcttcgcattacttaacaacaaaagctttcagaatgtccttaacctctaacatagaaatcctgcttctaggaatttatcctaagtaaacatttgtaacgtcacaaacacttggctacaagaacaatttttataaagcaatttataagaaagaaaaaatgcaagacatcttacatacacagtagtaatagccagttacattcactatagtacactcatatgatcacatattttgcagttattaaagaatgagtatgcttattaagagtaataagagcaaatatgttttcattttggtaaatttatatttgtattggttgtgtgtaggagagaaagacacacacacacacacactttgagagtctaaacccaaaaaatataaccagagttatttctgaatgctaagactgtgtttcatctttttctacttgcttatctacattttcccaatgaatatctyttattttaataacaatttcttagttatgttaaaaacctgcaacccggagcagtac

SEQ ID NO: 9544 - DNA, 556 bp, Homo sapiens
cccagaggccttcactctttggggcagtctctctagggtcactttctgaatgtaccttctacctaaagtatacaaacacaaagagccagctgagctggttctagtgtgaaagccgtaagtgccacccagcaggcgtttgaaaacaagaaatcattcttctgtggaaggagaatgtgccatctcagctaccctcagtccgccaggsagcccagtctgtgtattcatatgaagttgtgaaaaccatgagtgtgtgccatggccatcgtgtctacacacagccactattgttcctgtgggctagtctccagcaaattaaaacactggcatggcctaggaagggcgttgcgagctcctaaatggaaagcttctctgggggtagggagatgaagagccaagatgctggtgaagcaggtgcagtgaggatccaaggcaaggaattgccctgagggaggtggctgcatatggagaaaggcagttctctgtgggcaaggccagcttgcttcaggctgtagagggaatttggtctgaagcaacagggcatgaactgtgactttga

SEQ ID NO: 9545 - DNA, 532 bp, Homo sapiens
aagaaagggaaagaaaaagaaaaaaacttagatgcaaaagactaaataccgtataatttcatttacatgaaaatctggaggaagcaaactaactttataatgaatggaaacaaataagtgtttgcctggtgtgggggtggaatttagtgcaaagaggcatagaggaactttttttagggtgatgagatgttttatatcttgattgtggtggttgtttcaaggatatatacatttatcaaaatgcaaagaaaacatccaaaaataggtgcattttttacattctrtttcatgtaaagtttgccttattacagttgaattttaaaaagtagtgatccatagtgttaatcagcaaagtcctattgataattgtctcaaattggaaacaacctacatgtccctcagtgaagtattagttcagtaaattttggaagaacaataaaatgaagtactgtgtattccttaaaaacatattagacaggcgccaggcacggtggctcacacctgtaatcccagcactttgggaggccgagac

SEQ ID NO: 9546 - DNA, 532 bp, Homo sapiens
aagaaagggaaagaaaaagaaaaaaacttagatgcaaaagactaaataccgtataatttcatttacatgaaaatctggaggaagcaaactaactttataatgaatggaaacaaataagtgtttgcctggtgtgggggtggaatttagtgcaaagaggcatagaggaactttttttagggtgatgagatgttttatatcttgattgtggtggttgtttcaaggatatatacatttatcaaaatgcaaagaaaacatccaaaaataggtgcattttttacattctgtttcatgtaaagtttgccttattacagttgaattttaaaaagyagtgatccatagtgttaatcagcaaagtcctattgataattgtctcaaattggaaacaacctacatgtccctcagtgaagtattagttcagtaaattttggaagaacaataaaatgaagtactgtgtattccttaaaaacatattagacaggcgccaggcacggtggctcacacctgtaatcccagcactttgggaggccgagac

SEQ ID NO: 9547 - DNA, 1184 bp, Homo sapiens
caaatgaaatccattttcttttttacaaccctttttctttttcttttttttttttattatactttaagttttagggtacatgtgcacattgtgcaggttagttacatacgtatacatgtgccgtgctggtgcgctgcacccactaactcgtcatctagcattaggtatatctcccaatgctatccctcccccctccccccaccccacaacagtccccagagtgtgatattccccttcctgtgtccatgtgatctcattgttcaattcccacctatgagtgagaatatgcggtgtttggttttttgttcttgcgatagtttactgagaatgatgatttccaatttcatccatgtccctacaaaggacatgaactcttcttcttaacatctgttgggttcactccataccatgcttcaactctattgctggggttgaatgaaatctggcatgaaacaaaagatcacttacttcctttccttcagggctcccatgcacttttccaccctccaaaaccagttcttactcttactcttttttttatctcagttctttgtaatatatgtctgctttccttttctctccgaaacaatgcaaagctaaaaggttcatccttagccattcctgctccctgaacattgagattttaaagtaattatgacagaattttaaggactcaaaakgcaactatttcatgaatgacatagttcattgatttccagcctttcttctttcctaaaatgccccagtgggggtccaactcccttcgtggcctcttttggatagctatggtattgtatgtattgatatttactttattataaataaaaacttgaaaaatattttctaaaagaatatattttctaagactaagaaatatgagaaaagtgacattgtgttacagttttgcaaatctcttgatttctgattctgcttcagcatttaatcttttgcaacatgctgttttgattgtcatatgtagcaaaattttggcctcactaaaaaatgttgtgggacaaaggactattttgctagcctttttaaggtaatcataaatattcttctttgatattataccaaaactcagcaacagtagtttcttaaagatgagttttgatgggggatttgaaactatatcagtgcattttttccttctctgttacatgaaaatctattagtctatgtca

SEQ ID NO: 9548 - DNA, 1372 bp, Homo sapiens
tgcatccttaatatgcttgtgataatactttgtataaactataattttcttttctccaaaagtggatgtcatttttcagagttaagaaatgtgagaaaatctttgtttcttcactgggcaaatctaaccttttctaattcactaagtggttatgatcttttactggcatgtagtttttttgtgggggttcaggatacacatatacacatagttgaataggagaccctaaataaataataacattgcaagacttgtcaatcaaactgaaccagtttattggtgaactggagattccaacaactaaataaggctgaaagttggcacccagtgtgaagcattatagtgggtggcttcwttaggagcttctggtatgtaaaaattgatccaaagcctaagtcctcatcatctaacttagaatggcattctaaaaattgtgcccaatggcaccatccatagaggctaacatggtggcaggaatcaaattggagcactgtggtggacaagatgtgcctctcagacctcacttcataggaggacatgttcccctgtctatcagcaggcagcctccatctgtcagccccttcagggtttgcctcagctgcagtgtactgtctggccaaggatcactatttcccagggcagaccacctccagtgactagtcaagacgggattagaaaagcttggccattttagctgcatgctgcataactctagcataattctaattccagatcttgctgtgaggatgacagaggttttatagggcttgaatccagacttcccctttgaccctttctgcttcttctgtttcccttccataggtgttaatctctaaaaacttcacctcagcctccgctttcagaaaagcttattggcagcaagcacaatatgaatttgttgaatttctgggcttccatatctctatttgctccttttctttgattgtttatgttgtgtataatgactttcattagatactaccttaagtgcctaacaatatttgtccttctctttaaatcaagcttgtctaacccatggcccatgggctgcatgcagcccggaatggctttgaatgtggcccaacatatttcttaaaacattatgagatcttaccaatttttttagctcatgagctgttgttagtgtcagtatattttatgtgtggcccaagacaattcttccaatgtcgcccaggaaagccaaaagattggatacctctgctttaaatcatgtgacaaatcctgtgttctacggctagacattttttggttctacagtgctattctgactattactgtgtagttgtctaagtcttttcttaggcctggaagtacttgttttatgaatctgagtgctccaatgttagatgca

SEQ ID NO: 9549 - DNA, 519 bp, Homo sapiens
tgtgaacataataaacgttttgaagaaaatggacatatcaaattttgttttatggacaaatcctccaaatcaaatatataatccaaatacagagagagaagcaaatttctctctgtcacagcaaagagagcacaaacccatttaagtgccctgttcagttatgcttgctggtcaagaggtgcccacaagccataaaatgtttctgtccatggctcatgcaaagatgtgcatttttttcaatatttaaattatagactacattagtaaaagttttgaataaaaatgacctacgttgctttttgaacacactacaaattttctaaagcctttgtaataaaaaaggtaattagataatcttcaaacaattttgttagtatttagttctttctttagtttttcttctgtcatgttcaatataattatttatgaagcatgattattcaaaaatattcacatataccagatcrcttaggatttcatttgagctatgaaaaataacaatatcaataatatatagca

SEQ ID NO: 9550 - DNA, 554 bp, Homo sapiens
tctttttatatttccatttatttgagtagtagtcccatgtttcattcttaatgtttctgtatgtattataaaatgtaatgttttctagaaggttggtttttcagtaaaaccacttaaactttgcagatggcatcgtggaatgagtaagctacagctgaatttctgttatggtctttacaagttgtgtgaccttcgaaaagttaattttttgagactccattttctcatttgaaaaatggagattgtaatgcccctcttgcagtgttaatgtgatcttcaaggaggttaggtccataaaacagttgacatgcaataagtatttaatatgtagatatttgtttttatttataaataaatatrtagatatttgtttttatttacaaataaacatatagatatttatttcatttacaaataaatatatagatacttcatttacaaataaatatttatttcatttccaaaaattatatagatatttattttattgtgacctgggcctgctccttttctcattcagcataaactgtaatgaggatacatttgcaatccaa

SEQ ID NO: 9551 - DNA, 561 bp, Homo sapiens
atgggcagcttgatgtaaggataaaacacactatgcctgtatgtaaatatatggactgcatgcacatatgtgtagataattctagttttgaaagtgatcttacagaaaacattagtgacgacctactgagcagttactctggaccaggcattttatttacatacatcattccatttatttgtcctaagactttaaaataattatctttacttttctcttctgtattttataaaatgaggacacagaactgagaatttaatatacctgtcatagatgtgtataaatatatatatatgtatgaaaacattaaaataaaaagtaaaaaatccaccaattgaactgaaagatttgaacacatttctcycaataaatgatagatcaaacagacacaaatcagtacaaataaagaaaatttgaatggaacaatcaaattgctcagtctactgcaaatttcccaaacttctctgatggcctaataccagacctactgagtgagactctccaggaaagagacccagaaagctgtattcctcaggtgattatcatagaggaggtttagta

SEQ ID NO: 9552 - DNA, 561 bp, Homo sapiens
atgggcagcttgatgtaaggataaaacacactatgcctgtatgtaaatatatggactgcatgcacatatgtgtagataattctagttttgaaagtgatcttacagaaaacattagtgacgacctactgagcagttactctggaccaggcattttatttacatacatcattccatttatttgtcctaagactttaaaataattatctttacttttctcttctgtattttataaaatgaggacacagaactgagaatttaatatacctgtcatagatgtgtataaatatatatatatgtatgaaaacattaaaataaaaagtaaaaaatccaccaattgaactgaaagatttgaacacatttctcccaataaatgatagatcaaacagacacaaatcagtacaaataaagaaaatttgaatgraacaatcaaattgctcagtctactgcaaatttcccaaacttctctgatggcctaataccagacctactgagtgagactctccaggaaagagacccagaaagctgtattcctcaggtgattatcatagaggaggtttagta

SEQ ID NO: 9553 - DNA, 1356 bp, Homo sapiens
atatatgtgtgtgtgtgtgtgtgtgtgtgtgtgtatatatatatatatatatatatatatatatatggcctttaaactgttaaaacagtgttttattggcccaggaatatagtatagaattgagagtcagggtagaataaacatgcttgttttattcctaataaatctttcacaaaaaaaaatattacttaatataaaattttttaaggaaatacaacattaatgatgcagcaataacaataattttagttatgattttttcttaggtatcatttaggacagagttaatttgatagggtagaaataattgttttgaacctaatttgttaatctaattattttgtttacatcagtgtggtgatattttaccagtatcgcaatcacttttagacaaagttacaaaccctatcataaggataagtttgatacccataaatcagtaactttagttagataacaaaaaatcaaattcgtcttgtattccaccgtgctgatagagtaacctattgatggtgtgtatatttttacttgtgtggactggcagtgttcacattcccagaatgtgagctggaaaatagaactctttaaacattgaagaataaaaaaaaaaagtatgctctgaattacttgaaccagagaaataaagaagtgaattgggaagtaaatactagattagtagtgaaagttctgcttagaagatctctgaaaataaatacattagggtggtaagcatcctggactctggagtcagactgcctggatttgaatcccaactgtctccttattggctgtgtggctttaggaaagtagttgacctctgtgagctttagtttcctcctctttaaaatgaggttataatagtgcctacctcatagggatgctataagaatccaatgaattaatatatgccatggaatagtgcctgatcccttagatgtctataatgtcacttattatttacttgttatttttaagctcaaaaacatgcatctctttcttttcatagattaccatgggaccatttacagtcttcttgtctccataggagaattagtataygtgtgcttgtgtatatgtatagtatgctccatgttagccagaataacccaatgagtcataattgcagagcctgatgctgacagccccctatgtaataaaacttacagaaattggattacaatgtcattgagtagttgcctctatttccttatgacagcaagttttccacattctggcaagcctcctactgtgttttggatcagagctatatgccagaaccccaggttctaaatttacttcctaccttgagctgtttggcttcaggtttgggttttacttttatgaggtgtgttggga

SEQ ID NO: 9554 - DNA, 542 bp, Homo sapiens
aattctatatttctaagcattacaattgacagagaataaaactagtctgaatataagactatcttgcaaagtaaaattatgatgagatattttaatatacccattttatagtcaaaaacacataacatacacattttggtaaaggcataaaaattaaatgaaatcatacatatatattacataatacttcattaagatgtaaagatcatatacatatatatgaaatgataatatacatctgcatgtatccatgaacaattacaaaactatatgtttttacttagaaaactttttacagccatagttgttttttataaaatttaataaaatgtaaagtaaataataaaatttaataaatgataataaaaattctaactctttagaaatgaagaaacctgcttctagacaacctttgaattacaaaatgtaaaaatgaaattacttacaagcaagaaagtyataaaaaagaaaacatctcatcacaaattataaagcacagagagaaacctgtaatcaaaagaaaataagtttaaatgccttca

SEQ ID NO: 9555 - DNA, 479 bp, Homo sapiens
gctcctctcccttttttttgtcctgagtaactaactactacccatctttcaggactgagcttaatcctcacgtcggtgaaagcctttctaacatccccawttcagattccgttttgccgttactagtctcacagaaactggcacttctccttaaaaaaaaaaacttatctaaattttccatttataagtgattattttgtaagcattgtttgttgataataatatctgcatcctcagctggtaagttctgcaagggtagagtcatgtctgttttgcttgctacacctgtttggggttactgagactaccctcaagtttgataatttgctaagaggactcctaggactcagcagatatttgtgcttacagttgtgattgttggagtgaaaggataccgtgcacaatcagcaaagggaagtggcacatgggtgacactcagggaaattgagcgtcaacttccaagcatcctttcccagtgg

SEQ ID NO: 9556 - DNA, 528 bp, Homo sapiens
cacccagtcaaagcttctctgttggtttggattaaggagaaaataaatttggagggcatcttgcaagctgccatagtactgaacagataaacctcaaacacctgccataccccacaactccctcctaagtggtcttcctggataattgtcatgctggtcccatgtgacctccacctaagcctcagctgmgtggactggagctcatcccatgacccaagtgcagccaacttccagcagccgatgagacagcctgatgcaacagccttaacatacgaggctatgactctttcctaaaataactgaaaggcagatacgggaagttggttagtcagatgcagaagctgaaagatatctagaaagaaattaggcagcagaagctatgagtagaagccatgaggtagagcaaagacattcaggtaagaaagtggttagtaactgcagaatggcaaaggcagaggcagccaggccctgtggagaggattaacttattcttgagaaggaaaagttaatcttattgatagaagtggg

SEQ ID NO: 9557 - DNA, 576 bp, Homo sapiens
gcccaagggcctcttccatccttgtcaaggggagtgctaaccttctctcctttcatacaatccagctctcttattttgaatctgcgtgtatatacatgttggttgagaccggtgcagagtgattgagactcgggcttgtgggtctggtaggttcgaggactaactccatcgcttgggagcatgtggccttgggcaagttacttaatccactgggaacaggggtatcgtaaccatcagatggggatactgtctgggattcccatcccctatmtgggtctcaatcctctcagtttctgtggtctaacaactatgtgccagggactgggccaggcagaggctggggtatccgttagtaagatgggcacggtccctcgctgcctgctctgatttttgccccagctctgagagcagattaatggtattgtaagtcctcattgtatggttgaagtcgagactcaggggaagagaccctcccagaatctcccagcttgcctcggtaccataggagcaggacccccaggcttccaggtgcagcctcccaggtcggaagccagcaagctggggctgtagaacagg

SEQ ID NO: 9558 - DNA, 1212 bp, Homo sapiens
ttggctcactgcaacctccgcctcccgggttcaagtgattctcctgcatcagcctcctgagtagctgggattacaggcatgcgccaccatgcccagcaaattatgtatttttagtagagacagggtttcaccatgttggtcaggctggtgtcaaactcctgacctcaggtgacctgcccgcctyggcctcccaaagtgctgggattacaggcgtgagccacagccaagagtcccaagttttaatgctgctttgcttgaaatagaccccattatgcgcccttccaccatcctcgggctggggcatttcagagggatacagaggatacagagccccgtgtctcccggtcttgagcccctcctgctctctctaagaattcgcaaccatttggcgttcattcatctccctctctatccactcagatatgaagcggccactgagcccacccccaccggctgagaaggagacccccatatctggagctgctgagtgcctccctcggcccccagaaccacctaagcccaagcgagaaagaaagcggccatcgtacacgctctgtgatgtctgcaacatccagctgaactcggcggcccaggcccaggtgcactgtggggggcgggcccaccagaggcggcttcggcagctcagcttggggaagagcccctcagggccaggtcagtgtagaggggacgctgctcccacaaatttggtttggggagtatctctgtctgggcccctctgaggggctctgggtctgtggcctccctccatgggggtctttgcgtctggggtgccctcaatggggtcttagggtctgaagcccccccgatgccagcaagttttattctgcatctggacaacccttctgtaggacctctcggaatctgtgggtccttaggccgcctcttgggtctttgtttctagggaactctccctgtgggatcttttgggatcaggactcctaagcagcacttctccagcctggagcctcctggtagccacaggctttcagacaagggcctcatctgcggggtgggggtcccaggctccagctcaggtctgtggtctctgaaggccaaggtcagcaaggtacacagcactccaacccagggacaagggggaggcccctcttcctttggactcctggccaggatttctgcttctccctagctggggtgactttgcagaggtttggctatgagcttggaaggggc

SEQ ID NO: 9559 - DNA, 510 bp, Homo sapiens
aacaataatacctacaagtagccrttagataatgcatgtaaaatgcttagcaccattcccagcacataataacccctatattcatgctggctcttgttattatttttatcattatatgcctttcctagatgggtcatcttttaattctacttatgatatctcccactgagtagaacttaaagttttttctgtgaccaaacctaaaaatattttctttatggcttctggatgatgtcttgtataggagagacttccccacaccaacattacaaaaacatcctcttacatctccttctagtatttttgtagttttatttatttatttatttgagatggggtctcactctgccgccgaggctgaagtacagtggcgtgatcgcagctcactgcagccttgacctccccaagctcaggtgatcctcccacctcagtttttgtatttctagtagagacagtttcatcatgttgcacaggctggtctcgaactcctgggctcaagctatatatata

SEQ ID NO: 9560 - DNA, 522 bp, Homo sapiens
tcagtgttgaatctgatgcaagaatcaacatgaatttttgccaaatttgtcccagcagtgggtactaaataatccctgccttccccaccgcttgttgtcatcatatatgaaggtcttattcctaagagtaactgtttttcatccttccctccttgatgtgcaagggcctctgcagatgtccttttttctctctrttccacccaccactacctactcaatttctcctccagcagggtccccagagctatccttggacttccagcaagagttttccatcttaaaagttgtgtgtttttttcttcttcgtttacaatgccagcctatattctggggggcctgagcctccctgagcaattccaaatgggaaacacaacaacagccagtacctgtgggaatgctgcttgcatgcttgaaccaacattgccctcatcaaagctagctccctctagcctggacaatcctcatggtgggaacaaacagcctgcagtcattccagagaagcactccaggctcttagagaca

SEQ ID NO: 9561 - DNA, 522 bp, Homo sapiens
tcagtgttgaatctgatgcaagaatcaacatgaatttttgccaaatttgtcccagcagtgggtactaaataatccctgccttccccaccgcttgttgtcatcatatatgaaggtcttattcctaagagtaactgtttttcatccttccctccttgatgtgcaagggcctctgcagatgtccttttttctctctgttccacccaccactacctactcaatttctcctccagcagggtccccagagctatccttggacttccagcaagagttttccatcttaaaagttgtgtgtttttttcttcttcgtttacaatgccagcctatattctggggggcctgagcmtccctgagcaattccaaatgggaaacacaacaacagccagtacctgtgggaatgctgcttgcatgcttgaaccaacattgccctcatcaaagctagctccctctagcctggacaatcctcatggtgggaacaaacagcctgcagtcattccagagaagcactccaggctcttagagaca

SEQ ID NO: 9562 - DNA, 567 bp, Homo sapiens
agtctcaggaaaaaaaaaaaaaaaaaaagatttaaaacaatgtctccctccctaactcccctattgagttgtagaagcagacacaggtgatgacagccacccataaagcaagacatactatgttggggaaggaggtatgagcccagagttgcttaagtagtcatatcrgtgtttacataaccttgcggataaaattccactttaataaataaaggaaagatctgactctcctttttgaaaaagaaacaggtatataaggaagattttttttttctattttacatatctggttgcctcacaagattttgaaagacattttattttgaattatttatagaatcacaagaagtttctaaaatagtacagacaggtctcatgtacctatcattcagcttctcccaaaggtggcatcttacataactatactacacaataaaacccaggaaattggtattggcagaatcccacacaagattttatacacagtcatgtaggaattatatgtccctgactgtattagtctgttcttgggttgctataaagaaatgccagagactggataattta

SEQ ID NO: 9563 - DNA, 567 bp, Homo sapiens
agtctcaggaaaaaaaaaaaaaaaaaaagatttaaaacaatgtctccctccctaactcccctattgagttgtagaagcagacacaggtgatgacagccacccataaagcaagacatactatgttggggaaggaggtatgagcccagagttgcttaagtagtcatatcagtgtttacataaccttgcggataaaattccactttaataaataaaggaaagatctgactctcctttttgaaaaagaaacagrtatataaggaagattttttttttctattttacatatctggttgcctcacaagattttgaaagacattttattttgaattatttatagaatcacaagaagtttctaaaatagtacagacaggtctcatgtacctatcattcagcttctcccaaaggtggcatcttacataactatactacacaataaaacccaggaaattggtattggcagaatcccacacaagattttatacacagtcatgtaggaattatatgtccctgactgtattagtctgttcttgggttgctataaagaaatgccagagactggataattta

SEQ ID NO: 9564 - DNA, 567 bp, Homo sapiens
agtctcaggaaaaaaaaaaaaaaaaaaagatttaaaacaatgtctccctccctaactcccctattgagttgtagaagcagacacaggtgatgacagccacccataaagcaagacatactatgttggggaaggaggtatgagcccagagttgcttaagtagtcatatcagtgtttacataaccttgcggataaaattccactttaataaataaaggaaagatctgactctcctttttgaaaaagaaacaggtatataaggaagattttttttttctattttacatatctggttgcctcacaagattttgaaagacattttattttgaattatttatagaatcacaagaagtttctaaaatagtacagacaggtctcatgtacctatcattcagcttctcccaaaggtggcatcttacataactatastacacaataaaacccaggaaattggtattggcagaatcccacacaagattttatacacagtcatgtaggaattatatgtccctgactgtattagtctgttcttgggttgctataaagaaatgccagagactggataattta

SEQ ID NO: 9565 - DNA, 534 bp, Homo sapiens
tcctcaaggaacttacagactgataggggagctgagtgctacagaggtggtgatagacggcaggtgcttgggctgcagtggttgacagaggaggctgaagtcaattctgtcagcaatgggaaagagtcaggagaggcatcaaagagaaagtaactcttgagctaagacttgagggtgatttgctgttttaaagaaagacaatcaatgacagcaagttctaaacagagagagctgcttgggcaaatcaatgaaactgcctaggcagatcaggaaatagttaaaagttcacagtggcaggagcatagagcaggagagagtccacaggtgaggttgagagttgtcctgggaccaggttctgaagggtttacagaacaacttaaaaattagactggtcccaagttatggaataaacaraattttctctgtaaggaagtgggataattatatttccaatttaggaaattactttggctgtaataatgaagagcacctcttagaagttaagttgtctgattcacattttctgcttggggt

SEQ ID NO: 9566 - DNA, 522 bp, Homo sapiens
taaacatctgtattaattgatgtaggctaataagagtgctacagcaagagcaaccctcgaacttcagagtttaacacgacaatagtttaattctcattattgctagatgttcattatgggtagagggtggctctgtttcactatgcctggagattgatagaggtggacaaagactcaattattttgcagttgtacaatctgaagtgtataacsttcttggttcacatagtaaggacagagagcttgagggtcttacattagccaataaatattttagcctgaaagtgatatgctcacatttcattggccagaatgtttcatgggcctgatttactgaaagaaacaggaaagtataatccccactggtgtttgaaagaaagatatgttaagtgggcactagaagtctccagcctgtcactttcagatacacagccatgcaccgcataatgaccttttagttaacaacagaccaaatgtatgatggcggtcccataagattacaatattgtattttcactgtgc

SEQ ID NO: 9567 - DNA, 611 bp, Homo sapiens
tcttcttggactgggttgtaataataactgatgaaaattcccaatatgctcattgacaacatgttttcctgtgccatatgtatctcagtgacgttaattgatgatggtggtatgaatttgatatcactagatattgcagatatgagtaaaatacctgttttacaaaactgcctgcatttggaagatgtggttgaggaaggagtttgaagacttaagattaagatgacactcgctcttgacatacagggacagtcccagtttcaaatattccattcagcatttcagatcacttgacagccaacaagatctgatttgaggatcaaaatataaagggaaggtgctttgatggctcttagcagatttttaaccatttattatccactccaggaggcaaacaactgactttatttcccctcaaaaaaatccgtaaaatgttttaaggtgttttccatrcagagacaatccagaaagggactaactctaaaatatgcacatttttctgaaagttggatataatttttacttgcaaaagaacattcaacacataaatggaaaatattcaatataaaaatatcagcttctttagaattgtaattttaattgctaagatg

SEQ ID NO: 9568 - DNA, 533 bp, Homo sapiens
gggtttgctttgctgttgtcgggggcgctggggtgattagcatcatgcagggcatgtgattctgacaccctcttctgtggtgggggtgagaaggcacyggtgccactagtccctgacctgtccctcagacaagttacaaatgaagactgagggggtggagtagctatggaaaccaggagggaaggatttttttttttaatgcaaatgaattagaacaaaatgactggcatccctttttctttttccatctgtgacaaaagttctgtgtcctggtttctaccttcacttggagtaaattatgggggaaagaacatcatgaagacctgctattgtcagagtgtcatttcctctttctatctttctgtggattaattttaaatccatttgatagaattaatcatataagccagtctcatttccctgcaaatgtctgccttcgtgcaggtgattctgtagaaaggagtttctccaataaagcagagcttctctttcaactccatggacatcagagagagtccctttcaaaaaaggag

SEQ ID NO: 9569 - DNA, 533 bp, Homo sapiens
gggtttgctttgctgttgtcgggggcgctggggtgattagcatcatgcagggcatgtgattctgacaccctcttctgtggtgggggtgagaaggcaccggtgccactagtccctgacctgtccctcagacaagttacaaatgaagactgagggggtggagtagctatggaaaccaggagggaaggatttttytttttaatgcaaatgaattagaacaaaatgactggcatccctttttctttttccatctgtgacaaaagttctgtgtcctggtttctaccttcacttggagtaaattatgggggaaagaacatcatgaagacctgctattgtcagagtgtcatttcctctttctatctttctgtggattaattttaaatccatttgatagaattaatcatataagccagtctcatttccctgcaaatgtctgccttcgtgcaggtgattctgtagaaaggagtttctccaataaagcagagcttctctttcaactccatggacatcagagagagtccctttcaaaaaaggag

SEQ ID NO: 9570 - DNA, 533 bp, Homo sapiens
gggtttgctttgctgttgtcgggggcgctggggtgattagcatcatgcagggcatgtgattctgacaccctcttctgtggtgggggtgagaaggcaccggtgccactagtccctgacctgtccctcagacaagttacaaatgaagactgagggggtggagtagctatggaaaccaggagggaaggatttttttttttaatgcaaatgaattagaacaaaatgactggcatccctttttctttttccatctgtgacaaaarttctgtgtcctggtttctaccttcacttggagtaaattatgggggaaagaacatcatgaagacctgctattgtcagagtgtcatttcctctttctatctttctgtggattaattttaaatccatttgatagaattaatcatataagccagtctcatttccctgcaaatgtctgccttcgtgcaggtgattctgtagaaaggagtttctccaataaagcagagcttctctttcaactccatggacatcagagagagtccctttcaaaaaaggag

SEQ ID NO: 9571 - DNA, 501 bp, Homo sapiens
atctcctgacctcgtgatccgcccgcctcggcctcccaaagtgctgggattacaggcgtgagccaccgagcccggcctattgtaggaattattacactcactttgtttcactctgctctaccttctaaatctgaacatgtcctgttctaytgatactttctcctgtcaatagtcatgctagtgatggaagaaccttggccaatatgattagagtctgaaagattctcctgggtgatgtaaaacgagctcataggcagaggggagaacttccttctgtaacacacaggctggcttctgactcacctacaaaaaaagaaaaaaagagagctacttggttccactgtctctttggatctcatgagttgaaagctgaggctgtactccccaacaaacatgagtatttcagttctaagtaggtgactggagaaagatgaaatccactcaatttgaagaacatttaaaaaatatgttttcatgctttggaaaagtttcagtgtgtca

SEQ ID NO: 9572 - DNA, 544 bp, Homo sapiens
ccaacctggacccaacttccatttcaaatacacccaytgaaaaaagcaaggaaataaaaggccgctattccaaaagagatagtgaatggaagccaatttataccccaacaaacgcactcctgaccccaccccaatcccctgcccttgtcactcatccaggaatgtctccattgccatgtaaatgtcatatgtgtaatctatgttaaggggaagagtagaatgatgggaattgaagatggatgactagctaaggagcagagtcaagccccagatgacaccacagtacagggaaacaaacaattcacggctgcgcctgtgcactctctggaggcttcattcacaccttagtccatatgagtagaccctcttgcagttgcgcagtgcatgctctgcatagctgtacccggcagctctgagatagtccaattcacatagagaaaggtcacttctcctgacctcttcagattcttcagctgagggtggaagttggactcaggaattttcttagaaagatggaaatgcaaccataaaaagaaaaagagga

SEQ ID NO: 9573 - DNA, 544 bp, Homo sapiens
ccaacctggacccaacttccatttcaaatacacccattgaaaaaagcaaggaaataaaaggccgctattccaaaagagatagtgaatggaagccaatttataccccaacaaacgcactcctgaccccaccccaatcccctgcccttgtcactcatccaggaatgtctccattgccatgtaaatgtcatatgtgtaatctatgttaaggggaagagtagaatgatgggaattgaagatggatgactagctaaggagcagagtcaagccccaratgacaccacagtacagggaaacaaacaattcacggctgcgcctgtgcactctctggaggcttcattcacaccttagtccatatgagtagaccctcttgcagttgcgcagtgcatgctctgcatagctgtacccggcagctctgagatagtccaattcacatagagaaaggtcacttctcctgacctcttcagattcttcagctgagggtggaagttggactcaggaattttcttagaaagatggaaatgcaaccataaaaagaaaaagagga

SEQ ID NO: 9574 - DNA, 544 bp, Homo sapiens
ccaacctggacccaacttccatttcaaatacacccattgaaaaaagcaaggaaataaaaggccgctattccaaaagagatagtgaatggaagccaatttataccccaacaaacgcactcctgaccccaccccaatcccctgcccttgtcactcatccaggaatgtctccattgccatgtaaatgtcatatgtgtaatctatgttaaggggaagagtagaatgatgggaattgaagatggatgactagctaaggagcagagtcaagccccagatgacaccacagtacagggaaacaaacaattcacggctgcgcctgtgcactctctggaggcttcattcacaccttagtccatatgagtagaccctcttgcagttgcgcagtgcatgctctgcatagctgtacccggcagctctgagatrgtccaattcacatagagaaaggtcacttctcctgacctcttcagattcttcagctgagggtggaagttggactcaggaattttcttagaaagatggaaatgcaaccataaaaagaaaaagagga

SEQ ID NO: 9575 - DNA, 554 bp, Homo sapiens
tgtcagttgcagaggaagtgaatcctaattaatatgcctctcactcccaaaattactacggacaaaacattcaaagtcttatgtacaattatggagggcccatgctgggctgaattatgtcctcctaaaattcttatgtcctcccagaattcccagtatctctgaatgtgactgtatttagagataggttctttaaagaggtaattaagttaaaaatggggttattaggatgggctctgatccaatatgattggtatccttataagaagaggaaattaggacacagatataggcacaaaggaaagaccatgtgaagacacagggagaagatggccagagaagagaggcctcagaagaaaccaatcctgctgatgtcttcatctcagacttctagccttccaaaagtgtgaaaaataaacatctgttgtttaaaggcatccagtcaatggtattttgttatggcagccttagcaaactaatacagccaccaagctcatccatgtattatcagaccattttataatacaggaaagtggagctcaaaraggtgtgtg

SEQ ID NO: 9576 - DNA, 547 bp, Homo sapiens
agtgaactaacaaacagccccgtgatgtatctttcaccaccccatttttcaaatgatcaaatggaggctctgagaaggtgaggctctgccgctgttcatctccagttcaggcctcctcgcttctgtcctggccattttgagcagcccccctggcctccacccagcccccttccggcctgccgtccatggctgctgagtggaccttcccaacacagatgcaacggtgctacttctctgcttaatacaagagtgtcctgtcgcctaggctgcaggggagtcaacatcctcagaatgatgaaccaagttcaagtccaaggggactaaaataaggggaggggagagatacggcaggaagacaggctaaggggccaacgagtgtgctctctgtcctgagggcagtgggcagtgtgggagggaacgtgatcacatgcacgttttcaagcctccctctgtgtccaccccaccatytgttcctacagaagcatctatcaggccgggcgcagtagctctggtctgtaatcccagcacttttgagaggccgaggcag

SEQ ID NO: 9577 - DNA, 547 bp, Homo sapiens
gctggagtgcagtggcgcgatstcagctcactgcaagctcttcctcccgggttcacgccattctcttgcctcagcctcctgagtagctgggactacaggcgcctgccaccacgcctggctaattttttgtatttttaatagagatgggatttcaccgtgttagccaggatggtttcaatctcccaacctcatgatccaccggcctcggcctcccaaagtgctgggattacaggtgtgagccaccgcgcccagtgactagtctttaaaaaaatgaataatataaatttttttaaaagatgaaaacatatatataccctgtaacccaagagtcccactcctcagaatcttctcaaaccacactcttacccatgtgcaccagaatacccacacagcaccagaaaatgtccaaatgaccatcaaaagtggagagtacaaataaattgtgcagtgttcctggagtgaaatgaactacagcgacttgcaataactgtaatattgtcatattggataataatactgtaataacaaatgactcatcaatgaataa

SEQ ID NO: 9578 - DNA, 547 bp, Homo sapiens
gctggagtgcagtggcgcgatgtcagctcactgcaagctctkcctcccgggttcacgccattctcttgcctcagcctcctgagtagctgggactacaggcgcctgccaccacgcctggctaattttttgtatttttaatagagatgggatttcaccgtgttagccaggatggtttcaatctcccaacctcatgatccaccggcctcggcctcccaaagtgctgggattacaggtgtgagccaccgcgcccagtgactagtctttaaaaaaatgaataatataaatttttttaaaagatgaaaacatatatataccctgtaacccaagagtcccactcctcagaatcttctcaaaccacactcttacccatgtgcaccagaatacccacacagcaccagaaaatgtccaaatgaccatcaaaagtggagagtacaaataaattgtgcagtgttcctggagtgaaatgaactacagcgacttgcaataactgtaatattgtcatattggataataatactgtaataacaaatgactcatcaatgaataa

SEQ ID NO: 9579 - DNA, 547 bp, Homo sapiens
gctggagtgcagtggcgcgatgtcagctcactgcaagctcttcctcccgggttcacgccattctcttgcctcagcctcctgagtagctgggactacaggcgcctgccaccacgcctggctaattttttgtatttttaatagagatgggatttcaccgtgttagccaggatggtttcaatctcccaacctcatgatccaccggcctcggcctcccaaagtgctgggattacaggtgtgagccaccgcgcccagygactagtctttaaaaaaatgaataatataaatttttttaaaagatgaaaacatatatataccctgtaacccaagagtcccactcctcagaatcttctcaaaccacactcttacccatgtgcaccagaatacccacacagcaccagaaaatgtccaaatgaccatcaaaagtggagagtacaaataaattgtgcagtgttcctggagtgaaatgaactacagcgacttgcaataactgtaatattgtcatattggataataatactgtaataacaaatgactcatcaatgaataa

SEQ ID NO: 9580 - DNA, 845 bp, Homo sapiens
tgaagagcttccctgaatttcagtacctttcaaggcctctcttgaaagaatgtggaattaatttgggtggaggcttgtgcatggacttttttctgagtgtatttggccagtgggccaatggggaagcagaggcatggacagagagaggaatgcggcagaaggagaagctggggttgcaggatgccatttgctgtttgtacggcttcccatggcccactgtagtggctagagggcactgccaggaatccttcatgtggctgttgcttgctgttggggaacatgattcagagctgtgtagctccatgtccagttccactctgcatctcactcacaaagctctagcgttgggctgctgggttttggtgaaagcaggtgctatgaatatattgaaggacaaatcagtccctaagggacttcgatagacgcagtcctaaaaacatttccgggctggtttcttttttttaaacaccagttaaccgttttcagtttaactgtgttttccttcctgaaacctttaagtgagactaattggtatgattttttttttgtatgctttgtttttagggagtttctcaacttgtcaagtctgcgttgcagacagagatgaaatgatttttttttcccacacagaccaagcatgcagaaatgggaatgatttaagtttgtctttaatttaatttmtatatctttcttttcctttccttgggaaatagaggaaatacttgggggcattttcaccaaattgtaacttgtaacttcacaagagcccgtcagcaggaatttctatgcgtgttttaatgcctggttgggggagacatgaaatgacaacagacagttgccctcaa

SEQ ID NO: 9581 - DNA, 519 bp, Homo sapiens
cacacacacacacacacacacacacactcttgttgaatgaattgtcctaaatttgaattaagactgtgagcaacttgatctctttggaaatttgagtcattcttagaaattggttccaggttgaatattgtaaaaccaaatttcaaaaaatctggtaatttttctaccaggaaaaactagtttcctttttaagcttgatcatttttttctgtagacataccccttcaggccatctgatcatttttcttttatttccctcttagtatttctactccatttaattaaagacaaatgaaacataccgctacaacttcaccyccaatacaaaggatggataaacttctgttttatttcttgcatgtcaaatcaatatttggggtcctaatcattttaagaattctcctgtgatttgctcctgctttctcttcatcttatatgtgtgtgggcatgtgtgtgtgctcagtgaggcttagaattaaagactctattctacacaatgcatccactctatcaagagcc

SEQ ID NO: 9582 - DNA, 508 bp, Homo sapiens
cttttggaattttatcaaactgccaaagtgaacagcaacctggggtcaggtccagcagggactgctgcccctcccagtgacagcgtgttgccctcacccgccaccgctcaggccagctgcttcctctgcctcactgaccacccgcccagtccctacgtccctggaccagcccctccacgcatcaggctcttaccttcgcctcccgcgcagtcagaggaggcagctccgtctcactgtaaggcaacccaggcagagctgaggaactgcacggggcctgsagcggccccagcctgggtgccgacccccagaaaggactggctctgtccctttccagctcagggctcagcccaggagaaggcacagggaagggaggacaagggccttcctgtggggctgactcccaggaggggcaggacctgggagaagaaggagtgtagggacagcctggccggggttactggggcccctggcgtggggggcggtcaggctgcccagtggggctgcccgt

SEQ ID NO: 9583 - DNA, 879 bp, Homo sapiens
tcactgtacaatccccaaatgatcgacgttgttgttgtagcttcgaaaaggcttaggccccttgtcctctggcagcccagctcggtgtccctgtagcccagagggagccttggtgaggggtccaaggtaaagggttgcaagggcctgggggcattggccacccgtccctgccctgtgctcctagggagcccaggaccctttgaccagggcacactggaagaggcctccctccaagaagcagaccgacttgtaccttttcgtatttcataatgatgtcctctcgctcttgtgcccaccaactacccgcgacctctaccacgtccatcctgtgagacagaattgtctaaargtcacactgtacgcggcggcttcggagaacacctgaaccgctctcgccgggctcccagatgctggctggctgcgtaacccccattccaccgccgcccccagggaaaaaggggccagacccagtggcccacagctgctccagtctctggagtctcaagtcccaagcaggggtgggcatcttcccaaggacttgagtacagtgggacctagacagagaatcctgttgtcccccaatgccatgaaatggggacacaccggccccagcaggttgaatggtttccacctgccaagggtgaagggcccatgatgggctattccagggatgtggaggcagactggggtcagcgaccagaggtctctgtgcaatcggcctcctgggatgctcagggcctcagcgatgcccagtttcctacagggaacaagatctctcccgactgctcggttctactccgctcatcactttggctaccgtggctcttcagtctgaacagtgaagccactttaggaataacgcctgttgagcaggagggt

SEQ ID NO: 9584 - DNA, 539 bp, Homo sapiens
ttttatttgtgagtccctttccccaagttaaatttcttttttgctctttatattctctctattatttcatctacttttatgatttcaccccaactcgtatgctgatgatttctaaaatttaccttgattttcagatttctgtattcaactgccactggatatcttttattagaataaaagcataatattatcccattatttcttagtctcatgtgaaatcataattatcatcattgagtaaataccaagagagaggaaatacaaggaagtaatagcttcaaawcctattagtatataaaatgatgtacactaggggttaggaacccctactatgtgcttttctaataacctaaatagccactcagaggagatggggcgtataaattaactcttctccccttggtcccttattgatctagttatgccaggtaattaaattcagcattaatagaataggccttgggtggtatgcttaactgatttcccatctcctcctctctatgttgtcctagtcgtgtagggcccatctaaattagtag

SEQ ID NO: 9585 - DNA, 567 bp, Homo sapiens
aaaatattttggcaaaatagtcccaagaagaagtagaaaatctgaacaaataaattaacacaaaagaaaaattaatgccaagttctgccaccaccaaatgacatgttctactatgtcttcaaaaagacagattattcttgtcttatataaactattacagaacaggaaaaatggtgagaaatgatccaattcatttttttaaaaaggtagcataacattggtagcaatgccagactagaacagaaagagaaaagaaaatcattgatcaagcttaacgtacccagaaatcctaaatagtagcaaatcaaatccagcagtgaacttaaagaacgacagtgacaagtgcaaggatggcacttttctctggtagatgatgccatgaacaaaattaaacaaaaatgccaaactgtgaaaaaatattttcaacatayataatagtgtctagaatatattttttaaaacttgtgtaaaccattgacagagaagaaactaacctaataaaatgagtacaacatctaactagggattttcacaatagagggactacaaatggacaataatacaaaa

SEQ ID NO: 9586 - DNA, 280 bp, Homo sapiens
cctcccaccctgtgtgtatacacactgatagctcctgtttgcttttaatttgcctctccaaatgtatctgtacaaatgcctgggaaatgctttttggggggagaaggaggcagtatattactaaattaacaataataatagataagaatgtatgaatttcatatctatattgaaaaaagagttatggaaaaacctcttgttttaggtggaaggaaaacaaatkgtgtgtgtgtctgtaagagagaggggagaaagattgcatacacatgtgtttttagga

SEQ ID NO: 9587 - DNA, 547 bp, Homo sapiens
tgtggctcagtgtcccctcctcagagcccatccytgattactcatcactcgctatcatatcacactattttcgtagataattttcttgttcacttgttcatctgtcacccctgccctcagaatgtgagctgctttgttctctactatgcccccagctcctagtgcaatatctggcatataatagatactcaatgtatactagttgaatgactaaaagtagattagccttaagtaggaagagggggatctcttcctctgagatttgaaagagaaaaagatggaggcagacacaactaagtgtgcccttaagttgctggtgctttggagatccctctctggtcatctaccaagagagagagcttgcagggagaggcttgaagaaagcagctgtaaactgttccttagggaaacaggagagttgctgacccaaaacatacattaggattgactagctgtggtaagaacccatctgacactggaaccataaattcacagtgccaaatatccactcattgacaagacatgaacactcaactatttgggtaag

SEQ ID NO: 9588 - DNA, 547 bp, Homo sapiens
tgtggctcagtgtcccctcctcagagcccatccttgattactcatcactcgctatcatatcacactattttcrtagataattttcttgttcacttgttcatctgtcacccctgccctcagaatgtgagctgctttgttctctactatgcccccagctcctagtgcaatatctggcatataatagatactcaatgtatactagttgaatgactaaaagtagattagccttaagtaggaagagggggatctcttcctctgagatttgaaagagaaaaagatggaggcagacacaactaagtgtgcccttaagttgctggtgctttggagatccctctctggtcatctaccaagagagagagcttgcagggagaggcttgaagaaagcagctgtaaactgttccttagggaaacaggagagttgctgacccaaaacatacattaggattgactagctgtggtaagaacccatctgacactggaaccataaattcacagtgccaaatatccactcattgacaagacatgaacactcaactatttgggtaag

SEQ ID NO: 9589 - DNA, 547 bp, Homo sapiens
tgtggctcagtgtcccctcctcagagcccatccttgattactcatcactcgctatcatatcacactattttcgtagataattttcttgttcacttgttcatctgtcacccctgccctcagaatgtgagctgctttgttctctactatgcccccagctcctagtgcaatatctggcatataatagatactcaatgtatactagttgaatgactaaaagtagattagccttaagtaggaagagggggatctcttcctctgagatttgaaagagaaaaagatggaggcagacacaactaagtgtgcccttaagttgctggtgctttggagatccctctctggtcatctaccaagagagagagmttgcagggagaggcttgaagaaagcagctgtaaactgttccttagggaaacaggagagttgctgacccaaaacatacattaggattgactagctgtggtaagaacccatctgacactggaaccataaattcacagtgccaaatatccactcattgacaagacatgaacactcaactatttgggtaag

SEQ ID NO: 9590 - DNA, 542 bp, Homo sapiens
tgcccttctggtcttagtttaaagtgctgactggccaaggagaggatagccaactctatcartgtgataagttcctttttcagccaccctaatgatagctcctgcctctcagcccctctgattcctcctccattcaggtgccggtatgacctatccaaacgaagtcaatcatatccctctcacataaaacccttcaatggatcctcaagaccaatgaaataaagtgctaaccctctgtggcctggcccactgcctgcctcacttggggtctcttctctcactatcttttattttctttatcagcaacaccagatccttgtagttcctatcactcacaatgctgcttcctaactccaggttgctcatgtgtttccttctgctgagaacagccccattcactgtttgatcattttagactcaactgagagagtgtcccctccaccataaagccttccctggctactcctacacaagcatacagccaactcccccaaccctggggcttcaccttggaactcccatgatacccaatgcaagcccct

SEQ ID NO: 9591 - DNA, 776 bp, Homo sapiens
cctaaaatcaccatgttgagaaccagtgacctaatgtgcactgaattaaccttgaaaatacatgtgtttaagagaaactcacagaaacctcagcactcattcagcaccactcattcagccactcatggagccactcccgtgtgccagggcaggacaaggagactctaggtgagatcacagctgtatcccaccccctggcccatagcgagactgtcctctttggcttccttgccaccagcctgccgcctgccacctgccacagcctctccatcatccacacagtttctataaagagatctgaactatcacttatctctttaagaccctcaacagccttagaggataaaatcccaatgcccgttagcatactcgagacccttcaccatctggcctcagtcacctgcgtagccccctctaccccagtctccgactgaatggtctagtccccttcaccttctctgtctgtgccctaaatgggatcatgcctcctctaccctgaccacacccttgtctccacccctgccttggctccaattgctcactttttttttttttttgagacggagtctcgctctgtcacccaggctggagtgcagtggcatgatctcggctgactgcaagctccgccgcccgggttcacgccattctcctgcctcagcctctccragtagctgggactacaggcgcccgccaccacgcccggttacttttttgtatttttagtagagacggggtttcaccgtggtctcgatctcctgacctcgtgatctgcccgc

SEQ ID NO: 9592 - DNA, 728 bp, Homo sapiens
ttataaaattataaagcctttctcaacaaatagtctggtttgtagtgtagagactccattttcataaagattagtgatatatacccatagtctttacttctaatttatttaccagcgtatttccttatctgtccttcctctagcaactacatttcggcataattattgagagatattttttacacgaattttaaattacctagattccactagagtgctatatagtaagttgaataatggcaccagagatataaagcctattgtccagaacatgtaaatattactttatgtggcaaatatattgcagatatgattaagaattttgagactgagatgttatcctgattatctgagtggccttaaatgcaatcacatgtatatttataagagggcggaagaggcagctttgaccacacagagaaggcaacaggagaaaatagaactgagagaggtttgaagatacgaaccttgaaaattggatgatgtgccagatgataaaccaaagaattctagtagccattacaagctggaagaggcaarggacacattctccactagagcttctaaaaggagtgtggtccctttgataagtcaattttggccaagtgatactgttttagacttctggcctccagaaatatgacagaataaatttttgttgttttaagccaccaagttttggtaatctgttacagcagtcataggaatctaatataggtaccatgcat

SEQ ID NO: 9593 - DNA, 728 bp, Homo sapiens
ttataaaattataaagcctttctcaacaaatagtctggtttgtagtgtagagactccattttcataaagattagtgatatatacccatagtctttacttctaatttatttaccagcgtatttccttatctgtccttcctctagcaactacatttcggcataattattgagagatattttttacacgaattttaaattacctagattccactagagtgctatatagtaagttgaataatggcaccagagatataaagcctattgtccagaacatgtaaatattactttatgtggcaaatatattgcagatatgattaagaattttgagactgagatgttatcctgattatctgagtggccttaaatgcaatcacatgtatatttataagagggcggaagaggcagctttgaccacacagagaaggcaacaggagaaaatagaactgagagaggtttgaagatacgaaccttgaaaattggatgatgtgccagatgataaaccaaagaattctagtagccattacaagctggaagaggcaaaggacacattctccactagagcttctaaaaggagtgyggtccctttgataagtcaattttggccaagtgatactgttttagacttctggcctccagaaatatgacagaataaatttttgttgttttaagccaccaagttttggtaatctgttacagcagtcataggaatctaatataggtaccatgcat

SEQ ID NO: 9594 - DNA, 518 bp, Homo sapiens
gagaaggaccatttctagaaattctctagtaataaggcatggtatcagcatactgggactcgtgctctgctaaaagcacaaagcctgcgggagctcagcatggccacagtaatgtcyattcccttcctatctgttgtccataatttttaaaaaaataaatgctatttgggaaccaatgtataaagttcatattgtagaatgtattaaatggattaaaatgcagaaacaaaattcatccgtggaactctgtgtcctcacatatttattcatacaaaatttagaatcatttttgtcacattaaaaatttacattacgtttgtaacaatgtcaaatttatagattaatctagtgggaggtggcttaggaatcccaagcatatcattctaaaatacatcaagtggtcttttaaaacactcagtacactttataaatatattccattatgtcctgcatatcaattatcttctgctaggtggtttctattacttggtaactacactcaatgaaatctttttaaa

SEQ ID NO: 9595 - DNA, 518 bp, Homo sapiens
gagaaggaccatttctagaaattctctagtaataaggcatggtatcagcatactgggactcgtgctctgctaaaagcacaaagcctgcgggagctcagcatggccacagtaatgtccattcccttcctatctgttgtccataatttttaaaaaaataaatgctatttgggwaccaatgtataaagttcatattgtagaatgtattaaatggattaaaatgcagaaacaaaattcatccgtggaactctgtgtcctcacatatttattcatacaaaatttagaatcatttttgtcacattaaaaatttacattacgtttgtaacaatgtcaaatttatagattaatctagtgggaggtggcttaggaatcccaagcatatcattctaaaatacatcaagtggtcttttaaaacactcagtacactttataaatatattccattatgtcctgcatatcaattatcttctgctaggtggtttctattacttggtaactacactcaatgaaatctttttaaa

SEQ ID NO: 9596 - DNA, 518 bp, Homo sapiens
gagaaggaccatttctagaaattctctagtaataaggcatggtatcagcatactgggactcgtgctctgctaaaagcacaaagcctgcgggagctcagcatggccacagtaatgtccattcccttcctatctgttgtccataatttttaaaaaaataaatgctatttgggaaccaatgtataaagttcatattgtagaatgtattaaatggattaaaatgcagaaacaaaattcatccgtggaactctgtgtcctcacatatttattyatacaaaatttagaatcatttttgtcacattaaaaatttacattacgtttgtaacaatgtcaaatttatagattaatctagtgggaggtggcttaggaatcccaagcatatcattctaaaatacatcaagtggtcttttaaaacactcagtacactttataaatatattccattatgtcctgcatatcaattatcttctgctaggtggtttctattacttggtaactacactcaatgaaatctttttaaa

SEQ ID NO: 9597 - DNA, 573 bp, Homo sapiens
atggccttcatcgtgtagatgttaaataaacaatcacaaaaatatgattgtaacctttaatagtaaagtaaaaaaattctatagtggcaagtgtggtggctcacacctgtaaacccagcactttgggagcccaaggcaggcagatcacctgagctcgggagttcgagaccaacctgaccaacatggagaaaccccatctctactaaaaataccaaattagccaggcrtggtgctgcatgactgtaatcccagttactcgggaggctgaggcaggagaatcacttgaatccaggaggcgaagcttgcggtgagccaagatcgtgccattgcactccagcctgggcaacaagggtgaaactccgtcaaaaaaaaaaaaattagtgacaaggaacaaacgaatctgacttgataatttaggaaaggcttcactgagttgagatgacatgtgaagaatgagtagaaagtaattggtttggaggtgagaaggcagggtgggtaaagattctaaagcgtgaggggcataaactcctaaaagcagcaccagaagattttagttaaaaaaggtggtcagca

SEQ ID NO: 9598 - DNA, 573 bp, Homo sapiens
atggccttcatcgtgtagatgttaaataaacaatcacaaaaatatgattgtaacctttaatagtaaagtaaaaaaattctatagtggcaagtgtggtggctcacacctgtaaacccagcactttgggagcccaaggcaggcagatcacctgagctcgggagttcgagaccaacctgaccaacatggagaaaccccatctctactaaaaataccaaattagccaggcatggtgctgcatgactgtaatcccagttactcgggaggctgaggcaggagaatcacttgaatccaggaggcgaagcttgcggtgagccaagatcgtgccattgcactccagcctgggcaacaagggtgaaactccgtcaaaaaaaaaaaaattagtgacaaggaacaaacgaatytgacttgataatttaggaaaggcttcactgagttgagatgacatgtgaagaatgagtagaaagtaattggtttggaggtgagaaggcagggtgggtaaagattctaaagcgtgaggggcataaactcctaaaagcagcaccagaagattttagttaaaaaaggtggtcagca

SEQ ID NO: 9599 - DNA, 553 bp, Homo sapiens
atctacrgaataacacccattttttggaggacaattaatgtgatgaagggaatgcagcgaaagtatattatctaaagtgatatttttttcaattaaatggctcatgaatctaatttgttcataccaatatgtaatggctgctggagaaataaactgtaaactatgtttgaatggtatcaggctggattaccctgctacctccctgtcctctagttttcttgggctgactttattttaaaatccaaaaagagtatagtgacatccatactacctacctggaggagcccactggtgctctcgttaatatgtttgctaattcctgggtaatggggagaagaggttaccttctgtattagtccattcccacactgctaatgaagacatacccaagactggataatttataaaggaaagaggtttaattgacttacagttcagcatggctgggaggcctcaggaaacttacaatcacgatggaaggtgaaggggaagcaaggcaccttcttcataaggtggcagaaaggagaagtgccaagtgaagggggaagagccc

SEQ ID NO: 9600 - DNA, 1835 bp, Homo sapiens
gaattggacctttttctttagatttgctatacttttcattttagaaaaatattttaggctggctacagtgactcacacctgtaatcccaacacttttggaggttggggactgagcaaaagacaagccggccaacatggcaaaaccgtgtctctccaaaaaatacaaaaaattggccaggcgtggtggctcacgcttgtaatgtcagcactttgggaggctgaggtgggcggatcagaaggtcaggagatcgagaccatcctggctaacacagtgaaaccccgtctccactaaaaaatacaaaaaattagccagacgtggtggcaggcgcctgtagtgccagctacttgggaggctgaggcaggagaatagcttgcaccacccgggaggcggagcttgcagtgarctgagattgcaccactgcactccagcttgggccacagagtgagactccatctaaaaaataaaaataaataaataaataaattagctggacatggtactgcatgcatgtagtcccagctgctcaggaggctgaggtggggaggctcacttgagcccaggaagttgaaactgcagtgagcgatgatcgcgtcactgcactccagccagggcgacagagtgagaccccatctcaaaaaatatatatattttttagagaaataaaattcactgagttgcccctgagttgcccaggctgaactcctgggtgtaagcaatactcctactttatccttccaagtagctgggattacaagactgtgccactgtgcctagctttgatttgttttttttgttttttgttttttgttttgagacagagttttcactcttgttgcccaggctggagtgcagtggcgtgatcgcggctcactgcaacctctgcctcctgggttcaagcaattctcctgcctcagcctcccaagtagctgggattaccggcatgcgccaccaggcctggctaattttttttgtatttttagtagagatggagtttcaccatgttggccaggctggtcttgaattcctgtcctcaggtgatcctcctgtcttggcctcccaaagtgctgggattacaggtgtgagccaaggtgcccgacttgatttggctttatcttctcaatagtaaaagatttatgtgcttctgaagtgaaaacccataacactgtggatttagagagggcacatttccagcccagttcctgatacttgctgggttgtcgattttcaattttggtgtatctttccagtgtttctcatggcagatttaagcaaatatgtgtgtttacgttccacaggtcttatataaaaggtgtatgtcatgcagtgtatgtggcacggagcacgtgtttctatcctttctccttccttgtgttcactccacaatatgttgtgaggcacttgtgcaagatttccacatgtcaagcaagtgtggaaattctatgaagcttttaactttttgaggtggggtctcactctgtcgcccaagctggagtgcagtggagtggtcacagctcattgcagcattgatctcccaggctcaagcctcagcctcccactttgaggccactggcgtgtgctaccacaccagggtaatgtttgtttgtttgtttgttttgtagagatggtgtcttactatgttgcccaggctggtcttaaactcctggcctcaagggaccctcctgccttggcttcccaaaatgttggaataatagatgtgagcctccacgattggcctctatggagttttttaaggtttctgttttcttatctgtaaactggatgtgttagtagtacctgcctctgggtggttgggagaaatcaaggcgataatgca

SEQ ID NO: 9601 - DNA, 485 bp, Homo sapiens
ggctcacgcctgtaatcctagcacttcgggaggccaaggtgggcagatcacctgaggtggggagtttgagaccagcccgaccaacatggagaaaccccgtctccactaaaaatacaaaaatagccaggcatggtggcatatgcctrcaatcccagctactcgggaggctgaggcaggagctcacgctattgcactccagcctgggtgataaagcaaaactccatctcaaaaaaacaaaaacaaacaaacaaacaatggtcagaatgactcagattccaagggtctcttggtggaaaagtgtttttttttttttttaagacagagtctcacggccacccaggctggagtgcaatggcgtaatcttagctcactgcaacctccgcctcctgggtcaagcgattctcaggcctcagcctcctgagtagctgggattataggcacctgaaaccacacatggctaaattttgttttgtatttttagtaga

SEQ ID NO: 9602 - DNA, 485 bp, Homo sapiens
ggctcacgcctgtaatcctagcacttcgggaggccaaggtgggcagatcacctgaggtggggagtttgagaccagcccgaccaacatggagaaaccccgtctccactaaaaatacaaaaatagccaggcatggtggcatatgcctgcaatcccagctactcgggaggctgaggcaggagctcacgctattgcactccagcctgggygataaagcaaaactccatctcaaaaaaacaaaaacaaacaaacaaacaatggtcagaatgactcagattccaagggtctcttggtggaaaagtgtttttttttttttttaagacagagtctcacggccacccaggctggagtgcaatggcgtaatcttagctcactgcaacctccgcctcctgggtcaagcgattctcaggcctcagcctcctgagtagctgggattataggcacctgaaaccacacatggctaaattttgttttgtatttttagtaga

SEQ ID NO: 9603 - DNA, 485 bp, Homo sapiens
ggctcacgcctgtaatcctagcacttcgggaggccaaggtgggcagatcacctgaggtggggagtttgagaccagcccgaccaacatggagaaaccccgtctccactaaaaatacaaaaatagccaggcatggtggcatatgcctgcaatcccagctactcgggaggctgaggcaggagctcacgctattgcactccagcctgggtrataaagcaaaactccatctcaaaaaaacaaaaacaaacaaacaaacaatggtcagaatgactcagattccaagggtctcttggtggaaaagtgtttttttttttttttaagacagagtctcacggccacccaggctggagtgcaatggcgtaatcttagctcactgcaacctccgcctcctgggtcaagcgattctcaggcctcagcctcctgagtagctgggattataggcacctgaaaccacacatggctaaattttgttttgtatttttagtaga

SEQ ID NO: 9604 - DNA, 485 bp, Homo sapiens
ggctcacgcctgtaatcctagcacttcgggaggccaaggtgggcagatcacctgaggtggggagtttgagaccagcccgaccaacatggagaaaccccgtctccactaaaaatacaaaaatagccaggcatggtggcatatgcctgcaatcccagctactcgggaggctgaggcaggagctcacgctattgcactccagcctgggtgayaaagcaaaactccatctcaaaaaaacaaaaacaaacaaacaaacaatggtcagaatgactcagattccaagggtctcttggtggaaaagtgtttttttttttttttaagacagagtctcacggccacccaggctggagtgcaatggcgtaatcttagctcactgcaacctccgcctcctgggtcaagcgattctcaggcctcagcctcctgagtagctgggattataggcacctgaaaccacacatggctaaattttgttttgtatttttagtaga

SEQ ID NO: 9605 - DNA, 485 bp, Homo sapiens
ggctcacgcctgtaatcctagcacttcgggaggccaaggtgggcagatcacctgaggtggggagtttgagaccagcccgaccaacatggagaaaccccgtctccactaaaaatacaaaaatagccaggcatggtggcatatgcctgcaatcccagctactcgggaggctgaggcaggagctcacgctattgcactccagcctgggtgataaagcaaaactccatctcaaaaaaacaaaaacaaacaaacaaacaatggtcagaatgactcagattccaagggtctcttggtggaaaagtgtttttttttttttttaagacagagtckcacggccacccaggctggagtgcaatggcgtaatcttagctcactgcaacctccgcctcctgggtcaagcgattctcaggcctcagcctcctgagtagctgggattataggcacctgaaaccacacatggctaaattttgttttgtatttttagtaga

SEQ ID NO: 9606 - DNA, 637 bp, Homo sapiens
tatgtattttagaatttataaaaaggttatatcagtatataatgttttgagactwttattactcaatgttattaagattttagttttatgacttcaatattttagatgttattaaatattaaaaataggctatctttcacccttttaaaaggaaatgattgaaaactatgtccattggaatgaagacataggagaatggcagctagtgagtattaccttcattctttcacgtaataattaaagagtacttcctatggtctagaaattgtgctggctacagtggggaggaacatggtccagtagatgaatcagatgagaatccagtagggcagataaaatatttttctaattccatgtaattaattgtaacatacagatcatggtctgggtggaaatggtcagagttaggggctatgtgggactaagtgacctctggggccctttctgctctagcattcaaatcatgttttactagtgtaatgttaggatttctcagttatttgcctaactcacagtattgattactaattaagacatttctctgtctctcccttttctttttttgagaaatgtgttgcttatacaggaaataacatgaggaagcaaaccccagtacctgataaaaaggagaaagatg

SEQ ID NO: 9607 - DNA, 637 bp, Homo sapiens
tatgtattttagaatttataaaaaggttatatcagtatataatgttttgagacttttattactcaatgttattaagattttagttttatgacttcaatattttagatgttattaaatattaaaaataggctatctttcacccttttaaaaggaaatgattgaaaactatgtccattggaatgaagacataggagaatggcagctagtgagtattaccttcattctttcacgtaataattaaagagtacttcctatggtctagaaattgtgctggctacagtggggaggaacrtggtccagtagatgaatcagatgagaatccagtagggcagataaaatatttttctaattccatgtaattaattgtaacatacagatcatggtctgggtggaaatggtcagagttaggggctatgtgggactaagtgacctctggggccctttctgctctagcattcaaatcatgttttactagtgtaatgttaggatttctcagttatttgcctaactcacagtattgattactaattaagacatttctctgtctctcccttttctttttttgagaaatgtgttgcttatacaggaaataacatgaggaagcaaaccccagtacctgataaaaaggagaaagatg

SEQ ID NO: 9608 - DNA, 644 bp, Homo sapiens
gaggtggacctttctcacgtgtatcttgcctatactgaggagagtctgcgtcagtctttgatgaaactagaaagaccacgaacttcaaaggggaaagcaaggccaaagacagggagaaggtaaggactgtccttgaatctggtaaaacgaaggcattgaggtattctaattagatacatgtacaggaagttaaaatttatttagttaaaacatgatacatattttggctgatttattaaaaatcaaattcctggctgggcacagtggctcacgcctgtaatcccagcattttgggaggccgaggcaggtggatcatttgaggtcaggagtttgagaccagcctggctaacatagtgaaacgctgtctctactaaaaatacaaaagttaaccaggcatggtggcgcatgcctgtaatcccagctactggggaggctgaggcatgagaatcgcttgaacccaggagccggaggttgcagttagccgagatcatgagatcatgccactgaacttcagcctgggtgacagascaagacttggtctcaaaaaaaaaaaaaaaaaatcaaattccttatgtattagaatttgagtaaataaaatctggccaaagaattaaggtcttccaacttcttaggcttctgagtaa

SEQ ID NO: 9609 - DNA, 607 bp, Homo sapiens
ataaaatacccatgacataagtatttcctgttgtgtttttggcttcacaaatacagtatgggtttatatatctatcaattatatcaacttaaagtgtagattatggaaaaacctacatttattatcaccatccaacagttcccatrtttcctcatgatcctgttacctataagcatcaaaatgcaaagctggcttccacctgtggaaagtcgtccctgagagtcattattttccttttaacattgacatcatacactttgacctaaattaggaattaaaacactatcagagcaatcgttaaaattttataaggtaaacttcagttctttcttcggaggatcagaaatactcatgtagcctccatctaaggaatccaaggtgcaggaagcggaatgacgtaccagacatgacacagcaataagtggaagggttttgatgaggatcagtgcttctctgagtaaggtgaggctgaagaattgaggagtctctgccagccccaattaactcacttctttgaattctactgatggagattgttctgggaatatctgagataaaatttatctttgcaataactgttatttttaaggaaaatttcatgaacgaa

SEQ ID NO: 9610 - DNA, 550 bp, Homo sapiens
caaattatgtcttttaactccatatttggtctctctcagtgggacgggtgcttcctggatgcatctagttggccatcttgttctccctcccttattcattcttgctgatgaagaattaacttcccctcactctttgcagcactgtaggactgaggactctttagaccacaaagggcaacagcttgacttaaatttatgtagcaaaacacagacatgtgtgtaaacacacacacacacccacaaaggtttttgtctacttaactagaaagtcagaaagtaccacaactatattcaagagtttaagtgccctcaaatacttaaactaactcttattaactacaagaagacttcatatagtaaaaggagtagctttcaggaaaccctgatacttatctttggtgaaaacagatatgcttccttaaatttccatcctccacttctcccataataatagaatttktaactttgcatatggttttccatgtaagggctactttccaaagcctctcttgcagcttagagtaactgtgtaagtaaacaatagccaata

SEQ ID NO: 9611 - DNA, 550 bp, Homo sapiens
caaattatgtcttttaactccatatttggtctctctcagtgggacgggtgcttcctggatgcatctagttggccatcttgttctccctcccttattcattcttgctgatgaagaattaacttcccctcactctttgcagcactgtaggactgaggactctttagaccacaaagggcaacagcttgacttaaatttatgtagcaaaacacagacatgtgtgtaaacacacacacacacccacaaaggtttttgtctacttaactagaaagtcagaaagtaccacaactatattcaagagtttaagtgccctcaaatacttaaactaactcttattaactacaagaagacttcatatagtaaaaggagtagctttcaggaaaccctgatacttatctttggtgaaaacagatatgcttccttaaatttccatcctccacttctcccataataatagaatttttaactwtgcatatggttttccatgtaagggctactttccaaagcctctcttgcagcttagagtaactgtgtaagtaaacaatagccaata

SEQ ID NO: 9612 - DNA, 561 bp, Homo sapiens
tctctatcctaatgaagcctttcaccattttactgatttttcaatattccctgcacctttatcttttgttattttaaattttaacacttgtaagcggagaaaaaaagtacaatgactcccctgcamcccctaccttggttaaacaattgtcaacacttggctgattttacttcgtttaatcttgctcaccttgtttctcatccccaaattatttggaactattaataatagaggctgaaataattcttattgaaatcataccatggctaaaggttaagtactctttaaaagcaaacacagtattatgatctcacctaaattaataatttgttcttattaaatttcaaatttcttcagttgtctcataaatgattcctgttttacagtttaagaacctagatcaaaatgagatctttacacttccattaactgatatcttttggcttatagatttcctctttttccttatgattcatcctttgaagaaaccagatagtttaccccatagagcttcctctggcctggattttgcttgattgcatttttctgtaccttctattt

SEQ ID NO: 9613 - DNA, 551 bp, Homo sapiens
ggcacatataaaatgttcaggaaatattgcttgaataaataattaaaatctcatgaccctcccctggctgaaattacagtcagccctccatatctataggttctgcatctgcagattcaaccaagcttggtttggaggaaaaaaaataaagacaacaatacaaattactttaaaatactgtataacaactatttacattgcatgtacattgtgttattataagtaatcctggagatgttttaaagtatatgggaagatggacacaggttatgtgcaaataccaagccatttcatatcagagacttgagcatcctcagattttggtatcctggggagttcctgggacaagtctccctgatattgaggaattactatatttagaacctgggctgtctgcaattctgttggttgaaawtttatgtaataccccaggaaggacaaaggagtttcagccattccctgctcccattgcatttgtcttctcctaatatctaattgaggaattatgggattttgttttgcagagaaggaggagacaaatctgtattttg

SEQ ID NO: 9614 - DNA, 621 bp, Homo sapiens
ggagatcatcagcttctttcatacagatgaggctagataattggcctgataggaagaagtctagctagatctcgacattttctgccccacattttattttcctaatacattctaaacaggtatgcaartcattttggctaaagaaaagctgttaaagtcacattgaggatttattatcattagaaatgctcagaactcagaagtagacatatgtgtttttatgtgtgggcagataaaaggggaagttttggtggaagaaagccaatcgtgggaaatagtcaatatatgacccttgacttctcttagtgtgtttcagagaatcaaagtgatctaaaacgatcacacaaaggaaaggatagtacttcccaaacttgcatgtatgggcacagaatgcacacatggtaaagactgcatggcaaacatcaatgtaaatggacaagtcacctccagcccaaggtgactgtctcaatggctccagcctccctcggcccccacagtcaccttgagggctaaggccaatagtagcttgcacacctgtaacccattcttttcagttgatctacactggagtaaagtgaaatcaagctttaatgaactaaggctcagtttcaaaatccaaga

SEQ ID NO: 9615 - DNA, 556 bp, Homo sapiens
tggtcttcttttaaaaatcttgcatactaggattccctatgaaaatgagaccaaaaataacttattcaaagttattactttatgaaatatcagtaataaattctaggtttgaaacgctgagatcgtaaatgagggagtatttatttccacaactcgtgcgcaccccagcacttgacagatgaggctagtcctgcaccagcactgactggtggccactgctgccagaagcagtcttgtgaggggttcagtcacggaggctcggcagcagacagcacccaggtagactgctaatggcagccataggtgtagaaggaatctgtgccacacatttgccacccctgaacaatgaagtttttctaattattagatttttaawattccagagacaaaaaaacagagactacttaaaaagaagaccaagggataagaagcagagttcccaatgcatgtacctgagaaattccttgtagccagcatagttgtcaagatggcaccctgtgaaaaaaattagaacacaaaagtcagtgttgcctatgcaaattctggacctaacaaa

SEQ ID NO: 9616 - DNA, 614 bp, Homo sapiens
acaaaaaaagaataatgcccttaataaagcctaaatttataatttcattttcactagctataaaatttacgttttcacattgaaatgaggtctttcagataccagtaaaaggctctggtgcaaatgtcttagagtttcacattagatagtagtcaatgatgagaatgccaacaagatggaaaatgcctcaatgattgccaaaatggtgatgagagccaagaaataactgtgggtaatatttgtttcttaattatctgaaagcctctctagatcttgctattctctagataataaaaaccttatgaatgagaaaaaataatgagaagatcaaggcaagatccttgacagaatatactaaattcagaatatttgtggttaatttaaatgctgggggaaattgagatgtcaacaacaacaacaacaacaaaatgaaaacataatactttaaaaacattccggccgggtgtggtggctcaygcctgtaatcccagcactttgggaggccaaggcgggcagatcacctgaggtcaggagtttgagaccagcctgaccaacatggagaaaccctgtctctattaaaaatacaaaattaaccaggcacatgcctgtaattc

SEQ ID NO: 9617 - DNA, 512 bp, Homo sapiens
cagaaggtgagtcggggcgggggagaggcggcgagtgagcattaccgcctgagctccacctcctgtcagatcagagatggcattagattctcacaggtgcacgaaccctctcatgaactgcctgtgaaagggatctaggttgcgcaccccttatgagaatcttatgcctgatgatttgaggcagaacggcttcatcctgaaaccatccgctgctcatggataaaatgtcttcaayaaaatcggtccttggcaaccgctgctttggagtatttagttataatttataccttgaaatacattcacattcaaaaatttaaggctacttgaaacactttatatatatatggttaaaatatatatctacagtcaagatagggctataagtgcaaccccgaacaaactttagttgtagtcctctagtggtggtaaccagaactcagaatgaacgaggtacaataattgaacacttgggcttttggcagccacagaaaaaagggaaatgtgatagagat

SEQ ID NO: 9618 - DNA, 512 bp, Homo sapiens
cagaaggtgagtcggggcgggggagaggcggcgagtgagcattaccgcctgagctccacctcctgtcagatcagagatggcattagattctcacaggtgcacgaaccctctcatgaactgcctgtgaaagggatctaggttgcgcaccccttatgagaatcttatgcctgatgatttgaggcagaacggcttcatcctgaaaccatccgctgctcatggataaaatgtcttcaacaaaatcggtccttggcaaccgctgctttggagtatttagytataatttataccttgaaatacattcacattcaaaaatttaaggctacttgaaacactttatatatatatggttaaaatatatatctacagtcaagatagggctataagtgcaaccccgaacaaactttagttgtagtcctctagtggtggtaaccagaactcagaatgaacgaggtacaataattgaacacttgggcttttggcagccacagaaaaaagggaaatgtgatagagat

SEQ ID NO: 9619 - DNA, 2007 bp, Homo sapiens
ccataaacatgttttgttagataaattcagatatttatgtttgataattttgagtatcttgattctagaagtgagactatatgaaggatgtcaaggcagtcatttgccagacagtaagtaattatttctttatactttgttttaacagactgtcttatttcaggagaatttttatttctgaaatcaatgatcagtgttattattcctgccatttaaataagctgcagatattttcttggttaaagcaatacagtgacaagattttgtagtgtagcccattcttttagggataaagatatttatacatcactttctgccaacataacattttccattctgacttctgtttttgcctgttacatgttcattcaaaggcaagaaaagctcagcaaatctgtctataagagtatcctttggctttaggaatttttagcaccagtaaaaatggaaacttctattgttttcctttggtgaagactactttgatgacaagaaatacctgtagtccagattaaaagaagaaaacgtttatggaatagagaattattttcagtgaaaacaattgaaatcattagaaagtccactttttgttgttgttttttgcctgcaagaacaaaatggtcataagcaagaaacaaaaatattgcttcacgtttgaaaggcctctggaaaaagttcaaaacaatttgaagactactgcctcatcagtatctttaagtgttagaattaggagagacttggcattactatagattttatgatcttatttaaagaaacattcttcattgcaagaaaatggaaaattataatttaaaaaataattttcatggttatagatatataacaaataccttcacttgggatgttatctgctatactgaatattatagatttttgttaagtaattgtatagaaacataggcacaaatgtaacatttaaartaaatatggctaaatgtttcctcattattagattgctgttcttgttgaagaaaataacttctttaatttttcagtttttatccttattctttagtaattcactgattaaaaatattaggaaataataactgagatgattctagtattatagggtgaaggattatatatggtaatccaggtcaagtacttgatacatttcctagcacattgttcgagctcagtaaatgttaggaataatttattattagtaaaccagtttcgcgttgccactaatttattgtgtcatctttggtcagtcatttatcttttaggccctcattttcttcatttgaaaatatgggggaaggtttgaagtagatgatctctatatctctttaagctataatagataaataattctactttgtagtgtactcaaagtgaatgacttctaggattctggggcttgatttaaagggtatatatagcacttgttatgtaaatatattggctattttttatatagatgccatttaaataaatcatttcctttccaagaaatgtcattggctgacgttaattaatttttataaagatctttgaagatgagaagtggtatataagtggtgattattatcaaacatgaggagtgtaagtttaacattgctataatatacggtttgaatcagaaaataagattatattagaataatttgtaataacaccaacaaaaagcatgaatcccttttctgaaggaaacagtgcataaaattatgcatatgtaatacatgcttaaacattttattaaatacttttacaatgacaaaaaatgctgtatatgacgttcaattcaaaaatttctggaatgaatcttaagcccaactgttactaaaatatagaggacattgcttttgaaagttttttttaataaattgtttgctatttataatgtacatattggtaattgtgactaaaaccttttggctacccaaggtggtgaggtttttatatatagtagtcccccttattcataagggatacattccaaaacccctagtggatatttgagatcacatatagtaaaca

SEQ ID NO: 9620 - DNA, 2007 bp, Homo sapiens
ccataaacatgttttgttagataaattcagatatttatgtttgataattttgagtatcttgattctagaagtgagactatatgaaggatgtcaaggcagtcatttgccagacagtaagtaattatttctttatactttgttttaacagactgtcttatttcaggagaatttttatttctgaaatcaatgatcagtgttattattcctgccatttaaataagctgcagatattttcttggttaaagcaatacagtgacaagattttgtagtgtagcccattcttttagggataaagatatttatacatcactttctgccaacataacattttccattctgacttctgtttttgcctgttacatgttcattcaaaggcaagaaaagctcagcaaatctgtctataagagtatcctttggctttaggaatttttagcaccagtaaaaatggaaacttctattgttttcctttggtgaagactactttgatgacaagaaatacctgtagtccagattaaaagaagaaaacgtttatggaatagagaattattttcagtgaaaacaattgaaatcattagaaagtccactttttgttgttgttttttgcctgcaagaacaaaatggtcataagcaagaaacaaaaatattgcttcacgtttgaaaggcctctggaaaaagttcaaaacaatttgaagactactgcctcatcagtatctttaagtgttagaattaggagagacttggcattactatagattttatgatcttatttaaagaaacattcttcattgcaagaaaatggaaaattataatttaaaaaataattttcatggttatagatatataacaaataccttcacttgggatgttatctgctatactgaatattatagatttttgttaagtaattgtatagaaacataggcacaaatgtaacatttaaaataaatatggctaaatgtttcctcattattagattgctgttcttgttgaagaaaataacttctttaatttttcagtttttatccttattctttagtaattcactgattaaaaatattaggaaataataactgagatgattctagtattatagggtgaaggattatatatggtaatccaggtcaagtacttgatacatttcctagcacattgttcgagctcagtaaatgttaggaataatttattattagtaaaccagtttcgcgttgccactaatttattgtgtcatctttggtcagtcatttatcttttaggccctcattttcttcatttgaaaatatgggggaaggtttgaagtagatgatctctatatctctttaagctataatagataaataattctactttgtagtgtactcaaagtgaatgacttctaggattctggggcttgatttaaagggtatatatagcacttgttatgtaaatatattggctattttttatatagatgccatttaaataaatcatttcctttccaagaaatgtcattggctgacrttaattaatttttataaagatctttgaagatgagaagtggtatataagtggtgattattatcaaacatgaggagtgtaagtttaacattgctataatatacggtttgaatcagaaaataagattatattagaataatttgtaataacaccaacaaaaagcatgaatcccttttctgaaggaaacagtgcataaaattatgcatatgtaatacatgcttaaacattttattaaatacttttacaatgacaaaaaatgctgtatatgacgttcaattcaaaaatttctggaatgaatcttaagcccaactgttactaaaatatagaggacattgcttttgaaagttttttttaataaattgtttgctatttataatgtacatattggtaattgtgactaaaaccttttggctacccaaggtggtgaggtttttatatatagtagtcccccttattcataagggatacattccaaaacccctagtggatatttgagatcacatatagtaaaca

SEQ ID NO: 9621 - DNA, 2007 bp, Homo sapiens
ccataaacatgttttgttagataaattcagatatttatgtttgataattttgagtatcttgattctagaagtgagactatatgaaggatgtcaaggcagtcatttgccagacagtaagtaattatttctttatactttgttttaacagactgtcttatttcaggagaatttttatttctgaaatcaatgatcagtgttattattcctgccatttaaataagctgcagatattttcttggttaaagcaatacagtgacaagattttgtagtgtagcccattcttttagggataaagatatttatacatcactttctgccaacataacattttccattctgacttctgtttttgcctgttacatgttcattcaaaggcaagaaaagctcagcaaatctgtctataagagtatcctttggctttaggaatttttagcaccagtaaaaatggaaacttctattgttttcctttggtgaagactactttgatgacaagaaatacctgtagtccagattaaaagaagaaaacgtttatggaatagagaattattttcagtgaaaacaattgaaatcattagaaagtccactttttgttgttgttttttgcctgcaagaacaaaatggtcataagcaagaaacaaaaatattgcttcacgtttgaaaggcctctggaaaaagttcaaaacaatttgaagactactgcctcatcagtatctttaagtgttagaattaggagagacttggcattactatagattttatgatcttatttaaagaaacattcttcattgcaagaaaatggaaaattataatttaaaaaataattttcatggttatagatatataacaaataccttcacttgggatgttatctgctatactgaatattatagatttttgttaagtaattgtatagaaacataggcacaaatgtaacatttaaaataaatatggctaaatgtttcctcattattagattgctgttcttgttgaagaaaataacttctttaatttttcagtttttatccttattctttagtaattcactgattaaaaatattaggaaataataactgagatgattctagtattatagggtgaaggattatatatggtaatccaggtcaagtacttgatacatttcctagcacattgttcgagctcagtaaatgttaggaataatttattattagtaaaccagtttcgcgttgccactaatttattgtgtcatctttggtcagtcatttatcttttaggccctcattttcttcatttgaaaatatgggggaaggtttgaagtagatgatctctatatctctttaagctataatagataaataattctactttgtagtgtactcaaagtgaatgacttctaggattctggggcttgatttaaagggtatatatagcacttgttatgtaaatatattggctattttttatatagatgccatttaaataaatcatttcctttccaagaaatgtcattggctgacgttaattaatttttataaagakctttgaagatgagaagtggtatataagtggtgattattatcaaacatgaggagtgtaagtttaacattgctataatatacggtttgaatcagaaaataagattatattagaataatttgtaataacaccaacaaaaagcatgaatcccttttctgaaggaaacagtgcataaaattatgcatatgtaatacatgcttaaacattttattaaatacttttacaatgacaaaaaatgctgtatatgacgttcaattcaaaaatttctggaatgaatcttaagcccaactgttactaaaatatagaggacattgcttttgaaagttttttttaataaattgtttgctatttataatgtacatattggtaattgtgactaaaaccttttggctacccaaggtggtgaggtttttatatatagtagtcccccttattcataagggatacattccaaaacccctagtggatatttgagatcacatatagtaaaca

SEQ ID NO: 9622 - DNA, 528 bp, Homo sapiens
tgcttaatttaaaaaaatccaaactctaccaaatttagctaaatgaaataattatatgctgtattggtgtgtaagaggtsgggagaaggagcacattctaaacttccttgctcttttctaaatttgtctgtgagagagcaccgattaagagtcagaatttctaactccagtgtggacttcaatggagtaactattaaacaagatgcataacaagggttaccatgataatcaggtgaagttattaaatagaaaagaacatatttctgtcttttataagaagaaagacatcatttccatagagaaatgaaggaactctgaagcctggaaacccttgggaggggagcacatgtattattctagattagaactaaacattccagcatgaaggatgacctcatatggcctccctgtcgaaaggtatgtaaaaacaaatgttataactatgaatttgacattaaccatggggaaatttaagacaaatggaagttatacattattgatgaatctctttgggaaacttgttgaagt

SEQ ID NO: 9623 - DNA, 535 bp, Homo sapiens
cttgtgatgttttaaaattttcctctaatttcaaattcattagtttgttacccaattgtatttattctattttaatttatctactgagttctatttttttcaaaatgtattattctgctcatcttttccattattctccctcatctctttgagaatatttaattcttacttatatttattttaagattttatttatatttattttgaatttctgttccacaattctcttttatctggtataaggtgaaggaatccacctccagtctgagattttctaaytttgcaatctgggcagaatcactctctttgctcaccgccccacagtaagcaattacgtactttgaggactcttcttttctcctcactagtcctgatagggaggatagagaagagaaaatcatcaggatccacccaaaatatctgggaacctgttgttattcaccctccaacccagctaggttggattgcctttctgctgtttcctcaccatttgtcactgatgctgggttggtgctgctgttttttctccttactg

SEQ ID NO: 9624 - DNA, 659 bp, Homo sapiens
tgagatagttgctactcctctgaaaagaaatgttataaggcctcttgccctgtaacaaacatgacaaactgaaayactgaccaagggatcaagcagacaatacaaatgataaagcagataagtatccaggttctaggcttgtttgccttcagatgtctatgtcctccttgccttgctctgttctgtgtcacagaaggactcacccatgcaagatgcattcctcaggtttctgagtcagctgcctccagcagggtgaaaacaatggcaagcactggcaggagacttgagggtaggggactagtaggagaccaccaagttagctccattctccccaccccttcttgttcgctgtgtctgactgtttctctagcaatggcttcatctctgtgtgttccagtgtacccttcacgtaaccatgaccctgggctcctacaacactagctcctcctttttctctccagccaagtgttagtagtatcttcttgccatgtcaatctctggtttatgtcattgtcggtatcacctgtataactagttgcctatgctacagtattggcttctgtattcctggttagaccctgactgatagaatctgtaaacatggacacaagtaaaattgataggatttcacaaagtggtgagaacctcctggtcatctg

SEQ ID NO: 9625 - DNA, 659 bp, Homo sapiens
tgagatagttgctactcctctgaaaagaaatgttataaggcctcttgccctgtaacaaacatgacaaactgaaacactgaccaagggatcaagcagacaatacaaatgataaagcagataagtatccaggttctaggcttgtttgccttcagatgtctatstcctccttgccttgctctgttctgtgtcacagaaggactcacccatgcaagatgcattcctcaggtttctgagtcagctgcctccagcagggtgaaaacaatggcaagcactggcaggagacttgagggtaggggactagtaggagaccaccaagttagctccattctccccaccccttcttgttcgctgtgtctgactgtttctctagcaatggcttcatctctgtgtgttccagtgtacccttcacgtaaccatgaccctgggctcctacaacactagctcctcctttttctctccagccaagtgttagtagtatcttcttgccatgtcaatctctggtttatgtcattgtcggtatcacctgtataactagttgcctatgctacagtattggcttctgtattcctggttagaccctgactgatagaatctgtaaacatggacacaagtaaaattgataggatttcacaaagtggtgagaacctcctggtcatctg

SEQ ID NO: 9626 - DNA, 659 bp, Homo sapiens
tgagatagttgctactcctctgaaaagaaatgttataaggcctcttgccctgtaacaaacatgacaaactgaaacactgaccaagggatcaagcagacaatacaaatgataaagcagataagtatccaggttctaggcttgtttgccttcagatgtctatgtcctccttgccttgctctgttctgtgtcacagaaggactcacccatgcaagatgcattcctcaggtttctgagtcagctgcctccagcagggtgaaaacaatggcaagcactggcaggagacttgagggtaggggactagtaggagaccaccaagttagctccattctccccaccccttctygttcgctgtgtctgactgtttctctagcaatggcttcatctctgtgtgttccagtgtacccttcacgtaaccatgaccctgggctcctacaacactagctcctcctttttctctccagccaagtgttagtagtatcttcttgccatgtcaatctctggtttatgtcattgtcggtatcacctgtataactagttgcctatgctacagtattggcttctgtattcctggttagaccctgactgatagaatctgtaaacatggacacaagtaaaattgataggatttcacaaagtggtgagaacctcctggtcatctg

SEQ ID NO: 9627 - DNA, 569 bp, Homo sapiens
tgagtggcttggaatctaattggagagtcataacataccaccacataaatttgtattggtcttaaataaattttaaggaagtaccatacaagaggtactgaattattattattgattgaataagtaagaaagatcagagaatgggaaggtgaaccagttaatttttattgccagtatataccaaatatggaatatattttgatccttataaattgcttgacagtccagtgaaatagatactgcaagtcttcctattttagagatggagactaaataacatgcccaaacccatgtagctaggaagttgcactcaaagtgtgcttcgtggacaggcagcatgaaaatcacctgagaggttgtcagaaatgcaaatttaaggtccaacccagacctgttgaatcagatctctgggactgatgcacagaaatgtgtgttccaatcagttttctrtgtgattctcgtgcacattgaagtttgagaagtacctacttaaggtatgaatttgtggtaattgtgagatctgtgtaatgttaagcctcatattcttgccacagcaccatgctgtgacg

SEQ ID NO: 9628 - DNA, 569 bp, Homo sapiens
ttgcagtgagccgagattgcaccactgcactcccacctgggcgacagagcaagacttcatctcaaaaaaaaaaaaaaaaaaaaattgtacgtataattagcactaaatacatcttaactcttcttttccagttcatcacactaatgtacttgtattcaaaaccataaataacaggatatctcaaactgctttgttggagctctaagtttgctcaaattacttcagaaccaagaaaaatataagggtaggctcaagacaaccacacatatgcctttcaactgctccattctgcctttatctgctttaatagtttgaaaaacatttctagaataatattttcttttactttgaattttcaggaaagattgaaaacatttccaacagcattttcaaatgtcttaatatttcatcagtaaaatcttactatttacaggaatacccccattttattgtgctttgctttaatgtgtttcagatattggtttctttctttctttctttctttctttcttaacmaattgaagctttatggtaaccttgcattgatcttctattggcaccattttttc

SEQ ID NO: 9629 - DNA, 528 bp, Homo sapiens
cagcactttgggaggctgaggtgggtggatcacctgaggtcgggagttcaagagcagcctggctaacatggtgaaaccctgccactactaaaaacacaaaaattagctgggcatggtggtgggcacctgtaattccagctactcgggaggctgaggcaggagaattgcttgaacccaggaggtggaggttgcagtgagccaagattgcgccactgcactccagcctaggcaacagaccgagactccgtctaaaaaaaaaaaaaaacaaaaaaaamcttttttttgagggggtatatgaccctaaattagtgctaaatatatatctaaatatatatatatgtatgtcttttgggggtatatgaccctaaattcgtgctatcgtgctaaatatatatctaaatatatatatatatgtttgtgcgcttccgctactaaactatcatcattaatccagttggaaagatgtgagaaagtttaaatgtaagcacatcttatggttaaagagctaccaaaacaaagcaaaggtat

SEQ ID NO: 9630 - DNA, 528 bp, Homo sapiens
cagcactttgggaggctgaggtgggtggatcacctgaggtcgggagttcaagagcagcctggctaacatggtgaaaccctgccactactaaaaacacaaaaattagctgggcatggtggtgggcacctgtaattccagctactcgggaggctgaggcaggagaattgcttgaacccaggaggtggaggttgcagtgagccaagattgcgccactgcactccagcctaggcaacagaccgagactccgtctaaaaaaaaaaaaaaacaaaaaaaaacttttttttgrgggggtatatgaccctaaattagtgctaaatatatatctaaatatatatatatgtatgtcttttgggggtatatgaccctaaattcgtgctatcgtgctaaatatatatctaaatatatatatatatgtttgtgcgcttccgctactaaactatcatcattaatccagttggaaagatgtgagaaagtttaaatgtaagcacatcttatggttaaagagctaccaaaacaaagcaaaggtat

SEQ ID NO: 9631 - DNA, 547 bp, Homo sapiens
agcaawtaaagcttacattttatttccaaggggtgttttagagcacttgaaagggcctcagttaaacacttggttactgccgaggccggcactggggagggcagaagggccctttcgttctggggtagtaaatcccactcaagtaggggatgcctgatttgatttttttttcacgtacagaaagaaataatctatattttaagaagtgaaaggggcacatccgacctctgactccttataagcatccctttccctactgcaaggagcataatagagtttcctgcacctttccagggagttcccacccttcccaggagtgtggggtccccaaagcccaattagctggggctttcccaataatctggaaacatgcagtttaactttcatctgcctccaccctggctacagctctgttttggaggctctgaagctggagagatgtctgcctctgcttcctgaggactcttgtctctggacttccctccaacccagggcccactggccagttctggaactctccaagccagctgggggtacacaaggaatg

SEQ ID NO: 9632 - DNA, 560 bp, Homo sapiens
ctcaccatgatgttaacatttcagcctgctcccttccaggcagacagtcttccagaaagttacccggctccctggctgggcgcggtggctcacgcctgtaatctcagcactttgggaggccgagacgggcaaatcacgaggtcaggagatcgagaccatccyggctaacacaatgaaaccccgtctctactaaaaatataaaaaattagctgggcgtggtggcgggcatctgcagtcccagctactcaggaggctgaaacaggagaatggcgtgaacctgggaggcagagctcgcagtgagccaagatcgcaccactgcactgcagcctgcacgacagagcgagactccgtctcaaaaaaaaccaaaagacccagcaacccgagtcatatcctgatgatatccatgctcctcagtcacgcatcccgtggtgcaggggctgaccccaagaggagctgctgcccccagagggtggggagccgaggcagggcctgggtcagacttaccaggctatgctcccagcccagccctcactagggacccccgagtgcatctctctcct

SEQ ID NO: 9633 - DNA, 512 bp, Homo sapiens
atatccttatagcaaaagacaaaacaacaacaaaaactgttcccttttattttgtttgttttggtccattatatgtccaggttatgcattaatgcattgtgttacttgctaagtcttgttactggcctttaattaggatatttctttgcatcccgccaaactcctcttcatggttgtatctttttttttttttttggagatggaattttgcttatgttgcccaggctggagtataatgatgcgatcttggctcactgcaacctccgtctcccgggttcaagcgattctcctgcctcagcctcccgagtaactgggattgcaggcctgcgccaccttgcccagctaattttggaattttrtgagacggggttttgccatgttggtcagactagtctcgaactcctgacctcatgatccgcccgccttggcctcccaaactgttgggattacaggtgtgagccactgtgcccggtctttttttttttttttttgagacagggtcttattctgtt

SEQ ID NO: 9634 - DNA, 557 bp, Homo sapiens
tgcccagaattctaaggaatcaaaaagtaatgacaactggcttctagctatttatagtttttcaaaaaggtataatgaaactcttacattaggcctcaatttgtctacctacataagctaattaaaatgtcaactctcttttgcttttggctgcaaaacaattatgttaattgggtgtggcaactggaaactgagtggcatatgtgccttctaccaagaggaaaaaaatggaaaaactaattattatataacacaggtgtggagaccaaatctttcagaatattgggtttatggtttgggtttttttttttgtttttktttttttttttaaaaaaggacaatccagccatgcatggtggctcacacctgtaatcccagcactttggaaggccaaggcaggtagatcacctgaggtcaggagttcgagaccagcctggccaacatagtgaaaccccgtctctactaaaaatacaaaaaattagccaagtatggtggtgcgcgcctatagtcccagctactccggaggctgaggcaggagaatcacctgaacccaggag

SEQ ID NO: 9635 - DNA, 565 bp, Homo sapiens
tgcaagtgtgtctgaatacctcaacagcattaagttcagagtatgtaagatgggtcacctgtggaaaaaactctgaggttttctaggccagttgaaatactaatatacgyatgaattggagattaattttaaggatttggttcttccttcaaagagtaacaaagaactagaaaaaataagcatctgcttaagaaaaatcaacatgaaaattgctactaatgctcttaacaagagctcagaggctaccccactagtaataaagcacggaatgcaataaaagtgcttggatttatttccaacatccttaacagatgaatgctaaaatttgagcaatatgtcttcttctaaatcagcaaactcaaaagccactggttaccaaacattttgcttgatgtactgatatctctcctccactcgtaggagcagattttgctaagaactctacctgccaacctgtcccccgacccccatgccgtatgtaattcaattaatgattgtaagaaagagttcggggtgaatccatagagtcaagtgaaagcaactttattaagaaagtaaaggaata

SEQ ID NO: 9636 - DNA, 565 bp, Homo sapiens
tgcaagtgtgtctgaatacctcaacagcattaagttcagagtatgtaagatgggtcacctgtggaaaaaactctgaggttttctaggccagttgaaatactaatatacgcatgaatyggagattaattttaaggatttggttcttccttcaaagagtaacaaagaactagaaaaaataagcatctgcttaagaaaaatcaacatgaaaattgctactaatgctcttaacaagagctcagaggctaccccactagtaataaagcacggaatgcaataaaagtgcttggatttatttccaacatccttaacagatgaatgctaaaatttgagcaatatgtcttcttctaaatcagcaaactcaaaagccactggttaccaaacattttgcttgatgtactgatatctctcctccactcgtaggagcagattttgctaagaactctacctgccaacctgtcccccgacccccatgccgtatgtaattcaattaatgattgtaagaaagagttcggggtgaatccatagagtcaagtgaaagcaactttattaagaaagtaaaggaata

SEQ ID NO: 9637 - DNA, 565 bp, Homo sapiens
tgcaagtgtgtctgaatacctcaacagcattaagttcagagtatgtaagatgggtcacctgtggaaaaaactctgaggttttctaggccagttgaaatactaatatacgcatgaattggagattaattttaaggatttggttcttccttcaaagagtaacaaagaactagaaaaaataagcatctgcttaagaaaaatcaacatgaaaattgctactartgctcttaacaagagctcagaggctaccccactagtaataaagcacggaatgcaataaaagtgcttggatttatttccaacatccttaacagatgaatgctaaaatttgagcaatatgtcttcttctaaatcagcaaactcaaaagccactggttaccaaacattttgcttgatgtactgatatctctcctccactcgtaggagcagattttgctaagaactctacctgccaacctgtcccccgacccccatgccgtatgtaattcaattaatgattgtaagaaagagttcggggtgaatccatagagtcaagtgaaagcaactttattaagaaagtaaaggaata

SEQ ID NO: 9638 - DNA, 563 bp, Homo sapiens
aacacaactaaataagtatcagggcccaatggggatatttggtgtaatcactctgtgattctcccctgtacctgttaatgcatttgtatgccttctctcctattaaataaatttgtatgccttctctgccttttgtgagtagatttttcagtgaaccttcagagggcaaaggggaagttttccctttgcccctataactgttccaaccaagtcagaaactacattattttagagtcacaaattttttaaaacttcaaaatctatcaaaatgctaatataatatttttcatcttcaatatcatgagagcaccaaagaacaagccaatttctttttaaaatatttatgaaaaagtaaattatagaattctattcaatttttaactatgtataatatttatgagtccacaaattgcaaatgaaaaatatgaaaaaggtaataaaagtgatttgtttccaacagggaaacatgcattcgaaaatttgaatctgctcttgcaaagtcktattcatcacatttcccctgggtgcctaaattgttagcatcatattgatagattttcagt

SEQ ID NO: 9639 - DNA, 631 bp, Homo sapiens
ctcattttaacttaaccacctatttaaagggcctgttagtcacattccgaagtgcttggttaggatttatatgaattaggggtgaagagacaattcagtccataacaatgccccgatgaaatttaaagcaaatattccagtacgtttcctgtgctgtgcattttgggattcttaatagcaatttggggaaatatcctctacctagaaggctaacaattatttggccatagggaatgcctgcagaaataagaatacttcttgaataagaaagccagaagctttatctcttcttggtggccaccagcmtctcttttagggtcctattttacctccctatgagaaaggaatttgggccatatctctcagaagacttgttctctacttctagtgggaagtgaactattagaaaatatctgacgtcaaatacaggccaggtaatttccacttcctttgtatcaagagaacaagtgacttttagatattcactgccagtattaaaaacagaggtaaaaatcgggcaatagttccctccagaaccagacaacactaattaatcaaaattacagtaattcacatcttcaagtatttatcttctgcaatagaaataaattcatgaacagtatgtcattat

SEQ ID NO: 9640 - DNA, 549 bp, Homo sapiens
attttacaaggatagaagttttttattatcatctacaaataactcttaataacacttcctaagtattatttttaacgtaaggcatacttgttaatttacccgtcacttaaaggtattcttttcaagtgtattattttgttacacttttaaatagtttgtcgtgtacattacaaaagcatacatttttatttttagataaaaataaaacacagctgggcacagtggctcatgcctgtaattcccaacactttgggaggctgaggagggtgcatcacctgaggtcaggagttcaagaccagcctggccaacatggcgaaaccctgtctctactaaaaatataaaaattagctgggcgtgatggcaggcggctgtaatcccagctactagggaggctgaggcaggagaatcacttgaacccaggaggcggaggttgcagtgagccgagatcacgccattgcactcyagtctgggcgacaagagcaaaactccatctcaaacaaacaaacaaataaatattaaacacgacagcatagaagtaataatggaact

SEQ ID NO: 9641 - DNA, 1294 bp, Homo sapiens
caccaattaaatgagagaggggatctcaaagtttgggtcaaagcctttgattttcagataagagatcacatcaactttcagagaaaatctcagatgtctctaatatttctttactataaaacctcctccaaggtttcgattccagaaacgtttgaatcgcatttctgcaaggtacaaattaatagctcttacaaagacggtcagagatttcattttaaaacactattaaacctagaaggtagtagccaaattggagaggatgtttgatcctctcccaattttccrctgctgcaaagcagagactgatagtaaatcattctttgcagtcacttctcctgttttttaagaagaagaaatcattttagaagtttttctctttttttccttgcaagagcttcataacatcggcacacagcttgtgaaacagagggagagaacagaaaccacatccggaagtaatcatctctgcagcactgtaatggattatatgtgttaaaggggccgtggactaaattagcgtgaaggtatttcataaaaagttatgtaaatcttaagtggaggtaatgctcttctccttaaacttaggaatgaggaaaccgtaggccccaagaccttgctacaaaacagtagctttgctacttcttgtgccaccagattaaacagacaattggaatgaaaccactacctcatatactcacataaactaaattttattgttaacctggacacactgaaaatcatgagactgatggaaccaaacttcccacaattgtccagtcaatttgctatccttctattttttaatttttggggggggggaatagggaatagcaaaattgcctttttctcagcacttactcagtctgtagataatagaaagttcttattccttttaaacttgcaaatgagattctttatctcagaggcccaatcaccattccaaagagaatatttttattttcaagagattctgtttttaattggctacttagaaaatctattttagaaaacatacatacttgctggagttaacttgttctatattgttcaaaaaagaaaaaaatctaccaaaaggaaaacaaaatggacattgaaatgctgttttcagggataataatatttaacaacttgggggttggaggaaatcggtcccctttaatatctcagttggcacttcgccctgttagccctatgctagttgcattgtgctcagaggcaaccagacacttgcaacgattgcttctgaagcaccacagaactacctgcagtaatttggttgttttcaaccattctc

SEQ ID NO: 9642 - DNA, 1294 bp, Homo sapiens
caccaattaaatgagagaggggatctcaaagtttgggtcaaagcctttgattttcagataagagatcacatcaactttcagagaaaatctcagatgtctctaatatttctttactataaaacctcctccaaggtttcgattccagaaacgtttgaatcgcatttctgcaaggtacaaattaatagctcttacaaagacggtcagagatttcattttaaaacactattaaacctagaaggtagtagccaaattggagaggatgtttgatcctctcccaattttccactgctgcaaagcagagactgatagtaaatcattctttgcagtcacttctcctgttttttaagaagaagaaatcattttagaagtttttctctttttttccttgcaagagcttcataacrtcggcacacagcttgtgaaacagagggagagaacagaaaccacatccggaagtaatcatctctgcagcactgtaatggattatatgtgttaaaggggccgtggactaaattagcgtgaaggtatttcataaaaagttatgtaaatcttaagtggaggtaatgctcttctccttaaacttaggaatgaggaaaccgtaggccccaagaccttgctacaaaacagtagctttgctacttcttgtgccaccagattaaacagacaattggaatgaaaccactacctcatatactcacataaactaaattttattgttaacctggacacactgaaaatcatgagactgatggaaccaaacttcccacaattgtccagtcaatttgctatccttctattttttaatttttggggggggggaatagggaatagcaaaattgcctttttctcagcacttactcagtctgtagataatagaaagttcttattccttttaaacttgcaaatgagattctttatctcagaggcccaatcaccattccaaagagaatatttttattttcaagagattctgtttttaattggctacttagaaaatctattttagaaaacatacatacttgctggagttaacttgttctatattgttcaaaaaagaaaaaaatctaccaaaaggaaaacaaaatggacattgaaatgctgttttcagggataataatatttaacaacttgggggttggaggaaatcggtcccctttaatatctcagttggcacttcgccctgttagccctatgctagttgcattgtgctcagaggcaaccagacacttgcaacgattgcttctgaagcaccacagaactacctgcagtaatttggttgttttcaaccattctc

SEQ ID NO: 9643 - DNA, 1294 bp, Homo sapiens
caccaattaaatgagagaggggatctcaaagtttgggtcaaagcctttgattttcagataagagatcacatcaactttcagagaaaatctcagatgtctctaatatttctttactataaaacctcctccaaggtttcgattccagaaacgtttgaatcgcatttctgcaaggtacaaattaatagctcttacaaagacggtcagagatttcattttaaaacactattaaacctagaaggtagtagccaaattggagaggatgtttgatcctctcccaattttccactgctgcaaagcagagactgatagtaaatcattctttgcagtcacttctcctgttttttaagaagaagaaatcattttagaagtttttctctttttttccttgcaagagcttcataacatcrgcacacagcttgtgaaacagagggagagaacagaaaccacatccggaagtaatcatctctgcagcactgtaatggattatatgtgttaaaggggccgtggactaaattagcgtgaaggtatttcataaaaagttatgtaaatcttaagtggaggtaatgctcttctccttaaacttaggaatgaggaaaccgtaggccccaagaccttgctacaaaacagtagctttgctacttcttgtgccaccagattaaacagacaattggaatgaaaccactacctcatatactcacataaactaaattttattgttaacctggacacactgaaaatcatgagactgatggaaccaaacttcccacaattgtccagtcaatttgctatccttctattttttaatttttggggggggggaatagggaatagcaaaattgcctttttctcagcacttactcagtctgtagataatagaaagttcttattccttttaaacttgcaaatgagattctttatctcagaggcccaatcaccattccaaagagaatatttttattttcaagagattctgtttttaattggctacttagaaaatctattttagaaaacatacatacttgctggagttaacttgttctatattgttcaaaaaagaaaaaaatctaccaaaaggaaaacaaaatggacattgaaatgctgttttcagggataataatatttaacaacttgggggttggaggaaatcggtcccctttaatatctcagttggcacttcgccctgttagccctatgctagttgcattgtgctcagaggcaaccagacacttgcaacgattgcttctgaagcaccacagaactacctgcagtaatttggttgttttcaaccattctc

SEQ ID NO: 9644 - DNA, 1294 bp, Homo sapiens
caccaattaaatgagagaggggatctcaaagtttgggtcaaagcctttgattttcagataagagatcacatcaactttcagagaaaatctcagatgtctctaatatttctttactataaaacctcctccaaggtttcgattccagaaacgtttgaatcgcatttctgcaaggtacaaattaatagctcttacaaagacggtcagagatttcattttaaaacactattaaacctagaaggtagtagccaaattggagaggatgtttgatcctctcccaattttccactgctgcaaagcagagactgatagtaaatcattctttgcagtcacttctcctgttttttaagaagaagaaatcattttagaagtttttctctttttttccttgcaagagcttcataacatcggcacacagcttgtgaaacagagggagagaacagaaaccacatccggaagtaatcatctctgcagcactgtaatggattatatgtgttaaaggggccgtggactaaattagcgtgaaggtatttcataaaaagttatgtaaatcttaagtggaggtaatgctcttctccttaaacttaggaatgaggaaaccgtaggccccaagaccttgctacaaaacagtagctttgctacttcttgtgccaccagattaaacagacaattggaatgaaaccactacctcatatactcacataaactaaattttattgttaacctggacacactgaaaatcatgagactgatggaaccaaacttcccacaattgtccagtcaatttgctatccttctattttttaatttttrgggggggggaatagggaatagcaaaattgcctttttctcagcacttactcagtctgtagataatagaaagttcttattccttttaaacttgcaaatgagattctttatctcagaggcccaatcaccattccaaagagaatatttttattttcaagagattctgtttttaattggctacttagaaaatctattttagaaaacatacatacttgctggagttaacttgttctatattgttcaaaaaagaaaaaaatctaccaaaaggaaaacaaaatggacattgaaatgctgttttcagggataataatatttaacaacttgggggttggaggaaatcggtcccctttaatatctcagttggcacttcgccctgttagccctatgctagttgcattgtgctcagaggcaaccagacacttgcaacgattgcttctgaagcaccacagaactacctgcagtaatttggttgttttcaaccattctc

SEQ ID NO: 9645 - DNA, 1294 bp, Homo sapiens
caccaattaaatgagagaggggatctcaaagtttgggtcaaagcctttgattttcagataagagatcacatcaactttcagagaaaatctcagatgtctctaatatttctttactataaaacctcctccaaggtttcgattccagaaacgtttgaatcgcatttctgcaaggtacaaattaatagctcttacaaagacggtcagagatttcattttaaaacactattaaacctagaaggtagtagccaaattggagaggatgtttgatcctctcccaattttccactgctgcaaagcagagactgatagtaaatcattctttgcagtcacttctcctgttttttaagaagaagaaatcattttagaagtttttctctttttttccttgcaagagcttcataacatcggcacacagcttgtgaaacagagggagagaacagaaaccacatccggaagtaatcatctctgcagcactgtaatggattatatgtgttaaaggggccgtggactaaattagcgtgaaggtatttcataaaaagttatgtaaatcttaagtggaggtaatgctcttctccttaaacttaggaatgaggaaaccgtaggccccaagaccttgctacaaaacagtagctttgctacttcttgtgccaccagattaaacagacaattggaatgaaaccactacctcatatactcacataaactaaattttattgttaacctggacacactgaaaatcatgagactgatggaaccaaacttcccacaattgtccagtcaatttgctatccttctattttttaatttttggggggggggaatagggaatagcaaaattgcctttttctcagcacttactcagtctgtagataatagaaagttcttattccttttaaacttgcaaatgagattctttatctcagaggcccaatcaccattccaaagagaatatttttattttcaagagattctgtttttaattggctacttagaaaatctattttagaaaacatacatacttgctggagttaacttgttctatattgttcaaaaaagaaaaaaatctaccaaaaggaaaacaaaatggacattgaaatgctgttttcagggataataatatttaacaacttgggggttggaggaaatcggtcccctttaatatctcagttggcacttcgccctgttagccctatgctagttgcattgtgctcagaggcaaccagacacttgcaaygattgcttctgaagcaccacagaactacctgcagtaatttggttgttttcaaccattctc

SEQ ID NO: 9646 - DNA, 1294 bp, Homo sapiens
caccaattaaatgagagaggggatctcaaagtttgggtcaaagcctttgattttcagataagagatcacatcaactttcagagaaaatctcagatgtctctaatatttctttactataaaacctcctccaaggtttcgattccagaaacgtttgaatcgcatttctgcaaggtacaaattaatagctcttacaaagacggtcagagatttcattttaaaacactattaaacctagaaggtagtagccaaattggagaggatgtttgatcctctcccaattttccactgctgcaaagcagagactgatagtaaatcattctttgcagtcacttctcctgttttttaagaagaagaaatcattttagaagtttttctctttttttccttgcaagagcttcataacatcggcacacagcttgtgaaacagagggagagaacagaaaccacatccggaagtaatcatctctgcagcactgtaatggattatatgtgttaaaggggccgtggactaaattagcgtgaaggtatttcataaaaagttatgtaaatcttaagtggaggtaatgctcttctccttaaacttaggaatgaggaaaccgtaggccccaagaccttgctacaaaacagtagctttgctacttcttgtgccaccagattaaacagacaattggaatgaaaccactacctcatatactcacataaactaaattttattgttaacctggacacactgaaaatcatgagactgatggaaccaaacttcccacaattgtccagtcaatttgctatccttctattttttaatttttggggggggggaatagggaatagcaaaattgcctttttctcagcacttactcagtctgtagataatagaaagttcttattccttttaaacttgcaaatgagattctttatctcagaggcccaatcaccattccaaagagaatatttttattttcaagagattctgtttttaattggctacttagaaaatctattttagaaaacatacatacttgctggagttaacttgttctatattgttcaaaaaagaaaaaaatctaccaaaaggaaaacaaaatggacattgaaatgctgttttcagggataataatatttaacaacttgggggttggaggaaatcggtcccctttaatatctcagttggcacttcgccctgttagccctatgctagttgcattgtgctcagaggcaaccagacacttgcaacgattgcttytgaagcaccacagaactacctgcagtaatttggttgttttcaaccattctc

SEQ ID NO: 9647 - DNA, 644 bp, Homo sapiens
taaagtgttcttatcagatatatacttttaagatgatttttaaagatgcttctattttgagtgctattatccaaagtactaaaagttcattttaggccaggcgcggtggctcacatctgtaatctcagcactttgggaggccaaggtgggtggatcacctgaagtcaggagttcaagaccagcctggccaatatggtgaaaccctgtctctactaaaaatacaaaaattagccgggcatggtggcagacacctgtaatcccagctacttgggaggctgaggcaggagaatcgcctgaacccgggaggcggaggttgcagtgagccgagattgtgccactgcactccagtctgggagagaaaaagcgagactttgtctaaaataaaataaaatataaaagtttgttttataaacagcatatagggtcttataaagtggcctttcatgctgacctcatcaatgagccaaccatcactgctataatggttttagacgtgcgctatctctgcctggtgttttattgwtgttttgctttgttgtaatcaaataatactgttacatttgttaaggacagaatctgttgctattccagataaatattggtatcgtttgtttattctagaggattgccaaaaaattcacagt

SEQ ID NO: 9648 - DNA, 541 bp, Homo sapiens
aaggaaatggaagggagggtatatgggtactctgctgtctactcagttcattaaacctcaaattactttaaaatatagtctattaatttaaaaaattaatcatgttaacttacactatcatgttttctttgattgttgaggtcatttctgggggtctgtcttttatttagtgacagcatgttgacttgcccctcgctcccacttgtttctgacataatttcataccaagcatatatccacagtagacctcctttctttcatggaaatgcrcagcttatataaatatattgtagaaaattgctgcttttacttagactaaaagacacaagagtcccctgtaacaaacagcttgaagttatttcatttcactgaggtttgtacagggttcctgaaactgtcctgtttcaggagctgccagataacctgatcctagagtgaaactcactttggcattcagattttgtctatgttgatatacctcaacagtttaagattcttttttaacttacatggctccatgaaagagggatgtgatgtttca

SEQ ID NO: 9649 - DNA, 525 bp, Homo sapiens
gtatacagatgtagattttacctgtgcttgcttctctgacaaatgacctaaccccttgacaaatgacctctttttctccatctgtagtatggggatagtaggcaccgtttcatagagttgttatwatgatgaaatgatgaaaagtcatgtaatgttgtagcacaatgcccggaacaaaggaagcattcagcaaaagctgctatgtataggatccagctggagaaagcaaattcagtagaaaatattaaggctggtgatacacatttgttagtcataaaatattggagctacgtgggatcttttaccacaatttttgtttacccctgttattttatccatgaagtgtagaagaggtcattaaaccttgagaaatggataaggcccatgagaaagaatgtagaatagaaaatttggactagcaacttaatctaggattattcttaaatttagtgtagggcaatggttttccacctctgatagagggaagcagtgcactgactattggttgtttatccgtcggctttt

SEQ ID NO: 9650 - DNA, 525 bp, Homo sapiens
gtatacagatgtagattttacctgtgcttgcttctctgacaaatgacctaaccccttgacaaatgacctctttttctccatctgtagtatggggatagtaggcaccgtttcatagagttgttattatgatgaaatgatgaaaagtcatgtaatgttgtagcacaatgcccggaacaaaggaagcattcagcaaaagctgctatgtwtaggatccagctggagaaagcaaattcagtagaaaatattaaggctggtgatacacatttgttagtcataaaatattggagctacgtgggatcttttaccacaatttttgtttacccctgttattttatccatgaagtgtagaagaggtcattaaaccttgagaaatggataaggcccatgagaaagaatgtagaatagaaaatttggactagcaacttaatctaggattattcttaaatttagtgtagggcaatggttttccacctctgatagagggaagcagtgcactgactattggttgtttatccgtcggctttt

SEQ ID NO: 9651 - DNA, 525 bp, Homo sapiens
gtatacagatgtagattttacctgtgcttgcttctctgacaaatgacctaaccccttgacaaatgacctctttttctccatctgtagtatggggatagtaggcaccgtttcatagagttgttattatgatgaaatgatgaaaagtcatgtaatgttgtagcacaatgcccggaacaaaggaagcattcagcaaaagctgctatgtataggatccagctggagaaagcaaattcagtagaaaatattaaggctggtgatacacatttgttagtcataaaatattggagctacgtgggatcttttaccacaatttttgtttacccctgttattttatccatgaagtgtagaagaggtcattaaaccttgagaaatggataaggcccatgagaaagaatgtagaatagaaaatttggactagcaacttaatctaggattattcttaaatttagtgtagggcaatggttttccacctctgatagagggaagcagtgcactgacyattggttgtttatccgtcggctttt

SEQ ID NO: 9652 - DNA, 1033 bp, Homo sapiens
gtttattacaagaattttagkatcagctcatcaatatctccaaaaggtagctgggagagagctttgagacccaccttcacctttaatatgttattgaggtatattataatgataagctttctaatgttgcatctctgggaaagccttatttaatcttttttgtgtgtaatattttataacatataaaacatgtaagtatataatatgtacatatattataaaattattatatgttatacattgtttacatagcttatataatagcatatacatagatttgttatttctattatttgtttctatggtcacaagtggggatggcctacaattttctgttctagagtccttcctttggttttatatcagggttaggctagtcttattaaatgagttcagtagtttcttttaggtgtagactgacctcattaaatgtgttggagagttaacttgcccttattttcctatttctgaaacagttattaaagatggaaaagttcattactttcattcttagagttttagttggaattatctattaaatgatctgggctactgccttttagatgtcagtgtgggttaggaggtgtagttaatgagtgtataatgagctataaatactttcattttcagtgggctattttaatactctaattttgaagaataataatttctaataaccaaaaattatactttcatacattcattggtgtagaattttgtatagcagtatcttaaacatttttccaactcttgtgtatatatagctattttttgtcaatgtcaagttttatcttatcttttttcaatagctttccaaagtttatctctttaaaattatttctttcattttttttgtcctattgttcaattatctgaaaattccacatatatattttaaagtatgtctatttggtaaagatttttccttctcagttttattaaggtataactgacaaataaagattggatatatttatggtatgcaacttgatgttttgatatatgcataccttgcaaaatcatgaaatcaggc

SEQ ID NO: 9653 - DNA, 562 bp, Homo sapiens
cggtctcagctaactccctgtgtgaacctgggggcaatacctactaatggtgggtgggatggatattggctctgggagggcggttgtcccttgtcaacttcccagagtgggatcaacgttcaccactgttggaaatgatgaagggaccagaagtatgggaagcaagctatgaaagttgaagtggaagttacgctctctttgttctgcaacagtattacaaattgcaatatattcagcaagatggaaacactatgagcacttgcatgccgtttctgggagctgttcggtcaccctgctcatgggcacagttcctgtgcaccctgccacatgaaagtaactcatgctgggtgggkcgcaggtggctcaggcctgtaatcccagcactttgggaggccgaggcgggcggatcataaggtcaggagatcgagaccatcctggctaacatggtgaaaccccgtctctactaaaaatacaaaaaattagccaggcgtggtggcgggcgcctgtagtcccagctactgggaaggctgaggcaggagaatggcatgaacctgggaggcgg

SEQ ID NO: 9654 - DNA, 558 bp, Homo sapiens
cttttgattttgtcataaactatgattttcccctttaaaatgttcttagatttaaaatagggggtaagaactgtgtcttgacagatgacaattgtagttagattccgtagtctacacgtggcttttgcggtggttttccatccacttgcctctgctctctttaataaagttctgttgtgactgttaaaaggcctaaaaccttttaacgtttgcaagttggagacttayaggctaaaatttcctcctgagggaatccttttgtatttctagtatcattttaaagtaatagacatgtatcattttctcatatcaaacaccacccctatctattaggtaaaatctttggacttctattttatataaaatcagtagtctttcagcaaattgtgtattcagaaatgctacacaatagaagaggaggtggaatgaaggttccatttaggaacagtttgctcttagcaagtaaccaggtgttagtgtttcaggatgacttcatggaagggaagtcattgaaatgtctataatcaggtttttaagtgtcattcccaaattatcttg

SEQ ID NO: 9655 - DNA, 539 bp, Homo sapiens
gggaaactaaattaaaaagataaacaatatgaaataaagccatcttaaaactaatcctcaatcatttaaggcttggaagcaaagtctgatattggtgtacaagcccaagcagtgagggccacatgaaacaaggcaaattgtctctgctccagggtccataaagcctttcagtcccacatttggggtggtatgcttggtttcaggtttttttttagtacaatgaaccaattatgttcttttttcaatgagaagaatgactaaataaaggaaataaatggcacttaatccattgcaaccaagctgwctcaagcattaaataaaattctttgaaagtatttttctaatctgtgatagtccaactctatcccttattttacacacacacacacacacacacacacacacacactgagagacagagacagagagcaagagagagagaaagggaagagagaaactatagctttttatgtaatgaattctagaaaagatagatttaaatagccctttgcagccattcttttgtgccaattttagtg

SEQ ID NO: 9656 - DNA, 539 bp, Homo sapiens
gggaaactaaattaaaaagataaacaatatgaaataaagccatcttaaaactaatcctcaatcatttaaggcttggaagcaaagtctgatattggtgtacaagcccaagcagtgagggccacatgaaacaaggcaaattgtctctgctccagggtccataaagcctttcagtcccacatttggggtggtatgcttggtttcaggtttttttttagtacaatgaaccaattatgttcttttttcaatgagaagaatgactaaataaaggaaataaatggcacttaatccattgcaaccaagctgactcaagcattaaataaaattctttgaaagtatttttctaatctrtgatagtccaactctatcccttattttacacacacacacacacacacacacacacacacactgagagacagagacagagagcaagagagagagaaagggaagagagaaactatagctttttatgtaatgaattctagaaaagatagatttaaatagccctttgcagccattcttttgtgccaattttagtg

SEQ ID NO: 9657 - DNA, 539 bp, Homo sapiens
gggaaactaaattaaaaagataaacaatatgaaataaagccatcttaaaactaatcctcaatcatttaaggcttggaagcaaagtctgatattggtgtacaagcccaagcagtgagggccacatgaaacaaggcaaattgtctctgctccagggtccataaagcctttcagtcccacatttggggtggtatgcttggtttcaggtttttttttagtacaatgaaccaattatgttcttttttcaatgagaagaatgactaaataaaggaaataaatggcacttaatccattgcaaccaagctgactcaagcattaaataaaattctttgaaagtatttttctaatctgtgatagtccaactctatcccttattttacacacacacacacacacacacacacacacacactgagagacagagacagagagmaagagagagagaaagggaagagagaaactatagctttttatgtaatgaattctagaaaagatagatttaaatagccctttgcagccattcttttgtgccaattttagtg

SEQ ID NO: 9658 - DNA, 539 bp, Homo sapiens
gggaaactaaattaaaaagataaacaatatgaaataaagccatcttaaaactaatcctcaatcatttaaggcttggaagcaaagtctgatattggtgtacaagcccaagcagtgagggccacatgaaacaaggcaaattgtctctgctccagggtccataaagcctttcagtcccacatttggggtggtatgcttggtttcaggtttttttttagtacaatgaaccaattatgttcttttttcaatgagaagaatgactaaataaaggaaataaatggcacttaatccattgcaaccaagctgactcaagcattaaataaaattctttgaaagtatttttctaatctgtgatagtccaactctatcccttattttacacacacacacacacacacacacacacacacactgagagacagagacagagagcragagagagagaaagggaagagagaaactatagctttttatgtaatgaattctagaaaagatagatttaaatagccctttgcagccattcttttgtgccaattttagtg

SEQ ID NO: 9659 - DNA, 561 bp, Homo sapiens
gtaagatacacaaatgggtattgtaaatagcagagccaatgagaaaattagatgggcaggatggagaaatcttagaaaatggagttgacctcacaatacatagcatgggaaattgatayatgatgcaaataacttgtgatccaacttgtcaatgtactgttgtctatcagtatatttatagattgatctatccgttgatttaccttaatcagttcatctgttttgtagaaaatgaggatttgagtacttccttcctcagctagaaaaatagaaactcagagactgttttcaagccaatgcttctgattattttactgaggaacatataattgtagtaaacacctatgtgatttacaattttcaacattaacacaaaactttacatttttattttccctaaatttcttaatacacaaattcatagaagtttctatttttatgcagaacatttaggctcaaatgttcaaaaatttattatttgttttagctttgatttttcagttgttaatgtctcagtaagccttcagtcaaccgataccaagtcacaatacccttatcaaa

SEQ ID NO: 9660 - DNA, 1791 bp, Homo sapiens
taatgaatacattaggtaacgttacaaggttattgcaggaggcatttattaactaaacaaatttgtgttttcaacacatgtgggtgctctgctctcatgaacggagatgtaagaaagttaagttaggtccacatgataaacatatcaaatgaattaaaatatttctgtgtagagttttcccctaggtataggaacaatttactgtgggctataataaccccaggatgtgtagacagaagacacatggtgtctgtgtatactaaactctaatgaggttacaaaccacttctactctattccagatctattgaggctcctacttatcttggttggtatttgacccagtggacctcagatgcatggagagtcaacatttgtcatgtttttggtatggaaattagataaaattattacaacataaagtgtagcttcataaaaactaagaaaggacaaatacgtttcttcacatttcagacgctcacatctaggtgtgacattactttaatcaattagataataccagttacaattctctgtacctagaagatagtaatggctgacttcattcctctgtttgaatttcaggctttcacttaatcagacctgagtacttagatggtcacagctgggtattagatcctaatatcaaaatctgctatgaaaccacatgtgatcaatgtttagcaacaaagagaataaatgatggaccttggcaggtgtcccaggcactacacaaaattcacatcacattacaaagatgataagtagtctgattaaaatttattgcttttattcaccttacgtattgttccccaagcatttctttcagaataggctaattagcatacctttgggctccaagcagaagaaaatacaggaaattatatgtaggaatcagtagtgttggacattgtgtcttttcaagaacatacttagcctgtgaacagtgcagaaaaacatctgctggcaatgagctgcatggagcacgggtcacttggctcagcatgaattgaaattattagggaagaatttactcgcgaagatataacacagcatccacctaccgcttcacaatatttcaggtcaactgacttgccatcacttcgaacacaatccaacatccttgtttttattccatttccacaaactgccttctcactcagctgacatgtactccagtctgaaaaaaagggaagcccatcagaacagaaggctaagtaagaaacagatttcaaatgaaactctgatgacctgaatcccatatttaattcacaactgcttcctaagccccataatcaatcatcccccatgcagagcatatgggtcccagctttgaacgtatcaggagtcaaatggaattgctggggttgcacatagctacagggattattcttaaaggcagatgtctacttgaaaatcttgatagctagccgtttggtgacactgtgaaaatggctttggcttacagatcaatgtcacttaaaaactttctttcccaataaaaatataatttaaaatcttagcattacttttagccaaataatcataattgtgacagacggtactttaactgtgtagttatattcagataaaacatacattttatttcttatccatatttagaatgcaagaaaatgcatacgtttattaaagtgataaaaatcacwttggccatatttattcattctcttatgtctttcgtaagaagacataaaagacacctctttccctgggtaacatagcacatcccagataactgtgattttttttttttgtatcatcaaaggaaac

SEQ ID NO: 9661 - DNA, 1791 bp, Homo sapiens
taatgaatacattaggtaacgttacaaggttattgcaggaggcatttattaactaaacaaatttgtgttttcaacacatgtgggtgctctgctctcatgaacggagatgtaagaaagttaagttaggtccacatgataaacatatcaaatgaattaaaatatttctgtgtagagttttcccctaggtataggaacaatttactgtgggctataataaccccaggatgtgtagacagaagacacatggtgtctgtgtatactaaactctaatgaggttacaaaccacttctactctattccagatctattgaggctcctacttatcttggttggtatttgacccagtggacctcagatgcatggagagtcaacatttgtcatgtttttggtatggaaattagataaaattattacaacataaagtgtagcttcataaaaactaagaaaggacaaatacgtttcttcacatttcagacgctcacatctaggtgtgacattactttaatcaattagataataccagttacaattctctgtacctagaagatagtaatggctgacttcattcctctgtttgaatttcaggctttcacttaatcagacctgagtacttagatggtcacagctgggtattagatcctaatatcaaaatctgctatgaaaccacatgtgatcaatgtttagcaacaaagagaataaatgatggaccttggcaggtgtcccaggcactacacaaaattcacatcacattacaaagatgataagtagtctgattaaaatttattgcttttattcaccttacgtattgttccccaagcatttctttcagaataggctaattagcatacctttgggctccaagcagaagaaaatacaggaaattatatgtaggaatcagtagtgttggacattgtgtcttttcaagaacatacttagcctgtgaacagtgcagaaaaacatctgctggcaatgagctgcatggagcacgggtcacttggctcagcatgaattgaaattattagggaagaatttactcgcgaagatataacacagcatccacctaccgcttcacaatatttcaggtcaactgacttgccatcacttcgaacacaatccaacatccttgtttttattccatttccacaaactgccttctcactcagctgacatgtactccagtctgaaaaaaagggaagcccatcagaacagaaggctaagtaagaaacagatttcaaatgaaactctgatgacctgaatcccatatttaattcacaactgcttcctaagccccataatcaatcatcccccatgcagagcatatgggtcccagctttgaacgtatcaggagtcaaatggaattgctggggttgcacatagctacagggattattcttaaaggcagatgtctacttgaaaatcttgatagctagccgtttggtgacactgtgaaaatggctttggcttacagatcaatgtcacttaaaaactttctttcccaataaaaatataatttaaaatcttagcattacttttagccaaataatcataattgtgacagacggtactttaactgtgtagttatattcagataaaacatacattttatttcttatccatatttagaatgcaagaaaatgcatacgtttattaaagtgataaaaatcactttggccatatttattcattctcttatgtctttcgyaagaagacataaaagacacctctttccctgggtaacatagcacatcccagataactgtgattttttttttttgtatcatcaaaggaaac

SEQ ID NO: 9662 - DNA, 1097 bp, Homo sapiens
ccaaaagacaaagcaagaaacagcaccactgcaaagttaacttccatattcgggtgctttaagtagaatcactcacagatcagaagcacaagaagtgatagagcccttcatgttatatcttagggcaagagctcaactattcatagttttctgagaagacaggcatgccagaaagtcaccttccttattttccaacttacatgtataaaagagtatgttctctgtaaaatactataaactttcagstgggcatggtggcttacgcctgtaatcccagcactatgggaggcagaggtggacggatcacttgaggtcaggagttcgagaccagcctggacaacatggtgaaatcccgtctctactaaaaatacaaaaattagccgggcgtggtggtacgcgcctgtaatcgcagctactcaggaggctgaggcacatgaatcgcttgaacccaggaggcagaggttgtagtgagccgagattgcgccactgcactccagcctgggtgacagagcgagactctgtctcaaaaaagaaaaaaaaagtatgttctttgtaaaatactataaacttctataaacttttcttaaaagagagagaaaaaatgctgcatttttctaaccttccattggtaattccatttctattacttcattgcttgtggaagaagggtggcttcctgaaagaaaaataaataatatataacaaaggagaaatacaaaaatgtaaaaagaaatcactgaatacaatgcaaacaagtcaatacccacgcaggaatacacctgaaatacttctaccccttgaaataaaactggctgcgcgcggtaactcacgcctgtaatctcagcactctgggaggtggaggcgggcagatcacctgaggtcaggagttcgagaccagcctggccaacatggtgagaccccttctctacaaaaaaatacaaaaatcaaccgagtgtggtggcacacgcctgtaatctcagctattcttgaggccgagccaggagaatcacttgaacctgggaggtgaaggttgcagtgagccatgatcacgccactgcattccagcctgggcgacagagcgagactctgtctaaaaa

SEQ ID NO: 9663 - DNA, 1097 bp, Homo sapiens
ccaaaagacaaagcaagaaacagcaccactgcaaagttaacttccatattcgggtgctttaagtagaatcactcacagatcagaagcacaagaagtgatagagcccttcatgttatatcttagggcaagagctcaactattcatagttttctgagaagacaggcatgccagaaagtcaccttccttattttccaacttacatgtataaaagagtatgttctctgtaaaatactataaactttcagctgggcatggtggcttacgcctgtaatcccmgcactatgggaggcagaggtggacggatcacttgaggtcaggagttcgagaccagcctggacaacatggtgaaatcccgtctctactaaaaatacaaaaattagccgggcgtggtggtacgcgcctgtaatcgcagctactcaggaggctgaggcacatgaatcgcttgaacccaggaggcagaggttgtagtgagccgagattgcgccactgcactccagcctgggtgacagagcgagactctgtctcaaaaaagaaaaaaaaagtatgttctttgtaaaatactataaacttctataaacttttcttaaaagagagagaaaaaatgctgcatttttctaaccttccattggtaattccatttctattacttcattgcttgtggaagaagggtggcttcctgaaagaaaaataaataatatataacaaaggagaaatacaaaaatgtaaaaagaaatcactgaatacaatgcaaacaagtcaatacccacgcaggaatacacctgaaatacttctaccccttgaaataaaactggctgcgcgcggtaactcacgcctgtaatctcagcactctgggaggtggaggcgggcagatcacctgaggtcaggagttcgagaccagcctggccaacatggtgagaccccttctctacaaaaaaatacaaaaatcaaccgagtgtggtggcacacgcctgtaatctcagctattcttgaggccgagccaggagaatcacttgaacctgggaggtgaaggttgcagtgagccatgatcacgccactgcattccagcctgggcgacagagcgagactctgtctaaaaa

SEQ ID NO: 9664 - DNA, 1097 bp, Homo sapiens
ccaaaagacaaagcaagaaacagcaccactgcaaagttaacttccatattcgggtgctttaagtagaatcactcacagatcagaagcacaagaagtgatagagcccttcatgttatatcttagggcaagagctcaactattcatagttttctgagaagacaggcatgccagaaagtcaccttccttattttccaacttacatgtataaaagagtatgttctctgtaaaatactataaactttcagctgggcatggtggcttacgcctgtaatcccagcactatgggaggcagaggyggacggatcacttgaggtcaggagttcgagaccagcctggacaacatggtgaaatcccgtctctactaaaaatacaaaaattagccgggcgtggtggtacgcgcctgtaatcgcagctactcaggaggctgaggcacatgaatcgcttgaacccaggaggcagaggttgtagtgagccgagattgcgccactgcactccagcctgggtgacagagcgagactctgtctcaaaaaagaaaaaaaaagtatgttctttgtaaaatactataaacttctataaacttttcttaaaagagagagaaaaaatgctgcatttttctaaccttccattggtaattccatttctattacttcattgcttgtggaagaagggtggcttcctgaaagaaaaataaataatatataacaaaggagaaatacaaaaatgtaaaaagaaatcactgaatacaatgcaaacaagtcaatacccacgcaggaatacacctgaaatacttctaccccttgaaataaaactggctgcgcgcggtaactcacgcctgtaatctcagcactctgggaggtggaggcgggcagatcacctgaggtcaggagttcgagaccagcctggccaacatggtgagaccccttctctacaaaaaaatacaaaaatcaaccgagtgtggtggcacacgcctgtaatctcagctattcttgaggccgagccaggagaatcacttgaacctgggaggtgaaggttgcagtgagccatgatcacgccactgcattccagcctgggcgacagagcgagactctgtctaaaaa

SEQ ID NO: 9665 - DNA, 1097 bp, Homo sapiens
ccaaaagacaaagcaagaaacagcaccactgcaaagttaacttccatattcgggtgctttaagtagaatcactcacagatcagaagcacaagaagtgatagagcccttcatgttatatcttagggcaagagctcaactattcatagttttctgagaagacaggcatgccagaaagtcaccttccttattttccaacttacatgtataaaagagtatgttctctgtaaaatactataaactttcagctgggcatggtggcttacgcctgtaatcccagcactatgggaggcagaggtggacggatcacttgaggtcaggagttcgagaccagcctggacaacatggtgaaatcccgtctctactaaaaatacaaaaattagccgggcgtggtggyacgcgcctgtaatcgcagctactcaggaggctgaggcacatgaatcgcttgaacccaggaggcagaggttgtagtgagccgagattgcgccactgcactccagcctgggtgacagagcgagactctgtctcaaaaaagaaaaaaaaagtatgttctttgtaaaatactataaacttctataaacttttcttaaaagagagagaaaaaatgctgcatttttctaaccttccattggtaattccatttctattacttcattgcttgtggaagaagggtggcttcctgaaagaaaaataaataatatataacaaaggagaaatacaaaaatgtaaaaagaaatcactgaatacaatgcaaacaagtcaatacccacgcaggaatacacctgaaatacttctaccccttgaaataaaactggctgcgcgcggtaactcacgcctgtaatctcagcactctgggaggtggaggcgggcagatcacctgaggtcaggagttcgagaccagcctggccaacatggtgagaccccttctctacaaaaaaatacaaaaatcaaccgagtgtggtggcacacgcctgtaatctcagctattcttgaggccgagccaggagaatcacttgaacctgggaggtgaaggttgcagtgagccatgatcacgccactgcattccagcctgggcgacagagcgagactctgtctaaaaa

SEQ ID NO: 9666 - DNA, 611 bp, Homo sapiens
caattgtctatatttaatacatagaaataaagttagtgaaacatcaatatgaagcccataaacagttggcggaaaaagcaatggcctagagatttgggaagctgtaccctagactttgctctgcctctatgctgtatgaccttgggcaagtcattgaagatcttaaagtcttggtttcttcatctctacaaagtggggatggcagtctctatagtttaaaattgcattattctagatagtgcagagatagacagtgtcatttgaaaatgtcttaaaatcctgatacttctaatggaataaaatgaaagggataaaaaccaagacatggccaggtgcagtggctcacgmctgtaatcccagcactttgggaggccaaggcaggtggatcacctgaggtcaggagttcaagaccagcctggccaacatggtcaaaccccatctctgttaaaaatacaaaaattagctggagatggtggcgggtgcctgtaatcccagctacttgggaggctgaggcagaaagaattgcttaacacccaggaggcagaggttgcagtgagctgagatggtatcactgcactccagcctgggtgatagagtgaggctctgccttg

SEQ ID NO: 9667 - DNA, 1799 bp, Homo sapiens
aatttagcagtatgatgaatcaggctcatataatccagagaccagggaattcagacataaatgcaacattttacttaggttcacttttatctttcttcctattcacatctaattcaaatcactatactacaatatccatttgttaggtagcaaaaaatgaatgcgtagttattttcaatgaagagaactgtttatacagagttgaattgtttgggcatggaggacaaagcataaaatagaatagtttttaaaaatgccttgagaaacattatcaatgaatgtttccttacacctgatcagaggttttgcaaatgcatgtttatggctagttttctactttgttcattcattcattctcactaaaattaatgaattattagacctggggttatgcggkctttgagaaaaatcacttgcacatttgttcagtcagggttcttaggattgttgactgcaaacacttgggtatacgccatcaattctaagaaatttattaaaccaatattgaatagcttccagaattgttgggagggctcaggaataagtttccagaaaaaaagtcccaagactaagcttcagaactagcctgatggaaaaacagctgccgctacatctgctgcaattaataccaataatatatgtcaactgccaatgccaccaggaccaatgtcactttcatatcaaaaattaaatatactgctgactcctcaaaccacagccctcgaccaccacattcactgagaaaaatggaaagtctgtgcaaaatctgccttctgacactgatgaatccccaaatgaagtatggcaaacatctgttagatgggacaagtctacaagcctagtgacatgcctgcacactggctgcaagaaagactagaaatttgacttctgacttctaagttgctaagacataactcagagtgttgtaatttcatgaatttagaaagtctactcaaatactgtggatatgccaattgtctagcatattagcattttatgtaacatatcatggatcacgacatattaaaaaaatcaaatctcagaatttcagaagtgacagggacttcagaaaacaattacaatccagcccctcagttgtactaatggagtccaggggctatctattcatttaaaccagagccacaaattggtattctaaagtctgtgatggtcttttacattaggccattcaaaaatcacctcttcttatctcctatcactagtgctatttgtgagcagagaatggttcagctgagattgtagactgaatatggtggctcatgcttgtaatcctagcacctttggaggccaaggcaggaggaccacttgagcccaggagcttgagaccagcctgggcaacatggcaaaacctcgtctccattttttaaaaattaaaataaaaaataaagcaaagaaaatgtagggaattattatgttgaaggtggtacattgataattttaaacatcacccagacaggctgcagttgacatttccaatattcaatgaacattcgccctttaactgtgagaatctgctagctagtgattttgtgagttattgcccattagatgtagggcttctggaacacatcggctcctctctacacaccaacatacaaaacagcaagtcatacgcctcagaaggatgacccagaccaaaaccaaaatgttagctgggtaactattgtcgttggcatctatttgcttttcattaggttggaactgaactagagcttcagggagatcaatgagcacagggtgcagtggtaaaaatgtggcaccataaacctgcttgcaat

SEQ ID NO: 9668 - DNA, 1799 bp, Homo sapiens
aatttagcagtatgatgaatcaggctcatataatccagagaccagggaattcagacataaatgcaacattttacttaggttcacttttatctttcttcctattcacatctaattcaaatcactatactacaatatccatttgttaggtagcaaaaaatgaatgcgtagttattttcaatgaagagaactgtttatacagagttgaattgtttgggcatggaggacaaagcataaaatagaatagtttttaaaaatgccttgagaaacattatcaatgaatgtttccttacacctgatcagaggttttgcaaatgcatgtttatggctagttttctactttgttcattcattcattctcactaaaattaatgaattattagacctggggttatgcggtctttgagaaaaatcacttgcacatttgttcagtcagggttcttaggattgttgactgcaaacacttgggtatacgccatcaattctaagaaatttattaaaccaatattgaatagcttccagaattgttgggagggctcaggaataagtttccagaaaaaaagtcccaagactaagcttcagaactagcctgatggaaaaacagctgccgctacatctgctgcaattaataccaataatatatgtcaactgccaatgccaccaggaccaatgtcactttcatatcaaaaattaaatatactgctgactcctcaaaccacagccctcgaccaccacattcactgagaaaaatggaaagtctgtgcaaaatctgccttctgacactgatgaatccccaaatgaagtatggcaaacatctgttagatrggacaagtctacaagcctagtgacatgcctgcacactggctgcaagaaagactagaaatttgacttctgacttctaagttgctaagacataactcagagtgttgtaatttcatgaatttagaaagtctactcaaatactgtggatatgccaattgtctagcatattagcattttatgtaacatatcatggatcacgacatattaaaaaaatcaaatctcagaatttcagaagtgacagggacttcagaaaacaattacaatccagcccctcagttgtactaatggagtccaggggctatctattcatttaaaccagagccacaaattggtattctaaagtctgtgatggtcttttacattaggccattcaaaaatcacctcttcttatctcctatcactagtgctatttgtgagcagagaatggttcagctgagattgtagactgaatatggtggctcatgcttgtaatcctagcacctttggaggccaaggcaggaggaccacttgagcccaggagcttgagaccagcctgggcaacatggcaaaacctcgtctccattttttaaaaattaaaataaaaaataaagcaaagaaaatgtagggaattattatgttgaaggtggtacattgataattttaaacatcacccagacaggctgcagttgacatttccaatattcaatgaacattcgccctttaactgtgagaatctgctagctagtgattttgtgagttattgcccattagatgtagggcttctggaacacatcggctcctctctacacaccaacatacaaaacagcaagtcatacgcctcagaaggatgacccagaccaaaaccaaaatgttagctgggtaactattgtcgttggcatctatttgcttttcattaggttggaactgaactagagcttcagggagatcaatgagcacagggtgcagtggtaaaaatgtggcaccataaacctgcttgcaat

SEQ ID NO: 9669 - DNA, 544 bp, Homo sapiens
atttttggtgccgagttgggagagtgagccaggaaagacgggggagaggaaggtgctgacagggaaggattattggagcaaagaaaacaaatcaattagcatcgtgccaggcggagctggcagtggttcctccaaattgggcagcagcctctattttaaatggtgtatttttactgcttactattctgggggagacatatggtacctgcactgggttctgggggcccaggaggctggttttttgaaattagagacgacattctaaaacatggtaaagagaaatgcttgacagattcatttcactaatggccagttatttgaagcctaattctgagaaacgggtgcacagtttacggggaccagcaaatggtcaggggcagacacatggtcaggtgagtcccttattttaatamatattcacagcatacctgctaggtaggtgtgattatccccatttctcaggtgggaaaagtgaggccagggagcctgtgtgccaagtgggtgatcacacagacggcttttctcccctgatgtctgtgtcacc

SEQ ID NO: 9670 - DNA, 538 bp, Homo sapiens
gagagcctacctggagggcctgtgcgtggagtsgctccgcagatacctggagaacgggaaggagacgctgcagcgcgcgggtaccaggggcagtggggagccttccccatctcctataggtcgccggggatggcctcccacgagaagaggaggaaaatgggatcagcgctagaatgtcgccctcccttgaatggagaatggcatgagttttcctgagtttcctctgagggccccctcttctctctaggacaattaagggatgacgtctctgaggaaatggaggggaagacagtccctagaatactgatcaggggtcccctttgacccctgcagcagccttgggaaccgtgacttttcctctcaggccttgttctctgcctcacactcagtgtgtttggggctctgattccagcacttctgagtcactttacctccactcagatcaggagcagaagtccctgttccccgctcagagactcgaactttccaatgaataggagattatcccaggtgcctgcgtccaggctggtgtctgggt

SEQ ID NO: 9671 - DNA, 512 bp, Homo sapiens
atgtgcatgtttgtgtatctctatcttttgrgtagccattttaaatacacacacaaacatacacacacacacacaccccttattttcctgtgatcctaccatccagttaagatatagacccttactagtacctttaaagctcctggtcagctgtacaagaccaacactccctctcttccacataggaaactgcccttctgaattttgtttttcttttgcttttattattttatcatattatgcatatagccctaaacaatatagggcttattttagttttgtgtgttttaagactttattatataaatgtagtatgtcatgtgtatttttttgtgacttgcattttcttggaccctgcatgtgttacatgattcttgtgtgttgatatgtgtcactatacttcatttattttcactgctgcataattttggattatataactatgacacagtgtacccattctcctgttggtggatatttgggttgtttccactttttgatattataaacag

SEQ ID NO: 9672 - DNA, 512 bp, Homo sapiens
atgtgcatgtttgtgtatctctatcttttgagtagccattttaaatacacacacaaacatacacacacacacacaccccttattttcctgtgatcctaccatccagttaagatatagacccttactagtacctttaaagctcctggtcagctgtacaagaccaacactccctctcttccacataggaaactgcccttctgaattttgtttttcttttgcttttattattttatcatattatgcatatagccctaaacaatatagggcttattttagttttgtgtgttttaagactttattatataaatgtagtatgtcatgtgtatttttttgtgacttgcattttcttggaccctgcatgtgttayatgattcttgtgtgttgatatgtgtcactatacttcatttattttcactgctgcataattttggattatataactatgacacagtgtacccattctcctgttggtggatatttgggttgtttccactttttgatattataaacag

SEQ ID NO: 9673 - DNA, 537 bp, Homo sapiens
tagtagagatggggtttcaccatgttggccaggctggtctcaaattcctggcctccagtgatctgcccacttgagcctcgcaaagtagaactacaggcgtgagccactgtgcccggcctcaggtatttctttataccaatgcaagaatggcctaacacatatggagaaagggtctttgtagatgtggaatcatcagtatttaaatggaatcataagtgtctrcataagacagaggcagagagagattacacaaagaagagattaaagttatgtggccacaagccagggaatgctgttggccaacagaagctggaagaagcaagaaaccgattctttactagagcccctggagggagtgcagccctgccgacacttcgatttcagcccagtgataccgatttcagacttctagcctccagaactgtgagagagtaaatatctgttgttttaagccacaaaattcctggtgatttgttacagtaggcacaggaaactaatataatgcattttcagcataatcggataatgccacattga

SEQ ID NO: 9674 - DNA, 516 bp, Homo sapiens
aagcgccrctgacccctctgaatgcctgcaacctttcctttccctgtgtgatgctggtgacccagagctgtccctttcacaaaaatgttcaagaagaactaactgagtaaaagcaaaagcaaagcatgtcagcatagatttggagtcagtagacctaaattcagttatcagcgttgctacctactagctatatgatctaacctctcttgagattcagtttccctgttataaaatggggatgattgtagtcctcatctttcagggttgtgggaataaagtgagacaagaaagccatgaaaggtgcctagcacaatgcttagaatgtcgtaggcacttgatgttatttccatcattagccaccatcacaaaggcctgattgcagattaacttgttctttttatcaaaagcaacgttaaggatgcctcaggtacatgaagaccataacaaagactggagcttatttactgtagcagatttcatttgaaatgcttgggagccatgcttcccaaatgaatg

SEQ ID NO: 9675 - DNA, 567 bp, Homo sapiens
taatataaaatatatattacatataaatttatattatattataattatatatattatatataaataaaataaaataatatatttatatatcatatatataaataaaataaaataatatatttatattatatatatataaataaaataaaataatatatttatatwatatatatatatatatatatatatacacacacacacacatatatatatatggcagtatggagcctgttttatggaatttaccatttcccaaaagccccaaaggagaaccttgggtatatacaccaagagatcacagcactgtgcctgaggtatgtgaaactacaagagaaacatggaacattcctaactcattatttttaccaaaagttgagagttggaaggatgtttctaaatgatgtaactaataagtattaaaaagtttttcaattctaagacaaagtaatctccccactttaatatttttgaaaccacagagaagctttcaatcaatattcattttttaatggtgagtttactaaaagtaaattactacaatttaggagaaaatcagtataagaatgc

SEQ ID NO: 9676 - DNA, 567 bp, Homo sapiens
taatataaaatatatattacatataaatttatattatattataattatatatattatatataaataaaataaaataatatatttatatatcatatatataaataaaataaaataatatatttatattatatatatataaataaaataaaataatatatttatattwtatatatatatatatatatatatacacacacacacacatatatatatatggcagtatggagcctgttttatggaatttaccatttcccaaaagccccaaaggagaaccttgggtatatacaccaagagatcacagcactgtgcctgaggtatgtgaaactacaagagaaacatggaacattcctaactcattatttttaccaaaagttgagagttggaaggatgtttctaaatgatgtaactaataagtattaaaaagtttttcaattctaagacaaagtaatctccccactttaatatttttgaaaccacagagaagctttcaatcaatattcattttttaatggtgagtttactaaaagtaaattactacaatttaggagaaaatcagtataagaatgc

SEQ ID NO: 9677 - DNA, 567 bp, Homo sapiens
taatataaaatatatattacatataaatttatattatattataattatatatattatatataaataaaataaaataatatatttatatatcatatatataaataaaataaaataatatatttatattatatatatataaataaaataaaataatatatttatattatatatatatatatatatatatatayacacacacacacatatatatatatggcagtatggagcctgttttatggaatttaccatttcccaaaagccccaaaggagaaccttgggtatatacaccaagagatcacagcactgtgcctgaggtatgtgaaactacaagagaaacatggaacattcctaactcattatttttaccaaaagttgagagttggaaggatgtttctaaatgatgtaactaataagtattaaaaagtttttcaattctaagacaaagtaatctccccactttaatatttttgaaaccacagagaagctttcaatcaatattcattttttaatggtgagtttactaaaagtaaattactacaatttaggagaaaatcagtataagaatgc

SEQ ID NO: 9678 - DNA, 567 bp, Homo sapiens
taatataaaatatatattacatataaatttatattatattataattatatatattatatataaataaaataaaataatatatttatatatcatatatataaataaaataaaataatatatttatattatatatatataaataaaataaaataatatatttatattatatatatatatatatatatatatacayacacacacacatatatatatatggcagtatggagcctgttttatggaatttaccatttcccaaaagccccaaaggagaaccttgggtatatacaccaagagatcacagcactgtgcctgaggtatgtgaaactacaagagaaacatggaacattcctaactcattatttttaccaaaagttgagagttggaaggatgtttctaaatgatgtaactaataagtattaaaaagtttttcaattctaagacaaagtaatctccccactttaatatttttgaaaccacagagaagctttcaatcaatattcattttttaatggtgagtttactaaaagtaaattactacaatttaggagaaaatcagtataagaatgc

SEQ ID NO: 9679 - DNA, 567 bp, Homo sapiens
taatataaaatatatattacatataaatttatattatattataattatatatattatatataaataaaataaaataatatatttatatatcatatatataaataaaataaaataatatatttatattatatatatataaataaaataaaataatatatttatattatatatatatatatatatatatatacacayacacacacatatatatatatggcagtatggagcctgttttatggaatttaccatttcccaaaagccccaaaggagaaccttgggtatatacaccaagagatcacagcactgtgcctgaggtatgtgaaactacaagagaaacatggaacattcctaactcattatttttaccaaaagttgagagttggaaggatgtttctaaatgatgtaactaataagtattaaaaagtttttcaattctaagacaaagtaatctccccactttaatatttttgaaaccacagagaagctttcaatcaatattcattttttaatggtgagtttactaaaagtaaattactacaatttaggagaaaatcagtataagaatgc

SEQ ID NO: 9680 - DNA, 550 bp, Homo sapiens
taccagcctgtacactctgtcaacataagggttggccataaaaacctgttatattttactctgggcagcaattatttaatatccctcaacatatgtgtcaaacgcataagaaattgctccaggcttttccacattttcattgcttaaaaaagtagaaaacgccaaacaatgaggccttcatagaacctgaggcatcaaaaatattagctgcattgtgaaagccaaataggagcaacttattcttaaaaaagaatacaattaataaaccacatctccattgacacctagtaagtccccagcaaggtgtaaagccccggatttataaggctasgaaacatattacaggaataaaaccctaaaccacaaaaaggtgtactgtctacaacggttgtggtcactagggaaccctgtttcaacgctgatgcttctctgccttcccttttctaaatcaggttaaatggggctcctcacagtggagctgttcctcctgaccctctgacaccccaaactggactatccccggactgattaccttatcacatgctatttt

SEQ ID NO: 9681 - DNA, 550 bp, Homo sapiens
taccagcctgtacactctgtcaacataagggttggccataaaaacctgttatattttactctgggcagcaattatttaatatccctcaacatatgtgtcaaacgcataagaaattgctccaggcttttccacattttcattgcttaaaaaagtagaaaacgccaaacaatgaggccttcatagaacctgaggcatcaaaaatattagctgcattgtgaaagccaaataggagcaacttattcttaaaaaagaatacaattaataaaccacatctccattgacacctagtaagtccccagcaaggtgtaaagccccggatttataaggctacgaaacatattacaggaataaaaccctaaaccacaaaaaggtgtactgtctacaacggttgtggtcactagggaaccctgtttyaacgctgatgcttctctgccttcccttttctaaatcaggttaaatggggctcctcacagtggagctgttcctcctgaccctctgacaccccaaactggactatccccggactgattaccttatcacatgctatttt

SEQ ID NO: 9682 - DNA, 450 bp, Homo sapiens
gggccaatgggcggggctggaccaatgggcgggccgggscaagggcgggcactaagccgacggaaggggtggaacaaaagggcggggatggaccaatgggcgagggatgggctgggccaatgggcgtggctagaccaatgggcgagcgaagggccaatgggcagggcggggccaaaggacggggtctgagccaatggaagggggcggtaccaatgggcggggctgaaccaatggatgggttggaccaatggcaagggctggactaatggacgagggatgggccggggctggaccaatgggcgagggctggaccaatggccacgggctgggcggtggctgggccaatgggaaaaggaggatttcacctcgtggaatgctcaggggatgaagggagtattcctttatctagcttctactttgacataatttctcacctacagaaaagttgca

SEQ ID NO: 9683 - DNA, 589 bp, Homo sapiens
tggtattaatggtaatgaaaaacaattttattttcctaaaagtaaggtctcagataaaatgctaacrtcaccaaaatgtacagagctctttcagcatacatttttccaaaatttaaaatgtgcacattttaaataacaccatataacacacatgacctaaagggagtaattctttttagaattatattttatttataaaaatcaaatcttttatggagggttcacacaaaaataaatatttatttacttttaggagaaatatcccttgattagaagtcaggcacagggctgggcatggtggctcacgcctttaatcccagcactttgggaggccgaggtgggtggatcatgaggtcaggagatcgagaccatcctggctaacatggtgaaaccccgtctctactgaaaatacaaaaaattagctgggcgtggtggcgggcgcctgtagttccagctactcaggaggctgaggcaggagaatggtgtgaacccaggaggcggagcttgcagtgagccgagatcacgccactgcactccagcctgggcgacagagcaagactccgtctcaaaaaaaaaaaaaaaaaaaaaa

SEQ ID NO: 9684 - DNA, 589 bp, Homo sapiens
tggtattaatggtaatgaaaaacaattttattttcctaaaagtaaggtctcagataaaatgctaacgtcaccaaaatgtacagagctctttcagcatacatttttccaaaatttaaaatgtgcacattttaaataacaccatataacacacatgacctaaagggagtaattctttttagaattatattttatttataaaaatcaaatcttttatggagggttcacacaaaaataaatatttatttacttttaggagaaatatcccttgattagaagtcaggcacagggctgggcatggtggctcacgcctttaatcccagcactttkggaggccgaggtgggtggatcatgaggtcaggagatcgagaccatcctggctaacatggtgaaaccccgtctctactgaaaatacaaaaaattagctgggcgtggtggcgggcgcctgtagttccagctactcaggaggctgaggcaggagaatggtgtgaacccaggaggcggagcttgcagtgagccgagatcacgccactgcactccagcctgggcgacagagcaagactccgtctcaaaaaaaaaaaaaaaaaaaaaa

SEQ ID NO: 9685 - DNA, 634 bp, Homo sapiens
tgatcatgccactgcactccagcctgggtgacagagccagatcctgtctcaaaaaaaaaaaaaagagggagaccaccaagagcttaggcctaaatcatcccccattaccaagcttcatgggaaatctaagtttctttctctcagcatacgtatgtcaaatctcaggaaggactgactggtcattcttgggtcatacccacccatgagtcagtcatgctagccaagargaaaggggattctggtaggtcagggctagctcatgacacagtagttcgaaaggaagaaagacacccctctcaagagaagaggaaagagatgtcgagcagatataaacaagtatctgttctttcaggtaacacccattctgatgcagcccagcacacaagacccttcccagtgtcacccttgctgactttgccacgtcccattgagagtgaatcagacagtaccttcctaggcagagtgccgccccacacctccatggacataggtaatctattccaattggtaatacagttgagaagcatttgagcacttgttggaacaatggcaatctttttttttttctgtaatgattcatacaaacttggccatgggactttacaaaggaaggaaaatagacatcaacatttct

SEQ ID NO: 9686 - DNA, 520 bp, Homo sapiens
aaaaaatgaaatacagctggtgggactgagcactgcattttcattgtatttcatttcaattaacatacatttaagytgaagtagccaaatgtggtcagcagtattgtattcagagtagcactgagctgaagacccaggcaggaggtcgaaggcagggacaggaaggtcagggtttaaggtctgtgcagctatggcagagaagcgactttggcaaagcgcagagtgaggccccaggaagggaggaggtgggacactcggtctcggcatctggctccactggaagagaggtatacccagttcccagggtcaaagtgtttgttacacacacatgcatccatgcctgtgtgtgagtataggggttggtgtgtcccgaggcacccataggtgcgcttgtgtgggatccaggagtcccatgcctatgagcgattcaagagttcacccatgtatggacattgtatggactcccaggcacacacagataatgggtgtgtgttccttcctgagtatccatgcctcctgg

SEQ ID NO: 9687 - DNA, 605 bp, Homo sapiens
atagaatgtgtttatttaaaaatctaaaaggcaatattctgcatagggatattaaaagcatatctttataatgacaaaagaaatacgggtattcattataaccacgtctagtcaacattgccttggcagccttaccagtgcaacaagacaagaaaaagtaattacaagtataaggactgagaggaggaagtaaattgtcattaaagtcatgcaccacataatcacataataactttttggtcaatgatgcactgcgtatagaactgtagtcccataagattataacgaagctgaaaaatctgtattgtctaattatgtcacagccatggtaaagttgtagcacaacatatttctcatgcgtttgtggtgatgctggtgtaaacaaacctaccatgttgccaatcttttaaaattattgcatatacagtggtgtacagatcataacacytgacaataaatgaccatgttactgggctatgtactttctgtactatacttttaattattactttacagtatactctttctacttataaaaacacgttaactgtaaaacagtctcaggcaggtccttcaggaggtattcagaagaagccattgttagc

SEQ ID NO: 9688 - DNA, 622 bp, Homo sapiens
gcctagtctaggtagctttttcctattggcacagttgccagcattcacccgtggaagcttccagcttgcttgtctatgtctgcagctcgattttacaggctgttctttgttagaaaagaaaatgattttgggggctgcttttcattaaacagaaaacctcactgaggacttcctacccttgctatttgcctaaatgatttctccttaactcctatatcatcaccatgcttggctaatttttaatttttttttkgggtagagatggttctcactctgttgcccacactggtctcaaactcctgggcttgagccatcctcctgcctcaccctcccaaagtgctaggattacagggcatgaactgtgccatacccatcttcgaggttttatggtcatgtagaatttctgttcaaggaaagcagataacagacagggttaagggcatttgcttggaatatttaggagttttgcaggtcattcctttgaaatggaatttgttgcacatccctgatctgagattagaaacttttctgcatgttggtgtgaagatgaaagaagacagtgtttataaaatagtttatacttcaattgcctagcagtagaaacctgatttctaggaatttc

SEQ ID NO: 9689 - DNA, 622 bp, Homo sapiens
gcctagtctaggtagctttttcctattggcacagttgccagcattcacccgtggaagcttccagcttgcttgtctatgtctgcagctcgattttacaggctgttctttgttagaaaagaaaatgattttgggggctgcttttcattaaacagaaaacctcactgaggacttcctacccttgctatttgcctaaatgatttctccttaactcctatatcatcaccatgcttggctaatttttaatttttttttggggtagagatggttctcactctgttgcccacactggtctcaaactcctgggcttgagccatcctcctgcctcaccctcccaaagtgctaggattacagggcatgaactgtgccatacccatcttcgaggttttatggtcatgtagaatttctgttcaaggaaagcagataacagacagggttaagggcatttgcttggaatatttaggagttttgcaggtcattcctttgaaatggaatttgttgcacatccctgatctgagattagaaacttttctgcatgttggtgtgaagaygaaagaagacagtgtttataaaatagtttatacttcaattgcctagcagtagaaacctgatttctaggaatttc

SEQ ID NO: 9690 - DNA, 580 bp, Homo sapiens
ttacctgagcatatgtcctttcatacttattttttctgcatacatattttggaaaatggaatatctgcccttttttttwatctgagatacagtctacctctaaaaatacatgattctaacattctcacttttgttggcatttgatcagggtatagaaaaacagttaaaaggacagagaatggttgagagattatgatatgaagagaaaatgtgattgagtgtggtagacttggggcctgcttgaatgttgagagaatgactgttttccgataaaaaaaaaaagtccattctaggatcctaaaagaagggtctgaagttcactgcagaaagcaagctacatagtactaagccactaaggggacatggagcccttagtaattcctaccttagtaatagtctcatcatgccctcttgggaacccagccttgttgattagcctctctgctttctctccttatagttcaacctccctgtttgttccaagcagttcttttcctgcccatttattatgcatttctatacagctttcctcctctttttctataccatgctgcagttcttattgctacctagaggtttt

SEQ ID NO: 9691 - DNA, 547 bp, Homo sapiens
tggaagccaatcttgtctgaaggcgaggaatggcatagagcagttctcacatttgagtagacatcagaatcccctggatggattcttaaaacacggatttctgggcttcatctccagagtttttcattcataagttctgaggtgggaccccaagaaagtgagtttttgacatgtactcaggtgatgctaatgctgttcttgggaccacactttaagaaccactggttcagacctggatatcttagttaaattgcagattatcttttagcagatctggcatggggacttagatcccccgatgatatatatgcacattaaagtatgagaaacaatccagcttggaggcttttcggcttcactstgaattaatggaaagtattattctatcatgtctacacatatatttgcatctatctgcataacagccttagaggaaacaggtaaaactcaatatttcagacttctctcatcttcctcctgcaagatttgattactttaggtataaaacggggtcagcaagttttcttcaatgctgaatcaatcttta

SEQ ID NO: 9692 - DNA, 513 bp, Homo sapiens
aaaaaatttcccataataggattgcaagaactttttaaatctagtcaataacaggttatgattttttagaaaaggaactaagtttgcttctgttaaaagtaaaacatctgctaacttttaatagtgttaaaattatttattcatttaacaatattatttgtatacctaatgtgtgccagtcactgttcaaggtttgtttttcacagagcttagatggaaacaaaggtgtgagatgagtccggatgttcttatatttgttcccaaaacagctccaagttcttaaggacaaagttcatcagaagaaacgtcactgttgtaactaaaccagggtaaataatagagagggtctttgtctaattcagtgtgtataataaaagaagtagrgcagggtcatgttgagttttgagttgaaagaaatttgctataaatatataatgttttgtttgtagaaaaatgtaaggattttgccaagagttaaatgagaaaaagcaaaaacaatccaattgtaagtac

SEQ ID NO: 9693 - DNA, 537 bp, Homo sapiens
gcaaccttgcaatctccgcctcccgggttcaagcagttctcctgcctcagcatcccgagtagctgggattgcaggtgcgtgccatcaagcccggctaatttttgtattttcagtagagatgggttttcaccatgttagtcaggctggtcttgaactcctgacctcatgatcttcccgcctcggcttcccaaagtgctaggattataggcgtgagccaccgcgcccagcgtgtccttctagttttgggattaaacaacatgatccactggtttttgcaggagccagataatgtattaaactgggatttgctaaagaccacattgcaacctcctttcaatctttatttatttattttttgagacagggtcttgatctgtcactcaggctggagtgcagtggtgtgatcaacactcactgcaacctcaccatcctgggccctggtgattctcttgcctcrgcctcctgggtagctggcactgcaggcatgcaccatcgtgccgggctaaattttgtgtttttttatagagacagggtctc

SEQ ID NO: 9694 - DNA, 537 bp, Homo sapiens
gcaaccttgcaatctccgcctcccgggttcaagcagttctcctgcctcagcatcccgagtagctgggattgcaggtgcgtgccatcaagcccggctaatttttgtattttcagtagagatgggttttcaccatgttagtcaggctggtcttgaactcctgacctcatgatcttcccgcctcggcttcccaaagtgctaggattataggcgtgagccaccgcgcccagcgtgtccttctagttttgggattaaacaacatgatccactggtttttgcaggagccagataatgtattaaactgggatttgctaaagaccacattgcaacctcctttcaatctttatttatttattttttgagacagggtcttgatctgtcactcaggctggagtgcagtggtgtgatcaacactcactgcaacctcaccatcctgggccctggtgattctcttgcctcagcctcctgggtagctggcactgcaggcatgcaccatcrtgccgggctaaattttgtgtttttttatagagacagggtctc

SEQ ID NO: 9695 - DNA, 989 bp, Homo sapiens
ccgccagcacccaagatggcggcaygagcgtcgcaaccacaagaaccacatgcttcgtgtcccgcctcagcattctcgggtctcactagacttttgcaagtcactgtgggaaccctcaaggcgagggtgttccgcactctggcggcgatacaccttcctattccctgacctaggccttcattcccccgccacagaaagcgctggaagcgcccaacctggatacttcacccaacgcccaagcccactaacatcgcccgccgcgaaggcgcggccgaggggcccagaatgccagacactagggccttcgccctcctcattggtgggtccataccgcggggcgggcctaggtactcattgggccgggaattatgtcagtcttgggaaatcaggtccggggatgaggaggtacactcagccattgggccctctctgctgccaatcagagggacatccgtcgacggccccggcctcggctcgttgattggagaaactgttcctagggtgtttgcggcgggcgggtttccgagtgcggtagcaggagggggcggggaggtaagcggaggctccgagctctaggccggccggcggtggcggcggcgaggccgggactcgggcttagggcctgctgtggaggcagcggcggacgccgagctaagcagtgggtatcgggcacattcctttcccagaagggagggttgcagcgccgcggggccgaggcttatggggcgacgggatggtgctgaggtgcaggaggcgggggccgagcggggttcccgccagagcccggccctgggcctgacagggaggggccccgcgcggggccgagaggaaagctggctccggggtgggatggactgggcagggttgagggcacgagaaggcgtggtgtgaggcctggacttgggagtggggtggggccatcgggacggagggcggggtggggtttgctgtaagggtgggtcaaggccagggaagtagcacttgttcgc

SEQ ID NO: 9696 - DNA, 1237 bp, Homo sapiens
atatattcagtgtatataaatatattcagtgtatatatatattcagtgtatatatatatatattcagtgtatatatatatattcagtgtatatatayatatatattcagtgtatatatatatatatatacatatataaaatatatacactgtgtacaacctcacacaggacttcaaaactagtagacactcagtgatatttactgaattgacaaattaactaaattcaactgctattcatttctttctttttaaatatataaaagtagtaatacagttttataatttgatatgtgttacatatctttcatcaaagcaacataaaatgctctatacagatctccagtttggggctgggcatggtggttcatgcctgtaatcccagaactttgggagggcgcagcgggatgatctgttgagctcaggagttggagaccagcaaggccaatgtagtgagaccttgtccctactataaacaacaacaaaatttagccagtgtgagcctgtagtcccagctactcggaaggctgaggcaggaggattgcttgagctcatgccactgcactacagcctgggcgagatcctgtctcaaaaccaaaccaaattaaaacaaaacgaaaaaaccctccagctttttaaaattgtcacttgctgaaattacttccctaagatatccatcaaaagatacagagctagaaagagctgtgaatactgtcgagaaatcattaaaatgtgatatagattggtcaaggaaacattcctgctttgggtcagcttgagagcctttgctttgaaagaagtgctgagtattgctggtggagaagtgtatagagggcagttcagaaagatggaattgcctgacctaggattccaagactattttaataacataaatactctggttcaggttagagctgtcagcttttaaaatgctaaaatttctactccacttcttgctttcattcaattgagttttgtcctaaacttagggtaaacagccaaagctgtttttacttctcagaaattagacaccaaacgtattcttgctaattttaaaccagggcatttaaagataagatatcatttggtaatctcatcagtgcctgcccattttttgatgcaatcctcaaactgttgactgttgagacagcttgatgagtcaaatttttgaaaattgtattaactcactgctttttaaaatgtttgcctttagatatagcattaaacaattggattgg

SEQ ID NO: 9697 - DNA, 546 bp, Homo sapiens
tctggttctcctagctgattttcctactttaaaacttgccttccatttttcattatamtttttaattaatcatctcaaaatatttgttatcacatttttttctactcaaatattttatacacgcacacacacacacacacacacacacacacacacgcacatagaggaacctgagctgagtcacaatgactctgtggaatttaatcatgttatgtaaatagaatggcaaagagcaagtctccactataaaaaaatatgaatgaatttgtagaaactaaaaccagcatgctgtatagtaggaaactgcaagcgatatgatatctctgaagcgtaaactatgacccagggatgaatgagacctcaagctgaaaattaagcacaagaccacaccatggagagttttgtttagtatactaaaaaacgggtatttatactgaaacttatgaggatccaatgaaggattttaagcagaggagtgggatgatgagatttgcaagtgaaatagaatcttcattggctatgtggaagctgacttgagtgaaacaa

SEQ ID NO: 9698 - DNA, 599 bp, Homo sapiens
agattatatctatactaaattaaagcacatccacaaatgaccctgtaattttcagaaacrcacataggagtgggtgtctgtggtgggaaggagaagatggacgtacattaagagcctctgctggtttctaagaaggagtttatacaaagatgagacaggaaactctgcctcagagaccagctcattcccatctaagctgaatctcttgccatgaaacccaagtccctttcctttatgtttttttctcatcaaacatgttggagataacactgcctgttgatggtggtgacaacatccaaagacactcaaaggagggctccaattccataattcctataaaaatagcttccatgaaatgtcattagcttcatgatttgtgaaatgaagataattatactcccttcaaagctttgaggtaacgactgaatgagagaatgcctaggaaaacattttaaaatgctagagctttgtaaaatggtaaagctttatggcaatcatcttcggaaaaatgagttctactgtgtattatgctacagctaaataactaacaaaggtttttctagaaaaaacagttaatatctttttgtttgtacaagttc

SEQ ID NO: 9699 - DNA, 599 bp, Homo sapiens
agattatatctatactaaattaaagcacatccacaaatgaccctgtaattttcagaaacgcacataggagtgggtgtctgtggtgggaaggagaagatggacgtacattaagagcctctgctggtttctaagaaggagtttatacaaagatgagacaggaaactctgcctcagagaccagctcattcccatctaagctgaatctcttgccatgaaacccaagtccctttcctttatgtttttttctcatcaaacatgttggagataacactgcctgttgatggtggtgacaacatccaaagacactcaaaggagggctccaattccataattcctataaaaatagcttccatgaaatgtcattagcttcatgatttgtgaaatgaagataattatactcccttcaaagctttgaggtaacgactgaatgagagaatgcctaggaaaacattttaaaatgctagagctttgtaaaatggtaaagctttatggcaatcatcttcggaaaaatgagttctactgtgtattatgctayagctaaataactaacaaaggtttttctagaaaaaacagttaatatctttttgtttgtacaagttc

SEQ ID NO: 9700 - DNA, 1140 bp, Homo sapiens
gaggaggaataattattgaagatatgaaagagaatggggacagggacagagcaagttctcagaggacaccagcacaggtggctaagatccgagctgcttcctgcagcgtcaccacaccggcgacccatgctgaggcttcctcaatgaaaatccccaccttttttctacatgaactgctgcaagccacagttgcccatctgatatttgcatgcctgtgagtttcagatgtaactacaagaatttacacttatcctaattacgtttcataaactgtctttatgatcatctgttctggtacaacgaccaagaaaacattcagtgggtggtttggcaagttctgttttgaatcagctgtgcaccaggtgtgtgccaggccagtaggaagatcccggacagcgtctttgctctccagatgtctgtagtgtaagtgggaaggmaaactcaaagacagatcatttaaacaaatataatgtccagaccaggaggggtggcgtacacctatagtcccagctactcaggaggctgaggtgggaggatcgctggaacctaggcagtcaaggctgcagtgagctatgattgcaccactgcactccagcctgggtgacagagtgtgtcatcctggcggcactgctcctacccctacagcaggcgaggcggactgatgtaggaggcagatggtcaattcagggtgtttgccaggggacaggagcagatctgagtttttgatgcatcactgacctctgtgcagggacagctctgaggatggccagggtggagactgggatcagtgaagagggtactgccagttctgggtgtactagatgagtcctgaccatgagcagtgaaaataggaaagagatgagagaacagagccgccagggagtatttaggaggtaaaacccagcaggagacgggaatggaagggagtgggaggggagtggagtagtgagtgataatttgacttctagttttctgactcagctaatcagtagagcaacggtcctgctaaggcaagattacaggggatcagaacacagggaggtgtcagcctctagcaggggaacagctaccttccattattttatgtatgtgtgtatatatatatatacacatatatgtgtatatatatatacacatata

SEQ ID NO: 9701 - DNA, 620 bp, Homo sapiens
cctggtataaaaaagatataaaaacagatctttagagggatctacatacagtcttatcagaacattattatctacagcagaactgctatgagatgggcacatcctgatccctgaagaataatctcctaaagaacgtgttacaaaacaatgacttctgctgagaaattcaatagcatgccctctgggattcacattttttaaatgtgctctagcaagttggaaaaaagccttacaaatcattgaataccttcaaccataacaaaataaaaacaggacatgatttagtgtatcaaatgtatgaactgttattagaaatgagataaaaattataatagaaattactgyattttcctttcttaacaacaacatgcatgtagcctaagtaatacacaaatgtcataaatttgaaatctgcagttatagacaagcattaaaaattgatgaacccaaagctattgaaataaaaaaaaatttaaagaaaaatatatggagatgaaaggccccaacttcttgttgaattttcagcttgatactttggaaaaaaattaaaatagtttgattaaaccttaatagattcttacaaggttatatcactaagtattttttgttttgcttttttt

SEQ ID NO: 9702 - DNA, 623 bp, Homo sapiens
tctgtttccacctccatatttctaccccacaaagtcagcccttcttttctttctttagtgggaatacacattttgaaactgaaaagagatggtatgtggggatgtacggagaacttgttggagtctctgttgtggacaacgctttatgtggtttcaagcttcacatacaaaaaaaaagaaggaaagtggcagcacccaaaaaaggtatgaaaacatccagaagaaattttaaaataatttctatgataaattctttttgaaaactatcttcaagactattaagataatataaagaggtacaaataaaaatgagatattaaatgcaaccctaaaaagtatttaattcacccaaaaagtggcagaagaggaggaagagagaaataaaaagcagatgggacaaatagaaaccaaacttgtcaacaattgtgttaaatgtaaaagttctaattataacaattaaaagacagagactgtcagactggataaaaattcaagacccaattatgttttttatagtaagcacaatatctttttttttggaattttttttattatactttaagttttagggtacgtgtgcacarcgtgcaggttagttacatatgtatacatgtgccatgttg

SEQ ID NO: 9703 - DNA, 623 bp, Homo sapiens
tctgtttccacctccatatttctaccccacaaagtcagcccttcttttctttctttagtgggaatacacattttgaaactgaaaagagatggtatgtggggatgtacggagaacttgttggagtctctgttgtggacaacgctttatgtggtttcaagcttcacatacaaaaaaaaagaaggaaagtggcagcacccaaaaaaggtatgaaaacatccagaagaaattttaaaataatttctatgataaattctttttgaaaactatcttcaagactattaagataatataaagaggtacaaataaaaatgagatattaaatgcaaccctaaaaagtatttaattcacccaaaaagtggcagaagaggaggaagagagaaataaaaagcagatgggacaaatagaaaccaaacttgtcaacaattgtgttaaatgtaaaagttctaattataacaattaaaagacagagactgtcagactggataaaaattcaagacccaattatgttttttatagtaagcacaatatctttttttttggaattttttttattatactttaagttttagggtacgtgtgcacaacrtgcaggttagttacatatgtatacatgtgccatgttg
